United States Patent Application Publication US 2024/0327476 A1 - sequence listing, part 42

SEQ ID NO: 76615 - DNA, 1773 bp, synthetic construct
  misc_feature 1..1773: note = Description of Artificial Sequence: Synthetic coding sequence
  source 1..1773: mol_type = other DNA
atgaccctgcacaacaacagcaccaccagccccctgttccccaacatcagcagcagctggatccacagccccagcgacgccggcctgccccccggcaccgtgacccacttcggcagctacaacgtgagcagagccgccggcaacttcagcagccccgacggcaccaccgacgaccccctgggcggccacaccgtgtggcaggtggtgttcatcgccttcctgaccggcatcctggccctggtgaccatcatcggcaacatcctggtgatcgtgagcttcaaggtgaacaagcagctgaagaccgtgaacaactacttcctgctgagcctggcctgcgccgacctgatcatcggcgtgatcagcatgaacctgttcaccacctacatcatcatgaacagatgggccctgggcaacctggcctgcgacctgtggctggccatcgactacgtggccagcaacgccagcgtgatgaacctgctggtgatcagcttcgacagatacttcagcatcaccagacccctgacctacagagccaagagaaccaccaagagagccggcgtgatgatcggcctggcctgggtgatcagcttcgtgctgtgggcccccgccatcctgttctggcagtacttcgtgggcaagagaaccgtgccccccggcgagtgcttcatccagttcctgagcgagcccaccatcaccttcggcaccgccatcgccgccttctacatgcccgtgaccatcatgaccatcctgtactggagaatctacaaggagaccgagaagagaaccaaggagctggccggcctgcaggccagcggcaccgaggccgagaccgagaacttcgtgcaccccaccggcagcagcagaagctgcagcagctacgagctgcagcagcagagcatgaagagaagcaacagaagaaagtacggcagatgccacttctggttcaccaccaagagctggaagcccagcagcgagcagatggaccaggaccacagcagcagcgacagctggaacaacaacgacgccgccgccagcctggagaacagcgccagcagcgacgaggaggacatcggcagcgagaccagagccatctacagcatcgtgctgaagctgcccggccacagcaccatcctgaacagcaccaagctgcccagcagcgacaacctgcaggtgcccgaggaggagctgggcatggtggacctggagagaaaggccgacaagctgcaggcccagaagagcgtggacgacggcggcagcttccccaagagcttcagcaagctgcccatccagctggagagcgccgtggacaccgccaagaccagcgacgtgaacagcagcgtgggcaagagcaccgccaccctgcccctgagcttcaaggaggccaccctggccaagagattcgccctgaagaccagaagccagatcaccaagagaaagagaatgagcctggtgaaggagaagaaggccgcccagaccctgagcgccatcctgctggccttcatcatcacctggaccccctacaacatcatggtgctggtgaacaccttctgcgacagctgcatccccaagaccttctggaacctgggctactggctgtgctacatcaacagcaccgtgaaccccgtgtgctacgccctgtgcaacaagaccttcagaaccaccttcaagatgctgctgctgtgccagtgcgacaagaagaagagaagaaagcagcagtaccagcagagacagagcgtgatcttccacaagagagcccccgagcaggccctgtag

SEQ ID NO: 76616 - DNA, 333 bp, synthetic construct
  misc_feature 1..333: note = Description of Artificial Sequence: Synthetic coding sequence
  source 1..333: mol_type = other DNA
atgaccctgcacaacaacagcaccaccagccccctgttccccaacatcagcagcagctggatccacagccccagcgacgccggcctgccccccggcaccgtgacccacttcggcagctacaacgtgagcagagccgccggcaacttcagcagccccgacggcaccaccgacgaccccctgggcggccacaccgtgtggcaggtggtgttcatcgccttcctgaccggcatcctggccctggtgaccatcatcggcaacatcctggtgatcgtgagcttcaaggtgaacaagcagctgaagaccgtgaacaactacttcctgctgagcctgtag

SEQ ID NO: 76617 - DNA, 1440 bp, synthetic construct
  misc_feature 1..1440: note = Description of Artificial Sequence: Synthetic coding sequence
  source 1..1440: mol_type = other DNA
atggccaacttcacccccgtgaacggcagcagcggcaaccagagcgtgagactggtgaccagcagcagccacaacagatacgagaccgtggagatggtgttcatcgccaccgtgaccggcagcctgagcctggtgaccgtggtgggcaacatcctggtgatgctgagcatcaaggtgaacagacagctgcagaccgtgaacaactacttcctgttcagcctggcctgcgccgacctgatcatcggcgccttcagcatgaacctgtacaccgtgtacatcatcaagggctactggcccctgggcgccgtggtgtgcgacctgtggctggccctggactacgtggtgagcaacgccagcgtgatgaacctgctgatcatcagcttcgacagatacttctgcgtgaccaagcccctgacctaccccgccagaagaaccaccaagatggccggcctgatgatcgccgccgcctgggtgctgagcttcgtgctgtgggcccccgccatcctgttctggcagttcgtggtgggcaagagaaccgtgcccgacaaccagtgcttcatccagttcctgagcaaccccgccgtgaccttcggcaccgccatcgccgccttctacctgcccgtggtgatcatgaccgtgctgtacatccacatcagcctggccagcagaagcagagtgcacaagcacagacccgagggccccaaggagaagaaggccaagaccctggccttcctgaagagccccctgatgaagcagagcgtgaagaagcccccccccggcgaggccgccagagaggagctgagaaacggcaagctggaggaggcccccccccccgccctgccccccccccccagacccgtggccgacaaggacaccagcaacgagagcagcagcggcagcgccacccagaacaccaaggagagacccgccaccgagctgagcaccaccgaggccaccacccccgccatgcccgccccccccctgcagcccagagccctgaaccccgccagcagatggagcaagatccagatcgtgaccaagcagaccggcaacgagtgcgtgaccgccatcgagatcgtgcccgccacccccgccggcatgagacccgccgccaacgtggccagaaagttcgccagcatcgccagaaaccaggtgagaaagaagagacagatggccgccagagagagaaaggtgaccagaaccatcttcgccatcctgctggccttcatcctgacctggaccccctacaacgtgatggtgctggtgaacaccttctgccagagctgcatccccgacaccgtgtggagcatcggctactggctgtgctacgtgaacagcaccatcaaccccgcctgctacgccctgtgcaacgccaccttcaagaagaccttcagacacctgctgctgtgccagtacagaaacatcggcaccgccagatag

SEQ ID NO: 76618 - DNA, 1599 bp, synthetic construct
  misc_feature 1..1599: note = Description of Artificial Sequence: Synthetic coding sequence
  source 1..1599: mol_type = other DNA
atggagggcgacagctaccacaacgccaccaccgtgaacggcacccccgtgaaccaccagcccctggagagacacagactgtgggaggtgatcaccatcgccgccgtgaccgccgtggtgagcctgatcaccatcgtgggcaacgtgctggtgatgatcagcttcaaggtgaacagccagctgaagaccgtgaacaactactacctgctgagcctggcctgcgccgacctgatcatcggcatcttcagcatgaacctgtacaccacctacatcctgatgggcagatgggccctgggcagcctggcctgcgacctgtggctggccctggactacgtggccagcaacgccagcgtgatgaacctgctggtgatcagcttcgacagatacttcagcatcaccagacccctgacctacagagccaagagaacccccaagagagccggcatcatgatcggcctggcctggctgatcagcttcatcctgtgggcccccgccatcctgtgctggcagtacctggtgggcaagagaaccgtgcccctggacgagtgccagatccagttcctgagcgagcccaccatcaccttcggcaccgccatcgccgccttctacatccccgtgagcgtgatgaccatcctgtactgcagaatctacagagagaccgagaagagaaccaaggacctggccgacctgcagggcagcgacagcgtgaccaaggccgagaagagaaagcccgcccacagagccctgttcagaagctgcctgagatgccccagacccaccctggcccagagagagagaaaccaggccagctggagcagcagcagaagaagcaccagcaccaccggcaagcccagccaggccaccggccccagcgccaactgggccaaggccgagcagctgaccacctgcagcagctaccccagcagcgaggacgaggacaagcccgccaccgaccccgtgctgcaggtggtgtacaagagccagggcaaggagagccccggcgaggagttcagcgccgaggagaccgaggagaccttcgtgaaggccgagaccgagaagagcgactacgacacccccaactacctgctgagccccgccgccgcccacagacccaagagccagaagtgcgtggcctacaagttcagactggtggtgaaggccgacggcaaccaggagaccaacaacggctgccacaaggtgaagatcatgccctgccccttccccgtggccaaggagcccagcaccaagggcctgaaccccaaccccagccaccagatgaccaagagaaagagagtggtgctggtgaaggagagaaaggccgcccagaccctgagcgccatcctgctggccttcatcatcacctggaccccctacaacatcatggtgctggtgagcaccttctgcgacaagtgcgtgcccgtgaccctgtggcacctgggctactggctgtgctacgtgaacagcaccgtgaaccccatctgctacgccctgtgcaacagaaccttcagaaagaccttcaagatgctgctgctgtgcagatggaagaagaagaaggtggaggagaagctgtactggcagggcaacagcaagctgccctag

SEQ ID NO: 76619 - DNA, 1599 bp, synthetic construct; identical to SEQ ID NO: 76618
  misc_feature 1..1599: note = Description of Artificial Sequence: Synthetic coding sequence
  source 1..1599: mol_type = other DNA

SEQ ID NO: 76620 - DNA, 69 bp, synthetic construct
  misc_feature 1..69: note = Description of Artificial Sequence: Synthetic coding sequence
  source 1..69: mol_type = other DNA
atggagggcgacagctaccacaacgccaccaccgtgaacggcacccccgtgaaccaccagcccctgtag

SEQ ID NO: 76621 - DNA, 1449 bp, synthetic construct
  misc_feature 1..1449: note = Description of Artificial Sequence: Synthetic coding sequence
  source 1..1449: mol_type = other DNA
atggagccctggcccctgctgctgctgttcagcctgtgcagcgccggcctggtgctgggcagcgagcacgagaccagactggtggccaagctgttcaaggactacagcagcgtggtgagacccgtggaggaccacagacaggtggtggaggtgaccgtgggcctgcagctgatccagctgatcaacgtggacgaggtgaaccagatcgtgaccaccaacgtgagactgaagcagggcgacatggtggacctgcccagacccagctgcgtgaccctgggcgtgcccctgttcagccacctgcagaacgagcagtgggtggactacaacctgaagtggaaccccgacgactacggcggcgtgaagaagatccacatccccagcgagaagatctggagacccgacctggtgctgtacaacaacgccgacggcgacttcgccatcgtgaagttcaccaaggtgctgctgcagtacaccggccacatcacctggaccccccccgccatcttcaagagctactgcgagatcatcgtgacccacttccccttcgacgagcagaactgcagcatgaagctgggcacctggacctacgacggcagcgtggtggccatcaaccccgagagcgaccagcccgacctgagcaacttcatggagagcggcgagtgggtgatcaaggagagcagaggctggaagcacagcgtgacctacagctgctgccccgacaccccctacctggacatcacctaccacttcgtgatgcagagactgcccctgtacttcatcgtgaacgtgatcatcccctgcctgctgttcagcttcctgaccggcctggtgttctacctgcccaccgacagcggcgagaagatgaccctgagcatcagcgtgctgctgagcctgaccgtgttcctgctggtgatcgtggagctgatccccagcaccagcagcgccgtgcccctgatcggcaagtacatgctgttcaccatggtgttcgtgatcgccagcatcatcatcaccgtgatcgtgatcaacacccaccacagaagccccagcacccacgtgatgcccaactgggtgagaaaggtgttcatcgacaccatccccaacatcatgttcttcagcaccatgaagagacccagcagagagaagcaggacaagaagatcttcaccgaggacatcgacatcagcgacatcagcggcaagcccggccccccccccatgggcttccacagccccctgatcaagcaccccgaggtgaagagcgccatcgagggcatcaagtacatcgccgagaccatgaagagcgaccaggagagcaacaacgccgccgccgagtggaagtacgtggccatggtgatggaccacatcctgctgggcgtgttcatgctggtgtgcatcatcggcaccctggccgtgttcgccggcagactgatcgagctgaaccagcagggctag

SEQ ID NO: 76622 - DNA, 1374 bp, synthetic construct
  misc_feature 1..1374: note = Description of Artificial Sequence: Synthetic coding sequence
  source 1..1374: mol_type = other DNA
atggagccctggcccctgctgctgctgttcagcctgtgcagcgccggcctggtgctgggcagcgagcacgagaccagactggtggccaagctgttcaaggactacagcagcgtggtgagacccgtggaggaccacagacaggtggtggaggtgaccgtgggcctgcagctgatccagctgatcaacgtggacgaggtgaaccagatcgtgaccaccaacgtgagactgaagcagcagtgggtggactacaacctgaagtggaaccccgacgactacggcggcgtgaagaagatccacatccccagcgagaagatctggagacccgacctggtgctgtacaacaacgccgacggcgacttcgccatcgtgaagttcaccaaggtgctgctgcagtacaccggccacatcacctggaccccccccgccatcttcaagagctactgcgagatcatcgtgacccacttccccttcgacgagcagaactgcagcatgaagctgggcacctggacctacgacggcagcgtggtggccatcaaccccgagagcgaccagcccgacctgagcaacttcatggagagcggcgagtgggtgatcaaggagagcagaggctggaagcacagcgtgacctacagctgctgccccgacaccccctacctggacatcacctaccacttcgtgatgcagagactgcccctgtacttcatcgtgaacgtgatcatcccctgcctgctgttcagcttcctgaccggcctggtgttctacctgcccaccgacagcggcgagaagatgaccctgagcatcagcgtgctgctgagcctgaccgtgttcctgctggtgatcgtggagctgatccccagcaccagcagcgccgtgcccctgatcggcaagtacatgctgttcaccatggtgttcgtgatcgccagcatcatcatcaccgtgatcgtgatcaacacccaccacagaagccccagcacccacgtgatgcccaactgggtgagaaaggtgttcatcgacaccatccccaacatcatgttcttcagcaccatgaagagacccagcagagagaagcaggacaagaagatcttcaccgaggacatcgacatcagcgacatcagcggcaagcccggccccccccccatgggcttccacagccccctgatcaagcaccccgaggtgaagagcgccatcgagggcatcaagtacatcgccgagaccatgaagagcgaccaggagagcaacaacgccgccgccgagtggaagtacgtggccatggtgatggaccacatcctgctgggcgtgttcatgctggtgtgcatcatcggcaccctggccgtgttcgccggcagactgatcgagctgaaccagcagggctag

SEQ ID NO: 76623 - DNA, 1353 bp, synthetic construct
  misc_feature 1..1353: note = Description of Artificial Sequence: Synthetic coding sequence
  source 1..1353: mol_type = other DNA
atgggcctgagaagccaccacctgagcctgggcctgctgctgctgttcctgctgcccgccgagtgcctgggcgccgagggcagactggccctgaagctgttcagagacctgttcgccaactacaccagcgccctgagacccgtggccgacaccgaccagaccctgaacgtgaccctggaggtgaccctgagccagatcatcgacatggacgagagaaaccaggtgctgaccctgtacctgtggatcagacaggagtggaccgacgcctacctgagatgggaccccaacgcctacggcggcctggacgccatcagaatccccagcagcctggtgtggagacccgacatcgtgctgtacaacaaggccgacgcccagccccccggcagcgccagcaccaacgtggtgctgagacacgacggcgccgtgagatgggacgcccccgccatcaccagaagcagctgcagagtggacgtggccgccttccccttcgacgcccagcactgcggcctgaccttcggcagctggacccacggcggccaccagctggacgtgagacccagaggcgccgccgccagcctggccgacttcgtggagaacgtggagtggagagtgctgggcatgcccgccagaagaagagtgctgacctacggctgctgcagcgagccctaccccgacgtgaccttcaccctgctgctgagaagaagagccgccgcctacgtgtgcaacctgctgctgccctgcgtgctgatcagcctgctggcccccctggccttccacctgcccgccgacagcggcgagaaggtgagcctgggcgtgaccgtgctgctggccctgaccgtgttccagctgctgctggccgagagcatgccccccgccgagagcgtgcccctgatcggcaagtactacatggccaccatgaccatggtgaccttcagcaccgccctgaccatcctgatcatgaacctgcactactgcggccccagcgtgagacccgtgcccgcctgggccagagccctgctgctgggccacctggccagaggcctgtgcgtgagagagagaggcgagccctgcggccagagcagaccccccgagctgagccccagcccccagagccccgagggcggcgccggcccccccgccggcccctgccacgagcccagatgcctgtgcagacaggaggccctgctgcaccacgtggccaccatcgccaacaccttcagaagccacagagccgcccagagatgccacgaggactggaagagactggccagagtgatggacagattcttcctggccatcttcttcagcatggccctggtgatgagcctgctggtgctggtgcaggccctgtag

SEQ ID NO: 76624 - DNA, 1590 bp, synthetic construct
  misc_feature 1..1590: note = Description of Artificial Sequence: Synthetic coding sequence
  source 1..1590: mol_type = other DNA
atgggccccagctgccccgtgttcctgagcttcaccaagctgagcctgtggtggctgctgctgacccccgccggcggcgaggaggccaagagacccccccccagagcccccggcgaccccctgagcagccccagccccaccgccctgccccagggcggcagccacaccgagaccgaggacagactgttcaagcacctgttcagaggctacaacagatgggccagacccgtgcccaacaccagcgacgtggtgatcgtgagattcggcctgagcatcgcccagctgatcgacgtggacgagaagaaccagatgatgaccaccaacgtgtggctgaagcaggagtggagcgactacaagctgagatggaaccccaccgacttcggcaacatcaccagcctgagagtgcccagcgagatgatctggatccccgacatcgtgctgtacaacaacgccgacggcgagttcgccgtgacccacatgaccaaggcccacctgttcagcaccggcaccgtgcactgggtgccccccgccatctacaagagcagctgcagcatcgacgtgaccttcttccccttcgaccagcagaactgcaagatgaagttcggcagctggacctacgacaaggccaagatcgacctggagcagatggagcagaccgtggacctgaaggactactgggagagcggcgagtgggccatcgtgaacgccaccggcacctacaacagcaagaagtacgactgctgcgccgagatctaccccgacgtgacctacgccttcgtgatcagaagactgcccctgttctacaccatcaacctgatcatcccctgcctgctgatcagctgcctgaccgtgctggtgttctacctgcccagcgactgcggcgagaagatcaccctgtgcatcagcgtgctgctgagcctgaccgtgttcctgctgctgatcaccgagatcatccccagcaccagcctggtgatccccctgatcggcgagtacctgctgttcaccatgatcttcgtgaccctgagcatcgtgatcaccgtgttcgtgctgaacgtgcaccacagaagccccagcacccacaccatgccccactgggtgagaggcgccctgctgggctgcgtgcccagatggctgctgatgaacagaccccccccccccgtggagctgtgccaccccctgagactgaagctgagccccagctaccactggctggagagcaacgtggacgccgaggagagagaggtggtggtggaggaggaggacagatgggcctgcgccggccacgtggcccccagcgtgggcaccctgtgcagccacggccacctgcacagcggcgccagcggccccaaggccgaggccctgctgcaggagggcgagctgctgctgagcccccacatgcagaaggccctggagggcgtgcactacatcgccgaccacctgagaagcgaggacgccgacagcagcgtgaaggaggactggaagtacgtggccatggtgatcgacagaatcttcctgtggctgttcatcatcgtgtgcttcctgggcaccatcggcctgttcctgccccccttcctggccggcatgatctag

SEQ ID NO: 76625 - DNA, 1590 bp, synthetic construct; identical to SEQ ID NO: 76624
  misc_feature 1..1590: note = Description of Artificial Sequence: Synthetic coding sequence
  source 1..1590: mol_type = other DNA

SEQ ID NO: 76626 - DNA, 1518 bp, synthetic construct
  misc_feature 1..1518: note = Description of Artificial Sequence: Synthetic coding sequence
  source 1..1518: mol_type = other DNA
atgggcagcggccccctgagcctgcccctggccctgagcccccccagactgctgctgctgctgctgctgagcctgctgcccgtggccagagccagcgaggccgagcacagactgttcgagagactgttcgaggactacaacgagatcatcagacccgtggccaacgtgagcgaccccgtgatcatccacttcgaggtgagcatgagccagctggtgaaggtggacgaggtgaaccagatcatggagaccaacctgtggctgaagcagatctggaacgactacaagctgaagtggaaccccagcgactacggcggcgccgagttcatgagagtgcccgcccagaagatctggaagcccgacatcgtgctgtacaacaacgccgtgggcgacttccaggtggacgacaagaccaaggccctgctgaagtacaccggcgaggtgacctggatcccccccgccatcttcaagagcagctgcaagatcgacgtgacctacttccccttcgactaccagaactgcaccatgaagttcggcagctggagctacgacaaggccaagatcgacctggtgctgatcggcagcagcatgaacctgaaggactactgggagagcggcgagtgggccatcatcaaggcccccggctacaagcacgacatcaagtacaactgctgcgaggagatctaccccgacatcacctacagcctgtacatcagaagactgcccctgttctacaccatcaacctgatcatcccctgcctgctgatcagcttcctgaccgtgctggtgttctacctgcccagcgactgcggcgagaaggtgaccctgtgcatcagcgtgctgctgagcctgaccgtgttcctgctggtgatcaccgagaccatccccagcaccagcctggtgatccccctgatcggcgagtacctgctgttcaccatgatcttcgtgaccctgagcatcgtgatcaccgtgttcgtgctgaacgtgcactacagaacccccaccacccacaccatgcccagctgggtgaagaccgtgttcctgaacctgctgcccagagtgatgttcatgaccagacccaccagcaacgagggcaacgcccagaagcccagacccctgtacggcgccgagctgagcaacctgaactgcttcagcagagccgagagcaagggctgcaaggagggctacccctgccaggacggcatgtgcggctactgccaccacagaagaatcaagatcagcaacttcagcgccaacctgaccagaagcagcagcagcgagagcgtggacgccgtgctgagcctgagcgccctgagccccgagatcaaggaggccatccagagcgtgaagtacatcgccgagaacatgaaggcccagaacgaggccaaggagatccaggacgactggaagtacgtggccatggtgatcgacagaatcttcctgtgggtgttcaccctggtgtgcatcctgggcaccgccggcctgttcctgcagcccctgatggccagagaggacgcctag

SEQ ID NO: 76627 - DNA, 939 bp, synthetic construct
  misc_feature 1..939: note = Description of Artificial Sequence: Synthetic coding sequence
  source 1..939: mol_type = other DNA
accaaggccctgctgaagtacaccggcgaggtgacctggatcccccccgccatcttcaagagcagctgcaagatcgacgtgacctacttccccttcgactaccagaactgcaccatgaagttcggcagctggagctacgacaaggccaagatcgacctggtgctgatcggcagcagcatgaacctgaaggactactgggagagcggcgagtgggccatcatcaaggcccccggctacaagcacgacatcaagtacaactgctgcgaggagatctaccccgacatcacctacagcctgtacatcagaagactgcccctgttctacaccatcaacctgatcatcccctgcctgctgatcagcttcctgaccgtgctggtgttctacctgcccagcgactgcggcgagaaggtgaccctgtgcatcagcgtgctgctgagcctgaccgtgttcctgctggtgatcaccgagaccatccccagcaccagcctggtgatccccctgatcggcgagtacctgctgttcaccatgatcttcgtgaccctgagcatcgtgatcaccgtgttcgtgctgaacgtgcactacagaacccccaccacccacaccatgcccagctgggtgaagaccgtgttcctgaacctgctgcccagagtgatgttcatgaccagacccaccagcaacgagggcaacgcccagaagcccagacccctgtacggcgccagccccaaggccgccagaagagagatcaaggaggccatccagagcgtgaagtacatcgccgagaacatgaaggcccagaacgaggccaaggagatccaggacgactggaagtacgtggccatggtgatcgacagaatcttcctgtgggtgttcaccctggtgtgcatcctgggcaccgccggcctgttcctgcagcccctgatggccagagaggacgcctag

SEQ ID NO: 76628 - DNA, 1470 bp, synthetic construct
  misc_feature 1..1470: note = Description of Artificial Sequence: Synthetic coding sequence
  source 1..1470: mol_type = other DNA
atgggcagcggccccctgagcctgcccctggccctgagcccccccagactgctgctgctgctgctgctgagcctgctgcccgtggccagagccagcgaggccgagcacagactgttcgagagactgttcgaggactacaacgagatcatcagacccgtggccaacgtgagcgaccccgtgatcatccacttcgaggtgagcatgagccagctggtgaaggtggacgaggtgaaccagatcatggagaccaacctgtggctgaagcagatctggaacgactacaagctgaagtggaaccccagcgactacggcggcgccgagttcatgagagtgcccgcccagaagatctggaagcccgacatcgtgctgtacaacaacgccgtgggcgacttccaggtggacgacaagaccaaggccctgctgaagtacaccggcgaggtgacctggatcccccccgccatcttcaagagcagctgcaagatcgacgtgacctacttccccttcgactaccagaactgcaccatgaagttcggcagctggagctacgacaaggccaagatcgacctggtgctgatcggcagcagcatgaacctgaaggactactgggagagcggcgagtgggccatcatcaaggcccccggctacaagcacgacatcaagtacaactgctgcgaggagatctaccccgacatcacctacagcctgtacatcagaagactgcccctgttctacaccatcaacctgatcatcccctgcctgctgatcagcttcctgaccgtgctggtgttctacctgcccagcgactgcggcgagaaggtgaccctgtgcatcagcgtgctgctgagcctgaccgtgttcctgctggtgatcaccgagaccatccccagcaccagcctggtgatccccctgatcggcgagtacctgctgttcaccatgatcttcgtgaccctgagcatcgtgatcaccgtgttcgtgctgaacgtgcactacagaacccccaccacccacaccatgcccagctgggtgaagaccgtgttcctgaacctgctgcccagagtgatgttcatgaccagacccaccagcaacgagggcaacgcccagaagcccagacccctgtacggcgccgagctgagcaacctgaactgcttcagcagagccgagagcaagggctgcaaggagggctacccctgccaggacggcatgtgcggctactgccaccacagaagaatcaagatcagcaacttcagcgccaacctgaccagaagcagcagcagcgagagcgtggacgccgtgctgagcctgagcgccctgagccccgagatcaaggaggccatccagagcgtgaagtacatcgccgagaacatgaaggcccagaacgaggccaaggaggagcagaaggcccaggagatccagcagctgaagagaaaggagaagagcaccgagaccagcgaccaggagcccggcctgtag

SEQ ID NO: 76629 - DNA, 1518 bp, synthetic construct; identical to SEQ ID NO: 76626
  misc_feature 1..1518: note = Description of Artificial Sequence: Synthetic coding sequence
  source 1..1518: mol_type = other DNA

SEQ ID NO: 76630 - DNA, 1602 bp, synthetic construct
  misc_feature 1..1602: note = Description of Artificial Sequence: Synthetic coding sequence
  source 1..1602: mol_type = other DNA
gcccccgagcccggcgaggcccccagactggacagagcccaccccggctgcgcctgcgccgagctgagcctgctgtggctgtgctgctgcaccttcaccagcgccgacggcgacttcgccgtgacccacctgaccaaggcccacctgttccacgacggcagagtgcagtggaccccccccgccatctacaagagcagctgcagcatcgacgtgaccttcttccccttcgaccagcagaactgcaccatgaagttcggcagctggacctacgacaaggccaagatcgacctggtgaacatgcacagcagagtggaccagctggacttctgggagagcggcgagtgggtgatcgtggacgccgtgggcacctacaacaccagaaagtacgagtgctgcgccgagatctaccccgacatcacctacgccttcgtgatcagaagactgcccctgttctacaccatcaacctgatcatcccctgcctgctgatcagctgcctgaccgtgctggtgttctacctgcccagcgagtgcggcgagaagatcaccctgtgcatcagcgtgctgctgagcctgaccgtgttcctgctgctgatcaccgagatcatccccagcaccagcctggtgatccccctgatcggcgagtacctgctgttcaccatgatcttcgtgaccctgagcatcgtgatcaccgtgttcgtgctgaacgtgcaccacagaagccccagaacccacaccatgcccacctgggtgagaagagtgttcctggacatcgtgcccagactgctgctgatgaagagacccagcgtggtgaaggacaactgcagaagactgatcgagagcatgcacaagatggccagcgcccccagattctggcccgagcccgagggcgagccccccgccaccagcggcacccagagcctgcacccccccagccccagcttctgcgtgcccctggacgtgcccgccgagcccggccccagctgcaagagccccagcgaccagctgcccccccagcagcccctggaggccgagaaggccagcccccaccccagccccggcccctgcagacccccccacggcacccaggcccccggcctggccaaggccagaagcctgagcgtgcagcacatgagcagccccggcgaggccgtggagggcggcgtgagatgcagaagcagaagcatccagtactgcgtgcccagagacgacgccgcccccgaggccgacggccaggccgccggcgccctggccagcagaaacacccacagcgccgagctgcccccccccgaccagcccagcccctgcaagtgcacctgcaagaaggagcccagcagcgtgagccccagcgccaccgtgaagaccagaagcaccaaggccccccccccccacctgcccctgagccccgccctgaccagagccgtggagggcgtgcagtacatcgccgaccacctgaaggccgaggacaccgacttcagcgtgaaggaggactggaagtacgtggccatggtgatcgacagaatcttcctgtggatgttcatcatcgtgtgcctgctgggcaccgtgggcctgttcctgcccccctggctggccggcatgatctag

SEQ ID NO: 76631 - DNA, 1884 bp, synthetic construct
  misc_feature 1..1884: note = Description of Artificial Sequence: Synthetic coding sequence
  source 1..1884: mol_type = other DNA
atggagctgggcggccccggcgcccccagactgctgccccccctgctgctgctgctgggcaccggcctgctgagagccagcagccacgtggagaccagagcccacgccgaggagagactgctgaagaagctgttcagcggctacaacaagtggagcagacccgtggccaacatcagcgacgtggtgctggtgagattcggcctgagcatcgcccagctgatcgacgtggacgagaagaaccagatgatgaccaccaacgtgtgggtgaagcaggagtggcacgactacaagctgagatgggaccccgccgactacgagaacgtgaccagcatcagaatccccagcgagctgatctggagacccgacatcgtgctgtacaacaacgccgacggcgacttcgccgtgacccacctgaccaaggcccacctgttccacgacggcagagtgcagtggaccccccccgccatctacaagagcagctgcagcatcgacgtgaccttcttccccttcgaccagcagaactgcaccatgaagttcggcagctggacctacgacaaggccaagatcgacctggtgaacatgcacagcagagtggaccagctggacttctgggagagcggcgagtgggtgatcgtggacgccgtgggcacctacaacaccagaaagtacgagtgctgcgccgagatctaccccgacatcacctacgccttcgtgatcagaagactgcccctgttctacaccatcaacctgatcatcccctgcctgctgatcagctgcctgaccgtgctggtgttctacctgcccagcgagtgcggcgagaagatcaccctgtgcatcagcgtgctgctgagcctgaccgtgttcctgctgctgatcaccgagatcatccccagcaccagcctggtgatccccctgatcggcgagtacctgctgttcaccatgatcttcgtgaccctgagcatcgtgatcaccgtgttcgtgctgaacgtgcaccacagaagccccagaacccacaccatgcccacctgggtgagaagagtgttcctggacatcgtgcccagactgctgctgatgaagagacccagcgtggtgaaggacaactgcagaagactgatcgagagcatgcacaagatggccagcgcccccagattctggcccgagcccgagggcgagccccccgccaccagcggcacccagagcctgcacccccccagccccagcttctgcgtgcccctggacgtgcccgccgagcccggccccagctgcaagagccccagcgaccagctgcccccccagcagcccctggaggccgagaaggccagcccccaccccagccccggcccctgcagacccccccacggcacccaggcccccggcctggccaaggccagaagcctgagcgtgcagcacatgagcagccccggcgaggccgtggagggcggcgtgagatgcagaagcagaagcatccagtactgcgtgcccagagacgacgccgcccccgaggccgacggccaggccgccggcgccctggccagcagaaacacccacagcgccgagctgcccccccccgaccagcccagcccctgcaagtgcacctgcaagaaggagcccagcagcgtgagccccagcgccaccgtgaagaccagaagcaccaaggccccccccccccacctgcccctgagccccgccctgaccagagccgtggagggcgtgcagtacatcgccgaccacctgaaggccgaggacaccgacttcagcgtgaaggaggactggaagtacgtggccatggtgatcgacagaatcttcctgtggatgttcatcatcgtgtgcctgctgggcaccgtgggcctgttcctgcccccctggctggccggcatgatctag

SEQ ID NO: 76632 - DNA, 1671 bp, synthetic construct
  misc_feature 1..1671: note = Description of Artificial Sequence: Synthetic coding sequence
  source 1..1671: mol_type = other DNA
atgagaatgagcccccccagcgccagcccccccagcagcagcggcggcagaaccagcagcagcaccaccaccgccggcgagcccttctgggccggcgtgctgttcgccatcagaccccaccccggcctgagcggcagaatcgtgtggaccgccggctgccccggcgagggcgccgacggcgacttcgccgtgacccacctgaccaaggcccacctgttccacgacggcagagtgcagtggaccccccccgccatctacaagagcagctgcagcatcgacgtgaccttcttccccttcgaccagcagaactgcaccatgaagttcggcagctggacctacgacaaggccaagatcgacctggtgaacatgcacagcagagtggaccagctggacttctgggagagcggcgagtgggtgatcgtggacgccgtgggcacctacaacaccagaaagtacgagtgctgcgccgagatctaccccgacatcacctacgccttcgtgatcagaagactgcccctgttctacaccatcaacctgatcatcccctgcctgctgatcagctgcctgaccgtgctggtgttctacctgcccagcgagtgcggcgagaagatcaccctgtgcatcagcgtgctgctgagcctgaccgtgttcctgctgctgatcaccgagatcatccccagcaccagcctggtgatccccctgatcggcgagtacctgctgttcaccatgatcttcgtgaccctgagcatcgtgatcaccgtgttcgtgctgaacgtgcaccacagaagccccagaacccacaccatgcccacctgggtgagaagagtgttcctggacatcgtgcccagactgctgctgatgaagagacccagcgtggtgaaggacaactgcagaagactgatcgagagcatgcacaagatggccagcgcccccagattctggcccgagcccgagggcgagccccccgccaccagcggcacccagagcctgcacccccccagccccagcttctgcgtgcccctggacgtgcccgccgagcccggccccagctgcaagagccccagcgaccagctgcccccccagcagcccctggaggccgagaaggccagcccccaccccagccccggcccctgcagacccccccacggcacccaggcccccggcctggccaaggccagaagcctgagcgtgcagcacatgagcagccccggcgaggccgtggagggcggcgtgagatgcagaagcagaagcatccagtactgcgtgcccagagacgacgccgcccccgaggccgacggccaggccgccggcgccctggccagcagaaacacccacagcgccgagctgcccccccccgaccagcccagcccctgcaagtgcacctgcaagaaggagcccagcagcgtgagccccagcgccaccgtgaagaccagaagcaccaaggccccccccccccacctgcccctgagccccgccctgaccagagccgtggagggcgtgcagtacatcgccgaccacctgaaggccgaggacaccgacttcagcgtgaaggaggactggaagtacgtggccatggtgatcgacagaatcttcctgtggatgttcatcatcgtgtgcctgctgggcaccgtgggcctgttcctgcccccctggctggccggcatgatctag

SEQ ID NO: 76633 - DNA, 1407 bp, synthetic construct
  misc_feature 1..1407: note = Description of Artificial Sequence: Synthetic coding sequence
  source 1..1407: mol_type = other DNA
atggccgccagaggcagcggccccagagccctgagactgctgctgctggtgcagctggtggccggcagatgcggcctggccggcgccgccggcggcgcccagagaggcctgagcgagcccagcagcatcgccaagcacgaggacagcctgctgaaggacctgttccaggactacgagagatgggtgagacccgtggagcacctgaacgacaagatcaagatcaagttcggcctggccatcagccagctggtggacgtggacgagaagaaccagctgatgaccaccaacgtgtggctgaagcaggagtggatcgacgtgaagctgagatggaaccccgacgactacggcggcatcaaggtgatcagagtgcccagcgacagcgtgtggacccccgacatcgtgctgttcgacaacgccgacggcagattcgagggcaccagcaccaagaccgtgatcagatacaacggcaccgtgacctggaccccccccgccaactacaagagcagctgcaccatcgacgtgaccttcttccccttcgacctgcagaactgcagcatgaagttcggcagctggacctacgacggcagccaggtggacatcatcctggaggaccaggacgtggacaagagagacttcttcgacaacggcgagtgggagatcgtgagcgccaccggcagcaagggcaacagaaccgacagctgctgctggtacccctacgtgacctacagcttcgtgatcaagagactgcccctgttctacaccctgttcctgatcatcccctgcatcggcctgagcttcctgaccgtgctggtgttctacctgcccagcaacgagggcgagaagatctgcctgtgcaccagcgtgctggtgagcctgaccgtgttcctgctggtgatcgaggagatcatccccagcagcagcaaggtgatccccctgatcggcgagtacctggtgttcaccatgatcttcgtgaccctgagcatcatggtgaccgtgttcgccatcaacatccaccacagaagcagcagcacccacaacgccatggcccccctggtgagaaagatcttcctgcacaccctgcccaagctgctgtgcatgagaagccacgtggacagatacttcacccagaaggaggagaccgagagcggcagcggccccaagagcagcagaaacaccctggaggccgccctggacagcatcagatacatcaccagacacatcatgaaggagaacgacgtgagagaggtggtggaggactggaagttcatcgcccaggtgctggacagaatgttcctgtggaccttcctgttcgtgagcatcgtgggcagcctgggcctgttcgtgcccgtgatctacaagtgggccaacatcctgatccccgtgcacatcggcaacgccaacaagtag

SEQ ID NO: 76634 - DNA, 1485 bp, synthetic construct
  misc_feature 1..1485: note = Description of Artificial Sequence: Synthetic coding sequence
  source 1..1485: mol_type = other DNA
atgctgaccagcaagggccagggcttcctgcacggcggcctgtgcctgtggctgtgcgtgttcacccccttcttcaagggctgcgtgggctgcgccaccgaggagagactgttccacaagctgttcagccactacaaccagttcatcagacccgtggagaacgtgagcgaccccgtgaccgtgcacttcgaggtggccatcacccagctggccaacgtggacgaggtgaaccagatcatggagaccaacctgtggctgagacacatctggaacgactacaagctgagatgggaccccatggagtacgacggcatcgagaccctgagagtgcccgccgacaagatctggaagcccgacatcgtgctgtacaacaacgccgtgggcgacttccaggtggagggcaagaccaaggccctgctgaagtacaacggcatgatcacctggaccccccccgccatcttcaagagcagctgccccatggacatcaccttcttccccttcgaccaccagaactgcagcctgaagttcggcagctggacctacgacaaggccgagatcgacctgctgatcatcggcagcaaggtggacatgaacgacttctgggagaacagcgagtgggagatcatcgacgccagcggctacaagcacgacatcaagtacaactgctgcgaggagatctacaccgacatcacctacagcttctacatcagaagactgcccatgttctacaccatcaacctgatcatcccctgcctgttcatcagcttcctgaccgtgctggtgttctacctgcccagcgactgcggcgagaaggtgaccctgtgcatcagcgtgctgctgagcctgaccgtgttcctgctggtgatcaccgagaccatccccagcaccagcctggtggtgcccctggtgggcgagtacctgctgttcaccatgatcttcgtgaccctgagcatcgtggtgaccgtgttcgtgctgaacatccactacagaacccccaccacccacaccatgcccagatgggtgaagaccgtgttcctgaagctgctgccccaggtgctgctgatgagatggcccctggacaagaccagaggcaccggcagcgacgccgtgcccagaggcctggccagaagacccgccaagggcaagctggccagccacggcgagcccagacacctgaaggagtgcttccactgccacaagagcaacgagctggccaccagcaagagaagactgagccaccagcccctgcagtgggtggtggagaacagcgagcacagccccgaggtggaggacgtgatcaacagcgtgcagttcatcgccgagaacatgaagagccacaacgagaccaaggaggtggaggacgactggaagtacgtggccatggtggtggacagagtgttcctgtgggtgttcatcatcgtgtgcgtgttcggcaccgccggcctgttcctgcagcccctgctgggcaacaccggcaagagctag

SEQ ID NO: 76635 - DNA, 1440 bp, synthetic construct
  misc_feature 1..1440: note = Description of Artificial Sequence: Synthetic coding sequence
  source 1..1440: mol_type = other DNA
atgctgaccagcaagggccagggcttcctgcacggcggcctgtgcctgtggctgtgcgtgttcacccccttcttcaagggctgcgtgggctgcgccaccgaggagagactgttccacaagctgttcagccactacaaccagttcatcagacccgtggagaacgtgagcgaccccgtgaccgtgcacttcgaggtggccatcacccagctggccaacgtgatctggaacgactacaagctgagatgggaccccatggagtacgacggcatcgagaccctgagagtgcccgccgacaagatctggaagcccgacatcgtgctgtacaacaacgccgtgggcgacttccaggtggagggcaagaccaaggccctgctgaagtacaacggcatgatcacctggaccccccccgccatcttcaagagcagctgccccatggacatcaccttcttccccttcgaccaccagaactgcagcctgaagttcggcagctggacctacgacaaggccgagatcgacctgctgatcatcggcagcaaggtggacatgaacgacttctgggagaacagcgagtgggagatcatcgacgccagcggctacaagcacgacatcaagtacaactgctgcgaggagatctacaccgacatcacctacagcttctacatcagaagactgcccatgttctacaccatcaacctgatcatcccctgcctgttcatcagcttcctgaccgtgctggtgttctacctgcccagcgactgcggcgagaaggtgaccctgtgcatcagcgtgctgctgagcctgaccgtgttcctgctggtgatcaccgagaccatccccagcaccagcctggtggtgcccctggtgggcgagtacctgctgttcaccatgatcttcgtgaccctgagcatcgtggtgaccgtgttcgtgctgaacatccactacagaacccccaccacccacaccatgcccagatgggtgaagaccgtgttcctgaagctgctgccccaggtgctgctgatgagatggcccctggacaagaccagaggcaccggcagcgacgccgtgcccagaggcctggccagaagacccgccaagggcaagctggccagccacggcgagcccagacacctgaaggagtgcttccactgccacaagagcaacgagctggccaccagcaagagaagactgagccaccagcccctgcagtgggtggtggagaacagcgagcacagccccgaggtggaggacgtgatcaacagcgtgcagttcatcgccgagaacatgaagagccacaacgagaccaaggaggtggaggacgactggaagtacgtggccatggtggtggacagagtgttcctgtgggtgttcatcatcgtgtgcgtgttcggcaccgccggcctgttcctgcagcccctgctgggcaacaccggcaagagctag

SEQ ID NO: 76636 - DNA, 1509 bp, synthetic construct
  misc_feature 1..1509: note = Description of Artificial Sequence: Synthetic coding sequence
  source 1..1509: mol_type = other DNA
atgagatgcagccccggcggcgtgtggctggccctggccgccagcctgctgcacgtgagcctgcagggcgagttccagagaaagctgtacaaggagctggtgaagaactacaaccccctggagagacccgtggccaacgacagccagcccctgaccgtgtacttcagcctgagcctgctgcagatcatggacgtggacgagaagaaccaggtgctgaccaccaacatctggctgcagatgagctggaccgaccactacctgcagtggaacgtgagcgagtaccccggcgtgaagaccgtgagattccccgacggccagatctggaagcccgacatcctgctgtacaacagcgccgacgagagattcgacgccaccttccacaccaacgtgctggtgaacagcagcggccactgccagtacctgccccccggcatcttcaagagcagctgctacatcgacgtgagatggttccccttcgacgtgcagcactgcaagctgaagttcggcagctggagctacggcggctggagcctggacctgcagatgcaggaggccgacatcagcggctacatccccaacggcgagtgggacctggtgggcatccccggcaagagaagcgagagattctacgagtgctgcaaggagccctaccccgacgtgaccttcaccgtgaccatgagaagaagaaccctgtactacggcctgaacctgctgatcccctgcgtgctgatcagcgccctggccctgctggtgttcctgctgcccgccgacagcggcgagaagatcagcctgggcatcaccgtgctgctgagcctgaccgtgttcatgctgctggtggccgagatcatgcccgccaccagcgacagcgtgcccctgatcgcccagtacttcgccagcaccatgatcatcgtgggcctgagcgtggtggtgaccgtgatcgtgctgcagtaccaccaccacgaccccgacggcggcaagatgcccaagtggaccagagtgatcctgctgaactggtgcgcctggttcctgagaatgaagagacccggcgaggacaaggtgagacccgcctgccagcacaagcagagaagatgcagcctggccagcgtggagatgagcgccgtggcccccccccccgccagcaacggcaacctgctgtacatcggcttcagaggcctggacggcgtgcactgcgtgcccacccccgacagcggcgtggtgtgcggcagaatggcctgcagccccacccacgacgagcacctgctgcacggcggccagccccccgagggcgaccccgacctggccaagatcctggaggaggtgagatacatcgccaacagattcagatgccaggacgagagcgaggccgtgtgcagcgagtggaagttcgccgcctgcgtggtggacagactgtgcctgatggccttcagcgtgttcaccatcatctgcaccatcggcatcctgatgagcgcccccaacttcgtggaggccgtgagcaaggacttcgcctag

SEQ ID NO: 76637 - DNA, 210 bp, synthetic construct
  misc_feature 1..210: note = Description of Artificial Sequence: Synthetic coding sequence
  source 1..210: mol_type = other DNA
atgcagaagtactgcatctaccagcacttccagttccagctgctgatccagcacctgtggatcgccgccaactgcgacatctgggccaaggtggccagagtgatcggcctgctggccagccacaagaccgacctgcaggagaacacccccgtggtggaggccttccccaacagccccagaacccccaccctgcccggcgtgctgacctag

SEQ ID NO: 76638 - DNA, 1239 bp, synthetic construct
  misc_feature 1..1239: note = Description of Artificial Sequence: Synthetic coding sequence
  source 1..1239: mol_type = other DNA
atgcagaagtactgcatctaccagcacttccagttccagctgctgatccagcacctgtggatcgccgccaactgcgacatcgccgacgagagattcgacgccaccttccacaccaacgtgctggtgaacagcagcggccactgccagtacctgccccccggcatcttcaagagcagctgctacatcgacgtgagatggttccccttcgacgtgcagcactgcaagctgaagttcggcagctggagctacggcggctggagcctggacctgcagatgcaggaggccgacatcagcggctacatccccaacggcgagtgggacctggtgggcatccccggcaagagaagcgagagattctacgagtgctgcaaggagccctaccccgacgtgaccttcaccgtgaccatgagaagaagaaccctgtactacggcctgaacctgctgatcccctgcgtgctgatcagcgccctggccctgctggtgttcctgctgcccgccgacagcggcgagaagatcagcctgggcatcaccgtgctgctgagcctgaccgtgttcatgctgctggtggccgagatcatgcccgccaccagcgacagcgtgcccctgatcgcccagtacttcgccagcaccatgatcatcgtgggcctgagcgtggtggtgaccgtgatcgtgctgcagtaccaccaccacgaccccgacggcggcaagatgcccaagtggaccagagtgatcctgctgaactggtgcgcctggttcctgagaatgaagagacccggcgaggacaaggtgagacccgcctgccagcacaagcagagaagatgcagcctggccagcgtggagatgagcgccgtggcccccccccccgccagcaacggcaacctgctgtacatcggcttcagaggcctggacggcgtgcactgcgtgcccacccccgacagcggcgtggtgtgcggcagaatggcctgcagccccacccacgacgagcacctgctgcacggcggccagccccccgagggcgaccccgacctggccaagatcctggaggaggtgagatacatcgccaacagattcagatgccaggacgagagcgaggccgtgtgcagcgagtggaagttcgccgcctgcgtggtggacagactgtgcctgatggccttcagcgtgttcaccatcatctgcaccatcggcatcctgatgagcgcccccaacttcgtggaggccgtgagcaaggacttcgcctag

SEQ ID NO: 76639 - DNA, 447 bp, synthetic construct
  misc_feature 1..447: note = Description of Artificial Sequence: Synthetic coding sequence
  source 1..447: mol_type = other DNA
atgagatgcagccccggcggcgtgtggctggccctggccgccagcctgctgcacgtgagcctgcagggcgagttccagagaaagctgtacaaggagctggtgaagaactacaaccccctggagagacccgtggccaacgacagccagcccctgaccgtgtacttcagcctgagcctgctgcagatcatggacgtggacgagaagaaccaggtgctgaccaccaacatctggctgcagatgagctggaccgaccactacctgcagtggaacgtgagcgagtaccccggcgtgaagaccgtgagattccccgacggccagatctggaagcccgacatcctgctgtacaacagcagctacgaccagcagcaggaggtgctggcctacggcatgcactgctggagcccccagttcggccccaccagcagcagcatgttccccgtggtgtag

SEQ ID NO: 76640 - DNA, 600 bp, synthetic construct
  misc_feature 1..600: note = Description of Artificial Sequence: Synthetic coding sequence
  source 1..600: mol_type = other DNA
atgaccaacagcagaaagtgctggcccatgggctgcaccgccggcgcccacagcctggacccccaccccagactgtgcagcctgctgtgcatcggcgagttctgcggcagagacggctgcagcgccgacgagagattcgacgccaccttccacaccaacgtgctggtgaacagcagcggccactgccagtacctgccccccggcatcttcaagagcagctgctacatcgacgtgagatggttccccttcgacgtgcagcactgcaagctgaagttcggcagctggagctacggcggctggagcctggacctgcagatgcaggaggccgacatcagcggctacatccccaacggcgagtgggacctggtgggcatccccggcaagagaagcgagagattctacgagtgctgcaaggagccctaccccgacgtgaccttcaccgtgaccatgagaagaagaaccctgtactacggcctgaacctgctgatcccctgcgtgctgatcagcgccctggccctgctggtgttcctgctgcccgccgacagcggcgagaagatcagcctgggcatcaccgtgctgctgagcctgaccgtgttctag

SEQ ID NO: 76641 - DNA, 1596 bp, synthetic construct
  misc_feature 1..1596: note = Description of Artificial Sequence: Synthetic coding sequence
  source 1..1596: mol_type = other DNA
atgagatgcagccccggcggcgtgtggctggccctggccgccagcctgctgcacggcaaggccaccgccagcccccccagcacccccccctgggaccccggccacatccccggcgccagcgtgagacccgcccccggccccgtgagcctgcagggcgagttccagagaaagctgtacaaggagctggtgaagaactacaaccccctggagagacccgtggccaacgacagccagcccctgaccgtgtacttcagcctgagcctgctgcagatcatggacgtggacgagaagaaccaggtgctgaccaccaacatctggctgcagatgagctggaccgaccactacctgcagtggaacgtgagcgagtaccccggcgtgaagaccgtgagattccccgacggccagatctggaagcccgacatcctgctgtacaacagcgccgacgagagattcgacgccaccttccacaccaacgtgctggtgaacagcagcggccactgccagtacctgccccccggcatcttcaagagcagctgctacatcgacgtgagatggttccccttcgacgtgcagcactgcaagctgaagttcggcagctggagctacggcggctggagcctggacctgcagatgcaggaggccgacatcagcggctacatccccaacggcgagtgggacctggtgggcatccccggcaagagaagcgagagattctacgagtgctgcaaggagccctaccccgacgtgaccttcaccgtgaccatgagaagaagaaccctgtactacggcctgaacctgctgatcccctgcgtgctgatcagcgccctggccctgctggtgttcctgctgcccgccgacagcggcgagaagatcagcctgggcatcaccgtgctgctgagcctgaccgtgttcatgctgctggtggccgagatcatgcccgccaccagcgacagcgtgcccctgatcgcccagtacttcgccagcaccatgatcatcgtgggcctgagcgtggtggtgaccgtgatcgtgctgcagtaccaccaccacgaccccgacggcggcaagatgcccaagtggaccagagtgatcctgctgaactggtgcgcctggttcctgagaatgaagagacccggcgaggacaaggtgagacccgcctgccagcacaagcagagaagatgcagcctggccagcgtggagatgagcgccgtggcccccccccccgccagcaacggcaacctgctgtacatcggcttcagaggcctggacggcgtgcactgcgtgcccacccccgacagcggcgtggtgtgcggcagaatggcctgcagccccacccacgacgagcacctgctgcacggcggccagccccccgagggcgaccccgacctggccaagatcctggaggaggtgagatacatcgccaacagattcagatgccaggacgagagcgaggccgtgtgcagcgagtggaagttcgccgcctgcgtggtggacagactgtgcctgatggccttcagcgtgttcaccatcatctgcaccatcggcatcctgatgagcgcccccaacttcgtggaggccgtgagcaaggacttcgcctag

SEQ ID NO: 76642 - DNA, 966 bp, synthetic construct
  misc_feature 1..966: note = Description of Artificial Sequence: Synthetic coding sequence
  source 1..966: mol_type = other DNA
atgcaggaggccgacatcagcggctacatccccaacggcgagtgggacctggtgggcatccccggcaagagaagcgagagattctacgagtgctgcaaggagccctaccccgacgtgaccttcaccgtgaccatgagaagaagaaccctgtactacggcctgaacctgctgatcccctgcgtgctgatcagcgccctggccctgctggtgttcctgctgcccgccgacagcggcgagaagatcagcctgggcatcaccgtgctgctgagcctgaccgtgttcatgctgctggtggccgagatcatgcccgccaccagcgacagcgtgcccctgatcgcccagtacttcgccagcaccatgatcatcgtgggcctgagcgtggtggtgaccgtgatcgtgctgcagtaccaccaccacgaccccgacggcggcaagatgcccaagtggaccagagtgatcctgctgaactggtgcgcctggttcctgagaatgaagagacccggcgaggacaaggtgagacccgcctgccagcacaagcagagaagatgcagcctggccagcgtggagatgagcgccgtggcccccccccccgccagcaacggcaacctgctgtacatcggcttcagaggcctggacggcgtgcactgcgtgcccacccccgacagcggcgtggtgtgcggcagaatggcctgcagccccacccacgacgagcacctgctgcacggcggccagccccccgagggcgaccccgacctggccaagatcctggaggaggtgagatacatcgccaacagattcagatgccaggacgagagcgaggccgtgtgcagcgagtggaagttcgccgcctgcgtggtggacagactgtgcctgatggccttcagcgtgttcaccatcatctgcaccatcggcatcctgatgagcgcccccaacttcgtggaggccgtgagcaaggacttcgcctag

SEQ ID NO: 76643 - DNA, 1440 bp, synthetic construct
  misc_feature 1..1440: note = Description of Artificial Sequence: Synthetic coding sequence
  source 1..1440: mol_type = other DNA
atgaactggagccacagctgcatcagcttctgctggatctacttcgccgccagcagactgagagccgccgagaccgccgacggcaagtacgcccagaagctgttcaacgacctgttcgaggactacagcaacgccctgagacccgtggaggacaccgacaaggtgctgaacgtgaccctgcagatcaccctgagccagatcaaggacatggacgagagaaaccagatcctgaccgcctacctgtggatcagacagatctggcacgacgcctacctgacctgggacagagaccagtacgacggcctggacagcatcagaatccccagcgacctggtgtggagacccgacatcgtgctgtacaacaaggccgacgacgagagcagcgagcccgtgaacaccaacgtggtgctgagatacgacggcctgatcacctgggacgcccccgccatcaccaagagcagctgcgtggtggacgtgacctacttccccttcgacaaccagcagtgcaacctgaccttcggcagctggacctacaacggcaaccaggtggacatcttcaacgccctggacagcggcgacctgagcgacttcatcgaggacgtggagtgggaggtgcacggcatgcccgccgtgaagaacgtgatcagctacggctgctgcagcgagccctaccccgacgtgaccttcaccctgctgctgaagagaagaagcagcttctacatcgtgaacctgctgatcccctgcgtgctgatcagcttcctggcccccctgagcttctacctgcccgccgccagcggcgagaaggtgagcctgggcgtgaccatcctgctggccatgaccgtgttccagctgatggtggccgagatcatgcccgccagcgagaacgtgcccctgatcggcaagtactacatcgccaccatggccctgatcaccgccagcaccgccctgaccatcatggtgatgaacatccacttctgcggcgccgaggccagacccgtgccccactgggccagagtggtgatcctgaagtacatgagcagagtgctgttcgtgtacgacgtgggcgagagctgcctgagcccccaccacagcagagagagagaccacctgaccaaggtgtacagcaagctgcccgagagcaacctgaaggccgccagaaacaaggacctgagcagaaagaaggacatgaacaagagactgaagaacgacctgggctgccagggcaagaacccccaggaggccgagagctactgcgcccagtacaaggtgctgaccagaaacatcgagtacatcgccaagtgcctgaaggaccacaaggccaccaacagcaagggcagcgagtggaagaaggtggccaaggtgatcgacagattcttcatgtggatcttcttcatcatggtgttcgtgatgaccatcctgatcatcgccagagccgactag

SEQ ID NO: 76644 - DNA, 1506 bp, synthetic construct
  misc_feature 1..1506: note = Description of Artificial Sequence: Synthetic coding sequence
  source 1..1506: mol_type = other DNA
atgacccccggcgccctgctgatgctgctgggcgccctgggcgcccccctggcccccggcgtgagaggcagcgaggccgagggcagactgagagagaagctgttcagcggctacgacagcagcgtgagacccgccagagaggtgggcgacagagtgagagtgagcgtgggcctgatcctggcccagctgatcagcctgaacgagaaggacgaggagatgagcaccaaggtgtacctggacctggagtggaccgactacagactgagctgggaccccgccgagcacgacggcatcgacagcctgagaatcaccgccgagagcgtgtggctgcccgacgtggtgctgctgaacaacaacgacggcaacttcgacgtggccctggacatcagcgtggtggtgagcagcgacggcagcgtgagatggcagccccccggcatctacagaagcagctgcagcatccaggtgacctacttccccttcgactggcagaactgcaccatggtgttcagcagctacagctacgacagcagcgaggtgagcctgcagaccggcctgggccccgacggccagggccaccaggagatccacatccacgagggcaccttcatcgagaacggccagtgggagatcatccacaagcccagcagactgatccagccccccggcgaccccagaggcggcagagagggccagagacaggaggtgatcttctacctgatcatcagaagaaagcccctgttctacctggtgaacgtgatcgccccctgcatcctgatcaccctgctggccatcttcgtgttctacctgccccccgacgccggcgagaagatgggcctgagcatcttcgccctgctgaccctgaccgtgttcctgctgctgctggccgacaaggtgcccgagaccagcctgagcgtgcccatcatcatcaagtacctgatgttcaccatggtgctggtgaccttcagcgtgatcctgagcgtggtggtgctgaacctgcaccacagaagcccccacacccaccagatgcccctgtgggtgagacagatcttcatccacaagctgcccctgtacctgagactgaagagacccaagcccgagagagacctgatgcccgagcccccccactgcagcagccccggcagcggctggggcagaggcaccgacgagtacttcatcagaaagccccccagcgacttcctgttccccaagcccaacagattccagcccgagctgagcgcccccgacctgagaagattcatcgacggccccaacagagccgtggccctgctgcccgagctgagagaggtggtgagcagcatcagctacatcgccagacagctgcaggagcaggaggaccacgacgccctgaaggaggactggcagttcgtggccatggtggtggacagactgttcctgtggaccttcatcatcttcaccagcgtgggcaccctggtgatcttcctggacgccacctaccacctgcccccccccgaccccttcccctag

SEQ ID NO: 76645 - DNA, 1290 bp, synthetic construct
  misc_feature 1..1290: note = Description of Artificial Sequence: Synthetic coding sequence
  source 1..1290: mol_type = other DNA
atgagcaccaaggtgtacctggacctggagtggaccgactacagactgagctgggaccccgccgagcacgacggcatcgacagcctgagaatcaccgccgagagcgtgtggctgcccgacgtggtgctgctgaacaacaacgacggcaacttcgacgtggccctggacatcagcgtggtggtgagcagcgacggcagcgtgagatggcagccccccggcatctacagaagcagctgcagcatccaggtgacctacttccccttcgactggcagaactgcaccatggtgttcagcagctacagctacgacagcagcgaggtgagcctgcagaccggcctgggccccgacggccagggccaccaggagatccacatccacgagggcaccttcatcgagaacggccagtgggagatcatccacaagcccagcagactgatccagccccccggcgaccccagaggcggcagagagggccagagacaggaggtgatcttctacctgatcatcagaagaaagcccctgttctacctggtgaacgtgatcgccccctgcatcctgatcaccctgctggccatcttcgtgttctacctgccccccgacgccggcgagaagatgggcctgagcatcttcgccctgctgaccctgaccgtgttcctgctgctgctggccgacaaggtgcccgagaccagcctgagcgtgcccatcatcatcaagtacctgatgttcaccatggtgctggtgaccttcagcgtgatcctgagcgtggtggtgctgaacctgcaccacagaagcccccacacccaccagatgcccctgtgggtgagacagatcttcatccacaagctgcccctgtacctgagactgaagagacccaagcccgagagagacctgatgcccgagcccccccactgcagcagccccggcagcggctggggcagaggcaccgacgagtacttcatcagaaagccccccagcgacttcctgttccccaagcccaacagattccagcccgagctgagcgcccccgacctgagaagattcatcgacggccccaacagagccgtggccctgctgcccgagctgagagaggtggtgagcagcatcagctacatcgccagacagctgcaggagcaggaggaccacgacgccctgaaggaggactggcagttcgtggccatggtggtggacagactgttcctgtggaccttcatcatcttcaccagcgtgggcaccctggtgatcttcctggacgccacctaccacctgcccccccccgaccccttcccctag

SEQ ID NO: 76646 - DNA, 1509 bp, synthetic construct
  misc_feature 1..1509: note = Description of Artificial Sequence: Synthetic coding sequence
  source 1..1509: mol_type = other DNA
atggccagaagatgcggccccgtggccctgctgctgggcttcggcctgctgagactgtgcagcggcgtgtggggcaccgacaccgaggagagactggtggagcacctgctggaccccagcagatacaacaagctgatcagacccgccaccaacggcagcgagctggtgaccgtgcagctgatggtgagcctggcccagctgatcagcgtgcacgagagagagcagatcatgaccaccaacgtgtggctgacccaggagtgggaggactacagactgacctggaagcccgaggagttcgacaacatgaagaaggtgagactgcccagcaagcacatctggctgcccgacgtggtgctgtacaacaacgccgacggcatgtacgaggtgagcttctacagcaacgccgtggtgagctacgacggcagcatcttctggctgccccccgccatctacaagagcgcctgcaagatcgaggtgaagcacttccccttcgaccagcagaactgcaccatgaagttcagaagctggacctacgacagaaccgagatcgacctggtgctgaagagcgaggtggccagcctggacgacttcacccccagcggcgagtgggacatcgtggccctgcccggcagaagaaacgagaaccccgacgacagcacctacgtggacatcacctacgacttcatcatcagaagaaagcccctgttctacaccatcaacctgatcatcccctgcgtgctgatcaccagcctggccatcctggtgttctacctgcccagcgactgcggcgagaagatgaccctgtgcatcagcgtgctgctggccctgaccgtgttcctgctgctgatcagcaagatcgtgccccccaccagcctggacgtgcccctggtgggcaagtacctgatgttcaccatggtgctggtgaccttcagcatcgtgaccagcgtgtgcgtgctgaacgtgcaccacagaagccccaccacccacaccatggccccctgggtgaaggtggtgttcctggagaagctgcccgccctgctgttcatgcagcagcccagacaccactgcgccagacagagactgagactgagaagaagacagagagagagagagggcgccggcgccctgttcttcagagaggcccccggcgccgacagctgcacctgcttcgtgaacagagccagcgtgcagggcctggccggcgccttcggcgccgagcccgcccccgtggccggccccggcagaagcggcgagccctgcggctgcggcctgagagaggccgtggacggcgtgagattcatcgccgaccacatgagaagcgaggacgacgaccagagcgtgagcgaggactggaagtacgtggccatggtgatcgacagactgttcctgtggatcttcgtgttcgtgtgcgtgttcggcaccatcggcatgttcctgcagcccctgttccagaactacaccaccaccaccttcctgcacagcgaccacagcgcccccagcagcaagtag

SEQ ID NO: 76647 - DNA, 1377 bp, synthetic construct
  misc_feature 1..1377: note = Description of Artificial Sequence: Synthetic coding sequence
  source 1..1377: mol_type = other DNA
atgctgcccgacttcatgctggtgctgatcgtgctgggcatccccagcagcgccaccaccggcttcaacagcatcgccgagaacgaggacgccctgctgagacacctgttccagggctaccagaagtgggtgagacccgtgctgcacagcaacgacaccatcaaggtgtacttcggcctgaagatcagccagctggtggacgtggacgagaagaaccagctgatgaccaccaacgtgtggctgaagcaggagtggaccgaccacaagctgagatggaaccccgacgactacggcggcatccacagcatcaaggtgcccagcgagagcctgtggctgcccgacatcgtgctgttcgagaacgccgacggcagattcgagggcagcctgatgaccaaggtgatcgtgaagagcaacggcaccgtggtgtggaccccccccgccagctacaagagcagctgcaccatggacgtgaccttcttccccttcgacagacagaactgcagcatgaagttcggcagctggacctacgacggcaccatggtggacctgatcctgatcaacgagaacgtggacagaaaggacttcttcgacaacggcgagtgggagatcctgaacgccaagggcatgaagggcaacagaagagacggcgtgtacagctaccccttcatcacctacagcttcgtgctgagaagactgcccctgttctacaccctgttcctgatcatcccctgcctgggcctgagcttcctgaccgtgctggtgttctacctgcccagcgacgagggcgagaagctgagcctgagcaccagcgtgctggtgagcctgaccgtgttcctgctggtgatcgaggagatcatccccagcagcagcaaggtgatccccctgatcggcgagtacctgctgttcatcatgatcttcgtgaccctgagcatcatcgtgaccgtgttcgtgatcaacgtgcaccacagaagcagcagcacctaccaccccatggccccctgggtgaagagactgttcctgcagaagctgcccaagctgctgtgcatgaaggaccacgtggacagatacagcagccccgagaaggaggagagccagcccgtggtgaagggcaaggtgctggagaagaagaagcagaagcagctgagcgacggcgagaaggtgctggtggccttcctggagaaggccgccgacagcatcagatacatcagcagacacgtgaagaaggagcacttcatcagccaggtggtgcaggactggaagttcgtggcccaggtgctggacagaatcttcctgtggctgttcctgatcgtgagcgtgaccggcagcgtgctgatcttcacccccgccctgaagatgtggctgcacagctaccactag

SEQ ID NO: 76648 - DNA, 1497 bp, synthetic construct
  misc_feature 1..1497: note = Description of Artificial Sequence: Synthetic coding sequence
  source 1..1497: mol_type = other DNA
atgagaagagcccccagcctggtgctgttcttcctggtggccctgtgcggcagaggcaactgcagagtggccaacgccgaggagaagctgatggacgacctgctgaacaagaccagatacaacaacctgatcagacccgccaccagcagcagccagctgatcagcatcaagctgcagctgagcctggcccagctgatcagcgtgaacgagagagagcagatcatgaccaccaacgtgtggctgaagcaggagtggaccgactacagactgacctggaacagcagcagatacgagggcgtgaacatcctgagaatccccgccaagagaatctggctgcccgacatcgtgctgtacaacaacgccgacggcacctacgaggtgagcgtgtacaccaacctgatcgtgagaagcaacggcagcgtgctgtggctgccccccgccatctacaagagcgcctgcaagatcgaggtgaagtacttccccttcgaccagcagaactgcaccctgaagttcagaagctggacctacgaccacaccgagatcgacatggtgctgatgacccccaccgccagcatggacgacttcacccccagcggcgagtgggacatcgtggccctgcccggcagaagaaccgtgaacccccaggaccccagctacgtggacgtgacctacgacttcatcatcaagagaaagcccctgttctacaccatcaacctgatcatcccctgcgtgctgaccaccctgctggccatcctggtgttctacctgcccagcgactgcggcgagaagatgaccctgtgcatcagcgtgctgctggccctgaccttcttcctgctgctgatcagcaagatcgtgccccccaccagcctggacgtgcccctgatcggcaagtacctgatgttcaccatggtgctggtgaccttcagcatcgtgaccagcgtgtgcgtgctgaacgtgcaccacagaagccccagcacccacaccatggccccctgggtgaagagatgcttcctgcacaagctgcccaccttcctgttcatgaagagacccggccccgacagcagccccgccagagccttcccccccagcaagagctgcgtgaccaagcccgaggccaccgccaccagcaccagccccagcaacttctacggcaacagcatgtacttcgtgaaccccgccagcgccgccagcaagagccccgccggcagcacccccgtggccatccccagagacttctggctgagaagcagcggcagattcagacaggacgtgcaggaggccctggagggcgtgagcttcatcgcccagcacatgaagaacgacgacgaggaccagagcgtggtggaggactggaagtacgtggccatggtggtggacagactgttcctgtgggtgttcatgttcgtgtgcgtgctgggcaccgtgggcctgttcctgccccccctgttccagacccacgccgccagcgagggcccctacgccgcccagagagactag

SEQ ID NO: 76649 - DNA, 696 bp, synthetic construct
  misc_feature 1..696: note = Description of Artificial Sequence: Synthetic coding sequence
  source 1..696: mol_type = other DNA
atgagaagagcccccagcctggtgctgttcttcctggtggccctgtgcggcagaggcaactgcagagtggccaacgccgaggagaagctgatggacgacctgctgaacaagaccagatacaacaacctgatcagacccgccaccagcagcagccagctgatcagcatcaagctgcagctgagcctggcccagctgatcagcgtgaacgagagagagcagatcatgaccaccaacgtgtggctgaagcaggagtggaccgactacagactgacctggaacagcagcagatacgagggcgtgaacatcctgagaatccccgccaagagaatctggctgcccgacatcgtgctgtacaacaagagcctgagaaccggcagcacctggctgtggtggtggaccggctgcagctgcggctgcagctgcctgtgcgccagctgggccctgtggggcagcagctacagacccagcagcagacccatgcagctgctgagaggccccaccctgcccagcgtgaccgagggccccctgggctgcggcgtgagaggctgcgagtggcccggcggccacttcgccgccagcttctgggtggtggccgacgaggccctgagcaagtacgtgagcatcggccaccagccccaccagaccagccacagcagaggcaccggcaaggacggcggcctgggctgccccctgtag

SEQ ID NO: 76650 - DNA, 1554 bp, synthetic construct
  misc_feature 1..1554: note = Description of Artificial Sequence: Synthetic coding sequence
  source 1..1554: mol_type = other DNA
atggagggccccgtgctgaccctgggcctgctggccgccctggccgtgtgcggcagctggggcctgaacgaggaggagagactgatcagacacctgttccaggagaagggctacaacaaggagctgagacccgtggcccacaaggaggagagcgtggacgtggccctggccctgaccctgagcaacctgatcagcctgaaggaggtggaggagaccctgaccaccaacgtgtggatcgagcacggctggaccgacaacagactgaagtggaacgccgaggagttcggcaacatcagcgtgctgagactgccccccgacatggtgtggctgcccgagatcgtgctggagaacaacaacgacggcagcttccagatcagctacagctgcaacgtgctggtgtaccactacggcttcgtgtactggctgccccccgccatcttcagaagcagctgccccatcagcgtgacctacttccccttcgactggcagaactgcagcctgaagttcagcagcctgaagtacaccgccaaggagatcaccctgagcctgaagcaggacgccaaggagaacagaacctaccccgtggagtggatcatcatcgaccccgagggcttcaccgagaacggcgagtgggagatcgtgcacagacccgccagagtgaacgtggaccccagagcccccctggacagccccagcagacaggacatcaccttctacctgatcatcagaagaaagcccctgttctacatcatcaacatcctggtgccctgcgtgctgatcagcttcatggtgaacctggtgttctacctgcccgccgacagcggcgagaagaccagcgtggccatcagcgtgctgctggcccagagcgtgttcctgctgctgatcagcaagagactgcccgccaccagcatggccatccccctgatcggcaagttcctgctgttcggcatggtgctggtgaccatggtggtggtgatctgcgtgatcgtgctgaacatccacttcagaacccccagcacccacgtgctgagcgagggcgtgaagaagctgttcctggagaccctgcccgagctgctgcacatgagcagacccgccgaggacggccccagccccggcgccctggtgagaagaagcagcagcctgggctacatcagcaaggccgaggagtacttcctgctgaagagcagaagcgacctgatgttcgagaagcagagcgagagacacggcctggccagaagactgaccaccgccagaagaccccccgccagcagcgagcaggcccagcaggagctgttcaacgagctgaagcccgccgtggacggcgccaacttcatcgtgaaccacatgagagaccagaacaactacaacgaggagaaggacagctggaacagagtggccagaaccgtggacagactgtgcctgttcgtggtgacccccgtgatggtggtgggcaccgcctggatcttcctgcagggcgtgtacaaccagccccccccccagcccttccccggcgacccctacagctacaacgtgcaggacaagagattcatctag

SEQ ID NO: 76651 - DNA, 708 bp, synthetic construct
  misc_feature 1..708: note = Description of Artificial Sequence: Synthetic coding sequence
  source 1..708: mol_type = other DNA
atggagggccccgtgctgaccctgggcctgctggccgccctggccgtgtgcggcagctggggcctgaacgaggaggagagactgatcagacacctgttccaggagaagggctacaacaaggagctgagacccgtggcccacaaggaggagagcgtggacgtggccctggccctgaccctgagcaacctgatcagcctgaaggaggtggaggagaccctgaccaccaacgtgtggatcgagcacggctggaccgacaacagactgaagtggaacgccgaggagttcggcaacatcagcgtgctgagactgccccccgacatggtgtggctgcccgagatcgtgctggagaacaacaacgacggcagcttccagatcagctacagctgcaacgtgctggtgtaccactacggcttcgtgtactggctgccccccgccatcttcagaagcagctgccccatcagcgtgacctacttccccttcgactggcagaactgcagcctgaagttcagagagagaggcgtgggcgacagcccccccgccggccagggccagagaggcccccagagccccagcggccagccccagccccccggccaccacctgctgccccaccaccccccccaggcccccctgctgcaccaccagcaccccggcgccctgagagcccacctgctgcacggccagcccggcctgctgcccaccggctag

SEQ ID NO: 76652 - DNA, 972 bp, synthetic construct
  misc_feature 1..972: note = Description of Artificial Sequence: Synthetic coding sequence
  source 1..972: mol_type = other DNA
atgctgaagaacctggagaccagcgtgagctgcgccagccccagaacctggtgcggcagccagagactgtgctggagaaccaccatgaccgcccccagcagaagccccacccccgccacctgcctgagcaccaccaccgccagctgcaccggctgccacctgcccagcagcgccccccccgcccccagcctgagccccatcagccccagcaccggcagaaccgcccccagcagcagcggcggcgagaagaccagcgtggccatcagcgtgctgctggcccagagcgtgttcctgctgctgatcagcaagagactgcccgccaccagcatggccatccccctgatcggcaagttcctgctgttcggcatggtgctggtgaccatggtggtggtgatctgcgtgatcgtgctgaacatccacttcagaacccccagcacccacgtgctgagcgagggcgtgaagaagctgttcctggagaccctgcccgagctgctgcacatgagcagacccgccgaggacggccccagccccggcgccctggtgagaagaagcagcagcctgggctacatcagcaaggccgaggagtacttcctgctgaagagcagaagcgacctgatgttcgagaagcagagcgagagacacggcctggccagaagactgaccaccgccagaagaccccccgccagcagcgagcaggcccagcaggagctgttcaacgagctgaagcccgccgtggacggcgccaacttcatcgtgaaccacatgagagaccagaacaactacaacgaggagaaggacagctggaacagagtggccagaaccgtggacagactgtgcctgttcgtggtgacccccgtgatggtggtgggcaccgcctggatcttcctgcagggcgtgtacaaccagccccccccccagcccttccccggcgacccctacagctacaacgtgcaggacaagagattcatctag

SEQ ID NO: 76653 - DNA, 708 bp, synthetic construct; identical to SEQ ID NO: 76651
  misc_feature 1..708: note = Description of Artificial Sequence: Synthetic coding sequence
  source 1..708: mol_type = other DNA

SEQ ID NO: 76654 - DNA, 1509 bp, synthetic construct
  misc_feature 1..1509: note = Description of Artificial Sequence: Synthetic coding sequence
  source 1..1509: mol_type = other DNA
atggagggccccgtgctgaccctgggcctgctggccgccctggccgtgtgcggcagctggggcctgaacgaggaggagagactgatcagacacctgttccaggagaagggctacaacaaggagctgagacccgtggcccacaaggaggagagcgtggacgtggccctggccctgaccctgagcaacctgatcagcctgggctggaccgacaacagactgaagtggaacgccgaggagttcggcaacatcagcgtgctgagactgccccccgacatggtgtggctgcccgagatcgtgctggagaacaacaacgacggcagcttccagatcagctacagctgcaacgtgctggtgtaccactacggcttcgtgtactggctgccccccgccatcttcagaagcagctgccccatcagcgtgacctacttccccttcgactggcagaactgcagcctgaagttcagcagcctgaagtacaccgccaaggagatcaccctgagcctgaagcaggacgccaaggagaacagaacctaccccgtggagtggatcatcatcgaccccgagggcttcaccgagaacggcgagtgggagatcgtgcacagacccgccagagtgaacgtggaccccagagcccccctggacagccccagcagacaggacatcaccttctacctgatcatcagaagaaagcccctgttctacatcatcaacatcctggtgccctgcgtgctgatcagcttcatggtgaacctggtgttctacctgcccgccgacagcggcgagaagaccagcgtggccatcagcgtgctgctggcccagagcgtgttcctgctgctgatcagcaagagactgcccgccaccagcatggccatccccctgatcggcaagttcctgctgttcggcatggtgctggtgaccatggtggtggtgatctgcgtgatcgtgctgaacatccacttcagaacccccagcacccacgtgctgagcgagggcgtgaagaagctgttcctggagaccctgcccgagctgctgcacatgagcagacccgccgaggacggccccagccccggcgccctggtgagaagaagcagcagcctgggctacatcagcaaggccgaggagtacttcctgctgaagagcagaagcgacctgatgttcgagaagcagagcgagagacacggcctggccagaagactgaccaccgccagaagaccccccgccagcagcgagcaggcccagcaggagctgttcaacgagctgaagcccgccgtggacggcgccaacttcatcgtgaaccacatgagagaccagaacaactacaacgaggagaaggacagctggaacagagtggccagaaccgtggacagactgtgcctgttcgtggtgacccccgtgatggtggtgggcaccgcctggatcttcctgcagggcgtgtacaaccagccccccccccagcccttccccggcgacccctacagctacaacgtgcaggacaagagattcatctag

SEQ ID NO: 76655 - DNA, 1482 bp, synthetic construct
  misc_feature 1..1482: note = Description of Artificial Sequence: Synthetic coding sequence
  source 1..1482: mol_type = other DNA
atggccagagcccccctgggcgtgctgctgctgctgggcctgctgggcagaggcgtgggcaagaacgaggagctgagactgtaccaccacctgttcaacaactacgaccccggcagcagacccgtgagagagcccgaggacaccgtgaccatcagcctgaaggtgaccctgaccaacctgatcagcctgaacgagaaggaggagaccctgaccaccagcgtgtggatcggcatcgactggcaggactacagactgaactacagcaaggacgacttcggcggcatcgagaccctgagagtgcccagcgagctggtgtggctgcccgagatcgtgctggagaacaacatcgacggccagttcggcgtggcctacgacgccaacgtgctggtgtacgagggcggcagcgtgacctggctgccccccgccatctacagaagcgtgtgcgccgtggaggtgacctacttccccttcgactggcagaactgcagcctgatcttcagaagccagacctacaacgccgaggaggtggagttcaccttcgccgtggacaacgacggcaagaccatcaacaagatcgacatcgacaccgaggcctacaccgagaacggcgagtgggccatcgacttctgccccggcgtgatcagaagacaccacggcggcgccaccgacggccccggcgagaccgacgtgatctacagcctgatcatcagaagaaagcccctgttctacgtgatcaacatcatcgtgccctgcgtgctgatcagcggcctggtgctgctggcctacttcctgcccgcccaggccggcggccagaagtgcaccgtgagcatcaacgtgctgctggcccagaccgtgttcctgttcctgatcgcccagaagatccccgagaccagcctgagcgtgcccctgctgggcagattcctgatcttcgtgatggtggtggccaccctgatcgtgatgaactgcgtgatcgtgctgaacgtgagccagagaacccccaccacccacgccatgagccccagactgagacacgtgctgctggagctgctgcccagactgctgggcagcccccccccccccgaggcccccagagccgccagcccccccagaagagccagcagcgtgggcctgctgctgagagccgaggagctgatcctgaagaagcccagaagcgagctggtgttcgagggccagagacacagacagggcacctggaccgccgccttctgccagagcctgggcgccgccgcccccgaggtgagatgctgcgtggacgccgtgaacttcgtggccgagagcaccagagaccaggaggccaccggcgaggaggtgagcgactgggtgagaatgggcaacgccctggacaacatctgcttctgggccgccctggtgctgttcagcgtgggcagcagcctgatcttcctgggcgcctacttcaacagagtgcccgacctgccctacgccccctgcatccagccctag

SEQ ID NO: 76656 - DNA, 1554 bp, synthetic construct
  misc_feature 1..1554: note = Description of Artificial Sequence: Synthetic coding sequence
  source 1..1554: mol_type = other DNA
atgcacggcggccagggccccctgctgctgctgctgctgctggccgtgtgcctgggcgcccagggcagaaaccaggaggagagactgctggccgacctgatgcagaactacgaccccaacctgagacccgccgagagagacagcgacgtggtgaacgtgagcctgaagctgaccctgaccaacctgatcagcctgaacgagagagaggaggccctgaccaccaacgtgtggatcgagatgcagtggtgcgactacagactgagatgggaccccagagactacgagggcctgtgggtgctgagagtgcccagcaccatggtgtggagacccgacatcgtgctggagaacaacgtggacggcgtgttcgaggtggccctgtactgcaacgtgctggtgagccccgacggctgcatctactggctgccccccgccatcttcagaagcgcctgcagcatcagcgtgacctacttccccttcgactggcagaactgcagcctgatcttccagagccagacctacagcaccaacgagatcgacctgcagctgagccaggaggacggccagaccatcgagtggatcttcatcgaccccgaggccttcaccgagaacggcgagtgggccatccagcacagacccgccaagatgctgctggaccccgccgcccccgcccaggaggccggccaccagaaggtggtgttctacctgctgatccagagaaagcccctgttctacgtgatcaacatcatcgccccctgcgtgctgatcagcagcgtggccatcctgatccacttcctgcccgccaaggccggcggccagaagtgcaccgtggccatcaacgtgctgctggcccagaccgtgttcctgttcctggtggccaagaaggtgcccgagaccagccaggccgtgcccctgatcagcaagtacctgaccttcctgctggtggtgaccatcctgatcgtggtgaacgccgtggtggtgctgaacgtgagcctgagaagcccccacacccacagcatggccagaggcgtgagaaaggtgttcctgagactgctgccccagctgctgagaatgcacgtgagacccctggcccccgccgccgtgcaggacacccagagcagactgcagaacggcagcagcggctggagcatcaccaccggcgaggaggtggccctgtgcctgcccagaagcgagctgctgttccagcagtggcagagacagggcctggtggccgccgccctggagaagctggagaagggccccgagctgggcctgagccagttctgcggcagcctgaagcaggccgcccccgccatccaggcctgcgtggaggcctgcaacctgatcgcctgcgccagacaccagcagagccacttcgacaacggcaacgaggagtggttcctggtgggcagagtgctggacagagtgtgcttcctggccatgctgagcctgttcatctgcggcaccgccggcatcttcctgatggcccactacaacagagtgcccgccctgcccttccccggcgaccccagaccctacctgcccagccccgactag

SEQ ID NO: 76657 - DNA, 1554 bp, synthetic construct; identical to SEQ ID NO: 76656
  misc_feature 1..1554: note = Description of Artificial Sequence: Synthetic coding sequence
  source 1..1554: mol_type = other DNA

SEQ ID NO: 76658 - DNA, 1080 bp, synthetic construct
  misc_feature 1..1080: note = Description of Artificial Sequence: Synthetic coding sequence
  source 1..1080: mol_type = other DNA
atggtgagacccatgctgctgctgagcctgggcctgctggccggcctgctgcccgccctggccgcctgcccccagaactgccactgccacagcgacctgcagcacgtgatctgcgacaaggtgggcctgcagaagatccccaaggtgagcgagaagaccaagctgctgaacctgcagagaaacaacttccccgtgctggccgccaacagcttcagagccatgcccaacctggtgagcctgcacctgcagcactgccagatcagagaggtggccgccggcgccttcagaggcctgaagcagctgatctacctgtacctgagccacaacgacatcagagtgctgagagccggcgccttcgacgacctgaccgagctgacctacctgtacctggaccacaacaaggtgaccgagctgcccagaggcctgctgagccccctggtgaacctgttcatcctgcagctgaacaacaacaagatcagagagctgagagccggcgccttccagggcgccaaggacctgagatggctgtacctgagcgagaacgccctgagcagcctgcagcccggcgccctggacgacgtggagaacctggccaagttccacgtggacagaaaccagctgagcagctaccccagcgccgccctgagcaagctgagagtggtggaggagctgaagctgagccacaaccccctgaagagcatccccgacaacgccttccagagcttcggcagatacctggagaccctgtggctggacaacaccaacctggagaagttcagcgacggcgccttcctgggcgtgaccaccctgaagcacgtgcacctggagaacaacagactgaaccagctgcccagcaacttccccttcgacagcctggagaccctggccctgaccaacaacccctggaagtgcacctgccagctgagaggcctgagaagatggctggaggccaaggccagcagacccgacgccacctgcgccagccccgccaagttcaagggccagcacatcagagacaccgacgccttcagaagctgcaagttccccaccaagagaagcaagaaggccggcagacactag

SEQ ID NO: 76659 - DNA, 129 bp, synthetic construct
  misc_feature 1..129: note = Description of Artificial Sequence: Synthetic coding sequence
  source 1..129: mol_type = other DNA
tgagccagcagacccgacgccacctgcgccagccccgccaagttcaagggccagcacatcagagacaccgacgccttcagaagctgcaagttccccaccaagagaagcaagaaggccggcagacactag

SEQ ID NO: 76660 - DNA, 1080 bp, synthetic construct; identical to SEQ ID NO: 76658
  misc_feature 1..1080: note = Description of Artificial Sequence: Synthetic coding sequence
  source 1..1080: mol_type = other DNA

SEQ ID NO: 76661 - DNA, 2328 bp, synthetic construct
  misc_feature 1..2328: note = Description of Artificial Sequence: Synthetic coding sequence
  source 1..2328: mol_type = other DNA
atgagagccagcctgctgctgagcgtgctgagacccgccggccccgtggccgtgggcatcagcctgggcttcaccctgagcctgctgagcgtgacctgggtggaggagccctgcggccccggccccccccagcccggcgacagcgagctgccccccagaggcaacaccaacgccgccagaagacccaacagcgtgcagcccggcgccgagagagagaagcccggcgccggcgagggcgccggcgagaactgggagcccagagtgctgccctaccaccccgcccagcccggccaggccgccaagaaggccgtgagaaccagatacatcagcaccgagctgggcatcagacagagactgctggtggccgtgctgaccagccagaccaccctgcccaccctgggcgtggccgtgaacagaaccctgggccacagactggagagagtggtgttcctgaccggcgccagaggcagaagagccccccccggcatggccgtggtgaccctgggcgaggagagacccatcggccacctgcacctggccctgagacacctgctggagcagcacggcgacgacttcgactggttcttcctggtgcccgacaccacctacaccgaggcccacggcctggccagactgaccggccacctgagcctggccagcgccgcccacctgtacctgggcagaccccaggacttcatcggcggcgagcccacccccggcagatactgccacggcggcttcggcgtgctgctgagcagaatgctgctgcagcagctgagaccccacctggagggctgcagaaacgacatcgtgagcgccagacccgacgagtggctgggcagatgcatcctggacgccaccggcgtgggctgcaccggcgaccacgagggcgtgcactacagccacctggagctgagccccggcgagcccgtgcaggagggcgacccccacttcagaagcgccctgaccgcccaccccgtgagagaccccgtgcacatgtaccagctgcacaaggccttcgccagagccgagctggagagaacctaccaggagatccaggagctgcagtgggagatccagaacaccagccacctggccgtggacggcgaccaggccgccgcctggcccgtgggcatccccgcccccagcagacccgccagcagattcgaggtgctgagatgggactacttcaccgagcagcacgccttcagctgcgccgacggcagccccagatgccccctgagaggcgccgacagagccgacgtggccgacgtgctgggcaccgccctggaggagctgaacagaagataccaccccgccctgagactgcagaagcagcagctggtgaacggctacagaagattcgaccccgccagaggcatggagtacaccctggacctgcagctggaggccctgaccccccagggcggcagaagacccctgaccagaagagtgcagctgctgagacccctgagcagagtggagatcctgcccgtgccctacgtgaccgaggccagcagactgaccgtgctgctgcccctggccgccgccgagagagacctggcccccggcttcctggaggccttcgccaccgccgccctggagcccggcgacgccgccgccgccctgaccctgctgctgctgtacgagcccagacaggcccagagagtggcccacgccgacgtgttcgcccccgtgaaggcccacgtggccgagctggagagaagattccccggcgccagagtgccctggctgagcgtgcagaccgccgcccccagccccctgagactgatggacctgctgagcaagaagcaccccctggacaccctgttcctgctggccggccccgacaccgtgctgacccccgacttcctgaacagatgcagaatgcacgccatcagcggctggcaggccttcttccccatgcacttccaggccttccaccccgccgtggcccccccccagggccccggcccccccgagctgggcagagacaccggcagattcgacagacaggccgccagcgaggcctgcttctacaacagcgactacgtggccgccagaggcagactggccgccgccagcgagcaggaggaggagctgctggagagcctggacgtgtacgagctgttcctgcacttcagcagcctgcacgtgctgagagccgtggagcccgccctgctgcagagatacagagcccagacctgcagcgccagactgagcgaggacctgtaccacagatgcctgcagagcgtgctggagggcctgggcagcagaacccagctggccatgctgctgttcgagcaggagcagggcaacagcacctag

SEQ ID NO: 76662 - DNA, 1842 bp, synthetic construct
  misc_feature 1..1842: note = Description of Artificial Sequence: Synthetic coding sequence
  source 1..1842: mol_type = other DNA
atggccgtggtgaccctgggcgaggagagacccatcggccacctgcacctggccctgagacacctgctggagcagcacggcgacgacttcgactggttcttcctggtgcccgacaccacctacaccgaggcccacggcctggccagactgaccggccacctgagcctggccagcgccgcccacctgtacctgggcagaccccaggacttcatcggcggcgagcccacccccggcagatactgccacggcggcttcggcgtgctgctgagcagaatgctgctgcagcagctgagaccccacctggagggctgcagaaacgacatcgtgagcgccagacccgacgagtggctgggcagatgcatcctggacgccaccggcgtgggctgcaccggcgaccacgagggcgtgcactacagccacctggagctgagccccggcgagcccgtgcaggagggcgacccccacttcagaagcgccctgaccgcccaccccgtgagagaccccgtgcacatgtaccagctgcacaaggccttcgccagagccgagctggagagaacctaccaggagatccaggagctgcagtgggagatccagaacaccagccacctggccgtggacggcgaccaggccgccgcctggcccgtgggcatccccgcccccagcagacccgccagcagattcgaggtgctgagatgggactacttcaccgagcagcacgccttcagctgcgccgacggcagccccagatgccccctgagaggcgccgacagagccgacgtggccgacgtgctgggcaccgccctggaggagctgaacagaagataccaccccgccctgagactgcagaagcagcagctggtgaacggctacagaagattcgaccccgccagaggcatggagtacaccctggacctgcagctggaggccctgaccccccagggcggcagaagacccctgaccagaagagtgcagctgctgagacccctgagcagagtggagatcctgcccgtgccctacgtgaccgaggccagcagactgaccgtgctgctgcccctggccgccgccgagagagacctggcccccggcttcctggaggccttcgccaccgccgccctggagcccggcgacgccgccgccgccctgaccctgctgctgctgtacgagcccagacaggcccagagagtggcccacgccgacgtgttcgcccccgtgaaggcccacgtggccgagctggagagaagattccccggcgccagagtgccctggctgagcgtgcagaccgccgcccccagccccctgagactgatggacctgctgagcaagaagcaccccctggacaccctgttcctgctggccggccccgacaccgtgctgacccccgacttcctgaacagatgcagaatgcacgccatcagcggctggcaggccttcttccccatgcacttccaggccttccaccccgccgtggcccccccccagggccccggcccccccgagctgggcagagacaccggcagattcgacagacaggccgccagcgaggcctgcttctacaacagcgactacgtggccgccagaggcagactggccgccgccagcgagcaggaggaggagctgctggagagcctggacgtgtacgagctgttcctgcacttcagcagcctgcacgtgctgagagccgtggagcccgccctgctgcagagatacagagcccagacctgcagcgccagactgagcgaggacctgtaccacagatgcctgcagagcgtgctggagggcctgggcagcagaacccagctggccatgctgctgttcgagcaggagcagggcaacagcacctag

SEQ ID NO: 76663 - DNA, 2319 bp, synthetic construct
  misc_feature 1..2319: note = Description of Artificial Sequence: Synthetic coding sequence
  source 1..2319: mol_type = other DNA
atgagactgagcagcctgctggccctgctgagacccgccctgcccctgatcctgggcctgagcctgggctgcagcctgagcctgctgagagtgagctggatccagggcgagggcgaggacccctgcgtggaggccgtgggcgagagaggcggcccccagaaccccgacagcagagccagactggaccagagcgacgaggacttcaagcccagaatcgtgccctactacagagaccccaacaagccctacaagaaggtgctgagaaccagatacatccagaccgagctgggcagcagagagagactgctggtggccgtgctgaccagcagagccaccctgagcaccctggccgtggccgtgaacagaaccgtggcccaccacttccccagactgctgtacttcaccggccagagaggcgccagagcccccgccggcatgcaggtggtgagccacggcgacgagagacccgcctggctgatgagcgagaccctgagacacctgcacacccacttcggcgccgactacgactggttcttcatcatgcaggacgacacctacgtgcaggcccccagactggccgccctggccggccacctgagcatcaaccaggacctgtacctgggcagagccgaggagttcatcggcgccggcgagcaggccagatactgccacggcggcttcggctacctgctgagcagaagcctgctgctgagactgagaccccacctggacggctgcagaggcgacatcctgagcgccagacccgacgagtggctgggcagatgcctgatcgacagcctgggcgtgggctgcgtgagccagcaccagggccagcagtacagaagcttcgagctggccaagaacagagaccccgagaaggagggcagcagcgccttcctgagcgccttcgccgtgcaccccgtgagcgagggcaccctgatgtacagactgcacaagagattcagcgccctggagctggagagagcctacagcgagatcgagcagctgcaggcccagatcagaaacctgaccgtgctgacccccgagggcgaggccggcctgagctggcccgtgggcctgcccgcccccttcaccccccacagcagattcgaggtgctgggctgggactacttcaccgagcagcacaccttcagctgcgccgacggcgcccccaagtgccccctgcagggcgccagcagagccgacgtgggcgacgccctggagaccgccctggagcagctgaacagaagataccagcccagactgagattccagaagcagagactgctgaacggctacagaagattcgaccccgccagaggcatggagtacaccctggacctgctgctggagtgcgtgacccagagaggccacagaagagccctggccagaagagtgagcctgctgagacccctgagcagagtggagatcctgcccatgccctacgtgaccgaggccaccagagtgcagctggtgctgcccctgctggtggccgaggccgccgccgcccccgccttcctggaggccttcgccgccaacgtgctggagcccagagagcacgccctgctgaccctgctgctggtgtacggccccagagagggcggcagaggcgcccccgaccccttcctgggcgtgaaggccgccgccgccgagctggagagaagataccccggcaccagactggcctggctggccgtgagagccgaggcccccagccaggtgagactgatggacgtggtgagcaagaagcaccccgtggacaccctgttcttcctgaccaccgtgtggaccagacccggccccgaggtgctgaacagatgcagaatgaacgccatcagcggctggcaggccttcttccccgtgcacttccaggagttcaaccccgccctgagcccccagagaagcccccccggcccccccggcgccggccccgacccccccagcccccccggcgccgaccccagcagaggcgcccccatcggcggcagattcgacagacaggccagcgccgagggctgcttctacaacgccgactacctggccgccagagccagactggccggcgagctggccggccaggaggaggaggaggccctggagggcctggaggtgatggacgtgttcctgagattcagcggcctgcacctgttcagagccgtggagcccggcctggtgcagaagttcagcctgagagactgcagccccagactgagcgaggagctgtaccacagatgcagactgagcaacctggagggcctgggcggcagagcccagctggccatggccctgttcgagcaggagcaggccaacagcacctag

SEQ ID NO: 76664 - DNA, 2004 bp, synthetic construct
  misc_feature 1..2004: note = Description of Artificial Sequence: Synthetic coding sequence
  source 1..2004: mol_type = other DNA
atgagactgagcagcctgctggccctgctgagacccgccctgcccctgatcctgggcctgagcctgggctgcagcctgagcctgctgagagtgagctggatccagggcgagggcgaggacccctgcgtggaggccgtgggcgagagaggcggcccccagaaccccgacagcagagccagactggaccagagcgacgaggacttcaagcccagaatcgtgccctactacagagaccccaacaagccctacaagaaggtgctgagaaccagatacatccagaccgagctgggcagcagagagagactgctggtggccgtgctgaccagcagagccaccctgagcaccctggccgtggccgtgaacagaaccgtggcccaccacttccccagactgctgtacttcaccggccagagaggcgccagagcccccgccggcatgcaggtggtgagccacggcgacgagagacccgcctggctgatgagcgagaccctgagacacctgcacacccacttcggcgccgactacgactggttcttcatcatgcaggacgacacctacgtgcaggcccccagactggccgccctggccggccacctgagcatcaaccaggacctgtacctgggcagagccgaggagttcatcggcgccggcgagcaggccagatactgccacggcggcttcggctacctgctgagcagaagcctgctgctgagactgagaccccacctggacggctgcagaggcgacatcctgagcgccagacccgacgagtggctgggcagatgcctgatcgacagcctgggcgtgggctgcgtgagccagcaccagggccagcagtacagaagcttcgagctggccaagaacagagaccccgagaaggagggcagcagcgccttcctgagcgccttcgccgtgcaccccgtgagcgagggcaccctgatgtacagactgcacaagagattcagcgccctggagctggagagagcctacagcgagatcgagcagctgcaggcccagatcagaaacctgaccgtgctgacccccgagggcgaggccggcctgagctggcccgtgggcctgcccgcccccttcaccccccacagcagattcgaggtgctgggctgggactacttcaccgagcagcacaccttcagctgcgccgacggcgcccccaagtgccccctgcagggcgccagcagagccgacgtgggcgacgccctggagaccgccctggagcagctgaacagaagataccagcccagactgagattccagaagcagagactgctgaacggctacagaagattcgaccccgccagaggcatggagtacaccctggacctgctgctggagtgcgtgacccagagaggccacagaagagccctggccagaagagtgagcctgctgagacccctgagcagagtggagatcctgcccatgccctacgtgaccgaggccaccagagtgcagctggtgctgcccctgctggtggccgaggccgccgccgcccccgccttcctggaggccttcgccgccaacgtgctggagcccagagagcacgccctgctgaccctgctgctggtgtacggccccagagagggcggcagaggcgcccccgaccccttcctgggcgtgaaggccgccgccgccgagctggagagaagataccccggcaccagactggcctggctggccgtgagagccgaggcccccagccaggtgagactgatggacgtggtgagcaagaagcaccccgtggacaccctgttcttcctgaccaccgtgtggaccagacccggccccgaggtgctgaacagatgcagaatgaacgccatcagcggctggcaggccttcttccccgtgcacttccaggagttcaaccccgccctgagcccccagagaagccccccccccaacctgatcaccttccccctgagcgccagcgcccccggcagagccagacaggacggcggccagatcgagaactgctgctgcatcttctag

SEQ ID NO: 76665 - DNA, 6969 bp, synthetic construct
  misc_feature 1..6969: note = Description of Artificial Sequence: Synthetic coding sequence
  source 1..6969: mol_type = other DNA
atgcagagcggccccagaccccccctgcccgcccccggcctggccctggccctgaccctgaccatgctggccagactggccagcgccgccagcttcttcggcgagaaccacctggaggtgcccgtggccaccgccctgaccgacatcgacctgcagctgcagttcagcaccagccagcccgaggccctgctgctgctggccgccggccccgccgaccacctgctgctgcagctgtacagcggcagactgcaggtgagactggtgctgggccaggaggagctgagactgcagacccccgccgagaccctgctgagcgacagcatcccccacaccgtggtgctgaccgtggtggagggctgggccaccctgagcgtggacggcttcctgaacgccagcagcgccgtgcccggcgcccccctggaggtgccctacggcctgttcgtgggcggcaccggcaccctgggcctgccctacctgagaggcaccagcagacccctgagaggctgcctgcacgccgccaccctgaacggcagaagcctgctgagacccctgacccccgacgtgcacgagggctgcgccgaggagttcagcgccagcgacgacgtggccctgggcttcagcggcccccacagcctggccgccttccccgcctggggcacccaggacgagggcaccctggagttcaccctgaccacccagagcagacaggcccccctggccttccaggccggcggcagaagaggcgacttcatctacgtggacatcttcgagggccacctgagagccgtggtggagaagggccagggcaccgtgctgctgcacaacagcgtgcccgtggccgacggccagccccacgaggtgagcgtgcacatcaacgcccacagactggagatcagcgtggaccagtaccccacccacaccagcaacagaggcgtgctgagctacctggagcccagaggcagcctgctgctgggcggcctggacgccgaggccagcagacacctgcaggagcacagactgggcctgacccccgaggccaccaacgccagcctgctgggctgcatggaggacctgagcgtgaacggccagagaagaggcctgagagaggccctgctgaccagaaacatggccgccggctgcagactggaggaggaggagtacgaggacgacgcctacggccactacgaggccttcagcaccctggcccccgaggcctggcccgccatggagctgcccgagccctgcgtgcccgagcccggcctgccccccgtgttcgccaacttcacccagctgctgaccatcagccccctggtggtggccgagggcggcaccgcctggctggagtggagacacgtgcagcccaccctggacctgatggaggccgagctgagaaagagccaggtgctgttcagcgtgaccagaggcgccagacacggcgagctggagctggacatccccggcgcccaggccagaaagatgttcaccctgctggacgtggtgaacagaaaggccagattcatccacgacggcagcgaggacaccagcgaccagctggtgctggaggtgagcgtgaccgccagagtgcccatgcccagctgcctgagaagaggccagacctacctgctgcccatccaggtgaaccccgtgaacgaccccccccacatcatcttcccccacggcagcctgatggtgatcctggagcacacccagaagcccctgggccccgaggtgttccaggcctacgaccccgacagcgcctgcgagggcctgaccttccaggtgctgggcaccagcagcggcctgcccgtggagagaagagaccagcccggcgagcccgccaccgagttcagctgcagagagctggaggccggcagcctggtgtacgtgcacagaggcggccccgcccaggacctgaccttcagagtgagcgacggcctgcaggccagcccccccgccaccctgaaggtggtggccatcagacccgccatccagatccacagaagcaccggcctgagactggcccagggcagcgccatgcccatcctgcccgccaacctgagcgtggagaccaacgccgtgggccaggacgtgagcgtgctgttcagagtgaccggcgccctgcagttcggcgagctgcagaagcagggcgccggcggcgtggagggcgccgagtggtgggccacccaggccttccaccagagagacgtggagcagggcagagtgagatacctgagcaccgacccccagcaccacgcctacgacaccgtggagaacctggccctggaggtgcaggtgggccaggagatcctgagcaacctgagcttccccgtgaccatccagagagccaccgtgtggatgctgagactggagcccctgcacacccagaacacccagcaggagaccctgaccaccgcccacctggaggccaccctggaggaggccggccccagcccccccaccttccactacgaggtggtgcaggcccccagaaagggcaacctgcagctgcagggcaccagactgagcgacggccagggcttcacccaggacgacatccaggccggcagagtgacctacggcgccaccgccagagccagcgaggccgtggaggacaccttcagattcagagtgaccgcccccccctacttcagccccctgtacaccttccccatccacatcggcggcgaccccgacgcccccgtgctgaccaacgtgctgctggtggtgcccgagggcggcgagggcgtgctgagcgccgaccacctgttcgtgaagagcctgaacagcgccagctacctgtacgaggtgatggagagacccagacacggcagactggcctggagaggcacccaggacaagaccaccatggtgaccagcttcaccaacgaggacctgctgagaggcagactggtgtaccagcacgacgacagcgagaccaccgaggacgacatccccttcgtggccaccagacagggcgagagcagcggcgacatggcctgggaggaggtgagaggcgtgttcagagtggccatccagcccgtgaacgaccacgcccccgtgcagaccatcagcagaatcttccacgtggccagaggcggcagaagactgctgaccaccgacgacgtggccttcagcgacgccgacagcggcttcgccgacgcccagctggtgctgaccagaaaggacctgctgttcggcagcatcgtggccgtggacgagcccaccagacccatctacagattcacccaggaggacctgagaaagagaagagtgctgttcgtgcacagcggcgccgacagaggctggatccagctgcaggtgagcgacggccagcaccaggccaccgccctgctggaggtgcaggccagcgagccctacctgagagtggccaacggcagcagcctggtggtgccccagggcggccagggcaccatcgacaccgccgtgctgcacctggacaccaacctggacatcagaagcggcgacgaggtgcactaccacgtgaccgccggccccagatggggccagctggtgagagccggccagcccgccaccgccttcagccagcaggacctgctggacggcgccgtgctgtacagccacaacggcagcctgagccccagagacaccatggccttcagcgtggaggccggccccgtgcacaccgacgccaccctgcaggtgaccatcgccctggagggccccctggcccccctgaagctggtgagacacaagaagatctacgtgttccagggcgaggccgccgagatcagaagagaccagctggaggccgcccaggaggccgtgccccccgccgacatcgtgttcagcgtgaagagcccccccagcgccggctacctggtgatggtgagcagaggcgccctggccgacgagccccccagcctggaccccgtgcagagcttcagccaggaggccgtggacaccggcagagtgctgtacctgcacagcagacccgaggcctggagcgacgccttcagcctggacgtggccagcggcctgggcgcccccctggagggcgtgctggtggagctggaggtgctgcccgccgccatccccctggaggcccagaacttcagcgtgcccgagggcggcagcctgaccctggccccccccctgctgagagtgagcggcccctacttccccaccctgctgggcctgagcctgcaggtgctggagcccccccagcacggcgccctgcagaaggaggacggcccccaggccagaaccctgagcgccttcagctggagaatggtggaggagcagctgatcagatacgtgcacgacggcagcgagaccctgaccgacagcttcgtgctgatggccaacgccagcgagatggacagacagagccaccccgtggccttcaccgtgaccgtgctgcccgtgaacgaccagccccccatcctgaccaccaacaccggcctgcagatgtgggagggcgccaccgcccccatccccgccgaggccctgagaagcaccgacggcgacagcggcagcgaggacctggtgtacaccatcgagcagcccagcaacggcagagtggtgctgagaggcgcccccggcaccgaggtgagaagcttcacccaggcccagctggacggcggcctggtgctgttcagccacagaggcaccctggacggcggcttcagattcagactgagcgacggcgagcacaccagccccggccacttcttcagagtgaccgcccagaagcaggtgctgctgagcctgaagggcagccagaccctgaccgtgtgccccggcagcgtgcagcccctgagcagccagaccctgagagccagcagcagcgccggcaccgacccccagctgctgctgtacagagtggtgagaggcccccagctgggcagactgttccacgcccagcaggacagcaccggcgaggccctggtgaacttcacccaggccgaggtgtacgccggcaacatcctgtacgagcacgagatgccccccgagcccttctgggaggcccacgacaccctggagctgcagctgagcagcccccccgccagagacgtggccgccaccctggccgtggccgtgagcttcgaggccgcctgcccccagagacccagccacctgtggaagaacaagggcctgtgggtgcccgagggccagagagccagaatcaccgtggccgccctggacgccagcaacctgctggccagcgtgcccagcccccagagaagcgagcacgacgtgctgttccaggtgacccagttccccagcagaggccagctgctggtgagcgaggagcccctgcacgccggccagccccacttcctgcagagccagctggccgccggccagctggtgtacgcccacggcggcggcggcacccagcaggacggcttccacttcagagcccacctgcagggccccgccggcgccagcgtggccggcccccagaccagcgaggccttcgccatcaccgtgagagacgtgaacgagagacccccccagccccaggccagcgtgcccctgagactgaccagaggcagcagagcccccatcagcagagcccagctgagcgtggtggaccccgacagcgcccccggcgagatcgagtacgaggtgcagagagccccccacaacggcttcctgagcctggtgggcggcggcctgggccccgtgaccagattcacccaggccgacgtggacagcggcagactggccttcgtggccaacggcagcagcgtggccggcatcttccagctgagcatgagcgacggcgccagcccccccctgcccatgagcctggccgtggacatcctgcccagcgccatcgaggtgcagctgagagcccccctggaggtgccccaggccctgggcagaagcagcctgagccagcagcagctgagagtggtgagcgacagagaggagcccgaggccgcctacagactgatccagggcccccagtacggccacctgctggtgggcggcagacccaccagcgccttcagccagttccagatcgaccagggcgaggtggtgttcgccttcaccaacttcagcagcagccacgaccacttcagagtgctggccctggccagaggcgtgaacgccagcgccgtggtgaacgtgaccgtgagagccctgctgcacgtgtgggccggcggcccctggccccagggcgccaccctgagactggaccccaccgtgctggacgccggcgagctggccaacagaaccggcagcgtgcccagattcagactgctggagggccccagacacggcagagtggtgagagtgcccagagccagaaccgagcccggcggcagccagctggtggagcagttcacccagcaggacctggaggacggcagactgggcctggaggtgggcagacccgagggcagagcccccggccccgccggcgacagcctgaccctggagctgtgggcccagggcgtgccccccgccgtggccagcctggacttcgccaccgagccctacaacgccgccagaccctacagcgtggccctgctgagcgtgcccgaggccgccagaaccgaggccggcaagcccgagagcagcacccccaccggcgagcccggccccatggccagcagccccgagcccgccgtggccaagggcggcttcctgagcttcctggaggccaacatgttcagcgtgatcatccccatgtgcctggtgctgctgctgctggccctgatcctgcccctgctgttctacctgagaaagagaaacaagaccggcaagcacgacgtgcaggtgctgaccgccaagcccagaaacggcctggccggcgacaccgagaccttcagaaaggtggagcccggccaggccatccccctgaccgccgtgcccggccagggccccccccccggcggccagcccgaccccgagctgctgcagttctgcagaacccccaaccccgccctgaagaacggccagtactgggtgtag

SEQ ID NO: 76666 - DNA, 984 bp, synthetic construct
  misc_feature 1..984: note = Description of Artificial Sequence: Synthetic coding sequence
  source 1..984: mol_type = other DNA
gagcagcacagagaggagcccgaggccgcctacagactgatccagggcccccagtacggccacctgctggtgggcggcagacccaccagcgccttcagccagttccagatcgaccagggcgaggtggtgttcgccttcaccaacttcagcagcagccacgaccacttcagagtgctggccctggccagaggcgtgaacgccagcgccgtggtgaacgtgaccgtgagagccctgctgcacgtgtgggccggcggcccctggccccagggcgccaccctgagactggaccccaccgtgctggacgccggcgagctggccaacagaaccggcagcgtgcccagattcagactgctggagggccccagacacggcagagtggtgagagtgcccagagccagaaccgagcccggcggcagccagctggtggagcagttcacccagcaggacctggaggacggcagactgggcctggaggtgggcagacccgagggcagagcccccggccccgccggcgacagcctgaccctggagctgtgggcccagggcgtgccccccgccgtggccagcctggacttcgccaccgagccctacaacgccgccagaccctacagcgtggccctgctgagcgtgcccgaggccgccagaaccgaggccggcaagcccgagagcagcacccccaccggcgagcccggccccatggccagcagccccgagcccgccgtggccaagggcggcttcctgagcttcctggaggccaacatgttcagcgtgatcatccccatgtgcctggtgctgctgctgctggccctgatcctgcccctgctgttctacctgagaaagagaaacaagaccggcaagcacgacgtgcaggtgctgaccgccaagcccagaaacggcctggccggcgacaccgagaccttcagaaaggtggagcccggccaggccatccccctgaccgccgtgcccggccagggccccccctag

SEQ ID NO: 76667 - DNA, 2409 bp, synthetic construct
  misc_feature 1..2409: note = Description of Artificial Sequence: Synthetic coding sequence
  source 1..2409: mol_type = other DNA
atggccgccagaggcagaagagcctggctgagcgtgctgctgggcctggtgctgggcttcgtgctggccagcagactggtgctgcccagagccagcgagctgaagagagccggccccagaagaagagccagccccgagggctgcagaagcggccaggccgccgccagccaggccggcggcgccagaggcgacgccagaggcgcccagctgtggccccccggcagcgaccccgacggcggccccagagacagaaacttcctgttcgtgggcgtgatgaccgcccagaagtacctgcagaccagagccgtggccgcctacagaacctggagcaagaccatccccggcaaggtgcagttcttcagcagcgagggcagcgacaccagcgtgcccatccccgtggtgcccctgagaggcgtggacgacagctaccccccccagaagaagagcttcatgatgctgaagtacatgcacgaccactacctggacaagtacgagtggttcatgagagccgacgacgacgtgtacatcaagggcgacagactggagaacttcctgagaagcctgaacagcagcgagcccctgttcctgggccagaccggcctgggcaccaccgaggagatgggcaagctggccctggagcccggcgagaacttctgcatgggcggccccggcgtgatcatgagcagagaggtgctgagaagaatggtgccccacatcggcaagtgcctgagagagatgtacaccacccacgaggacgtggaggtgggcagatgcgtgagaagattcgccggcgtgcagtgcgtgtggagctacgagatgcagcagctgttctacgagaactacgagcagaacaagaagggctacatcagagacctgcacaacagcaagatccaccaggccatcaccctgcaccccaacaagaaccccccctaccagtacagactgcacagctacatgctgagcagaaagatcagcgagctgagacacagaaccatccagctgcacagagagatcgtgctgatgagcaagtacagcaacaccgagatccacaaggaggacctgcagctgggcatcccccccagcttcatgagattccagcccagacagagagaggagatcctggagtgggagttcctgaccggcaagtacctgtacagcgccgtggacggccagccccccagaagaggcatggacagcgcccagagagaggccctggacgacatcgtgatgcaggtgatggagatgatcaacgccaacgccaagaccagaggcagaatcatcgacttcaaggagatccagtacggctacagaagagtgaaccccatgtacggcgccgagtacatcctggacctgctgctgctgtacaagaagcacaagggcaagaagatgaccgtgcccgtgagaagacacgcctacctgcagcagaccttcagcaagatccagttcgtggagcacgaggagctggacgcccaggagctggccaagagaatcaaccaggagagcggcagcctgagcttcctgagcaacagcctgaagaagctggtgcccttccagctgcccggcagcaagagcgagcacaaggagcccaaggacaagaagatcaacatcctgatccccctgagcggcagattcgacatgttcgtgagattcatgggcaacttcgagaagacctgcctgatccccaaccagaacgtgaagctggtggtgctgctgttcaacagcgacagcaaccccgacaaggccaagcaggtggagctgatgagagactacagaatcaagtaccccaaggccgacatgcagatcctgcccgtgagcggcgagttcagcagagccctggccctggaggtgggcagcagccagttcaacaacgagagcctgctgttcttctgcgacgtggacctggtgttcaccaccgagttcctgcagagatgcagagccaacaccgtgctgggccagcagatctacttccccatcatcttcagccagtacgaccccaagatcgtgtacagcggcaaggtgcccagcgacaaccacttcgccttcacccagaagaccggcttctggagaaactacggcttcggcatcacctgcatctacaagggcgacctggtgagagtgggcggcttcgacgtgagcatccagggctggggcctggaggacgtggacctgttcaacaaggtggtgcaggccggcctgaagaccttcagaagccaggaggtgggcgtggtgcacgtgcaccaccccgtgttctgcgaccccaacctggaccccaagcagtacaagatgtgcctgggcagcaaggccagcacctacggcagcacccagcagctggccgagatgtggctggagaagaacgaccccagctacagcaagagcagcaacaacaacggcagcgtgagaaccgcctag

SEQ ID NO: 76668 - DNA, 2649 bp, synthetic construct
  misc_feature 1..2649: note = Description of Artificial Sequence: Synthetic coding sequence
  source 1..2649: mol_type = other DNA
atggccgtgagaagcagaagaccctggatgagcgtggccctgggcctggtgctgggcttcaccgccgccagctggctgatcgcccccagagtggccgagctgagcgagagaaagagaagaggcagcagcctgtgcagctactacggcagaagcgccgccggccccagagccggcgcccagcagcccctgccccagccccagagcagacccagacaggagcagagccccccccccgccagacaggacctgcagggcccccccctgcccgaggccgcccccggcatcaccagcttcagaagcagcccctggcagcagcccccccccctgcagcagagaagaagaggcagagagcccgagggcgccaccggcctgcccggcgcccccgccgccgagggcgagcccgaggaggaggacggcggcgccgccggccagagaagagacggcagacccggcagcagccacaacggcagcggcgacggcggcgccgccgcccccagcgccagacccagagacttcctgtacgtgggcgtgatgaccgcccagaagtacctgggcagcagagccctggccgcccagagaacctgggccagattcatccccggcagagtggagttcttcagcagccagcagccccccaacgccggccagccccccccccccctgcccgtgatcgccctgcccggcgtggacgacagctaccccccccagaagaagagcttcatgatgatcaagtacatgcacgaccactacctggacaagtacgagtggttcatgagagccgacgacgacgtgtacatcaagggcgacaagctggaggagttcctgagaagcctgaacagcagcaagcccctgtacctgggccagaccggcctgggcaacatcgaggagctgggcaagctgggcctggagcccggcgagaacttctgcatgggcggccccggcatgatcttcagcagagaggtgctgagaagaatggtgccccacatcggcgagtgcctgagagagatgtacaccacccacgaggacgtggaggtgggcagatgcgtgagaagattcggcggcacccagtgcgtgtggagctacgagatgcagcagctgttccacgagaactacgagcacaacagaaagggctacatccaggacctgcacaacagcaagatccacgccgccatcaccctgcaccccaacaagagacccgcctaccagtacagactgcacaactacatgctgagcagaaagatcagcgagctgagatacagaaccatccagctgcacagagagagcgccctgatgagcaagctgagcaacaccgaggtgagcaaggaggaccagcagctgggcgtgatccccagcttcaaccacttccagcccagagagagaaacgaggtgatcgagtgggagttcctgaccggcaagctgctgtacagcgccgccgagaaccagccccccagacagagcctgagcagcatcctgagaaccgccctggacgacaccgtgctgcaggtgatggagatgatcaacgagaacgccaagagcagaggcagactgatcgacttcaaggagatccagtacggctacagaagagtgaaccccatgcacggcgtggagtacatcctggacctgctgctgctgtacaagagacacaagggcagaaagctgaccgtgcccgtgagaagacacgcctacctgcagcagctgttcagcaagcccttcttcagagagaccgaggagctggacgtgaacagcctggtggagagcatcaacagcgagacccagagcttcagcttcatcagcaacagcctgaagatcctgagcagcttccagggcgccaaggagatgggcggccacaacgagaagaaggtgcacatcctggtgcccctgatcggcagatacgacatcttcctgagattcatggagaacttcgagaacatgtgcctgatccccaagcagaacgtgaagctggtgatcatcctgttcagcagagacagcggccaggacagcagcaagcacatcgagctgatcaagggctaccagaacaagtaccccaaggccgagatgaccctgatccccatgaagggcgagttcagcagaggcctgggcctggagatggccagcgcccagttcgacaacgacaccctgctgctgttctgcgacgtggacctgatcttcagagaggacttcctgcagagatgcagagacaacaccatccagggccagcaggtgtactaccccatcatcttcagccagtacgaccccaaggtgaccaacggcggcaacccccccaccgacgactacttcatcttcagcaagaagaccggcttctggagagactacggctacggcatcacctgcatctacaagagcgacctgctgggcgccggcggcttcgacaccagcatccagggctggggcctggaggacgtggacctgtacaacaaggtgatcctgagcggcctgagacccttcagaagccaggaggtgggcgtggtgcacatcttccaccccgtgcactgcgaccccaacctggaccccaagcagtacaagatgtgcctgggcagcaaggccagcaccttcgccagcaccatgcagctggccgagctgtggctggagaagcacctgggcgtgagatacaacagaaccctgagctag

SEQ ID NO: 76669 - DNA, 2868 bp, synthetic construct
  misc_feature 1..2868: note = Description of Artificial Sequence: Synthetic coding sequence
  source 1..2868: mol_type = other DNA
atgcccagcctgcccgccccccccgcccccctgctgctgctgggcctgctgctgctgggcagcagacccgccagaggcgccggccccgagccccccgtgctgcccatcagaagcgagaaggagcccctgcccgtgagaggcgccgccggctgcaccttcggcggcaaggtgtacgccctggacgagacctggcaccccgacctgggcgagcccttcggcgtgatgagatgcgtgctgtgcgcctgcgaggccccccagtggggcagaagaaccagaggccccggcagagtgagctgcaagaacatcaagcccgagtgccccacccccgcctgcggccagcccagacagctgcccggccactgctgccagacctgcccccaggagagaagcagcagcgagagacagcccagcggcctgagcttcgagtaccccagagaccccgagcacagaagctacagcgacagaggcgagcccggcgccgaggagagagccagaggcgacggccacaccgacttcgtggccctgctgaccggccccagaagccaggccgtggccagagccagagtgagcctgctgagaagcagcctgagattcagcatcagctacagaagactggacagacccaccagaatcagattcagcgacagcaacggcagcgtgctgttcgagcaccccgccgcccccacccaggacggcctggtgtgcggcgtgtggagagccgtgcccagactgagcctgagactgctgagagccgagcagctgcacgtggccctggtgaccctgacccaccccagcggcgaggtgtggggccccctgatcagacacagagccctggccgccgagaccttcagcgccatcctgaccctggagggccccccccagcagggcgtgggcggcatcaccctgctgaccctgagcgacaccgaggacagcctgcacttcctgctgctgttcagaggcctgctggagcccagaagcggcggcctgacccaggtgcccctgagactgcagatcctgcaccagggccagctgctgagagagctgcaggccaacgtgagcgcccaggagcccggcttcgccgaggtgctgcccaacctgaccgtgcaggagatggactggctggtgctgggcgagctgcagatggccctggagtgggccggcagacccggcctgagaatcagcggccacatcgccgccagaaagagctgcgacgtgctgcagagcgtgctgtgcggcgccgacgccctgatccccgtgcagaccggcgccgccggcagcgccagcctgaccctgctgggcaacggcagcctgatctaccaggtgcaggtggtgggcaccagcagcgaggtggtggccatgaccctggagaccaagccccagagaagagaccagagaaccgtgctgtgccacatggccggcctgcagcccggcggccacaccgccgtgggcatctgccccggcctgggcgccagaggcgcccacatgctgctgcagaacgagctgttcctgaacgtgggcaccaaggacttccccgacggcgagctgagaggccacgtggccgccctgccctactgcggccacagcgccagacacgacaccctgcccgtgcccctggccggcgccctggtgctgccccccgtgaagagccaggccgccggccacgcctggctgagcctggacacccactgccacctgcactacgaggtgctgctggccggcctgggcggcagcgagcagggcaccgtgaccgcccacctgctgggcccccccggcacccccggccccagaagactgctgaagggcttctacggcagcgaggcccagggcgtggtgaaggacctggagcccgagctgctgagacacctggccaagggcatggccagcctgatgatcaccaccaagggcagccccagaggcgagctgagaggccaggtgcacatcgccaaccagtgcgaggtgggcggcctgagactggaggccgccggcgccgagggcgtgagagccctgggcgcccccgacaccgccagcgccgccccccccgtggtgcccggcctgcccgccctggcccccgccaagcccggcggccccggcagacccagagaccccaacacctgcttcttcgagggccagcagagaccccacggcgccagatgggcccccaactacgaccccctgtgcagcctgtgcacctgccagagaagaaccgtgatctgcgaccccgtggtgtgccccccccccagctgcccccaccccgtgcaggcccccgaccagtgctgccccgtgtgccccgagaagcaggacgtgagagacctgcccggcctgcccagaagcagagaccccggcgagggctgctacttcgacggcgacagaagctggagagccgccggcaccagatggcaccccgtggtgccccccttcggcctgatcaagtgcgccgtgtgcacctgcaagggcggcaccggcgaggtgcactgcgagaaggtgcagtgccccagactggcctgcgcccagcccgtgagagtgaaccccaccgactgctgcaagcagtgccccgtgggcagcggcgcccacccccagctgggcgaccccatgcaggccgacggccccagaggctgcagattcgccggccagtggttccccgagagccagagctggcaccccagcgtgccccccttcggcgagatgagctgcatcacctgcagatgcggcgccggcgtgccccactgcgagagagacgactgcagcctgcccctgagctgcggcagcggcaaggagagcagatgctgcagcagatgcaccgcccacagaagacccgcccccgagaccagaaccgaccccgagctggagaaggaggccgagggcagctag

SEQ ID NO: 76670 - DNA, 285 bp, synthetic construct
  misc_feature 1..285: note = Description of Artificial Sequence: Synthetic coding sequence
  source 1..285: mol_type = other DNA
atgcccagcctgcccgccccccccgcccccctgctgctgctgggcctgctgctgctgggcagcagacccgccagaggcgccggccccgagccccccgtgctgcccatcagaagcgagaaggagcccctgcccgtgagaggcgccgccggctgcaccttcggcggcaaggtgtacgccctggacgagacctggcaccccgacctgggcgagcccttcggcgtgatgagatgcgtgctgtgcgcctgcgaggccaccggcaccctgagacccagagagatgaagtag

SEQ ID NO: 76671 - DNA, 1512 bp, synthetic construct
  misc_feature 1..1512: note = Description of Artificial Sequence: Synthetic coding sequence
  source 1..1512: mol_type = other DNA
ggcgagcacctgagccagaagggcccccacgtgagaccctgcagaaccaaccccggcagcctggaggcccccgacagcacccccggcgccgccaccgccagaaccagcggccagtgcctgagccccggcgagtggggcagcggcagcagatgccacctgagctggcccctggccatcgcccaccacaccctgctgtgcccccaggagcccggcttcgccgaggtgctgcccaacctgaccgtgcaggagatggactggctggtgctgggcgagctgcagatggccctggagtgggccggcagacccggcctgagaatcagcggccacatcgccgccagaaagagctgcgacgtgctgcagagcgtgctgtgcggcgccgacgccctgatccccgtgcagaccggcgccgccggcagcgccagcctgaccctgctgggcaacggcagcctgatctaccaggtgcaggtggtgggcaccagcagcgaggtggtggccatgaccctggagaccaagccccagagaagagaccagagaaccgtgctgtgccacatggccggcctgcagcccggcggccacaccgccgtgggcatctgccccggcctgggcgccagaggcgcccacatgctgctgcagaacgagctgttcctgaacgtgggcaccaaggacttccccgacggcgagctgagaggccacgtggccgccctgccctactgcggccacagcgccagacacgacaccctgcccgtgcccctggccggcgccctggtgctgccccccgtgaagagccaggccgccggccacgcctggctgagcctggacacccactgccacctgcactacgaggtgctgctggccggcctgggcggcagcgagcagggcaccgtgaccgcccacctgctgggcccccccggcacccccggccccagaagactgctgaagggcttctacggcagcgaggcccagggcgtggtgaaggacctggagcccgagctgctgagacacctggccaagggcatggccagcctgatgatcaccaccaagggcagccccagaggcgagctgagaggccaggtgcacatcgccaaccagtgcgaggtgggcggcctgagactggaggccgccggcgccgagggcgtgagagccctgggcgcccccgacaccgccagcgccgccccccccgtggtgcccggcctgcccgccctggcccccgccaagcccggcggccccggcagacccagagaccccaacacctgcttcttcgagggccagcagagaccccacggcgccagatgggcccccaactacgaccccctgtgcagcctgtgcacctgccagagaagaaccgtgatctgcgaccccgtggtgtgccccccccccagctgcccccaccccgtgcaggcccccgaccagtgctgccccgtgtgccccgagaagcaggacgtgagagacctgcccggcctgcccagaagcagagaccccggcgagggcggccactggagaggcgccctgtag

SEQ ID NO: 76672 - DNA, 2748 bp, synthetic construct
  misc_feature 1..2748: note = Description of Artificial Sequence: Synthetic coding sequence
  source 1..2748: mol_type = other DNA
atgcccagcctgcccgccccccccgcccccctgctgctgctgggcctgctgctgctgggcagcagacccgccagaggcgccggccccgagccccccgtgctgcccatcagaagcgagaaggagcccctgcccgtgagaggcgccgccggctgcaccttcggcggcaaggtgtacgccctggacgagacctggcaccccgacctgggcgagcccttcggcgtgatgagatgcgtgctgtgcgcctgcgaggccccccagtggggcagaagaaccagaggccccggcagagtgagctgcaagaacatcaagcccgagtgccccacccccgcctgcggccagcccagacagctgcccggccactgctgccagacctgcccccaggagagaagcagcagcgagagacagcccagcggcctgagcttcgagtaccccagagaccccgagcacagaagctacagcgacagaggcgagcccggcgccgaggagagagccagaggcgacggccacaccgacttcgtggccctgctgaccggccccagaagccaggccgtggccagagccagagtgagcctgctgagaagcagcctgagattcagcatcagctacagaagactggacagacccaccagaatcagattcagcgacagcaacggcagcgtgctgttcgagcaccccgccgcccccacccaggacggcctggtgtgcggcgtgtggagagccgtgcccagactgagcctgagactgctgagagccgagcagctgcacgtggccctggtgaccctgacccaccccagcggcgaggtgtggggccccctgatcagacacagagccctggccgccgagaccttcagcgccatcctgaccctggagggccccccccagcagggcgtgggcggcatcaccctgctgaccctgagcgacaccgaggacagcctgcacttcctgctgctgttcagaggcctgctggagcccagaagcggcggcctgacccaggtgcccctgagactgcagatcctgcaccagggccagctgctgagagagctgcaggccaacgtgagcgcccaggagcccggcttcgccgaggtgctgcccaacctgaccgtgcaggagatggactggctggtgctgggcgagctgcagatggccctggagtgggccggcagacccggcctgagaatcagcggccacatcgccgccagaaagagctgcgacgtgctgcagagcgtgctgtgcggcgccgacgccctgatccccgtgcagaccggcgccgccggcagcgccagcctgaccctgctgggcaacggcagcctgatctaccaggccgtgggcatctgccccggcctgggcgccagaggcgcccacatgctgctgcagaacgagctgttcctgaacgtgggcaccaaggacttccccgacggcgagctgagaggccacgtggccgccctgccctactgcggccacagcgccagacacgacaccctgcccgtgcccctggccggcgccctggtgctgccccccgtgaagagccaggccgccggccacgcctggctgagcctggacacccactgccacctgcactacgaggtgctgctggccggcctgggcggcagcgagcagggcaccgtgaccgcccacctgctgggcccccccggcacccccggccccagaagactgctgaagggcttctacggcagcgaggcccagggcgtggtgaaggacctggagcccgagctgctgagacacctggccaagggcatggccagcctgatgatcaccaccaagggcagccccagaggcgagctgagaggccaggtgcacatcgccaaccagtgcgaggtgggcggcctgagactggaggccgccggcgccgagggcgtgagagccctgggcgcccccgacaccgccagcgccgccccccccgtggtgcccggcctgcccgccctggcccccgccaagcccggcggccccggcagacccagagaccccaacacctgcttcttcgagggccagcagagaccccacggcgccagatgggcccccaactacgaccccctgtgcagcctgtgcacctgccagagaagaaccgtgatctgcgaccccgtggtgtgccccccccccagctgcccccaccccgtgcaggcccccgaccagtgctgccccgtgtgccccgagaagcaggacgtgagagacctgcccggcctgcccagaagcagagaccccggcgagggctgctacttcgacggcgacagaagctggagagccgccggcaccagatggcaccccgtggtgccccccttcggcctgatcaagtgcgccgtgtgcacctgcaagggcggcaccggcgaggtgcactgcgagaaggtgcagtgccccagactggcctgcgcccagcccgtgagagtgaaccccaccgactgctgcaagcagtgccccgtgggcagcggcgcccacccccagctgggcgaccccatgcaggccgacggccccagaggctgcagattcgccggccagtggttccccgagagccagagctggcaccccagcgtgccccccttcggcgagatgagctgcatcacctgcagatgcggcgccggcgtgccccactgcgagagagacgactgcagcctgcccctgagctgcggcagcggcaaggagagcagatgctgcagcagatgcaccgcccacagaagacccgcccccgagaccagaaccgaccccgagctggagaaggaggccgagggcagctag

SEQ ID NO: 76673 - DNA, 1494 bp, synthetic construct
  misc_feature 1..1494: note = Description of Artificial Sequence: Synthetic coding sequence
  source 1..1494: mol_type = other DNA
atggactggctggtgctgggcgagctgcagatggccctggagtgggccggcagacccggcctgagaatcagcggccacatcgccgccagaaagagctgcgacgtgctgcagagcgtgctgtgcggcgccgacgccctgatccccgtgcagaccggcgccgccggcagcgccagcctgaccctgctgggcaacggcagcctgatctaccaggtgcaggtggtgggcaccagcagcgaggtggtggccatgaccctggagaccaagccccagagaagagaccagagaaccgtgctgtgccacatggccggcctgcagcccggcggccacaccgccgtgggcatctgccccggcctgggcgccagaggcgcccacatgctgctgcagaacgagctgttcctgaacgtgggcaccaaggacttccccgacggcgagctgagaggccacgtggccgccctgccctactgcggccacagcgccagacacgacaccctgcccgtgcccctggccggcgccctggtgctgccccccgtgaagagccaggccgccggccacgcctggctgagcctggacacccactgccacctgcactacgaggtgctgctggccggcctgggcggcagcgagcagggcaccgtgaccgcccacctgctgggcccccccggcacccccggccccagaagactgctgaagggcttctacggcagcgaggcccagggcgtggtgaaggacctggagcccgagctgctgagacacctggccaagggcatggccagcctgatgatcaccaccaagggcagccccagaggcgagctgagaggccagagaagaaccgtgatctgcgaccccgtggtgtgccccccccccagctgcccccaccccgtgcaggcccccgaccagtgctgccccgtgtgccccgagaagcaggacgtgagagacctgcccggcctgcccagaagcagagaccccggcgagggctgctacttcgacggcgacagaagctggagagccgccggcaccagatggcaccccgtggtgccccccttcggcctgatcaagtgcgccgtgtgcacctgcaagggcggcaccggcgaggtgcactgcgagaaggtgcagtgccccagactggcctgcgcccagcccgtgagagtgaaccccaccgactgctgcaagcagtgccccgtgggcagcggcgcccacccccagctgggcgaccccatgcaggccgacggccccagaggctgcagattcgccggccagtggttccccgagagccagagctggcaccccagcgtgccccccttcggcgagatgagctgcatcacctgcagatgcggcgccggcgtgccccactgcgagagagacgactgcagcctgcccctgagctgcggcagcggcaaggagagcagatgctgcagcagatgcaccgcccacagaagacccgcccccgagaccagaaccgaccccgagctggagaaggaggccgagggcagctag

SEQ ID NO: 76674 - DNA, 3126 bp, synthetic construct
  misc_feature 1..3126: note = Description of Artificial Sequence: Synthetic coding sequence
  source 1..3126: mol_type = other DNA
atggagaacatgttcctgcagagcagcatgctgacctgcatcttcctgctgatcagcggcagctgcgagctgtgcgccgaggagaacttcagcagaagctacccctgcgacgagaagaagcagaacgacagcgtgatcgccgagtgcagcaacagaagactgcaggaggtgccccagaccgtgggcaagtacgtgaccgagctggacctgagcgacaacttcatcacccacatcaccaacgagagcttccagggcctgcagaacctgaccaagatcaacctgaaccacaaccccaacgtgcagcaccagaacggcaaccccggcatccagagcaacggcctgaacatcaccgacggcgccttcctgaacctgaagaacctgagagagctgctgctggaggacaaccagctgccccagatccccagcggcctgcccgagagcctgaccgagctgagcctgatccagaacaacatctacaacatcaccaaggagggcatcagcagactgatcaacctgaagaacctgtacctggcctggaactgctacttcaacaaggtgtgcgagaagaccaacatcgaggacggcgtgttcgagaccctgaccaacctggagctgctgagcctgagcttcaacagcctgagccacgtgccccccaagctgcccagcagcctgagaaagctgttcctgagcaacacccagatcaagtacatcagcgaggaggacttcaagggcctgatcaacctgaccctgctggacctgagcggcaactgccccagatgcttcaacgcccccttcccctgcgtgccctgcgacggcggcgccagcatcaacatcgacagattcgccttccagaacctgacccagctgagatacctgaacctgagcagcaccagcctgagaaagatcaacgccgcctggttcaagaacatgccccacctgaaggtgctggacctggagttcaactacctggtgggcgagatcgccagcggcgccttcctgaccatgctgcccagactggagatcctggacctgagcttcaactacatcaagggcagctacccccagcacatcaacatcagcagaaacttcagcaagctgctgagcctgagagccctgcacctgagaggctacgtgttccaggagctgagagaggacgacttccagcccctgatgcagctgcccaacctgagcaccatcaacctgggcatcaacttcatcaagcagatcgacttcaagctgttccagaacttcagcaacctggagatcatctacctgagcgagaacagaatcagccccctggtgaaggacaccagacagagctacgccaacagcagcagcttccagagacacatcagaaagagaagaagcaccgacttcgagttcgacccccacagcaacttctaccacttcaccagacccctgatcaagccccagtgcgccgcctacggcaaggccctggacctgagcctgaacagcatcttcttcatcggccccaaccagttcgagaacctgcccgacatcgcctgcctgaacctgagcgccaacagcaacgcccaggtgctgagcggcaccgagttcagcgccatcccccacgtgaagtacctggacctgaccaacaacagactggacttcgacaacgccagcgccctgaccgagctgagcgacctggaggtgctggacctgagctacaacagccactacttcagaatcgccggcgtgacccaccacctggagttcatccagaacttcaccaacctgaaggtgctgaacctgagccacaacaacatctacaccctgaccgacaagtacaacctggagagcaagagcctggtggagctggtgttcagcggcaacagactggacatcctgtggaacgacgacgacaacagatacatcagcatcttcaagggcctgaagaacctgaccagactggacctgagcctgaacagactgaagcacatccccaacgaggccttcctgaacctgcccgccagcctgaccgagctgcacatcaacgacaacatgctgaagttcttcaactggaccctgctgcagcagttccccagactggagctgctggacctgagaggcaacaagctgctgttcctgaccgacagcctgagcgacttcaccagcagcctgagaaccctgctgctgagccacaacagaatcagccacctgcccagcggcttcctgagcgaggtgagcagcctgaagcacctggacctgagcagcaacctgctgaagaccatcaacaagagcgccctggagaccaagaccaccaccaagctgagcatgctggagctgcacggcaaccccttcgagtgcacctgcgacatcggcgacttcagaagatggatggacgagcacctgaacgtgaagatccccagactggtggacgtgatctgcgccagccccggcgaccagagaggcaagagcatcgtgagcctggagctgaccacctgcgtgagcgacgtgaccgccgtgatcctgttcttcttcaccttcttcatcaccaccatggtgatgctggccgccctggcccaccacctgttctactgggacgtgtggttcatctacaacgtgtgcctggccaaggtgaagggctacagaagcctgagcaccagccagaccttctacgacgcctacatcagctacgacaccaaggacgccagcgtgaccgactgggtgatcaacgagctgagataccacctggaggagagcagagacaagaacgtgctgctgtgcctggaggagagagactgggaccccggcctggccatcatcgacaacctgatgcagagcatcaaccagagcaagaagaccgtgttcgtgctgaccaagaagtacgccaagagctggaacttcaagaccgccttctacctggccctgcagagactgatggacgagaacatggacgtgatcatcttcatcctgctggagcccgtgctgcagcacagccagtacctgagactgagacagagaatctgcaagagcagcatcctgcagtggcccgacaaccccaaggccgagggcctgttctggcagaccctgagaaacgtggtgctgaccgagaacgacagcagatacaacaacatgtacgtggacagcatcaagcagtactag

SEQ ID NO: 76675 - DNA, 1377 bp, synthetic construct
  misc_feature 1..1377: note = Description of Artificial Sequence: Synthetic coding sequence
  source 1..1377: mol_type = other DNA
atgagaaagaagtggaagatgggcggcatgaagtacatcttcagcctgctgttcttcctgctgctggagggcggcaagaccgagcaggtgaagcacagcgagacctactgcatgttccaggacaagaagtacagagtgggcgagagatggcacccctacctggagccctacggcctggtgtactgcgtgaactgcatctgcagcgagaacggcaacgtgctgtgcagcagagtgagatgccccaacgtgcactgcctgagccccgtgcacatcccccacctgtgctgccccagatgccccgaggacagcctgccccccgtgaacaacaaggtgaccagcaagagctgcgagtacaacggcaccacctaccagcacggcgagctgttcgtggccgagggcctgttccagaacagacagcccaaccagtgcacccagtgcagctgcagcgagggcaacgtgtactgcggcctgaagacctgccccaagctgacctgcgccttccccgtgagcgtgcccgacagctgctgcagagtgtgcagaggcgacggcgagctgagctgggagcacagcgacggcgacatcttcagacagcccgccaacagagaggccagacacagctaccacagaagccactacgaccccccccccagcagacaggccggcggcctgagcagattccccggcgccagaagccacagaggcgccctgatggacagccagcaggccagcggcaccatcgtgcagatcgtgatcaacaacaagcacaagcacggccaggtgtgcgtgagcaacggcaagacctacagccacggcgagagctggcaccccaacctgagagccttcggcatcgtggagtgcgtgctgtgcacctgcaacgtgaccaagcaggagtgcaagaagatccactgccccaacagatacccctgcaagtacccccagaagatcgacggcaagtgctgcaaggtgtgccccggcaagaaggccaaggaggagctgcccggccagagcttcgacaacaagggctacttctgcggcgaggagaccatgcccgtgtacgagagcgtgttcatggaggacggcgagaccaccagaaagatcgccctggagaccgagagacccccccaggtggaggtgcacgtgtggaccatcagaaagggcatcctgcagcacttccacatcgagaagatcagcaagagaatgttcgaggagctgccccacttcaagctggtgaccagaaccaccctgagccagtggaagatcttcaccgagggcgaggcccagatcagccagatgtgcagcagcagagtgtgcagaaccgagctggaggacctggtgaaggtgctgtacctggagagaagcgagaagggccactgctag

SEQ ID NO: 76676 - DNA, 1353 bp, synthetic construct
  misc_feature 1..1353: note = Description of Artificial Sequence: Synthetic coding sequence
  source 1..1353: mol_type = other DNA
atgggcggcatgaagtacatcttcagcctgctgttcttcctgctgctggagggcggcaagaccgagcaggtgaagcacagcgagacctactgcatgttccaggacaagaagtacagagtgggcgagagatggcacccctacctggagccctacggcctggtgtactgcgtgaactgcatctgcagcgagaacggcaacgtgctgtgcagcagagtgagatgccccaacgtgcactgcctgagccccgtgcacatcccccacctgtgctgccccagatgccccgacagcctgccccccgtgaacaacaaggtgaccagcaagagctgcgagtacaacggcaccacctaccagcacggcgagctgttcgtggccgagggcctgttccagaacagacagcccaaccagtgcacccagtgcagctgcagcgagggcaacgtgtactgcggcctgaagacctgccccaagctgacctgcgccttccccgtgagcgtgcccgacagctgctgcagagtgtgcagaggcgacggcgagctgagctgggagcacagcgacggcgacatcttcagacagcccgccaacagagaggccagacacagctaccacagaagccactacgaccccccccccagcagacaggccggcggcctgagcagattccccggcgccagaagccacagaggcgccctgatggacagccagcaggccagcggcaccatcgtgcagatcgtgatcaacaacaagcacaagcacggccaggtgtgcgtgagcaacggcaagacctacagccacggcgagagctggcaccccaacctgagagccttcggcatcgtggagtgcgtgctgtgcacctgcaacgtgaccaagcaggagtgcaagaagatccactgccccaacagatacccctgcaagtacccccagaagatcgacggcaagtgctgcaaggtgtgccccggcaagaaggccaaggagctgcccggccagagcttcgacaacaagggctacttctgcggcgaggagaccatgcccgtgtacgagagcgtgttcatggaggacggcgagaccaccagaaagatcgccctggagaccgagagacccccccaggtggaggtgcacgtgtggaccatcagaaagggcatcctgcagcacttccacatcgagaagatcagcaagagaatgttcgaggagctgccccacttcaagctggtgaccagaaccaccctgagccagtggaagatcttcaccgagggcgaggcccagatcagccagatgtgcagcagcagagtgtgcagaaccgagctggaggacctggtgaaggtgctgtacctggagagaagcgagaagggccactgctag

SEQ ID NO: 76677 - DNA, 1371 bp, synthetic construct
  misc_feature 1..1371: note = Description of Artificial Sequence: Synthetic coding sequence
  source 1..1371: mol_type = other DNA
atgagaaagaagtggaagatgggcggcatgaagtacatcttcagcctgctgttcttcctgctgctggagggcggcaagaccgagcaggtgaagcacagcgagacctactgcatgttccaggacaagaagtacagagtgggcgagagatggcacccctacctggagccctacggcctggtgtactgcgtgaactgcatctgcagcgagaacggcaacgtgctgtgcagcagagtgagatgccccaacgtgcactgcctgagccccgtgcacatcccccacctgtgctgccccagatgccccgacagcctgccccccgtgaacaacaaggtgaccagcaagagctgcgagtacaacggcaccacctaccagcacggcgagctgttcgtggccgagggcctgttccagaacagacagcccaaccagtgcacccagtgcagctgcagcgagggcaacgtgtactgcggcctgaagacctgccccaagctgacctgcgccttccccgtgagcgtgcccgacagctgctgcagagtgtgcagaggcgacggcgagctgagctgggagcacagcgacggcgacatcttcagacagcccgccaacagagaggccagacacagctaccacagaagccactacgaccccccccccagcagacaggccggcggcctgagcagattccccggcgccagaagccacagaggcgccctgatggacagccagcaggccagcggcaccatcgtgcagatcgtgatcaacaacaagcacaagcacggccaggtgtgcgtgagcaacggcaagacctacagccacggcgagagctggcaccccaacctgagagccttcggcatcgtggagtgcgtgctgtgcacctgcaacgtgaccaagcaggagtgcaagaagatccactgccccaacagatacccctgcaagtacccccagaagatcgacggcaagtgctgcaaggtgtgccccggcaagaaggccaaggagctgcccggccagagcttcgacaacaagggctacttctgcggcgaggagaccatgcccgtgtacgagagcgtgttcatggaggacggcgagaccaccagaaagatcgccctggagaccgagagacccccccaggtggaggtgcacgtgtggaccatcagaaagggcatcctgcagcacttccacatcgagaagatcagcaagagaatgttcgaggagctgccccacttcaagctggtgaccagaaccaccctgagccagtggaagatcttcaccgagggcgaggcccagatcagccagatgtgcagcagcagagtgtgcagaaccgagctggaggacctggtgaaggtgctgtacctggagagaagcgagaagggccactgctag

SEQ ID NO: 76678 - DNA, 1134 bp, synthetic construct
  misc_feature 1..1134: note = Description of Artificial Sequence: Synthetic coding sequence
  source 1..1134: mol_type = other DNA
atgagaaagaagtggaagatgggcggcatgaagtacatcttcagcctgctgttcttcctgctgctggagggcggcaagaccgagcaggtgaagcacagcgagacctactgcatgttccaggacaagaagtacagagtgggcgagagatggcacccctacctggagccctacggcctggtgtactgcgtgaactgcatctgcagcgagaacggcaacgtgctgtgcagcagagtgagatgccccaacgtgcactgcctgagccccgtgcacatcccccacctgtgctgccccagatgccccggcgacggcgagctgagctgggagcacagcgacggcgacatcttcagacagcccgccaacagagaggccagacacagctaccacagaagccactacgaccccccccccagcagacaggccggcggcctgagcagattccccggcgccagaagccacagaggcgccctgatggacagccagcaggccagcggcaccatcgtgcagatcgtgatcaacaacaagcacaagcacggccaggtgtgcgtgagcaacggcaagacctacagccacggcgagagctggcaccccaacctgagagccttcggcatcgtggagtgcgtgctgtgcacctgcaacgtgaccaagcaggagtgcaagaagatccactgccccaacagatacccctgcaagtacccccagaagatcgacggcaagtgctgcaaggtgtgccccggcaagaaggccaaggagctgcccggccagagcttcgacaacaagggctacttctgcggcgaggagaccatgcccgtgtacgagagcgtgttcatggaggacggcgagaccaccagaaagatcgccctggagaccgagagacccccccaggtggaggtgcacgtgtggaccatcagaaagggcatcctgcagcacttccacatcgagaagatcagcaagagaatgttcgaggagctgccccacttcaagctggtgaccagaaccaccctgagccagtggaagatcttcaccgagggcgaggcccagatcagccagatgtgcagcagcagagtgtgcagaaccgagctggaggacctggtgaaggtgctgtacctggagagaagcgagaagggccactgctag

SEQ ID NO: 76679 - DNA, 1374 bp, synthetic construct
  misc_feature 1..1374: note = Description of Artificial Sequence: Synthetic coding sequence
  source 1..1374: mol_type = other DNA
atgagaaagaagtggaagatgggcggcatgaagtacatcttcagcctgctgttcttcctgctgctggagggcggcaagaccgagcaggtgaagcacagcgagacctactgcatgttccaggacaagaagtacagagtgggcgagagatggcacccctacctggagccctacggcctggtgtactgcgtgaactgcatctgcagcgagaacggcaacgtgctgtgcagcagagtgagatgccccaacgtgcactgcctgagccccgtgcacatcccccacctgtgctgccccagatgccccgacagcctgccccccgtgaacaacaaggtgaccagcaagagctgcgagtacaacggcaccacctaccagcacggcgagctgttcgtggccgagggcctgttccagaacagacagcccaaccagtgcacccagtgcagctgcagcgagggcaacgtgtactgcggcctgaagacctgccccaagctgacctgcgccttccccgtgagcgtgcccgacagctgctgcagagtgtgcagaggcgacggcgagctgagctgggagcacagcgacggcgacatcttcagacagcccgccaacagagaggccagacacagctaccacagaagccactacgaccccccccccagcagacaggccggcggcctgagcagattccccggcgccagaagccacagaggcgccctgatggacagccagcaggccagcggcaccatcgtgcagatcgtgatcaacaacaagcacaagcacggccaggtgtgcgtgagcaacggcaagacctacagccacggcgagagctggcaccccaacctgagagccttcggcatcgtggagtgcgtgctgtgcacctgcaacgtgaccaagcaggagtgcaagaagatccactgccccaacagatacccctgcaagtacccccagaagatcgacggcaagtgctgcaaggtgtgccccggcaagaaggccaaggaggagctgcccggccagagcttcgacaacaagggctacttctgcggcgaggagaccatgcccgtgtacgagagcgtgttcatggaggacggcgagaccaccagaaagatcgccctggagaccgagagacccccccaggtggaggtgcacgtgtggaccatcagaaagggcatcctgcagcacttccacatcgagaagatcagcaagagaatgttcgaggagctgccccacttcaagctggtgaccagaaccaccctgagccagtggaagatcttcaccgagggcgaggcccagatcagccagatgtgcagcagcagagtgtgcagaaccgagctggaggacctggtgaaggtgctgtacctggagagaagcgagaagggccactgctag

SEQ ID NO: 76680 - DNA, 1137 bp, synthetic construct
  misc_feature 1..1137: note = Description of Artificial Sequence: Synthetic coding sequence
  source 1..1137: mol_type = other DNA
atgagaaagaagtggaagatgggcggcatgaagtacatcttcagcctgctgttcttcctgctgctggagggcggcaagaccgagcaggtgaagcacagcgagacctactgcatgttccaggacaagaagtacagagtgggcgagagatggcacccctacctggagccctacggcctggtgtactgcgtgaactgcatctgcagcgagaacggcaacgtgctgtgcagcagagtgagatgccccaacgtgcactgcctgagccccgtgcacatcccccacctgtgctgccccagatgccccggcgacggcgagctgagctgggagcacagcgacggcgacatcttcagacagcccgccaacagagaggccagacacagctaccacagaagccactacgaccccccccccagcagacaggccggcggcctgagcagattccccggcgccagaagccacagaggcgccctgatggacagccagcaggccagcggcaccatcgtgcagatcgtgatcaacaacaagcacaagcacggccaggtgtgcgtgagcaacggcaagacctacagccacggcgagagctggcaccccaacctgagagccttcggcatcgtggagtgcgtgctgtgcacctgcaacgtgaccaagcaggagtgcaagaagatccactgccccaacagatacccctgcaagtacccccagaagatcgacggcaagtgctgcaaggtgtgccccggcaagaaggccaaggaggagctgcccggccagagcttcgacaacaagggctacttctgcggcgaggagaccatgcccgtgtacgagagcgtgttcatggaggacggcgagaccaccagaaagatcgccctggagaccgagagacccccccaggtggaggtgcacgtgtggaccatcagaaagggcatcctgcagcacttccacatcgagaagatcagcaagagaatgttcgaggagctgccccacttcaagctggtgaccagaaccaccctgagccagtggaagatcttcaccgagggcgaggcccagatcagccagatgtgcagcagcagagtgtgcagaaccgagctggaggacctggtgaaggtgctgtacctggagagaagcgagaagggccactgctag

SEQ ID NO: 76681 - DNA, 1356 bp, synthetic construct
  misc_feature 1..1356: note = Description of Artificial Sequence: Synthetic coding sequence
  source 1..1356: mol_type = other DNA
atggtgcccgaggtgagagtgctgagcagcctgctgggcctggccctgctgtggttccccctggacagccacgccagagccagacccgacatgttctgcctgttccacggcaagagatacagccccggcgagagctggcacccctacctggagccccagggcctgatgtactgcctgagatgcacctgcagcgagggcgcccacgtgagctgctacagactgcactgcccccccgtgcactgcccccagcccgtgaccgagccccagcagtgctgccccaagtgcgtggagccccacacccccagcggcctgagagccccccccaagagctgccagcacaacggcaccatgtaccagcacggcgagatcttcagcgcccacgagctgttccccagcagactgcccaaccagtgcgtgctgtgcagctgcaccgagggccagatctactgcggcctgaccacctgccccgagcccggctgccccgcccccctgcccctgcccgacagctgctgccaggcctgcaaggacgaggccagcgagcagagcgacgaggaggacagcgtgcagagcctgcacggcgtgagacacccccaggacccctgcagcagcgacgccggcagaaagagaggccccggcacccccgcccccaccggcctgagcgcccccctgagcttcatccccagacacttcagacccaagggcgccggcagcaccaccgtgaagatcgtgctgaaggagaagcacaagaaggcctgcgtgcacggcggcaagacctacagccacggcgaggtgtggcaccccgccttcagagccttcggccccctgccctgcatcctgtgcacctgcgaggacggcagacaggactgccagagagtgacctgccccaccgagtacccctgcagacaccccgagaaggtggccggcaagtgctgcaagatctgccccgaggacaaggccgaccccggccacagcgagatcagcagcaccagatgccccaaggcccccggcagagtgctggtgcacaccagcgtgagccccagccccgacaacctgagaagattcgccctggagcacgaggccagcgacctggtggagatctacctgtggaagctggtgaaggacgaggagaccgaggcccagagaggcgaggtgcccggccccagaccccacagccagaacctgcccctggacagcgaccaggagagccaggaggccagactgcccgagagaggcaccgccctgcccaccgccagatggccccccagaagaagcctggagagactgcccagccccgaccccggcgccgagggccacggccagagcagacagagcgaccaggacatcaccaagacctag

SEQ ID NO: 76682 - DNA, 846 bp, synthetic construct
  misc_feature 1..846: note = Description of Artificial Sequence: Synthetic coding sequence
  source 1..846: mol_type = other DNA
atgtaccagcacggcgagatcttcagcgcccacgagctgttccccagcagactgcccaaccagtgcgtgctgtgcagctgcaccgagggccagatctactgcggcctgaccacctgccccgagcccggctgccccgcccccctgcccctgcccgacagctgctgccaggcctgcaaggccggcagcagctggggcctgctgtgcagcgtgagcgacttccaccccagctgccacctgcagagacacccccaggacccctgcagcagcgacgccggcagaaagagaggccccggcacccccgcccccaccggcctgagcgcccccctgagcttcatccccagacacttcagacccaagggcgccggcagcaccaccgtgaagatcgtgctgaaggagaagcacaagaaggcctgcgtgcacggcggcaagacctacagccacggcgaggtgtggcaccccgccttcagagccttcggccccctgccctgcatcctgtgcacctgcgaggacggcagacaggactgccagagagtgacctgccccaccgagtacccctgcagacaccccgagaaggtggccggcaagtgctgcaagatctgccccgaggacaaggccgaccccggccacagcgagatcagcagcaccagatgccccaaggcccccggcagagtgctggtgcacaccagcgtgagccccagccccgacaacctgagaagattcgccctggagcacgaggccagcgacctggtggagatctacctgtggaagctggtgaagggcgtgttcctggcccagaccctggagctgaaggtgaccgccagccccgacaaggtgaccaagacctag

SEQ ID NO: 76683 - DNA, 1290 bp, synthetic construct
  misc_feature 1..1290: note = Description of Artificial Sequence: Synthetic coding sequence
  source 1..1290: mol_type = other DNA
atggtgcccgaggtgagagtgctgagcagcctgctgggcctggccctgctgtggttccccctggacagccacgccagagccagacccgacatgttctgcctgttccacggcaagagatacagccccggcgagagctggcacccctacctggagccccagggcctgatgtactgcctgagatgcacctgcagcgagggcgcccacgtgagctgctacagactgcactgcccccccgtgcactgcccccagcccgtgaccgagccccagcagtgctgccccaagtgcgtggagccccacacccccagcggcctgagagccccccccaagagctgccagcacaacggcaccatgtaccagcacggcgagatcttcagcgcccacgagctgttccccagcagactgcccaaccagtgcgtgctgtgcagctgcaccgagggccagatctactgcggcctgaccacctgccccgagcccggctgccccgcccccctgcccctgcccgacagctgctgccaggcctgcaaggacgaggccagcgagcagagcgacgaggaggacagcgtgcagagcctgcacggcgtgagacacccccaggacccctgcagcagcgacgccggcagaaagagaggccccggcacccccgcccccaccggcctgagcgcccccctgagcttcatccccagacacttcagacccaagggcgccggcagcaccaccgtgaagatcgtgctgaaggagaagcacaagaaggcctgcgtgcacggcggcaagacctacagccacggcgaggtgtggcaccccgccttcagagccttcggccccctgccctgcatcctgtgcacctgcgaggacggcagacaggactgccagagagtgacctgccccaccgagtacccctgcagacaccccgagaaggtggccggcaagtgctgcaagatctgccccgaggacaaggccgaccccggccacagcgagatcagcagcaccagatgccccaaggcccccggcagagtgctggtgcacaccagcgtgagccccagccccgacaacctgagaagattcgccctggagcacgaggccagcgacctggtggagatctacctgtggaagctggtgaagggcatcttccacctgacccagatcaagaaggtgagaaagcaggacttccagaaggaggcccagcacttcagactgctggccggcccccacgagggccactggaacgtgttcctggcccagaccctggagctgaaggtgaccgccagccccgacaaggtgaccaagacctag

SEQ ID NO: 76684 - DNA, 840 bp, synthetic construct
  misc_feature 1..840: note = Description of Artificial Sequence: Synthetic coding sequence
  source 1..840: mol_type = other DNA
atgtaccagcacggcgagatcttcagcgcccacgagctgttccccagcagactgcccaaccagtgcgtgctgtgcagctgcaccgagggccagatctactgcggcctgaccacctgccccgagcccggctgccccgcccccctgcccctgcccgacagctgctgccaggcctgcaaggacgaggccagcgagcagagcgacgaggaggacagcgtgcagagcctgcacggcgtgagacacccccaggacccctgcagcagcgacgccggcagaaagagaggccccggcacccccgcccccaccggcctgagcgcccccctgagcttcatccccagacacttcagacccaagggcgccggcagcaccaccgtgaagatcgtgctgaaggagaagcacaagaaggcctgcgtgcacggcggcaagacctacagccacggcgaggtgtggcaccccgccttcagagccttcggccccctgccctgcatcctgtgcacctgcgaggacggcagacaggactgccagagagtgacctgccccaccgagtacccctgcagacaccccgagaaggtggccggcaagtgctgcaagatctgccccgaggacaaggccgaccccggccacagcgagatcagcagcaccagatgccccaaggcccccggcagagtgctggtgcacaccagcgtgagccccagccccgacaacctgagaagattcgccctggagcacgaggccagcgacctggtggagatctacctgtggaagctggtgaaggacgtgttcctggcccagaccctggagctgaaggtgaccgccagccccgacaaggtgaccaagacctag

SEQ ID NO: 76685 - DNA, 498 bp, synthetic construct
  misc_feature 1..498: note = Description of Artificial Sequence: Synthetic coding sequence
  source 1..498: mol_type = other DNA
atggagatgttccagggcctgctgctgctgctgctgctgagcatgggcggcacctgggccagcaaggagcccctgagacccagatgcagacccatcaacgccaccctggccgtggagaaggagggctgccccgtgtgcatcaccgtgaacaccaccatctgcgccggctactgccccaccatgaccagagtgctgcagggcgtgctgcccgccctgccccaggtggtgtgcaactacagagacgtgagattcgagagcatcagactgcccggctgccccagaggcgtgaaccccgtggtgagctacgccgtggccctgagctgccagtgcgccctgtgcagaagaagcaccaccgactgcggcggccccaaggaccaccccctgacctgcgacgaccccagattccaggacagcagcagcagcaaggcccccccccccagcctgcccagccccagcagactgcccggccccagcgacacccccatcctgccccagtag

SEQ ID NO: 76686 - DNA, 507 bp, synthetic construct
  misc_feature 1..507: note = Description of Artificial Sequence: Synthetic coding sequence
  source 1..507: mol_type = other DNA
gcccccagaatggagatgttccagggcctgctgctgctgctgctgctgagcatgggcggcacctgggccagcaaggagcccctgagacccagatgcagacccatcaacgccaccctggccgtggagaaggagggctgccccgtgtgcatcaccgtgaacaccaccatctgcgccggctactgccccaccatgaccagagtgctgcagggcgtgctgcccgccctgccccaggtggtgtgcaactacagagacgtgagattcgagagcatcagactgcccggctgccccagaggcgtgaaccccgtggtgagctacgccgtggccctgagctgccagtgcgccctgtgcagaagaagcaccaccgactgcggcggccccaaggaccaccccctgacctgcgacgaccccagattccaggacagcagcagcagcaaggcccccccccccagcctgcccagccccagcagactgcccggccccagcgacacccccatcctgccccagtag

SEQ ID NO: 76687 - DNA, 654 bp, synthetic construct
  misc_feature 1..654: note = Description of Artificial Sequence: Synthetic coding sequence
  source 1..654: mol_type = other DNA
atggcccccggcagcagaaccagcctgctgctggccttcgccctgctgtgcctgccctggctgcaggaggccggcgccgtgcagaccgtgcccctgagcagactgttcgaccacgccatgctgcaggcccacagagcccaccagctggccatcgacacctaccaggagttcgaggagacctacatccccaaggaccagaagtacagcttcctgcacgacagccagaccagcttctgcttcagcgacagcatccccacccccagcaacatggaggagacccagcagaagagcaacctggagctgctgagaatcagcctgctgctgatcgagagctggctggagcccgtgagattcctgagaagcatgttcgccaacaacctggtgtacgacaccagcgacagcgacgactaccacctgctgaaggacctggaggagggcatccagaccctgatgggcagactggaggacggcagcagaagaaccggccagatcctgaagcagacctacagcaagttcgacaccaacagccacaaccacgacgccctgctgaagaactacggcctgctgtactgcttcagaaaggacatggacaaggtggagaccttcctgagaatggtgcagtgcagaagcgtggagggcagctgcggcttctag

SEQ ID NO: 76688 - DNA, 771 bp, synthetic construct
  misc_feature 1..771: note = Description of Artificial Sequence: Synthetic coding sequence
  source 1..771: mol_type = other DNA
atggcccccggcagcagaaccagcctgctgctggccttcgccctgctgtgcctgccctggctgcaggaggccggcgccgtgcagaccgtgcccctgagcagactgttcgaccacgccatgctgcaggcccacagagcccaccagctggccatcgacacctaccaggagttcgaggagacctacatccccaaggaccagaagtacagcttcctgcacgacagccagaccagcttctgcttcagcgacagcatccccacccccagcaacatggaggagacccagcagaagagcaacctggagctgctgagaatcagcctgctgctgatcgagagctggctggagcccgtgagattcctgagaagcatgttcgccaacaacctggtgtacgacaccagcgacagcgacgactaccacctgctgaaggacctggaggagggcatccagaccctgatgggcgtgagagtggcccccggcgtgaccaaccccggcacccccctggccagcagagccggcggcgagaagtactgctgccccctgttcagcagcaaggccctgacccaggagaacagcccctacagcagcttcagactggtgaacccccccggcctgagcctgcaccccgagggcgagggcggcaagtggatcaacgagagaggcagagagcagtgccccagcgcctggcccctgctgctgttcctgcacttcgccgaggccggcagaagacagccccccgactgggccgacccccaggccgacctgcagcaggtgtag

SEQ ID NO: 76689 - DNA, 369 bp, synthetic construct
  misc_feature 1..369: note = Description of Artificial Sequence: Synthetic coding sequence
  source 1..369: mol_type = other DNA
atggcccccggcagcagaaccagcctgctgctggccttcgccctgctgtgcctgccctggctgcaggaggccggcgccgtgcagaccgtgcccctgagcagactgttcgaccacgccatgctgcaggcccacagagcccaccagctggccatcgacacctaccaggagttcagactggaggacggcagcagaagaaccggccagatcctgaagcagacctacagcaagttcgacaccaacagccacaaccacgacgccctgctgaagaactacggcctgctgtactgcttcagaaaggacatggacaaggtggagaccttcctgagaatggtgcagtgcagaagcgtggagggcagctgcggcttctag

SEQ ID NO: 76690 - DNA, 552 bp, synthetic construct
  misc_feature 1..552: note = Description of Artificial Sequence: Synthetic coding sequence
  source 1..552: mol_type = other DNA
atggcccccggcagcagaaccagcctgctgctggccttcgccctgctgtgcctgccctggctgcaggaggccgagacctacatccccaaggaccagaagtacagcttcctgcacgacagccagaccagcttctgcttcagcgacagcatccccacccccagcaacatggaggagacccagcagaagagcaacctggagctgctgagaatcagcctgctgctgatcgagagctggctggagcccgtgagattcctgagaagcatgttcgccaacaacctggtgtacgacaccagcgacagcgacgactaccacctgctgaaggacctggaggagggcatccagaccctgatgggcagactggaggacggcagcagaagaaccggccagatcctgaagcagacctacagcaagttcgacaccaacagccacaaccacgacgccctgctgaagaactacggcctgctgtactgcttcagaaaggacatggacaaggtggagaccttcctgagaatggtgcagtgcagaagcgtggagggcagctgcggcttctag

SEQ ID NO: 76691 - DNA, 504 bp, synthetic construct
  misc_feature 1..504: note = Description of Artificial Sequence: Synthetic coding sequence
  source 1..504: mol_type = other DNA
atggccgccggcagcagaaccagcctgctgctggccttcgccctgctgtgcctgccctggctgcaggaggccggcgccgtgcagaccgtgcccctgagcagactgttcgaccacgccatgctgcaggcccacagagcccaccagctggccatcgacacctaccaggagttcgaggagacctacatccccaaggaccagaagtacagcttcctgcacgacagccagaccagcttctgcttcagcgacagcatccccacccccagcaacatggaggagacccagcagaagagcaacctggagctgctgagaatcagcctgctgctgatcgagagctggctggagcccgtgagattcctgagaagcatgttcgccaacaacctggtgtacgacaccagcgacagcgacgactaccacctgctgaaggacctggaggagggcatccagaccctgatgggcgtgagagtggcccccggcgtggccaaccccggcacccccctggcctag

SEQ ID NO: 76692 - DNA, 369 bp, synthetic construct
  misc_feature 1..369: note = Description of Artificial Sequence: Synthetic coding sequence
  source 1..369: mol_type = other DNA
atggccgccggcagcagaaccagcctgctgctggccttcgccctgctgtgcctgccctggctgcaggaggccggcgccgtgcagaccgtgcccctgagcagactgttcgaccacgccatgctgcaggcccacagagcccaccagctggccatcgacacctaccaggagttcagactggaggacggcagcagaagaaccggccagatcctgaagcagacctacagcaagttcgacaccaacagccacaaccacgacgccctgctgaagaactacggcctgctgtactgcttcagaaaggacatggacaaggtggagaccttcctgagaatggtgcagtgcagaagcgtggagggcagctgcggcttctag

SEQ ID NO: 76693 - DNA, 654 bp, synthetic construct
  misc_feature 1..654: note = Description of Artificial Sequence: Synthetic coding sequence
  source 1..654: mol_type = other DNA
atggccgccggcagcagaaccagcctgctgctggccttcgccctgctgtgcctgccctggctgcaggaggccggcgccgtgcagaccgtgcccctgagcagactgttcgaccacgccatgctgcaggcccacagagcccaccagctggccatcgacacctaccaggagttcgaggagacctacatccccaaggaccagaagtacagcttcctgcacgacagccagaccagcttctgcttcagcgacagcatccccacccccagcaacatggaggagacccagcagaagagcaacctggagctgctgagaatcagcctgctgctgatcgagagctggctggagcccgtgagattcctgagaagcatgttcgccaacaacctggtgtacgacaccagcgacagcgacgactaccacctgctgaaggacctggaggagggcatccagaccctgatgggcagactggaggacggcagcagaagaaccggccagatcctgaagcagacctacagcaagttcgacaccaacagccacaaccacgacgccctgctgaagaactacggcctgctgtactgcttcagaaaggacatggacaaggtggagaccttcctgagaatggtgcagtgcagaagcgtggagggcagctgcggcttctag

SEQ ID NO: 76694 - DNA, 483 bp, synthetic construct
  misc_feature 1..483: note = Description of Artificial Sequence: Synthetic coding sequence
  source 1..483: mol_type = other DNA
atggccgccggcagcagaaccagcctgctgctggccttcgccctgctgtgcctgccctggctgcaggaggccgacagcatccccacccccagcaacatggaggagacccagcagaagagcaacctggagctgctgagaatcagcctgctgctgatcgagagctggctggagcccgtgagattcctgagaagcatgttcgccaacaacctggtgtacgacaccagcgacagcgacgactaccacctgctgaaggacctggaggagggcatccagaccctgatgggcagactggaggacggcagcagaagaaccggccagatcctgaagcagacctacagcaagttcgacaccaacagccacaaccacgacgccctgctgaagaactacggcctgctgtactgcttcagaaaggacatggacaaggtggagaccttcctgagaatggtgcagtgcagaagcgtggagggcagctgcggcttctag

SEQ ID NO: 76695 - DNA, 498 bp, synthetic construct
  misc_feature 1..498: note = Description of Artificial Sequence: Synthetic coding sequence
  source 1..498: mol_type = other DNA
tgaggcagcagaaccagcctgctgctggccttcgccctgctgtgcctgccctggctgcaggaggccggcgccgtgcagaccgtgcccctgagcagactgttcgaccacgccatgctgcaggcccacagagcccaccagctggccatcgacacctaccaggagttcgaggagacctacatccccaaggaccagaagtacagcttcctgcacgacagccagaccagcttctgcttcagcgacagcatccccacccccagcaacatggaggagacccagcagaagagcaacctggagctgctgagaatcagcctgctgctgatcgagagctggctggagcccgtgagattcctgagaagcatgttcgccaacaacctggtgtacgacaccagcgacagcgacgactaccacctgctgaaggacctggaggagggcatccagaccctgatgggcgtgagagtggcccccggcgtggccaaccccggcacccccctggcctag

SEQ ID NO: 76696 - DNA, 669 bp, synthetic construct
  misc_feature 1..669: note = Description of Artificial Sequence: Synthetic coding sequence
  source 1..669: mol_type = other DNA
atggccgccggcagcagaaccagcctgctgctggccttcgccctgctgtgcctgccctggctgcaggaggccggcgccgtgcagaccgtgcccctgagcagactgttcaaggaggccatgctgcaggcccacagagcccaccagctggccatcgacacctaccaggagttcatcagcagctggggcatggaggcctacatcaccaaggagcagaagtacagcttcctgcacgacagccagaccagcttctgcttcagcgacagcatccccaccagcagcaacatggaggagacccagcagaagagcaacctggagctgctgcacatcagcctgctgctgatcgagagcagactggagcccgtgagattcctgagaagcaccttcaccaacaacctggtgtacgacaccagcgacagcgacgactaccacctgctgaaggacctggaggagggcatccagatgctgatgggcagactggaggacggcagccacctgaccggccagaccctgaagcagacctacagcaagttcgacaccaacagccacaaccacgacgccctgctgaagaactacggcctgctgcactgcttcagaaaggacatggacaaggtggagaccttcctgagaatggtgcagtgcagaagcgtggagggcagctgcggcttctag

SEQ ID NO: 76697 - DNA, 387 bp, synthetic construct
  misc_feature 1..387: note = Description of Artificial Sequence: Synthetic coding sequence
  source 1..387: mol_type = other DNA
atggaggagacccagcagaagagcaacctggagctgctgcacatcagcctgctgctgatcgagagcagactggagcccgtgagattcctgagaagcaccttcaccaacaacctggtgtacgacaccagcgacagcgacgactaccacctgctgaaggacctggaggagggcatccagatgctgatgggcagactggaggacggcagccacctgaccggccagaccctgaagcagacctacagcaagttcgacaccaacagccacaaccacgacgccctgctgaagaactacggcctgctgcactgcttcagaaaggacatggacaaggtggagaccttcctgagaatggtgcagtgcagaagcgtggagggcagctgcggcttctag

SEQ ID NO: 76698 - DNA, 522 bp, synthetic construct
  misc_feature 1..522: note = Description of Artificial Sequence: Synthetic coding sequence
  source 1..522: mol_type = other DNA
atggccaccggcagcagaaccagcctgctgctggccttcgccctgctgtgcctgccctggctgcaggaggccggcgccgtgcagaccgtgcccctgagcagactgttcaaggaggccatgctgcaggcccacagagcccaccagctggccatcgacacctaccaggagttcatcagcagctggggcatgggcgccggccagggctggcaggagggcgtgaccttcccccactggggcagcaacggcagaagactgagaagcagcggcctgttcagcgaggccaagatgcaggccgacgagcacagactgagccaggtgcccagaagagtgaccgtgggcgccggcctgcagcacagaaagcagtggagcttcctggtgggcggccccagccccagaaagaagcccatcagccagagaaacagaagcatccacagctgcatgacccccagaccccccagcgccagccagaccctgttcagacacccccccacctggagaaagagaagcagaaaccccacctag

SEQ ID NO: 76699 - DNA, 420 bp, synthetic construct
  misc_feature 1..420: note = Description of Artificial Sequence: Synthetic coding sequence
  source 1..420: mol_type = other DNA
atggccgccgacagcatccccaccagcagcaacatggaggagacccagcagaagagcaacctggagctgctgcacatcagcctgctgctgatcgagagcagactggagcccgtgagattcctgagaagcaccttcaccaacaacctggtgtacgacaccagcgacagcgacgactaccacctgctgaaggacctggaggagggcatccagatgctgatgggcagactggaggacggcagccacctgaccggccagaccctgaagcagacctacagcaagttcgacaccaacagccacaaccacgacgccctgctgaagaactacggcctgctgcactgcttcagaaaggacatggacaaggtggagaccttcctgagaatggtgcagtgcagaagcgtggagggcagctgcggcttctag

SEQ ID NO: 76700 - DNA, 1962 bp, synthetic construct
  misc_feature 1..1962: note = Description of Artificial Sequence: Synthetic coding sequence
  source 1..1962: mol_type = other DNA
atggccgacaccctgcccagcgagttcgacgtgatcgtgatcggcaccggcctgcccgagagcatcatcgccgccgcctgcagcagaagcggcagaagagtgctgcacgtggacagcagaagctactacggcggcaactgggccagcttcagcttcagcggcctgctgagctggctgaaggagtaccaggagaacagcgacatcgtgagcgacagccccgtgtggcaggaccagatcctggagaacgaggaggccatcgccctgagcagaaaggacaagaccatccagcacgtggaggtgttctgctacgccagccaggacctgcacgaggacgtggaggaggccggcgccctgcagaagaaccacgccctggtgaccagcgccaacagcaccgaggccgccgacagcgccttcctgcccaccgaggacgagagcctgagcaccatgagctgcgagatgctgaccgagcagacccccagcagcgaccccgagaacgccctggaggtgaacggcgccgaggtgaccggcgagaaggagaaccactgcgacgacaagacctgcgtgcccagcaccagcgccgaggacatgagcgagaacgtgcccatcgccgaggacaccaccgagcagcccaagaagaacagaatcacctacagccagatcatcaaggagggcagaagattcaacatcgacctggtgagcaagctgctgtacagcagaggcctgctgatcgacctgctgatcaagagcaacgtgagcagatacgccgagttcaagaacatcaccagaatcctggccttcagagagggcagagtggagcaggtgccctgcagcagagccgacgtgttcaacagcaagcagctgaccatggtggagaagagaatgctgatgaagttcctgaccttctgcatggagtacgagaagtaccccgacgagtacaagggctacgaggagatcaccttctacgagtacctgaagacccagaagctgacccccaacctgcagtacatcgtgatgcacagcatcgccatgaccagcgagaccgccagcagcaccatcgacggcctgaaggccaccaagaacttcctgcactgcctgggcagatacggcaacacccccttcctgttccccctgtacggccagggcgagctgccccagtgcttctgcagaatgtgcgccgtgttcggcggcatctactgcctgagacacagcgtgcagtgcctggtggtggacaaggagagcagaaagtgcaaggccatcatcgaccagttcggccagagaatcatcagcgagcacttcctggtggaggacagctacttccccgagaacatgtgcagcagagtgcagtacagacagatcagcagagccgtgctgatcaccgacagaagcgtgctgaagaccgacagcgaccagcagatcagcatcctgaccgtgcccgccgaggagcccggcaccttcgccgtgagagtgatcgagctgtgcagcagcaccatgacctgcatgaagggcacctacctggtgcacctgacctgcaccagcagcaagaccgccagagaggacctggagagcgtggtgcagaagctgttcgtgccctacaccgagatggagatcgagaacgagcaggtggagaagcccagaatcctgtgggccctgtacttcaacatgagagacagcagcgacatcagcagaagctgctacaacgacctgcccagcaacgtgtacgtgtgcagcggccccgactgcggcctgggcaacgacaacgccgtgaagcaggccgagaccctgttccaggagatctgccccaacgaggacttctgcccccccccccccaaccccgaggacatcatcctggacggcgacagcctgcagcccgaggccagcgagagcagcgccatccccgaggccaacagcgagaccttcaaggagagcaccaacctgggcaacctggaggagagcagcgagtag

SEQ ID NO: 76701 - DNA, 333 bp, synthetic construct
  misc_feature 1..333: note = Description of Artificial Sequence: Synthetic coding sequence
  source 1..333: mol_type = other DNA
atggccgacaccctgcccagcgagttcgacgtgatcgtgatcggcaccggcctgcccgagagcatcatcgccgccgcctgcagcagaagcggcagaagagtgctgcacgtggacagcagaagctactacggcggcaactgggccagcttcagcttcagcggcctgctgagctggctgaaggagtaccaggagaacagcgacatcgtgagcgacagccccgtgtggcaggaccagatcctggagaacgaggaggccatcgccctgagcagaaaggacaagaccatccagcacgtggaggtgttctgctacgccagaagcaccctgctgctgtag

SEQ ID NO: 76702 - DNA, 1518 bp, synthetic construct
  misc_feature 1..1518: note = Description of Artificial Sequence: Synthetic coding sequence
  source 1..1518: mol_type = other DNA
atgagctgcgagatgctgaccgagcagacccccagcagcgaccccgagaacgccctggaggtgaacggcgccgaggtgaccggcgagaaggagaaccactgcgacgacaagacctgcgtgcccagcaccagcgccgaggacatgagcgagaacgtgcccatcgccgaggacaccaccgagcagcccaagaagaacagaatcacctacagccagatcatcaaggagggcagaagattcaacatcgacctggtgagcaagctgctgtacagcagaggcctgctgatcgacctgctgatcaagagcaacgtgagcagatacgccgagttcaagaacatcaccagaatcctggccttcagagagggcagagtggagcaggtgccctgcagcagagccgacgtgttcaacagcaagcagctgaccatggtggagaagagaatgctgatgaagttcctgaccttctgcatggagtacgagaagtaccccgacgagtacaagggctacgaggagatcaccttctacgagtacctgaagacccagaagctgacccccaacctgcagtacatcgtgatgcacagcatcgccatgaccagcgagaccgccagcagcaccatcgacggcctgaaggccaccaagaacttcctgcactgcctgggcagatacggcaacacccccttcctgttccccctgtacggccagggcgagctgccccagtgcttctgcagaatgtgcgccgtgttcggcggcatctactgcctgagacacagcgtgcagtgcctggtggtggacaaggagagcagaaagtgcaaggccatcatcgaccagttcggccagagaatcatcagcgagcacttcctggtggaggacagctacttccccgagaacatgtgcagcagagtgcagtacagacagatcagcagagccgtgctgatcaccgacagaagcgtgctgaagaccgacagcgaccagcagatcagcatcctgaccgtgcccgccgaggagcccggcaccttcgccgtgagagtgatcgagctgtgcagcagcaccatgacctgcatgaagggcacctacctggtgcacctgacctgcaccagcagcaagaccgccagagaggacctggagagcgtggtgcagaagctgttcgtgccctacaccgagatggagatcgagaacgagcaggtggagaagcccagaatcctgtgggccctgtacttcaacatgagagacagcagcgacatcagcagaagctgctacaacgacctgcccagcaacgtgtacgtgtgcagcggccccgactgcggcctgggcaacgacaacgccgtgaagcaggccgagaccctgttccaggagatctgccccaacgaggacttctgcccccccccccccaaccccgaggacatcatcctggacggcgacagcctgcagcccgaggccagcgagagcagcgccatccccgaggccaacagcgagaccttcaaggagagcaccaacctgggcaacctggaggagagcagcgagtag

SEQ ID NO: 76703 - DNA, 1971 bp, synthetic construct
  misc_feature 1..1971: note = Description of Artificial Sequence: Synthetic coding sequence
  source 1..1971: mol_type = other DNA
atggccgacaacctgcccaccgagttcgacgtggtgatcatcggcaccggcctgcccgagagcatcctggccgccgcctgcagcagaagcggccagagagtgctgcacatcgacagcagaagctactacggcggcaactgggccagcttcagcttcagcggcctgctgagctggctgaaggagtaccagcagaacaacgacatcggcgaggagagcaccgtggtgtggcaggacctgatccacgagaccgaggaggccatcaccctgagaaagaaggacgagaccatccagcacaccgaggccttctgctacgccagccaggacatggaggacaacgtggaggagatcggcgccctgcagaagaaccccagcctgggcgtgagcaacaccttcaccgaggtgctggacagcgccctgcccgaggagagccagctgagctacttcaacagcgacgagatgcccgccaagcacacccagaagagcgacaccgagatcagcctggaggtgaccgacgtggaggagagcgtggagaaggagaagtactgcggcgacaagacctgcatgcacaccgtgagcgacaaggacggcgacaaggacgagagcaagagcaccgtggaggacaaggccgacgagcccatcagaaacagaatcacctacagccagatcgtgaaggagggcagaagattcaacatcgacctggtgagcaagctgctgtacagccagggcctgctgatcgacctgctgatcaagagcgacgtgagcagatacgtggagttcaagaacgtgaccagaatcctggccttcagagagggcaaggtggagcaggtgccctgcagcagagccgacgtgttcaacagcaaggagctgaccatggtggagaagagaatgctgatgaagttcctgaccttctgcctggagtacgagcagcaccccgacgagtaccaggccttcagacagtgcagcttcagcgagtacctgaagaccaagaagctgacccccaacctgcagcacttcgtgctgcacagcatcgccatgaccagcgagagcagctgcaccaccatcgacggcctgaacgccaccaagaacttcctgcagtgcctgggcagattcggcaacacccccttcctgttccccctgtacggccagggcgagatcccccagggcttctgcagaatgtgcgccgtgttcggcggcatctactgcctgagacacaaggtgcagtgcttcgtggtggacaaggagagcggcagatgcaaggccatcatcgaccacttcggccagagaatcaacgccaagtacttcatcgtggaggacagctacctgagcgaggagacctgcagcaacgtgcagtacaagcagatcagcagagccgtgctgatcaccgaccagagcatcctgaagaccgacctggaccagcagaccagcatcctgatcgtgccccccgccgagcccggcgcctgcgccgtgagagtgaccgagctgtgcagcagcaccatgacctgcatgaaggacacctacctggtgcacctgacctgcagcagcagcaagaccgccagagaggacctggagagcgtggtgaagaagctgttcaccccctacaccgagaccgagatcaacgaggaggagctgaccaagcccagactgctgtgggccctgtacttcaacatgagagacagcagcggcatcagcagaagcagctacaacggcctgcccagcaacgtgtacgtgtgcagcggccccgactgcggcctgggcaacgagcacgccgtgaagcaggccgagaccctgttccaggagatcttccccaccgaggagttctgcccccccccccccaaccccgaggacatcatcttcgacggcgacgacaagcagcccgaggcccccggcaccaacaacgtggtgatggccaagctggagagcagcgaggagagcaagaacctggagagccccgagaagcacctgcagaactag

SEQ ID NO: 76704 - DNA, 1641 bp, synthetic construct
  misc_feature 1..1641: note = Description of Artificial Sequence: Synthetic coding sequence
  source 1..1641: mol_type = other DNA
atggagcagagaagagtgaccgacttcttcgccagaagaagacccggcccccccagaatcgccccccccaagctggcctgcagaacccccagccccgccagacccgccctgagagcccccgccagcgccaccagcggcagcagaaagagagccagaccccccgccgcccccggcagagaccaggccagaccccccgccagaagaagactgagactgagcgtggacgaggtgagcagccccagcacccccgaggcccccgacatccccgcctgccccagccccggccagaagatcaagaagagcacccccgccgccggccagcccccccacctgaccagcgcccaggaccaggacaccatcagcgagctggccagctgcctgcagagagccagagagctgggcgccagagtgagagccctgaaggccagcgcccaggacgccggcgagagctgcacccccgaggccgagggcagacccgaggagccctgcggcgagaaggcccccgcctaccagagattccacgccctggcccagcccggcctgcccggcctggtgctgccctacaagtaccaggtgctggccgagatgttcagaagcatggacaccatcgtgggcatgctgcacaacagaagcgagacccccaccttcgccaaggtgcagagaggcgtgcaggacatgatgagaagaagattcgaggagtgcaacgtgggccagatcaagaccgtgtaccccgccagctacagattcagacaggagagaagcgtgcccaccttcaaggacggcaccagaagaagcgactaccagctgaccatcgagcccctgctggagcaggaggccgacggcgccgccccccagctgaccgccagcagactgctgcagagaagacagatcttcagccagaagctggtggagcacgtgaaggagcaccacaaggccttcctggccagcctgagccccgccatggtggtgcccgaggaccagctgaccagatggcaccccagattcaacgtggacgaggtgcccgacatcgagcccgccgccctgccccagccccccgccaccgagaagctgaccaccgcccaggaggtgctggccagagccagaaacctgatcagccccagaatggagaaggccctgagccagctggccctgagaagcgccgcccccagcagccccggcagccccagacccgccctgcccgccaccccccccgccaccccccccgccgccagccccagcgccctgaagggcgtgagccaggacctgctggagagaatcagagccaaggaggcccagaagcagctggcccagatgaccagatgccccgagcaggagcagagactgcagagactggagagactgcccgagctggccagagtgctgagaagcgtgttcgtgagcgagagaaagcccgccctgagcatggaggtggcctgcgccagaatggtgggcagctgctgcaccatcatgagccccggcgagatggagaagcacctgctgctgctgagcgagctgctgcccgactggctgagcctgcacagaatcagaaccgacacctacgtgaagctggacaaggccgccgacctggcccacatcaccgccagactggcccaccagaccagagccgaggagggcctgtag

SEQ ID NO: 76705 - DNA, 306 bp, synthetic construct
  misc_feature 1..306: note = Description of Artificial Sequence: Synthetic coding sequence
  source 1..306: mol_type = other DNA
atgcagcagcagcagcagctggccagcgccagaaacagaagactggcccagcagatggagaacagacccagcgtgcaggccgccctgaagctgaagcagaagagcctgaagcagagactgggcaagagcaacatccaggccagactgggcagacccatcggcgccctggccagaggcgccatcggcggcagaggcctgcccatcatccagagaggcctgcccagaggcggcctgagaggcggcagagccaccagaaccctgctgagaggcggcatgagcctgagaggccagtgctgcgtgccctag

SEQ ID NO: 76706 - DNA, 672 bp, synthetic construct
  misc_feature 1..672: note = Description of Artificial Sequence: Synthetic coding sequence
  source 1..672: mol_type = other DNA
atgctgaagaacaagcagcccacccccgtgaacatcagagccagcatgcagcagcagcagcagctggccagcgccagaaacagaagactggcccagcagatggagaacagacccagcgtgcaggccgccctgaagctgaagcagagcctgaagcagagactgggcaagagcaacatccaggccagactgggcagacccatcggcgccctggccagaggcgccatcggcggcagaggcctgcccatcatccagagaggcctgcccagaggcggcctgagaggcggcagagccaccagaaccctgctgagaggcggcatgagcctgagaggccagaacctgctgagaggcggcagagccgtggcccccagaatgggcctgagaagaggcggcgtgagaggcagaggcggccccggcagaggcggcctgggcagaggcgccatgggcagaggcggcatcggcggcagaggcagaggcatgatcggcagaggcagaggcggcttcggcggcagaggcagaggcagaggcagaggcagaggcgccctggccagacccgtgctgaccaaggagcagctggacaaccagctggacgcctacatgagcaagaccaagggccacctggacgccgagctggacgcctacatggcccagaccgaccccgagaccaacgactag

SEQ ID NO: 76707 - DNA, 609 bp, synthetic construct
  misc_feature 1..609: note = Description of Artificial Sequence: Synthetic coding sequence
  source 1..609: mol_type = other DNA
atggccgcccagagcgcccccaaggtggtgctgaagagcaccaccaagatgagcctgaacgagagattcaccaacatgctgaagaacaagcagcccacccccgtgaacatcagagccagcatgcagcagcagcagcagctggccagcgccagaaacagaagactggcccagcagatggagaacagacccagcgtgcaggccgccctgaagctgaagcagagcctgaagcagagactgggcaagagcaacatccaggccagactgggcagacccatcggcgccctggccagaggcgccatcggcggcagaggcctgcccatcatccagagaggcctgcccagaggcggcctgagaggcggcagagccaccagaaccctgctgagaggcggcatgagcctgagaggcagaggcatgatcggcagaggcagaggcggcttcggcggcagaggcagaggcagaggcagaggcagaggcgccctggccagacccgtgctgaccaaggagcagctggacaaccagctggacgcctacatgagcaagaccaagggccacctggacgccgagctggacgcctacatggcccagaccgaccccgagaccaacgactag

SEQ ID NO: 76708 - DNA, 747 bp, synthetic construct
  misc_feature 1..747: note = Description of Artificial Sequence: Synthetic coding sequence
  source 1..747: mol_type = other DNA
atggccgcccagagcgcccccaaggtggtgctgaagagcaccaccaagatgagcctgaacgagagattcaccaacatgctgaagaacaagcagcccacccccgtgaacatcagagccagcatgcagcagcagcagcagctggccagcgccagaaacagaagactggcccagcagatggagaacagacccagcgtgcaggccgccctgaagctgaagcagagcctgaagcagagactgggcaagagcaacatccaggccagactgggcagacccatcggcgccctggccagaggcgccatcggcggcagaggcctgcccatcatccagagaggcctgcccagaggcggcctgagaggcggcagagccaccagaaccctgctgagaggcggcatgagcctgagaggccagaacctgctgagaggcggcagagccgtggcccccagaatgggcctgagaagaggcggcgtgagaggcagaggcggccccggcagaggcggcctgggcagaggcgccatgggcagaggcggcatcggcggcagaggcagaggcatgatcggcagaggcagaggcggcttcggcggcagaggcagaggcagaggcagaggcagaggcgccctggccagacccgtgctgaccaaggagcagctggacaaccagctggacgcctacatgagcaagaccaagggccacctggacgccgagctggacgcctacatggcccagaccgaccccgagaccaacgactag

SEQ ID NO: 76709 - DNA, 609 bp, synthetic construct; identical to SEQ ID NO: 76707
  misc_feature 1..609: note = Description of Artificial Sequence: Synthetic coding sequence
  source 1..609: mol_type = other DNA

SEQ ID NO: 76710 - DNA, 636 bp, synthetic construct
  misc_feature 1..636: note = Description of Artificial Sequence: Synthetic coding sequence
  source 1..636: mol_type = other DNA
atggaggagctgagcagcgtgggcgagcaggtgttcgccgccgagtgcatcctgagcaagagactgagaaagggcaagctggagtacctggtgaagtggagaggctggagcagcaagcacaacagctgggagcccgaggagaacatcctggaccccagactgctgctggccttccagaagaaggagcacgagaaggaggtgcagaacagaaagagaggcaagagacccagaggcagacccagaaagctgaccgccatgagcagctgcagcagaagaagcaagctgaaggtgggcggctgcgccggctacgccgaccccaccagccagcaccccctgggcgtgggcggcagacagagagagggcctgggccccagcggcagaggctggcacttctgccagcagagcgtgcccctgctgggcaagcaggagccccccttcttcctgagcctgagcttctgctgccagggcccccagcccgccgagagcagcagcccccccctgcccggcgccagctgcttcagcctgagctgcacccccctgtgctgggtggccggcagcaactgctgcagacaggccctgttcccccccagaggcagcctgggcgacggcaaggagcaggaggcctgcgtgcagtag

SEQ ID NO: 76711 - DNA, 1599 bp, synthetic construct
  misc_feature 1..1599: note = Description of Artificial Sequence: Synthetic coding sequence
  source 1..1599: mol_type = other DNA
atggaggagctgagcagcgtgggcgagcaggtgttcgccgccgagtgcatcctgagcaagagactgagaaagggcaagctggagtacctggtgaagtggagaggctggagcagcaagcacaacagctgggagcccgaggagaacatcctggaccccagactgctgctggccttccagaagaaggagcacgagaaggaggtgcagaacagaaagagaggcaagagacccagaggcagacccagaaagctgaccgccatgagcagctgcagcagaagaagcaagctgaaggagcccgacgcccccagcaagagcaagagcagcagcagcagcagcagcagcaccagcagcagcagcagcagcgacgaggaggacgacagcgacctggacgccaagagaggccccagaggcagagagacccaccccgtgccccagaagaaggcccagatcctggtggccaagcccgagctgaaggaccccatcagaaagaagagaggcagaaagcccctgccccccgagcagaaggccaccagaagacccgtgagcctggccaaggtgctgaagaccgccagaaaggacctgggcgcccccgccagcaagctgcccccccccctgagcgcccccgtggccggcctggccgccctgaaggcccacgccaaggaggcctgcggcggccccagcgccatggccacccccgagaacctggccagcctgatgaagggcatggccagcagccccggcagaggcggcatcagctggcagagcagcatcgtgcactacatgaacagaatgacccagagccaggcccaggccgccagcagactggccctgaaggcccaggccaccaacaagtgcggcctgggcctggacctgaaggtgagaacccagaagggcgagctgggcatgagcccccccggcagcaagatccccaaggcccccagcggcggcgccgtggagcagaaggtgggcaacaccggcggccccccccacacccacggcgccagcagagtgcccgccggctgccccggcccccagcccgcccccacccaggagctgagcctgcaggtgctggacctgcagagcgtgaagaacggcatgcccggcgtgggcctgctggccagacacgccaccgccaccaagggcgtgcccgccaccaaccccgcccccggcaagggcaccggcagcggcctgatcggcgccagcggcgccaccatgcccaccgacaccagcaagagcgagaagctggccagcagagccgtggccccccccacccccgccagcaagagagactgcgtgaagggcagcgccacccccagcggccaggagagcagaaccgcccccggcgaggccagaaaggccgccaccctgcccgagatgagcgccggcgaggagagcagcagcagcgacagcgaccccgacagcgccagcccccccagcaccggccagaaccccagcgtgagcgtgcagaccagccaggactggaagcccaccagaagcctgatcgagcacgtgttcgtgaccgacgtgaccgccaacctgatcaccgtgaccgtgaaggagagccccaccagcgtgggcttcttcaacctgagacactactag

SEQ ID NO: 76712 - DNA, 1935 bp, synthetic construct
  misc_feature 1..1935: note = Description of Artificial Sequence: Synthetic coding sequence
  source 1..1935: mol_type = other DNA
atggaggccgagagaggccccgagagaagacccgccgagagaagcagccccggccagacccccgaggagggcgcccaggccctggccgagttcgccgccctgcacggccccgccctgagagccagcggcgtgcccgagagatactggggcagactgctgcacaagctggagcacgaggtgttcgacgccggcgaggtgttcggcatcatgcaggtggaggaggtggaggaggaggaggacgaggccgccagagaggtgagaaagcagcagcccaaccccggcaacgagctgtgctacaaggtgatcgtgaccagagagagcggcctgcaggccgcccaccccaacagcatcttcctgatcgaccacgcctggacctgcagagtggagcacgccagacagcagctgcagcaggtgcccggcctgctgcacagaatggccaacctgatgggcatcgagttccacggcgagctgcccagcaccgaggccgtggccctggtgctggaggagatgtggaagttcaaccagacctaccagctggcccacggcaccgccgaggagaagatgcccgtgtggtacatcatggacgagttcggcagcagaatccagcacgccgacgtgcccagcttcgccaccgcccccttcttctacatgccccagcaggtggcctacaccctgctgtggcccctgagagacctggacaccggcgaggaggtgaccagagacttcgcctacggcgagaccgaccccctgatcagaaagtgcatgctgctgccctgggcccccaccgacatgctggacctgagcagctgcacccccgagccccccgccgagcactaccaggccatcctggaggagaacaaggagaagctgcccctggacatcaaccccgtggtgcacccccacggccacatcttcaaggtgtacaccgacgtgcagcaggtggccagcagcctgacccaccccagattcaccctgacccagagcgaggccgacgccgacatcctgttcaacttcagccacttcaaggactacagaaagctgagccaggagagacccggcgtgctgctgaaccagttcccctgcgagaacctgctgaccgtgaaggactgcctggccagcatcgccagaagagccggcggccccgagggccccccctggctgcccagaaccttcaacctgagaaccgagctgccccagttcgtgagctacttccagcagagagagagatggggcgaggacaaccactggatctgcaagccctggaacctggccagaagcctggacacccacgtgaccaagagcctgcacagcatcatcagacacagagagagcacccccaaggtggtgagcaagtacatcgagagccccgtgctgttcctgagagaggacgtgggcaaggtgaagttcgacatcagatacatcgtgctgctgagaagcgtgagacccctgagactgttcgtgtacgacgtgttctggctgagattcagcaacagagccttcgccctgaacgacctggacgactacgagaagcacttcaccgtgatgaactacgaccccgacgtggtgctgaagcaggtgcactgcgaggagttcatccccgagttcgagaagcagtaccccgagttcccctggaccgacgtgcaggccgagatcttcagagccttcaccgagctgttccaggtggcctgcgccaagcccccccccctgggcctgtgcgactaccccagcagcagagccatgtacgccgtggacctgatgctgaagtgggacaacggccccgacggcagaagagtgatgcagccccagatcctggaggtgaacttcaaccccgactgcgagagagcctgcagataccaccccaccttcttcaacgacgtgttcagcaccctgttcctggaccagcccggcggctgccacgtgacctgcctggtgtag

SEQ ID NO: 76713 - DNA, 477 bp, synthetic construct
  misc_feature 1..477: note = Description of Artificial Sequence: Synthetic coding sequence
  source 1..477: mol_type = other DNA
atggagctgagcgccatcggcgagcaggtgttcgccgtggagagcatcagaaagaagagagtgagaaagggcaaggtggagtacctggtgaagtggaagggctggccccccaagtacagcacctgggagcccgaggagcacatcctggaccccagactggtgatggcctacgaggagaaggaggagagagacagagccagcggctacagaaagagaggccccaagcccaagagactgctgctgcaggagccccccgcccccgacgtgctgcaggccgccggcgagtgggagcccgccgcccagccccccgaggaggaggccgacgccgacctggccgagggcccccccccctggacccccgccctgcccagcagcgaggtgaccgtgaccgacatcaccgccaacagcatcaccgtgaccttcagagaggcccaggccgccgagggcttcttcagagacagaagcggcaagttctag

SEQ ID NO: 76714 - DNA, 366 bp, synthetic construct
  misc_feature 1..366: note = Description of Artificial Sequence: Synthetic coding sequence
  source 1..366: mol_type = other DNA
atggagctgagcgccatcggcgagcaggtgttcgccgtggagagcatcagaaagaagagagtgagaaagggcaaggtggagtacctggtgaagtggaagggctggccccccaaggaggagagagacagagccagcggctacagaaagagaggccccaagcccaagagactgctgctgcagagactgtacagcatggacctgagaagcagccacaaggccaagggcaaggagaagctgtgcttcagcctgacctgccccctgggcagcggcagccccgagggcgtggtgaaggccggcgcccccgagctggtggacaagggccccctggtgcccaccctgcccttccccctgagaaagcccagatag

SEQ ID NO: 76715 - DNA, 5133 bp, synthetic construct
  misc_feature 1..5133: note = Description of Artificial Sequence: Synthetic coding sequence
  source 1..5133: mol_type = other DNA
atgaacggccacagcgacgaggagagcgtgagaaacagcagcggcgagagcagccagagcgacgacgacagcggcagcgccagcggcagcggcagcggcagcagcagcggcagcagcagcgacggcagcagcagccagagcggcagcagcgacagcgacagcggcagcgagagcggcagccagagcgagagcgagagcgacaccagcagagagaacaaggtgcaggccaagccccccaaggtggacggcgccgagttctggaagagcagccccagcatcctggccgtgcagagaagcgccatcctgaagaagcagcagcagcagcagcagcagcagcagcaccaggccagcagcaacagcggcagcgaggaggacagcagcagcagcgaggacagcgacgacagcagcagcgaggtgaagagaaagaagcacaaggacgaggactggcagatgagcggcagcggcagccccagccagagcggcagcgacagcgagagcgaggaggagagagagaagagcagctgcgacgagaccgagagcgactacgagcccaagaacaaggtgaagagcagaaagccccagaacagaagcaagagcaagaacggcaagaagatcctgggccagaagaagagacagatcgacagcagcgaggaggacgacgacgaggaggactacgacaacgacaagagaagcagcagaagacaggccaccgtgaacgtgagctacaaggaggacgaggagatgaagaccgacagcgacgacctgctggaggtgtgcggcgaggacgtgccccagcccgaggaggaggagttcgagaccatcgagagattcatggactgcagaatcggcagaaagggcgccaccggcgccaccaccaccatctacgccgtggaggccgacggcgaccccaacgccggcttcgagaagaacaaggagcccggcgagatccagtacctgatcaagtggaagggctggagccacatccacaacacctgggagaccgaggagaccctgaagcagcagaacgtgagaggcatgaagaagctggacaactacaagaagaaggaccaggagaccaagagatggctgaagaacgccagccccgaggacgtggagtactacaactgccagcaggagctgaccgacgacctgcacaagcagtaccagatcgtggagagaatcatcgcccacagcaaccagaagagcgccgccggctaccccgactactactgcaagtggcagggcctgccctacagcgagtgcagctgggaggacggcgccctgatcagcaagaagttccaggcctgcatcgacgagtacttcagcagaaaccagagcaagaccacccccttcaaggactgcaaggtgctgaagcagagacccagattcgtggccctgaagaagcagcccagctacatcggcggccacgagggcctggagctgagagactaccagctgaacggcctgaactggctggcccacagctggtgcaagggcaacagctgcatcctggccgacgagatgggcctgggcaagaccatccagaccatcagcttcctgaactacctgttccacgagcaccagctgtacggccccttcctgctggtggtgcccctgagcaccctgaccagctggcagagagagatccagacctgggccagccagatgaacgccgtggtgtacctgggcgacatcaacagcagaaacatgatcagaacccacgagtggacccaccaccagaccaagagactgaagttcaacatcctgctgaccacctacgagatcctgctgaaggacaaggccttcctgggcggcctgaactgggccttcatcggcgtggacgaggcccacagactgaagaacgacgacagcctgctgtacaagaccctgatcgacttcaagagcaaccacagactgctgatcaccggcacccccctgcagaacagcctgaaggagctgtggagcctgctgcacttcatcatgcccgagaagttcagcagctgggaggacttcgaggaggagcacggcaagggcagagagtacggctacgccagcctgcacaaggagctggagcccttcctgctgagaagagtgaagaaggacgtggagaagagcctgcccgccaaggtggagcagatcctgagaatggagatgagcgccctgcagaagcagtactacaagtggatcctgaccagaaactacaaggccctgagcaagggcagcaagggcagcaccagcggcttcctgaacatcatgatggagctgaagaagtgctgcaaccactgctacctgatcaagccccccgacaacaacgagttctacaacaagcaggaggccctgcagcacctgatcagaagcagcggcaagctgatcctgctggacaagctgctgatcagactgagagagagaggcaacagagtgctgatcttcagccagatggtgagaatgctggacatcctggccgagtacctgaagtacagacagttccccttccagagactggacggcagcatcaagggcgagctgagaaagcaggccctggaccacttcaacgccgagggcagcgaggacttctgcttcctgctgagcaccagagccggcggcctgggcatcaacctggccagcgccgacaccgtggtgatcttcgacagcgactggaacccccagaacgacctgcaggcccaggccagagcccacagaatcggccagaagaagcaggtgaacatctacagactggtgaccaagggcagcgtggaggaggacatcctggagagagccaagaagaagatggtgctggaccacctggtgatccagagaatggacaccaccggcaagaccgtgctgcacaccggcagcgcccccagcagcagcacccccttcaacaaggaggagctgagcgccatcctgaagttcggcgccgaggagctgttcaaggagcccgagggcgaggagcaggagccccaggagatggacatcgacgagatcctgaagagagccgagacccacgagaacgagcccggccccctgaccgtgggcgacgagctgctgagccagttcaaggtggccaacttcagcaacatggacgaggacgacatcgagctggagcccgagagaaacagcaagaactgggaggagatcatccccgaggaccagagaagaagactggaggaggaggagagacagaaggagctggaggagatctacatgctgcccagaatgagaaactgcgccaagcagatcagcttcaacggcagcgagggcagaagaagcagaagcagaagatacagcggcagcgacagcgacagcatcagcgagggcaagagacccaagaagagaggcagacccagaaccatccccagagagaacatcaagggcttcagcgacgccgagatcagaagattcatcaagagctacaagaagttcggcggccccctggagagactggacgccatcgccagagacgccgagctggtggacaagagcgagaccgacctgagaagactgggcgagctggtgcacaacggctgcatcaaggccctgaaggacagcagcagcggcaccgagagaaccggcggcagactgggcaaggtgaagggccccaccttcagaatcagcggcgtgcaggtgaacgccaagctggtgatcagccacgaggaggagctgatccccctgcacaagagcatccccagcgaccccgaggagagaaagcagtacaccatcccctgccacaccaaggccgcccacttcgacatcgactggggcaaggaggacgacagcaacctgctgatcggcatctacgagtacggctacggcagctgggagatgatcaagatggaccccgacctgagcctgacccacaagatcctgcccgacgaccccgacaagaagccccaggccaagcagctgcagaccagagccgactacctgatcaagctgctgagcagagacctggccaagaaggaggccctgagcggcgccggcagcagcaagagaagaaaggccagagccaagaagaacaaggccatgaagagcatcaaggtgaaggaggagatcaagagcgacagcagccccctgcccagcgagaagagcgacgaggacgacgacaagctgagcgagagcaagagcgacggcagagagagaagcaagaagagcagcgtgagcgacgcccccgtgcacatcaccgccagcggcgagcccgtgcccatcagcgaggagagcgaggagctggaccagaagaccttcagcatctgcaaggagagaatgagacccgtgaaggccgccctgaagcagctggacagacccgagaagggcctgagcgagagagagcagctggagcacaccagacagtgcctgatcaagatcggcgaccacatcaccgagtgcctgaaggagtacaccaaccccgagcagatcaagcagtggagaaagaacctgtggatcttcgtgagcaagttcaccgagttcgacgccagaaagctgcacaagctgtacaagcacgccatcaagaagagacaggagagccagcagaacagcgaccagaacagcaacctgaacccccacgtgatcagaaaccccgacgtggagagactgaaggagaacaccaaccacgacgacagcagcagagacagctacagcagcgacagacacctgacccagtaccacgaccaccacaaggacagacaccagggcgacagctacaagaagagcgacagcagaaagagaccctacagcagcttcagcaacggcaaggaccacagagactgggaccactacaagcaggacagcagatactacagcgacagagagaagcacagaaagctggacgaccacagaagcagagaccacagaagcaacctggagggcagcctgaaggacagaagccacagcgaccacagaagccacagcgaccacagactgcacagcgaccacagaagcagcagcgagtacacccaccacaagagcagcagagactacagataccacagcgactggcagatggaccacagagccagcagcagcggccccagaagccccctggaccagagaagcccctacggcagcagaagccccttcgagcacagcgtggagcacaagagcacccccgagcacacctggagcagcagaaagacctag

SEQ ID NO: 76716 - DNA, 903 bp, synthetic construct
  misc_feature 1..903: note = Description of Artificial Sequence: Synthetic coding sequence
  source 1..903: mol_type = other DNA
atgttcagcttcaccggcgtgctggtgatctacgaggtgctgaagaagtgcatcggcaagctgatcagcctgagagtgtgcagcatcgagggctgcgtgtgcgtgtacgtgttcgtgcccggcggcaaggagttccacgagaagctgaacatcttccaccagaccaacctgatctgcctgttcctgaacagcagcagaaacctgtggatcttcgtgagcaagttcaccgagttcgacgccagaaagctgcacaagctgtacaagcacgccatcaagaagagacaggagagccagcagaacagcgaccagaacagcaacctgaacccccacgtgatcagaaaccccgacgtggagagactgaaggagaacaccaaccacgacgacagcagcagagacagctacagcagcgacagacacctgacccagtaccacgaccaccacaaggacagacaccagggcgacagctacaagaagagcgacagcagaaagagaccctacagcagcttcagcaacggcaaggaccacagagactgggaccactacaagcaggacagcagatactacagcgacagagagaagcacagaaagctggacgaccacagaagcagagaccacagaagcaacctggagggcagcctgaaggacagaagccacagcgaccacagaagccacagcgaccacagactgcacagcgaccacagaagcagcagcgagtacacccaccacaagagcagcagagactacagataccacagcgactggcagatggaccacagagccagcagcagcggccccagaagccccctggaccagagaagcccctacggcagcagaagccccttcgagcacagcgtggagcacaagagcacccccgagcacacctggagcagcagaaagacctag

SEQ ID NO: 76717 - DNA, 624 bp, synthetic construct
  misc_feature 1..624: note = Description of Artificial Sequence: Synthetic coding sequence
  source 1..624: mol_type = other DNA
atgaacggccacagcgacgaggagagcgtgagaaacagcagcggcgagagcagccagagcgacgacgacagcggcagcgccagcggcagcggcagcggcagcagcagcggcagcagcagcgacggcagcagcagccagagcggcagcagcgacagcgacagcggcagcgagagcggcagccagagcgagagcgagagcgacaccagcagagagaacaaggtgcaggccaagccccccaaggtggacggcgccgagttctggaagagcagccccagcatcctggccgtgcagagaagcgccatcctgaagaagcagcagcagcagcagcagcagcagcagcaccaggccagcagcaacagcggcagcgaggaggacagcagcagcagcgaggacagcgacgacagcagcagcgaggtgaagagaaagaagcacaaggacgaggactggcagatgagcggcagcggcagccccagccagagcggcagcgacagcgagagcgaggaggagagagagaagagcagctgcgacgagaccgagagcgactacgagcccaagaacaaggtgaagagcagaaagccccagaacagaagcaagagcaagaacgagaagaagaagaagaagtag

SEQ ID NO: 76718 - DNA, 660 bp, synthetic construct
  misc_feature 1..660: note = Description of Artificial Sequence: Synthetic coding sequence
  source 1..660: mol_type = other DNA
gtgggcgccgacagagacagccccaccctgctgcccgccggcggcagcaactggctggcccagagattccactgccagaacggctgcatcctgggcgacgagatgggcctgggcaagacctgccagaccatcgccctgttcatctacctggccggcagactgaacgacgagggccccttcctgatcctgtgccccctgagcgtggagcagctggagagaagaaacgccgagatctgcagcagaagcttcctgtgcaacatctgcggcgacaaggaggagagagcctgcctgcagcaggacctgaagcaggagagcagattccacgtgctgctgaccacctacgagatctgcctgaaggacgccagcttcctgaagagcttcccctggagcgtgctggtggtggacgaggcccacagactgaagaaccagagcagcctgctgcacaagaccctgagcgagttcagcgtggtgttcagcctgctgctgaccggcacccccatccagaacagcctgcaggagctgtacagcctgctgagcttcgtggagcccgacctgttcagcaaggaggagtgggagatcctgttcaacgccaccagaatcctgagaaagaacctgagccagcaggtgaactgcaccaacagctgcagccacttctgctag

SEQ ID NO: 76719 - DNA, 1851 bp, synthetic construct
  misc_feature 1..1851: note = Description of Artificial Sequence: Synthetic coding sequence
  source 1..1851: mol_type = other DNA
atgagcgccctgcagaagaagtactacaaggccatcctgatgaaggacctggacgccttcgagaacgagaccgccaagaaggtgaagctgcagaacatcctgagccagctgagaaagtgcgtggaccacccctacctgttcgacggcgtggagcccgagcccttcgaggtgggcgaccacctgaccgaggccagcggcaagctgcacctgctggacaagctgctggccttcctgtacagcggcggccacagagtgctgctgttcagccagatgacccagatgctggacatcctgcaggactacatggactacagaggctacagctacgagagagtggacggcagcgtgagaggcgaggagagacacctggccatcaagaacttcggccagcagcccatcttcgtgttcctgctgagcaccagagccggcggcgtgggcatgaacctgaccgccgccgacaccgtgatcttcgtggacagcgacttcaacccccagaacgacctgcaggccgccgccagagcccacagaatcggccagaacaagagcgtgaaggtgatcagactgatcggcagagacaccgtggaggagatcgtgtacagaaaggccgccagcaagctgcagctgaccaacatgatcatcgagggcggccacttcaccctgggcgcccagaagcccgccgccgacgccgacctgcagctgagcgagatcctgaagttcggcctggacaagctgctggccagcgagggcagcaccatggacgagatcgacctggagagcatcctgggcgagaccaaggacggccagtgggtgagcgacgccctgcccgccgccgagggcggcagcagagaccaggaggagggcaagaaccacatgtacctgttcgagggcaaggactacagcaaggagcccagcaaggaggacagaaagagcttcgagcagctggtgaacctgcagaagaccctgctggagaaggccagccaggagggcagaagcctgagaaacaagggcagcgtgctgatccccggcctggtggagggcagcaccaagagaaagagagtgctgagccccgaggagctggaggacagacagaagaagagacaggaggccgccgccaagagaagaagactgatcgaggagaagaagagacagaaggaggaggccgagcacaagaagaagatggcctggtgggagagcaacaactaccagagcttctgcctgcccagcgaggagagcgagcccgaggacctggagaacggcgaggagagcagcgccgagctggactaccaggaccccgacgccaccagcctgaagtacgtgagcggcgacgtgacccacccccaggccggcgccgaggacgccctgatcgtgcactgcgtggacgacagcggccactggggcagaggcggcctgttcaccgccctggagaagagaagcgccgagcccagaaagatctacgagctggccggcaagatgaaggacctgagcctgggcggcgtgctgctgttccccgtggacgacaaggagagcagaaacaagggccaggacctgctggccctgatcgtggcccagcacagagacagaagcaacgtgctgagcggcatcaagatggccgccctggaggagggcctgaagaagatcttcctggccgccaagaagaagaaggccagcgtgcacctgcccagaatcggccacgccaccaagggcttcaactggtacggcaccgagagactgatcagaaagcacctggccgccagaggcatccccacctacatctactacttccccagaagcaagagcgccgtgctgcacgcccagagcagcagcagcagcagcagacagctggtgccctag

SEQ ID NO: 76720 - DNA, 2694 bp, synthetic construct
  misc_feature 1..2694: note = Description of Artificial Sequence: Synthetic coding sequence
  source 1..2694: mol_type = other DNA
atggagagagccggcgccaccagcagaggcggccaggcccccggcttcctgctgagactgcacaccgagggcagagccgaggccgccagagtgcaggagcaggacctgagacagtggggcctgaccggcatccacctgagaagctaccagctggagggcgtgaactggctggcccagagattccactgccagaacggctgcatcctgggcgacgagatgggcctgggcaagacctgccagaccatcgccctgttcatctacctggccggcagactgaacgacgagggccccttcctgatcctgtgccccctgagcgtgctgagcaactggaaggaggagatgcagagattcgcccccggcctgagctgcgtgacctacgccggcgacaaggaggagagagcctgcctgcagcaggacctgaagcaggagagcagattccacgtgctgctgaccacctacgagatctgcctgaaggacgccagcttcctgaagagcttcccctggagcgtgctggtggtggacgaggcccacagactgaagaaccagagcagcctgctgcacaagaccctgagcgagttcagcgtggtgttcagcctgctgctgaccggcacccccatccagaacagcctgcaggagctgtacagcctgctgagcttcgtggagcccgacctgttcagcaaggaggaggtgggcgacttcatccagagataccaggacatcgagaaggagagcgagagcgccagcgagctgcacaagctgctgcagcccttcctgctgagaagagtgaaggccgaggtggccaccgagctgcccaagaagaccgaggtggtgatctaccacggcatgagcgccctgcagaagaagtactacaaggccatcctgatgaaggacctggacgccttcgagaacgagaccgccaagaaggtgaagctgcagaacatcctgagccagctgagaaagtgcgtggaccacccctacctgttcgacggcgtggagcccgagcccttcgaggtgggcgaccacctgaccgaggccagcggcaagctgcacctgctggacaagctgctggccttcctgtacagcggcggccacagagtgctgctgttcagccagatgacccagatgctggacatcctgcaggactacatggactacagaggctacagctacgagagagtggacggcagcgtgagaggcgaggagagacacctggccatcaagaacttcggccagcagcccatcttcgtgttcctgctgagcaccagagccggcggcgtgggcatgaacctgaccgccgccgacaccgtgatcttcgtggacagcgacttcaacccccagaacgacctgcaggccgccgccagagcccacagaatcggccagaacaagagcgtgaaggtgatcagactgatcggcagagacaccgtggaggagatcgtgtacagaaaggccgccagcaagctgcagctgaccaacatgatcatcgagggcggccacttcaccctgggcgcccagaagcccgccgccgacgccgacctgcagctgagcgagatcctgaagttcggcctggacaagctgctggccagcgagggcagcaccatggacgagatcgacctggagagcatcctgggcgagaccaaggacggccagtgggtgagcgacgccctgcccgccgccgagggcggcagcagagaccaggaggagggcaagaaccacatgtacctgttcgagggcaaggactacagcaaggagcccagcaaggaggacagaaagagcttcgagcagctggtgaacctgcagaagaccctgctggagaaggccagccaggagggcagaagcctgagaaacaagggcagcgtgctgatccccggcctggtggagggcagcaccaagagaaagagagtgctgagccccgaggagctggaggacagacagaagaagagacaggaggccgccgccaagagaagaagactgatcgaggagaagaagagacagaaggaggaggccgagcacaagaagaagatggcctggtgggagagcaacaactaccagagcttctgcctgcccagcgaggagagcgagcccgaggacctggagaacggcgaggagagcagcgccgagctggactaccaggaccccgacgccaccagcctgaagtacgtgagcggcgacgtgacccacccccaggccggcgccgaggacgccctgatcgtgcactgcgtggacgacagcggccactggggcagaggcggcctgttcaccgccctggagaagagaagcgccgagcccagaaagatctacgagctggccggcaagatgaaggacctgagcctgggcggcgtgctgctgttccccgtggacgacaaggagagcagaaacaagggccaggacctgctggccctgatcgtggcccagcacagagacagaagcaacgtgctgagcggcatcaagatggccgccctggaggagggcctgaagaagatcttcctggccgccaagaagaagaaggccagcgtgcacctgcccagaatcggccacgccaccaagggcttcaactggtacggcaccgagagactgatcagaaagcacctggccgccagaggcatccccacctacatctactacttccccagaagcaagagcgccgtgctgcacgcccagagcagcagcagcagcagcagacagctggtgccctag

SEQ ID NO: 76721 - DNA, 2082 bp, synthetic construct
  misc_feature 1..2082: note = Description of Artificial Sequence: Synthetic coding sequence
  source 1..2082: mol_type = other DNA
atggagagagccggcgccaccagcagaggcggccaggcccccggcttcctgctgagactgcacaccgagggcagagccgaggccgccagagtgcaggagcaggacctgagacagtggggcctgaccgccagcgagctgcacaagctgctgcagcccttcctgctgagaagagtgaaggccgaggtggccaccgagctgcccaagaagaccgaggtggtgatctaccacggcatgagcgccctgcagaagaagtactacaaggccatcctgatgaaggacctggacgccttcgagaacgagaccgccaagaaggtgaagctgcagaacatcctgagccagctgagaaagtgcgtggaccacccctacctgttcgacggcgtggagcccgagcccttcgaggtgggcgaccacctgaccgaggccagcggcaagctgcacctgctggacaagctgctggccttcctgtacagcggcggccacagagtgctgctgttcagccagatgacccagatgctggacatcctgcaggactacatggactacagaggctacagctacgagagagtggacggcagcgtgagaggcgaggagagacacctggccatcaagaacttcggccagcagcccatcttcgtgttcctgctgagcaccagagccggcggcgtgggcatgaacctgaccgccgccgacaccgtgatcttcgtggacagcgacttcaacccccagaacgacctgcaggccgccgccagagcccacagaatcggccagaacaagagcgtgaaggtgatcagactgatcggcagagacaccgtggaggagatcgtgtacagaaaggccgccagcaagctgcagctgaccaacatgatcatcgagggcggccacttcaccctgggcgcccagaagcccgccgccgacgccgacctgcagctgagcgagatcctgaagttcggcctggacaagctgctggccagcgagggcagcaccatggacgagatcgacctggagagcatcctgggcgagaccaaggacggccagtgggtgagcgacgccctgcccgccgccgagggcggcagcagagaccaggaggagggcaagaaccacatgtacctgttcgagggcaaggactacagcaaggagcccagcaaggaggacagaaagagcttcgagcagctggtgaacctgcagaagaccctgctggagaaggccagccaggagggcagaagcctgagaaacaagggcagcgtgctgatccccggcctggtggagggcagcaccaagagaaagagagtgctgagccccgaggagctggaggacagacagaagaagagacaggaggccgccgccaagagaagaagactgatcgaggagaagaagagacagaaggaggaggccgagcacaagaagaagatggcctggtgggagagcaacaactaccagagcttctgcctgcccagcgaggagagcgagcccgaggacctggagaacggcgaggagagcagcgccgagctggactaccaggaccccgacgccaccagcctgaagtacgtgagcggcgacgtgacccacccccaggccggcgccgaggacgccctgatcgtgcactgcgtggacgacagcggccactggggcagaggcggcctgttcaccgccctggagaagagaagcgccgagcccagaaagatctacgagctggccggcaagatgaaggacctgagcctgggcggcgtgctgctgttccccgtggacgacaaggagagcagaaacaagggccaggacctgctggccctgatcgtggcccagcacagagacagaagcaacgtgctgagcggcatcaagatggccgccctggaggagggcctgaagaagatcttcctggccgccaagaagaagaaggccagcgtgcacctgcccagaatcggccacgccaccaagggcttcaactggtacggcaccgagagactgatcagaaagcacctggccgccagaggcatccccacctacatctactacttccccagaagcaagagcgccgtgctgcacgcccagagcagcagcagcagcagcagacagctggtgccctag

SEQ ID NO: 76722 - DNA, 2412 bp, synthetic construct
  misc_feature 1..2412: note = Description of Artificial Sequence: Synthetic coding sequence
  source 1..2412: mol_type = other DNA
atggagagagccggcgccaccagcagaggcggccaggcccccggcttcctgctgagactgcacaccgagggcagagccgaggccgccagagtgcaggagcaggacctgagacagtggggcctgaccggcatccacctgagaagctaccagctggagggcgtgaactggctggcccagagattccactgccagaacggctgcatcctgggcgacgagatgggcctgggcaagacctgccagaccatcgccctgttcatctacctggccggcagactgaacgacgagggccccttcctgatcctgtgccccctgagcgtgctgagcaactggaaggaggagatgcagagattcgcccccggcctgagctgcgtgacctacgccggcgacaaggaggagagagcctgcctgcagcaggacctgaagcaggagagcagattccacgtgctgctgaccacctacgagatctgcctgaaggacgccagcttcctgaagagcttcccctggagcgtgctggtggtggacgaggcccacagactgaagaaccagagcagcctgctgcacaagaccctgagcgagttcagcgtggtgttcagcctgctgctgaccggcacccccatccagaacagcctgcaggagctgtacagcctgctgagcttcgtggagcccgacctgttcagcaaggaggaggtgggcgacttcatccagagataccaggacatcgagaaggagagcgagagcgccagcgagctgcacaagctgctgcagcccttcctgctgagaagagtgaaggccgaggtggccaccgagctgcccaagaagaccgaggtggtgatctaccacggcatgagcgccctgcagaagaagtactacaaggccatcctgatgaaggacctggacgccttcgagaacgagaccgccaagaaggtgaagctgcagaacatcctgagccagctgagaaagtgcgtggaccacccctacctgttcgacggcggcgtgggcatgaacctgaccgccgccgacaccgtgatcttcgtggacagcgacttcaacccccagaacgacctgcaggccgccgccagagcccacagaatcggccagaacaagagcgtgaaggtgatcagactgatcggcagagacaccgtggaggagatcgtgtacagaaaggccgccagcaagctgcagctgaccaacatgatcatcgagggcggccacttcaccctgggcgcccagaagcccgccgccgacgccgacctgcagctgagcgagatcctgaagttcggcctggacaagctgctggccagcgagggcagcaccatggacgagatcgacctggagagcatcctgggcgagaccaaggacggccagtgggtgagcgacgccctgcccgccgccgagggcggcagcagagaccaggaggagggcaagaaccacatgtacctgttcgagggcaaggactacagcaaggagcccagcaaggaggacagaaagagcttcgagcagctggtgaacctgcagaagaccctgctggagaaggccagccaggagggcagaagcctgagaaacaagggcagcgtgctgatccccggcctggtggagggcagcaccaagagaaagagagtgctgagccccgaggagctggaggacagacagaagaagagacaggaggccgccgccaagagaagaagactgatcgaggagaagaagagacagaaggaggaggccgagcacaagaagaagatggcctggtgggagagcaacaactaccagagcttctgcctgcccagcgaggagagcgagcccgaggacctggagaacggcgaggagagcagcgccgagctggactaccaggaccccgacgccaccagcctgaagtacgtgagcggcgacgtgacccacccccaggccggcgccgaggacgccctgatcgtgcactgcgtggacgacagcggccactggggcagaggcggcctgttcaccgccctggagaagagaagcgccgagcccagaaagatctacgagctggccggcaagatgaaggacctgagcctgggcggcgtgctgctgttccccgtggacgacaaggagagcagaaacaagggccaggacctgctggccctgatcgtggcccagcacagagacagaagcaacgtgctgagcggcatcaagatggccgccctggaggagggcctgaagaagatcttcctggccgccaagaagaagaaggccagcgtgcacctgcccagaatcggccacgccaccaagggcttcaactggtacggcaccgagagactgatcagaaagcacctggccgccagaggcatccccacctacatctactacttccccagaagcaagagcgccgtgctgcacgcccagagcagcagcagcagcagcagacagctggtgccctag

SEQ ID NO: 76723 - DNA, 1305 bp, synthetic construct
  misc_feature 1..1305: note = Description of Artificial Sequence: Synthetic coding sequence
  source 1..1305: mol_type = other DNA
atggccgtgagctgggagatgagatgggcctggggcagacccgccagattcgcccccggcctgagctgcgtgacctacgccggcgacaaggaggagagagcctgcctgcagcaggacctgaagcaggagagcagattccacgtgctgctgaccacctacgagatctgcctgaaggacgccagcttcctgaagagcttcccctggagcgtgctggtggtggacgaggcccacagactgaagaaccagagcagcctgctgcacaagaccctgagcgagttcagcgtggtgttcagcctgctgctgaccggcacccccatccagaacagcctgcaggagctgtacagcctgctgagcttcgtggagcccgacctgttcagcaaggaggaggtgggcgacttcatccagagataccaggacatcgagaaggagagcgagagcgccagcgagctgcacaagctgctgcagcccttcctgctgagaagagtgaaggccgaggtggccaccgagctgcccaagaagaccgaggtggtgatctaccacggcatgagcgccctgcagaagaagtactacaaggccatcctgatgaaggacctggacgccttcgagaacgagaccgccaagaaggtgaagctgcagaacatcctgagccagctgagaaagtgcgtggaccacccctacctgttcgacggcgtggagcccgagcccttcgaggtgggcgaccacctgaccgaggccagcggcaagctgcacctgctggacaagctgctggccttcctgtacagcggcggccacagagtgctgctgttcagccagatgacccagatgctggacatcctgcaggactacatggactacagaggctacagctacgagagagtggacggcagcgtgagaggcgaggagagacacctggccatcaagaacttcggccagcagcccatcttcgtgttcctgctgagcaccagagccggcggcgtgggcatgaacctgaccgccgccgacaccgtgatcttcgtggacagcgacttcaacccccagaacgacctgcaggccgccgccagagcccacagaatcggccagaacaagagcgtgaaggtgatcagactgatcggcagagacaccgtggaggagatcgtgtacagaaaggccgccagcaagctgcagctgaccaacatgatcatcgagggcggccacttcaccctgggcgcccagaagcccgccgccgacgccgacctgcaggtgagatacagcaacctggtgtggatcaactgctggcccctgagaggcgccccctggatgaagtag

SEQ ID NO: 76724 - DNA, 5487 bp, synthetic construct
  misc_feature 1..5487: note = Description of Artificial Sequence: Synthetic coding sequence
  source 1..5487: mol_type = other DNA
atgatgagaaacaaggacaagagccaggaggaggacagcagcctgcacagcaacgccagcagccacagcgccagcgaggaggccagcggcagcgacagcggcagccagagcgagagcgagcagggcagcgaccccggcagcggccacggcagcgagagcaacagcagcagcgagagcagcgagagccagagcgagagcgagagcgagagcgccggcagcaagagccagcccgtgctgcccgaggccaaggagaagcccgccagcaagaaggagagaatcgccgacgtgaagaagatgtgggaggagtaccccgacgtgtacggcgtgagaagaagcaacagaagcagacaggagcccagcagattcaacatcaaggaggaggccagcagcggcagcgagagcggcagccccaagagaagaggccagagacagctgaagaagcaggagaagtggaagcaggagcccagcgaggacgagcaggagcagggcaccagcgccgagagcgagcccgagcagaagaaggtgaaggccagaagacccgtgcccagaagaaccgtgcccaagcccagagtgaagaagcagcccaagacccagagaggcaagagaaagaagcaggacagcagcgacgaggacgacgacgacgacgaggcccccaagagacagaccagaagaagagccgccaagaacgtgagctacaaggaggacgacgacttcgagaccgacagcgacgacctgatcgagatgaccggcgagggcgtggacgagcagcaggacaacagcgagaccatcgagaaggtgctggacagcagactgggcaagaagggcgccaccggcgccagcaccaccgtgtacgccatcgaggccaacggcgaccccagcggcgacttcgacaccgagaaggacgagggcgagatccagtacctgatcaagtggaagggctggagctacatccacagcacctgggagagcgaggagagcctgcagcagcagaaggtgaagggcctgaagaagctggagaacttcaagaagaaggaggacgagatcaagcagtggctgggcaaggtgagccccgaggacgtggagtacttcaactgccagcaggagctggccagcgagctgaacaagcagtaccagatcgtggagagagtgatcgccgtgaagaccagcaagagcaccctgggccagaccgacttccccgcccacagcagaaagcccgcccccagcaacgagcccgagtacctgtgcaagtggatgggcctgccctacagcgagtgcagctgggaggacgaggccctgatcggcaagaagttccagaactgcatcgacagcttccacagcagaaacaacagcaagaccatccccaccagagagtgcaaggccctgaagcagagacccagattcgtggccctgaagaagcagcccgcctacctgggcggcgagaacctggagctgagagactaccagctggagggcctgaactggctggcccacagctggtgcaagaacaacagcgtgatcctggccgacgagatgggcctgggcaagaccatccagaccatcagcttcctgagctacctgttccaccagcaccagctgtacggccccttcctgatcgtggtgcccctgagcaccctgaccagctggcagagagagttcgagatctgggcccccgagatcaacgtggtggtgtacatcggcgacctgatgagcagaaacaccatcagagagtacgagtggatccacagccagaccaagagactgaagttcaacgccctgatcaccacctacgagatcctgctgaaggacaagaccgtgctgggcagcatcaactgggccttcctgggcgtggacgaggcccacagactgaagaacgacgacagcctgctgtacaagaccctgatcgacttcaagagcaaccacagactgctgatcaccggcacccccctgcagaacagcctgaaggagctgtggagcctgctgcacttcatcatgcccgagaagttcgagttctgggaggacttcgaggaggaccacggcaagggcagagagaacggctaccagagcctgcacaaggtgctggagcccttcctgctgagaagagtgaagaaggacgtggagaagagcctgcccgccaaggtggagcagatcctgagagtggagatgagcgccctgcagaagcagtactacaagtggatcctgaccagaaactacaaggccctggccaagggcaccagaggcagcaccagcggcttcctgaacatcgtgatggagctgaagaagtgctgcaaccactgctacctgatcaagccccccgaggagaacgagagagagaacggccaggagatcctgctgagcctgatcagaagcagcggcaagctgatcctgctggacaagctgctgaccagactgagagagagaggcaacagagtgctgatcttcagccagatggtgagaatgctggacatcctggccgagtacctgaccatcaagcactaccccttccagagactggacggcagcatcaagggcgagatcagaaagcaggccctggaccacttcaacgccgacggcagcgaggacttctgcttcctgctgagcaccagagccggcggcctgggcatcaacctggccagcgccgacaccgtggtgatcttcgacagcgactggaacccccagaacgacctgcaggcccaggccagagcccacagaatcggccagaagaagcaggtgaacatctacagactggtgaccaagggcaccgtggaggaggagatcatcgagagagccaagaagaagatggtgctggaccacctggtgatccagagaatggacaccaccggcagaaccatcctggagaacaacagcggcagaagcaacagcaaccccttcaacaaggaggagctgaccgccatcctgaagttcggcgccgaggacctgttcaaggagctggagggcgaggagagcgagccccaggagatggacatcgacgagatcctgagactggccgagaccagagagaacgaggtgagcaccagcgccaccgacgagctgctgagccagttcaaggtggccaacttcgccaccatggaggacgaggaggagctggaggagagaccccacaaggactgggacgagatcatccccgaggagcagagaaagaaggtggaggaggaggagagacagaaggagctggaggagatctacatgctgcccagaatcagaagcagcaccaagaaggcccagaccaacgacagcgacagcgacaccgagagcaagagacaggcccagagaagcagcgccagcgagagcgagaccgaggacagcgacgacgacaagaagcccaagagaagaggcagacccagaagcgtgagaaaggacctggtggagggcttcaccgacgccgagatcagaagattcatcaaggcctacaagaagttcggcctgcccctggagagactggagtgcatcgccagagacgccgagctggtggacaagagcgtggccgacctgaagagactgggcgagctgatccacaacagctgcgtgagcgccatgcaggagtacgaggagcagctgaaggagaacgccagcgagggcaagggccccggcaagagaagaggccccaccatcaagatcagcggcgtgcaggtgaacgtgaagagcatcatccagcacgaggaggagttcgagatgctgcacaagagcatccccgtggaccccgaggagaagaagaagtactgcctgacctgcagagtgaaggccgcccacttcgacgtggagtggggcgtggaggacgacagcagactgctgctgggcatctacgagcacggctacggcaactgggagctgatcaagaccgaccccgagctgaagctgaccgacaagatcctgcccgtggagaccgacaagaagccccagggcaagcagctgcagaccagagccgactacctgctgaagctgctgagaaagggcctggagaagaagggcgccgtgaccggcggcgaggaggccaagctgaagaagagaaagcccagagtgaagaaggagaacaaggtgcccagactgaaggaggagcacggcatcgagctgagcagccccagacacagcgacaaccccagcgaggagggcgaggtgaaggacgacggcctggagaagagccccatgaagaagaagcagaagaagaaggagaacaaggagaacaaggagaagcagatgagcagcagaaaggacaaggagggcgacaaggagagaaagaagagcaaggacaagaaggagaagcccaagagcggcgacgccaagagcagcagcaagagcaagagaagccagggccccgtgcacatcaccgccggcagcgagcccgtgcccatcggcgaggacgaggacgacgacctggaccaggagaccttcagcatctgcaaggagagaatgagacccgtgaagaaggccctgaagcagctggacaagcccgacaagggcctgaacgtgcaggagcagctggagcacaccagaaactgcctgctgaagatcggcgacagaatcgccgagtgcctgaaggcctacagcgaccaggagcacatcaagctgtggagaagaaacctgtggatcttcgtgagcaagttcaccgagttcgacgccagaaagctgcacaagctgtacaagatggcccacaagaagagaagccaggaggaggaggagcagaagaagaaggacgacgtgaccggcggcaagaagcccttcagacccgaggccagcggcagcagcagagacagcctgatcagccagagccacaccagccacaacctgcacccccagaagccccacctgcccgccagccacggcccccagatgcacggccaccccagagacaactacaaccaccccaacaagagacacttcagcaacgccgacagaggcgactggcagagagagagaaagttcaactacggcggcggcaacaacaaccccccctggggcagcgacagacaccaccagtacgagcagcactggtacaaggaccaccactacggcgacagaagacacatggacgcccacagaagcggcagctacagacccaacaacatgagcagaaagagaccctacgaccagtacagcagcgacagagaccacagaggccacagagactactacgacagacaccaccacgacagcaagagaagaagaagcgacgagttcagaccccagaactaccaccagcaggacttcagaagaatgagcgaccacagacccgccatgggctaccacggccagggccccagcgaccactacagaagcttccacaccgacaagctgggcgagtacaagcagcccctgccccccctgcaccccgccgtgagcgaccccagaagcccccccagccagaagagcccccacgacagcaagagccccctggaccacagaagccccctggagagaagcctggagcagaagaacaaccccgactacaactggaacgtgagaaagacctag

SEQ ID NO: 76725 - DNA, 1506 bp, synthetic construct
  misc_feature 1..1506: note = Description of Artificial Sequence: Synthetic coding sequence
  source 1..1506: mol_type = other DNA
atgatgagaaacaaggacaagagccaggaggaggacagcagcctgcacagcaacgccagcagccacagcgccagcgaggaggccagcggcagcgacagcggcagccagagcgagagcgagcagggcagcgaccccggcagcggccacggcagcgagagcaacagcagcagcgagagcagcgagagccagagcgagagcgagagcgagagcgccggcagcaagagccagcccgtgctgcccgaggccaaggagaagcccgccagcaagaaggagagaatcgccgacgtgaagaagatgtgggaggagtaccccgacgtgtacggcgtgagaagaagcaacagaagcagacaggagcccagcagattcaacatcaaggaggaggccagcagcggcagcgagagcggcagccccaagagaagaggccagagacagctgaagaagcaggagaagtggaagcaggagcccagcgaggacgagcaggagcagggcaccagcgccgagagcgagcccgagcagaagaaggtgaaggccagaagacccgtgcccagaagaaccgtgcccaagcccagagtgaagaagcagcccaagacccagagaggcaagagaaagaagcaggacagcagcgacgaggacgacgacgacgacgaggcccccaagagacagaccagaagaagagccgccaagaacgtgagctacaaggaggacgacgacttcgagaccgacagcgacgacctgatcgagatgaccggcgagggcgtggacgagcagcaggacaacagcgagaccatcgagaaggtgctggacagcagactgggcaagaagggcgccaccggcgccagcaccaccgtgtacgccatcgaggccaacggcgaccccagcggcgacttcgacaccgagaaggacgagggcgagatccagtacctgatcaagtggaagggctggagctacatccacagcacctgggagagcgaggagagcctgcagcagcagaaggtgaagggcctgaagaagctggagaacttcaagaagaaggaggacgagatcaagcagtggctgggcaaggtgagccccgaggacgtggagtacttcaactgccagcaggagctggccagcgagctgaacaagcagtaccagatcgtggagagagtgatcgccgtgaagaccagcaagagcaccctgggccagaccgacttccccgcccacagcagaaagcccgcccccagcaacgagcccgagtacctgtgcaagtggatgggcctgccctacagcgagtgcagctgggaggacgaggccctgatcggcaagaagttccagaactgcatcgacagcttccacagcagaaacaacagcaagaccatccccaccagagagtgcaaggccctgaagcagagacccagattcgtggccctgaagaagcagcccgcctacctgggcggcgagaacctggagctgagagactaccagctggagggcctgaactggctggcccacagctggtgcaagtag

SEQ ID NO: 76726 - DNA, 1545 bp, synthetic construct
  misc_feature 1..1545: note = Description of Artificial Sequence: Synthetic coding sequence
  source 1..1545: mol_type = other DNA
atggcccacaagcagagagaggactacctgaacctgagcccctgcgtgttcacctggtacagaaccttcagccagctggccttcgacggcgagaagctgagccacagcgccagcgaggaggccagcggcagcgacagcggcagccagagcgagagcgagcagggcagcgaccccggcagcggccacggcagcgagagcaacagcagcagcgagagcagcgagagccagagcgagagcgagagcgagagcgccggcagcaagagccagcccgtgctgcccgaggccaaggagaagcccgccagcaagaaggagagaatcgccgacgtgaagaagatgtgggaggagtaccccgacgtgtacggcgtgagaagaagcaacagaagcagacaggagcccagcagattcaacatcaaggaggaggccagcagcggcagcgagagcggcagccccaagagaagaggccagagacagctgaagaagcaggagaagtggaagcaggagcccagcgaggacgagcaggagcagggcaccagcgccgagagcgagcccgagcagaagaaggtgaaggccagaagacccgtgcccagaagaaccgtgcccaagcccagagtgaagaagcagcccaagacccagagaggcaagagaaagaagcaggacagcagcgacgaggacgacgacgacgacgaggcccccaagagacagaccagaagaagagccgccaagaacgtgagctacaaggaggacgacgacttcgagaccgacagcgacgacctgatcgagatgaccggcgagggcgtggacgagcagcaggacaacagcgagaccatcgagaaggtgctggacagcagactgggcaagaagggcgccaccggcgccagcaccaccgtgtacgccatcgaggccaacggcgaccccagcggcgacttcgacaccgagaaggacgagggcgagatccagtacctgatcaagtggaagggctggagctacatccacagcacctgggagagcgaggagagcctgcagcagcagaaggtgaagggcctgaagaagctggagaacttcaagaagaaggaggacgagatcaagcagtggctgggcaaggtgagccccgaggacgtggagtacttcaactgccagcaggagctggccagcgagctgaacaagcagtaccagatcgtggagagagtgatcgccgtgaagaccagcaagagcaccctgggccagaccgacttccccgcccacagcagaaagcccgcccccagcaacgagcccgagtacctgtgcaagtggatgggcctgccctacagcgagtgcagctgggaggacgaggccctgatcggcaagaagttccagaactgcatcgacagcttccacagcagaaacaacagcaagaccatccccaccagagagtgcaaggccctgaagcagagacccagattcgtggccctgaagaagcagcccgcctacctgggcggcgagaacctggagctgagagactaccagctggagggcctgaactggctggcccacagctggtgcaagtag

SEQ ID NO: 76727 - DNA, 552 bp, synthetic construct
  misc_feature 1..552: note = Description of Artificial Sequence: Synthetic coding sequence
  source 1..552: mol_type = other DNA
atgatgagaaacaaggacaagagccaggaggaggacagcagcctgcacagcaacgccagcagccacagcgccagcgaggaggccagcggcagcgacagcggcagccagagcgagagcgagcagggcagcgaccccggcagcggccacggcagcgagagcaacagcagcagcgagagcagcgagagccagagcgagagcgagagcgagagcgccggcagcaagagccagcccgtgctgcccgaggccaaggagaagcccgccagcaagaaggagagaatcgccgacgtgaagaagatgtgggaggagtaccccgacgtgtacggcgtgagaagaagcaacagaagcagacaggagcccagcagattcaacatcaaggaggaggccagcagcggcagcgagagcggcagccccaagagaagaggccagagacagctgaagaagcaggagaagtggaagcaggagcccagcgaggacgagcaggagcagggcaccagcgccgagagcgagcccgagcagaagaaggtgaaggccagaagacccgtgcccagatag

SEQ ID NO: 76728 - DNA, 5220 bp, synthetic construct
  misc_feature 1..5220: note = Description of Artificial Sequence: Synthetic coding sequence
  source 1..5220: mol_type = other DNA
atgatgagaaacaaggacaagagccaggaggaggacagcagcctgcacagcaacgccagcagccacagcgccagcgaggaggccagcggcagcgacagcggcagccagagcgagagcgagcagggcagcgaccccggcagcggccacggcagcgagagcaacagcagcagcgagagcagcgagagccagagcgagagcgagagcgagagcgccggcagcaagagccagcccgtgctgcccgaggccaaggagaagcccgccagcaagaaggagagaatcgccgacgtgaagaagatgtgggaggagtaccccgacgtgtacggcgtgagaagaagcaacagaagcagacaggagcccagcagattcaacatcaaggaggaggccagcagcggcagcgagagcggcagccccaagagaagaggccagagacagctgaagaagcaggagaagtggaagcaggagcccagcgaggacgagcaggagcagggcaccagcgccgagagcgagcccgagcagaagaaggtgaaggccagaagacccgtgcccagaagaaccgtgcccaagcccagagtgaagaagcagcccaagacccagagaggcaagagaaagaagcaggacagcagcgacgaggacgacgacgacgacgaggcccccaagagacagaccagaagaagagccgccaagaacgtgagctacaaggaggacgacgacttcgagaccgacagcgacgacctgatcgagatgaccggcgagggcgtggacgagcagcaggacaacagcgagaccatcgagaaggtgctggacagcagactgggcaagaagggcgccaccggcgccagcaccaccgtgtacgccatcgaggccaacggcgaccccagcggcgacttcgacaccgagaaggacgagggcgagatccagtacctgatcaagtggaagggctggagctacatccacagcacctgggagagcgaggagagcctgcagcagcagaaggtgaagggcctgaagaagctggagaacttcaagaagaaggaggacgagatcaagcagtggctgggcaaggtgagccccgaggacgtggagtacttcaactgccagcaggagctggccagcgagctgaacaagcagtaccagatcgtggagagagtgatcgccgtgaagaccagcaagagcaccctgggccagaccgacttccccgcccacagcagaaagcccgcccccagcaacgagcccgagtacctgtgcaagtggatgggcctgccctacagcgagtgcagctgggaggacgaggccctgatcggcaagaagttccagaactgcatcgacagcttccacagcagaaacaacagcaagaccatccccaccagagagtgcaaggccctgaagcagagacccagattcgtggccctgaagaagcagcccgcctacctgggcggcgagaacctggagctgagagactaccagctggagggcctgaactggctggcccacagctggtgcaagaacaacagcgtgatcctggccgacgagatgggcctgggcaagaccatccagaccatcagcttcctgagctacctgttccaccagcaccagctgtacggccccttcctgatcgtggtgcccctgagcaccctgaccagctggcagagagagttcgagatctgggcccccgagatcaacgtggtggtgtacatcggcgacctgatgagcagaaacaccatcagagagtacgagtggatccacagccagaccaagagactgaagttcaacgccctgatcaccacctacgagatcctgctgaaggacaagaccgtgctgggcagcatcaactgggccttcctgggcgtggacgaggcccacagactgaagaacgacgacagcctgctgtacaagaccctgatcgacttcaagagcaaccacagactgctgatcaccggcacccccctgcagaacagcctgaaggagctgtggagcctgctgcacttcatcatgcccgagaagttcgagttctgggaggacttcgaggaggaccacggcaagggcagagagaacggctaccagagcctgcacaaggtgctggagcccttcctgctgagaagagtgaagaaggacgtggagaagagcctgcccgccaaggtggagcagatcctgagagtggagatgagcgccctgcagaagcagtactacaagtggatcctgaccagaaactacaaggccctggccaagggcaccagaggcagcaccagcggcttcctgaacatcgtgatggagctgaagaagtgctgcaaccactgctacctgatcaagccccccgaggagaacgagagagagaacggccaggagatcctgctgagcctgatcagaagcagcggcaagctgatcctgctggacaagctgctgaccagactgagagagagaggcaacagagtgctgatcttcagccagatggtgagaatgctggacatcctggccgagtacctgaccatcaagcactaccccttccagagactggacggcagcatcaagggcgagatcagaaagcaggccctggaccacttcaacgccgacggcagcgaggacttctgcttcctgctgagcaccagagccggcggcctgggcatcaacctggccagcgccgacaccgtggtgatcttcgacagcgactggaacccccagaacgacctgcaggcccaggccagagcccacagaatcggccagaagaagcaggtgaacatctacagactggtgaccaagggcaccgtggaggaggagatcatcgagagagccaagaagaagatggtgctggaccacctggtgatccagagaatggacaccaccggcagaaccatcctggagaacaacagcggcagaagcaacagcaaccccttcaacaaggaggagctgaccgccatcctgaagttcggcgccgaggacctgttcaaggagctggagggcgaggagagcgagccccaggagatggacatcgacgagatcctgagactggccgagaccagagagaacgaggtgagcaccagcgccaccgacgagctgctgagccagttcaaggtggccaacttcgccaccatggaggacgaggaggagctggaggagagaccccacaaggactgggacgagatcatccccgaggagcagagaaagaaggtggaggaggaggagagacagaaggagctggaggagatctacatgctgcccagaatcagaagcagcaccaagaaggcccagaccaacgacagcgacagcgacaccgagagcaagagacaggcccagagaagcagcgccagcgagagcgagaccgaggacagcgacgacgacaagaagcccaagagaagaggcagacccagaagcgtgagaaaggacctggtggagggcttcaccgacgccgagatcagaagattcatcaaggcctacaagaagttcggcctgcccctggagagactggagtgcatcgccagagacgccgagctggtggacaagagcgtggccgacctgaagagactgggcgagctgatccacaacagctgcgtgagcgccatgcaggagtacgaggagcagctgaaggagaacgccagcgagggcaagggccccggcaagagaagaggccccaccatcaagatcagcggcgtgcaggtgaacgtgaagagcatcatccagcacgaggaggagttcgagatgctgcacaagagcatccccgtggaccccgaggagaagaagaagtactgcctgacctgcagagtgaaggccgcccacttcgacgtggagtggggcgtggaggacgacagcagactgctgctgggcatctacgagcacggctacggcaactgggagctgatcaagaccgaccccgagctgaagctgaccgacaagatcctgcccgtggagaccgacaagaagccccagggcaagcagctgcagaccagagccgactacctgctgaagctgctgagaaagggcctggagaagaagggcgccgtgaccggcggcgaggaggccaagctgaagaagagaaagcccagagtgaagaaggagaacaaggtgcccagactgaaggaggagcacggcatcgagctgagcagccccagacacagcgacaaccccagcgaggagggcgaggtgaaggacgacggcctggagaagagccccatgaagaagaagcagaagaagaaggagaacaaggagaacaaggagaagcagatgagcagcagaaaggacaaggagggcgacaaggagagaaagaagagcaaggacaagaaggagaagcccaagagcggcgacgccaagagcagcagcaagagcaagagaagccagggccccgtgcacatcaccgccggcagcgagcccgtgcccatcggcgaggacgaggacgacgacctggaccaggagaccttcagcatctgcaaggagagaatgagacccgtgaagaaggccctgaagcagctggacaagcccgacaagggcctgaacgtgcaggagcagctggagcacaccagaaactgcctgctgaagatcggcgacagaatcgccgagtgcctgaaggcctacagcgaccaggagcacatcaagctgtggagaagaaacctgtggatcttcgtgagcaagttcaccgagttcgacgccagaaagctgcacaagctgtacaagatggcccacaagaagagaagccaggaggaggaggagcagaagaagaaggacgacgtgaccggcggcaagaagcccttcagacccgaggccagcggcagcagcagagacagcctgatcagccagagccacaccagccacaacctgcacccccagaagccccacctgcccgccagccacggcccccagatgcacggccaccccagagacaactacaaccaccccaacaagagacacttcagcaacgccgacagaggcgactggcagagagagagaaagttcaactacggcggcggcaacaacaaccccccctggggcagcgacagacaccaccagtacgagcagcactggtacaaggaccaccactacggcgacagaagacacatggacgcccacagaagcggcagctacagacccaacaacatgagcagaaagagaccctacgaccagtacagcagcgacagagaccacagaggccacagagactactacgacagatacgccaagggctgcgagacccccggcgccaacctgtgccaggagctgttcctgggcagaaagtag

SEQ ID NO: 76729 - DNA, 6003 bp, synthetic construct
  misc_feature 1..6003: note = Description of Artificial Sequence: Synthetic coding sequence
  source 1..6003: mol_type = other DNA
atgaaggccgccgacaccgtgatcctgtgggccagaagcaagaacgaccagctgagaatcagcttcccccccggcctgtgctggggcgacagaatgcccgacaaggacgacatcagactgctgcccagcgccctgggcgtgaagaagagaaagagaggccccaagaagcagaaggagaacaagcccggcaagcccagaaagagaaagaagagagacagcgaggaggagttcggcagcgagagagacgagtacagagagaagagcgagagcggcggcagcgagtacggcaccggccccggcagaaagagaagaagaaagcacagagagaagaaggagaagaagaccaagagaagaaagaagggcgagggcgacggcggccagaagcaggtggagcagaagagcagcgccaccctgctgctgacctggggcctggaggacgtggagcacgtgttcagcgaggaggactaccacaccctgaccaactacaaggccttcagccagttcatgagacccctgatcgccaagaagaaccccaagatccccatgagcaagatgatgaccatcctgggcgccaagtggagagagttcagcgccaacaaccccttcaagggcagcgccgccgccgtggccgccgccgccgccgccgccgccgccgccgtggccgagcaggtgagcgccgccgtgagcagcgccacccccatcgcccccagcggcccccccgccctgccccccccccccgccgccgacatccagcccccccccatcagaagagccaagaccaaggagggcaagggccccggccacaagagaagaagcaagagccccagagtgcccgacggcagaaagaagctgagaggcaagaagatggcccccctgaagatcaagctgggcctgctgggcggcaagagaaagaagggcggcagctacgtgttccagagcgacgagggccccgagcccgaggccgaggagagcgacctggacagcggcagcgtgcacagcgccagcggcagacccgacggccccgtgagaaccaagaagctgaagagaggcagacccggcagaaagaagaagaaggtgctgggctgccccgccgtggccggcgaggaggaggtggacggctacgagaccgaccaccaggactactgcgaggtgtgccagcagggcggcgagatcatcctgtgcgacacctgccccagagcctaccacctggtgtgcctggaccccgagctggacagagcccccgagggcaagtggagctgcccccactgcgagaaggagggcgtgcagtgggaggccaaggaggaggaggaggagtacgaggaggagggcgaggaggagggcgagaaggaggaggaggacgaccacatggagtactgcagagtgtgcaaggacggcggcgagctgctgtgctgcgacgcctgcatcagcagctaccacatccactgcctgaacccccccctgcccgacatccccaacggcgagtggctgtgccccagatgcacctgccccgtgctgaagggcagagtgcagaagatcctgcactggagatggggcgagccccccgtggccgtgcccgccccccagcaggccgacggcaaccccgacgtgcccccccccagacccctgcagggcagaagcgagagagagttcttcgtgaagtgggtgggcctgagctactggcactgcagctgggccaaggagctgcagctggagatcttccacctggtgatgtacagaaactaccagagaaagaacgacatggacgagcccccccccctggactacggcagcggcgaggacgacggcaagagcgacaagagaaaggtgaaggacccccactacgccgagatggaggagaagtactacagattcggcatcaagcccgagtggatgaccgtgcacagaatcatcaaccacagcgtggacaagaagggcaactaccactacctggtgaagtggagagacctgccctacgaccagagcacctgggaggaggacgagatgaacatccccgagtacgaggagcacaagcagagctactggagacacagagagctgatcatgggcgaggaccccgcccagcccagaaagtacaagaagaagaagaaggagctgcagggcgacggcccccccagcagccccaccaacgaccccaccgtgaagtacgagacccagcccagattcatcaccgccaccggcggcaccctgcacatgtaccagctggagggcctgaactggctgagattcagctgggcccagggcaccgacaccatcctggccgacgagatgggcctgggcaagaccatccagaccatcgtgttcctgtacagcctgtacaaggagggccacaccaagggccccttcctggtgagcgcccccctgagcaccatcatcaactgggagagagagttccagatgtgggcccccaagttctacgtggtgacctacaccggcgacaaggacagcagagccatcatcagagagaacgagttcagcttcgaggacaacgccatcaagggcggcaagaaggccttcaagatgaagagagaggcccaggtgaagttccacgtgctgctgaccagctacgagctgatcaccatcgaccaggccgccctgggcagcatcagatgggcctgcctggtggtggacgaggcccacagactgaagaacaaccagagcaagttcttcagagtgctgaacggctacaagatcgaccacaagctgctgctgaccggcacccccctgcagaacaacctggaggagctgttccacctgctgaacttcctgacccccgagagattcaacaacctggagggcttcctggaggagttcgccgacatcagcaaggaggaccagatcaagaagctgcacgacctgctgggcccccacatgctgagaagactgaaggccgacgtgttcaagaacatgcccgccaagaccgagctgatcgtgagagtggagctgagccccatgcagaagaagtactacaagtacatcctgaccagaaacttcgaggccctgaacagcagaggcggcggcaaccaggtgagcctgctgaacatcatgatggacctgaagaagtgctgcaaccacccctacctgttccccgtggccgccatggagagccccaagctgcccagcggcgcctacgagggcggcgccctgatcaagagcagcggcaagctgatgctgctgcagaagatgctgagaaagctgaaggagcagggccacagagtgctgatcttcagccagatgaccaagatgctggacctgctggaggacttcctggactacgagggctacaagtacgagagaatcgacggcggcatcaccggcgccctgagacaggaggccatcgacagattcaacgcccccggcgcccagcagttctgcttcctgctgagcaccagagccggcggcctgggcatcaacctggccaccgccgacaccgtgatcatcttcgacagcgactggaacccccacaacgacatccaggccttcagcagagcccacagaatcggccaggccaacaaggtgatgatctacagattcgtgaccagagccagcgtggaggagagaatcacccaggtggccaagagaaagatgatgctgacccacctggtggtgagacccggcctgggcagcaaggccggcagcatgagcaagcaggagctggacgacatcctgaagttcggcaccgaggagctgttcaaggacgagaacgagggcgagaacaaggaggaggacagcagcgtgatccactacgacaacgaggccatcgccagactgctggacagaaaccaggacgccaccgaggacaccgacgtgcagaacatgaacgagtacctgagcagcttcaaggtggcccagtacgtggtgagagaggaggacaagatcgaggagatcgagagagagatcatcaagcaggaggagaacgtggaccccgactactgggagaagctgctgagacaccactacgagcagcagcaggaggacctggccagaaacctgggcaagggcaagagagtgagaaagcaggtgaactacaacgacgccgcccaggaggaccaggacaaccagagcgagtacagcgtgggcagcgaggaggaggacgaggacttcgacgagagacccgagggcagaagacagagcaagagacagctgagaaacgagaaggacaagcccctgccccccctgctggccagagtgggcggcaacatcgaggtgctgggcttcaacaccagacagagaaaggccttcctgaacgccgtgatgagatggggcatgcccccccaggacgccttcaccacccagtggctggtgagagacctgagaggcaagaccgagaaggagttcaaggcctacgtgagcctgttcatgagacacctgtgcgagcccggcgccgacggcagcgagaccttcgccgacggcgtgcccagagagggcctgagcagacagcaggtgctgaccagaatcggcgtgatgagcctggtgaagaagaaggtgcaggagttcgagcacatcaacggcagatggagcatgcccgagctgatgcccgaccccagcgccgacagcaagagaagcagcagagccagcagccccaccaagaccagccccaccacccccgaggccagcgccaccaacagcccctgcaccagcaagcccgccacccccgcccccagcgagaagggcgagggcatcagaacccccctggagaaggaggaggccgagaaccaggaggagaagcccgagaagaacagcagaatcggcgagaagatggagaccgaggccgacgcccccagccccgcccccagcctgggcgagagactggagcccagaaagatccccctggaggacgaggtgcccggcgtgcccggcgagatggagcccgagcccggctacagaggcgacagagagaagagcgccaccgagagcacccccggcgagagaggcgaggagaagcccctggacggccaggagcacagagagagacccgagggcgagaccggcgacctgggcaagagagaggacgtgaagggcgacagagagctgagacccggccccagagacgagcccagaagcaacggcagaagagaggagaagaccgagaagcccagattcatgttcaacatcgccgacggcggcttcaccgagctgcacaccctgtggcagaacgaggagagagccgccatcagcagcggcaagctgaacgagatctggcacagaagacacgactactggctgctggccggcatcgtgctgcacggctacgccagatggcaggacatccagaacgacgcccagttcgccatcatcaacgagcccttcaagaccgaggccaacaagggcaacttcctggagatgaagaacaagttcctggccagaagattcaagctgctggagcaggccctggtgatcgaggagcagctgagaagagccgcctacctgaacctgagccaggagcccgcccaccccgccatggccctgcacgccagattcgccgaggccgagtgcctggccgagagccaccagcacctgagcaaggagagcctggccggcaacaagcccgccaacgccgtgctgcacaaggtgctgaaccagctggaggagctgctgagcgacatgaaggccgacgtgaccagactgcccgccaccctgagcagaatcccccccatcgccgccagactgcagatgagcgagagaagcatcctgagcagactggccagcaagggcaccgagccccaccccacccccgcctacccccccggcccctacgccaccccccccggctacggcgccgccttcagcgccgcccccgtgggcgccctggccgccgccggcgccaactacagccagatgcccgccggcagcttcatcaccgccgccaccaacggcccccccgtgctggtgaagaaggagaaggagatggtgggcgccctggtgagcgacggcctggacagaaaggagcccagagccggcgaggtgatctgcatcgacgactag

SEQ ID NO: 76730 - DNA, 5901 bp, synthetic construct
  misc_feature 1..5901: note = Description of Artificial Sequence: Synthetic coding sequence
  source 1..5901: mol_type = other DNA
atgaaggccgccgacaccgtgatcctgtgggccagaagcaagaacgaccagctgagaatcagcttcccccccggcctgtgctggggcgacagaatgcccgacaaggacgacatcagactgctgcccagcgccctgggcgtgaagaagagaaagagaggccccaagaagcagaaggagaacaagcccggcaagcccagaaagagaaagaagagagacagcgaggaggagttcggcagcgagagagacgagtacagagagaagagcgagagcggcggcagcgagtacggcaccggccccggcagaaagagaagaagaaagcacagagagaagaaggagaagaagaccaagagaagaaagaagggcgagggcgacggcggccagaagcaggtggagcagaagagcagcgccaccctgctgctgacctggggcctggaggacgtggagcacgtgttcagcgaggaggactaccacaccctgaccaactacaaggccttcagccagttcatgagacccctgatcgccaagaagaaccccaagatccccatgagcaagatgatgaccatcctgggcgccaagtggagagagttcagcgccaacaaccccttcaagggcagcgccgccgccgtggccgccgccgccgccgccgccgccgccgccgtggccgagcaggtgagcgccgccgtgagcagcgccacccccatcgcccccagcggcccccccgccctgccccccccccccgccgccgacatccagcccccccccatcagaagagccaagaccaaggagggcaagggccccggccacaagagaagaagcaagagccccagagtgcccgacggcagaaagaagctgagaggcaagaagatggcccccctgaagatcaagctgggcctgctgggcggcaagagaaagaagggcggcagctacgtgttccagagcgacgagggccccgagcccgaggccgaggagagcgacctggacagcggcagcgtgcacagcgccagcggcagacccgacggccccgtgagaaccaagaagctgaagagaggcagacccggcagaaagaagaagaaggtgctgggctgccccgccgtggccggcgaggaggaggtggacggctacgagaccgaccaccaggactactgcgaggtgtgccagcagggcggcgagatcatcctgtgcgacacctgccccagagcctaccacctggtgtgcctggaccccgagctggacagagcccccgagggcaagtggagctgcccccactgcgagaaggagggcgtgcagtgggaggccaaggaggaggaggaggagtacgaggaggagggcgaggaggagggcgagaaggaggaggaggacgaccacatggagtactgcagagtgtgcaaggacggcggcgagctgctgtgctgcgacgcctgcatcagcagctaccacatccactgcctgaacccccccctgcccgacatccccaacggcgagtggctgtgccccagatgcacctgccccgtgctgaagggcagagtgcagaagatcctgcactggagatggggcgagccccccgtggccgtgcccgccccccagcaggccgacggcaaccccgacgtgcccccccccagacccctgcagggcagaagcgagagagagttcttcgtgaagtgggtgggcctgagctactggcactgcagctgggccaaggagctgcagctggagatcttccacctggtgatgtacagaaactaccagagaaagaacgacatggacgagcccccccccctggactacggcagcggcgaggacgacggcaagagcgacaagagaaaggtgaaggacccccactacgccgagatggaggagaagtactacagattcggcatcaagcccgagtggatgaccgtgcacagaatcatcaaccacagcgtggacaagaagggcaactaccactacctggtgaagtggagagacctgccctacgaccagagcacctgggaggaggacgagatgaacatccccgagtacgaggagcacaagcagagctactggagacacagagagctgatcatgggcgaggaccccgcccagcccagaaagtacaagaagaagaagaaggagctgcagggcgacggcccccccagcagccccaccaacgaccccaccgtgaagtacgagacccagcccagattcatcaccgccaccggcggcaccctgcacatgtaccagctggagggcctgaactggctgagattcagctgggcccagggcaccgacaccatcctggccgacgagatgggcctgggcaagaccatccagaccatcgtgttcctgtacagcctgtacaaggagggccacaccaagggccccttcctggtgagcgcccccctgagcaccatcatcaactgggagagagagttccagatgtgggcccccaagttctacgtggtgacctacaccggcgacaaggacagcagagccatcatcagagagaacgagttcagcttcgaggacaacgccatcaagggcggcaagaaggccttcaagatgaagagagaggcccaggtgaagttccacgtgctgctgaccagctacgagctgatcaccatcgaccaggccgccctgggcagcatcagatgggcctgcctggtggtggacgaggcccacagactgaagaacaaccagagcaagttcttcagagtgctgaacggctacaagatcgaccacaagctgctgctgaccggcacccccctgcagaacaacctggaggagctgttccacctgctgaacttcctgacccccgagagattcaacaacctggagggcttcctggaggagttcgccgacatcagcaaggaggaccagatcaagaagctgcacgacctgctgggcccccacatgctgagaagactgaaggccgacgtgttcaagaacatgcccgccaagaccgagctgatcgtgagagtggagctgagccccatgcagaagaagtactacaagtacatcctgaccagaaacttcgaggccctgaacagcagaggcggcggcaaccaggtgagcctgctgaacatcatgatggacctgaagaagtgctgcaaccacccctacctgttccccgtggccgccatggagagccccaagctgcccagcggcgcctacgagggcggcgccctgatcaagagcagcggcaagctgatgctgctgcagaagatgctgagaaagctgaaggagcagggccacagagtgctgatcttcagccagatgaccaagatgctggacctgctggaggacttcctggactacgagggctacaagtacgagagaatcgacggcggcatcaccggcgccctgagacaggaggccatcgacagattcaacgcccccggcgcccagcagttctgcttcctgctgagcaccagagccggcggcctgggcatcaacctggccaccgccgacaccgtgatcatcttcgacagcgactggaacccccacaacgacatccaggccttcagcagagcccacagaatcggccaggccaacaaggtgatgatctacagattcgtgaccagagccagcgtggaggagagaatcacccaggtggccaagagaaagatgatgctgacccacctggtggtgagacccggcctgggcagcaaggccggcagcatgagcaagcaggagctggacgacatcctgaagttcggcaccgaggagctgttcaaggacgagaacgagggcgagaacaaggaggaggacagcagcgtgatccactacgacaacgaggccatcgccagactgctggacagaaaccaggacgccaccgaggacaccgacgtgcagaacatgaacgagtacctgagcagcttcaaggtggcccagtacgtggtgagagaggaggacaagatcgaggagatcgagagagagatcatcaagcaggaggagaacgtggaccccgactactgggagaagctgctgagacaccactacgagcagcagcaggaggacctggccagaaacctgggcaagggcaagagagtgagaaagcaggtgaactacaacgacgccgcccaggaggaccaggacaaccagagcgagtacagcgtgggcagcgaggaggaggacgaggacttcgacgagagacccgagggcagaagacagagcaagagacagctgagaaacgagaaggacaagcccctgccccccctgctggccagagtgggcggcaacatcgaggtgctgggcttcaacaccagacagagaaaggccttcctgaacgccgtgatgagatggggcatgcccccccaggacgccttcaccacccagtggctggtgagagacctgagaggcaagaccgagaaggagttcaaggcctacgtgagcctgttcatgagacacctgtgcgagcccggcgccgacggcagcgagaccttcgccgacggcgtgcccagagagggcctgagcagacagcaggtgctgaccagaatcggcgtgatgagcctggtgaagaagaaggtgcaggagttcgagcacatcaacggcagatggagcatgcccgagctgatgcccgaccccagcgccgacagcaagagaagcagcagagccagcagccccaccaagaccagccccaccacccccgaggccagcgccaccaacagcccctgcaccagcaagcccgccacccccgcccccagcgagaagggcgagggcatcagaacccccctggagaaggaggaggccgagaaccaggaggagaagcccgagaagaacagcagaatcggcgagaagatggagaccgaggccgacgcccccagccccgcccccagcctgggcgagagactggagcccagaaagatccccctggaggacgaggtgcccggcgtgcccggcgagatggagcccgagcccggctacagaggcgacagagagaagagcgaggacgtgaagggcgacagagagctgagacccggccccagagacgagcccagaagcaacggcagaagagaggagaagaccgagaagcccagattcatgttcaacatcgccgacggcggcttcaccgagctgcacaccctgtggcagaacgaggagagagccgccatcagcagcggcaagctgaacgagatctggcacagaagacacgactactggctgctggccggcatcgtgctgcacggctacgccagatggcaggacatccagaacgacgcccagttcgccatcatcaacgagcccttcaagaccgaggccaacaagggcaacttcctggagatgaagaacaagttcctggccagaagattcaagctgctggagcaggccctggtgatcgaggagcagctgagaagagccgcctacctgaacctgagccaggagcccgcccaccccgccatggccctgcacgccagattcgccgaggccgagtgcctggccgagagccaccagcacctgagcaaggagagcctggccggcaacaagcccgccaacgccgtgctgcacaaggtgctgaaccagctggaggagctgctgagcgacatgaaggccgacgtgaccagactgcccgccaccctgagcagaatcccccccatcgccgccagactgcagatgagcgagagaagcatcctgagcagactggccagcaagggcaccgagccccaccccacccccgcctacccccccggcccctacgccaccccccccggctacggcgccgccttcagcgccgcccccgtgggcgccctggccgccgccggcgccaactacagccagatgcccgccggcagcttcatcaccgccgccaccaacggcccccccgtgctggtgaagaaggagaaggagatggtgggcgccctggtgagcgacggcctggacagaaaggagcccagagccggcgaggtgatctgcatcgacgactag

SEQ ID NO: 76731 - DNA, 6180 bp, synthetic construct
  misc_feature 1..6180: note = Description of Artificial Sequence: Synthetic coding sequence
  source 1..6180: mol_type = other DNA
atggccagccccctgagagacgaggaggaggaggaggaggagatggtggtgagcgaggaggaggaggaggaggaggaggagggcgacgaggaggaggaggaggaggtggaggccgccgacgaggacgacgaggaggacgacgacgagggcgtgctgggcagaggccccggccacgacagaggcagagacagacacagcccccccggctgccacctgttccccccccccccccccccccccccccccctgcccccccccccccccccccccccccccgacaaggacgacatcagactgctgcccagcgccctgggcgtgaagaagagaaagagaggccccaagaagcagaaggagaacaagcccggcaagcccagaaagagaaagaagagagacagcgaggaggagttcggcagcgagagagacgagtacagagagaagagcgagagcggcggcagcgagtacggcaccggccccggcagaaagagaagaagaaagcacagagagaagaaggagaagaagaccaagagaagaaagaagggcgagggcgacggcggccagaagcaggtggagcagaagagcagcgccaccctgctgctgacctggggcctggaggacgtggagcacgtgttcagcgaggaggactaccacaccctgaccaactacaaggccttcagccagttcatgagacccctgatcgccaagaagaaccccaagatccccatgagcaagatgatgaccatcctgggcgccaagtggagagagttcagcgccaacaaccccttcaagggcagcgccgccgccgtggccgccgccgccgccgccgccgccgccgccgtggccgagcaggtgagcgccgccgtgagcagcgccacccccatcgcccccagcggcccccccgccctgccccccccccccgccgccgacatccagcccccccccatcagaagagccaagaccaaggagggcaagggccccggccacaagagaagaagcaagagccccagagtgcccgacggcagaaagaagctgagaggcaagaagatggcccccctgaagatcaagctgggcctgctgggcggcaagagaaagaagggcggcagctacgtgttccagagcgacgagggccccgagcccgaggccgaggagagcgacctggacagcggcagcgtgcacagcgccagcggcagacccgacggccccgtgagaaccaagaagctgaagagaggcagacccggcagaaagaagaagaaggtgctgggctgccccgccgtggccggcgaggaggaggtggacggctacgagaccgaccaccaggactactgcgaggtgtgccagcagggcggcgagatcatcctgtgcgacacctgccccagagcctaccacctggtgtgcctggaccccgagctggacagagcccccgagggcaagtggagctgcccccactgcgagaaggagggcgtgcagtgggaggccaaggaggaggaggaggagtacgaggaggagggcgaggaggagggcgagaaggaggaggaggacgaccacatggagtactgcagagtgtgcaaggacggcggcgagctgctgtgctgcgacgcctgcatcagcagctaccacatccactgcctgaacccccccctgcccgacatccccaacggcgagtggctgtgccccagatgcacctgccccgtgctgaagggcagagtgcagaagatcctgcactggagatggggcgagccccccgtggccgtgcccgccccccagcaggccgacggcaaccccgacgtgcccccccccagacccctgcagggcagaagcgagagagagttcttcgtgaagtgggtgggcctgagctactggcactgcagctgggccaaggagctgcagctggagatcttccacctggtgatgtacagaaactaccagagaaagaacgacatggacgagcccccccccctggactacggcagcggcgaggacgacggcaagagcgacaagagaaaggtgaaggacccccactacgccgagatggaggagaagtactacagattcggcatcaagcccgagtggatgaccgtgcacagaatcatcaaccacagcgtggacaagaagggcaactaccactacctggtgaagtggagagacctgccctacgaccagagcacctgggaggaggacgagatgaacatccccgagtacgaggagcacaagcagagctactggagacacagagagctgatcatgggcgaggaccccgcccagcccagaaagtacaagaagaagaagaaggagctgcagggcgacggcccccccagcagccccaccaacgaccccaccgtgaagtacgagacccagcccagattcatcaccgccaccggcggcaccctgcacatgtaccagctggagggcctgaactggctgagattcagctgggcccagggcaccgacaccatcctggccgacgagatgggcctgggcaagaccatccagaccatcgtgttcctgtacagcctgtacaaggagggccacaccaagggccccttcctggtgagcgcccccctgagcaccatcatcaactgggagagagagttccagatgtgggcccccaagttctacgtggtgacctacaccggcgacaaggacagcagagccatcatcagagagaacgagttcagcttcgaggacaacgccatcaagggcggcaagaaggccttcaagatgaagagagaggcccaggtgaagttccacgtgctgctgaccagctacgagctgatcaccatcgaccaggccgccctgggcagcatcagatgggcctgcctggtggtggacgaggcccacagactgaagaacaaccagagcaagttcttcagagtgctgaacggctacaagatcgaccacaagctgctgctgaccggcacccccctgcagaacaacctggaggagctgttccacctgctgaacttcctgacccccgagagattcaacaacctggagggcttcctggaggagttcgccgacatcagcaaggaggaccagatcaagaagctgcacgacctgctgggcccccacatgctgagaagactgaaggccgacgtgttcaagaacatgcccgccaagaccgagctgatcgtgagagtggagctgagccccatgcagaagaagtactacaagtacatcctgaccagaaacttcgaggccctgaacagcagaggcggcggcaaccaggtgagcctgctgaacatcatgatggacctgaagaagtgctgcaaccacccctacctgttccccgtggccgccatggagagccccaagctgcccagcggcgcctacgagggcggcgccctgatcaagagcagcggcaagctgatgctgctgcagaagatgctgagaaagctgaaggagcagggccacagagtgctgatcttcagccagatgaccaagatgctggacctgctggaggacttcctggactacgagggctacaagtacgagagaatcgacggcggcatcaccggcgccctgagacaggaggccatcgacagattcaacgcccccggcgcccagcagttctgcttcctgctgagcaccagagccggcggcctgggcatcaacctggccaccgccgacaccgtgatcatcttcgacagcgactggaacccccacaacgacatccaggccttcagcagagcccacagaatcggccaggccaacaaggtgatgatctacagattcgtgaccagagccagcgtggaggagagaatcacccaggtggccaagagaaagatgatgctgacccacctggtggtgagacccggcctgggcagcaaggccggcagcatgagcaagcaggagctggacgacatcctgaagttcggcaccgaggagctgttcaaggacgagaacgagggcgagaacaaggaggaggacagcagcgtgatccactacgacaacgaggccatcgccagactgctggacagaaaccaggacgccaccgaggacaccgacgtgcagaacatgaacgagtacctgagcagcttcaaggtggcccagtacgtggtgagagaggaggacaagatcgaggagatcgagagagagatcatcaagcaggaggagaacgtggaccccgactactgggagaagctgctgagacaccactacgagcagcagcaggaggacctggccagaaacctgggcaagggcaagagagtgagaaagcaggtgaactacaacgacgccgcccaggaggaccaggacaaccagagcgagtacagcgtgggcagcgaggaggaggacgaggacttcgacgagagacccgagggcagaagacagagcaagagacagctgagaaacgagaaggacaagcccctgccccccctgctggccagagtgggcggcaacatcgaggtgctgggcttcaacaccagacagagaaaggccttcctgaacgccgtgatgagatggggcatgcccccccaggacgccttcaccacccagtggctggtgagagacctgagaggcaagaccgagaaggagttcaaggcctacgtgagcctgttcatgagacacctgtgcgagcccggcgccgacggcagcgagaccttcgccgacggcgtgcccagagagggcctgagcagacagcaggtgctgaccagaatcggcgtgatgagcctggtgaagaagaaggtgcaggagttcgagcacatcaacggcagatggagcatgcccgagctgatgcccgaccccagcgccgacagcaagagaagcagcagagccagcagccccaccaagaccagccccaccacccccgaggccagcgccaccaacagcccctgcaccagcaagcccgccacccccgcccccagcgagaagggcgagggcatcagaacccccctggagaaggaggaggccgagaaccaggaggagaagcccgagaagaacagcagaatcggcgagaagatggagaccgaggccgacgcccccagccccgcccccagcctgggcgagagactggagcccagaaagatccccctggaggacgaggtgcccggcgtgcccggcgagatggagcccgagcccggctacagaggcgacagagagaagagcgccaccgagagcacccccggcgagagaggcgaggagaagcccctggacggccaggagcacagagagagacccgagggcgagaccggcgacctgggcaagagagaggacgtgaagggcgacagagagctgagacccggccccagagacgagcccagaagcaacggcagaagagaggagaagaccgagaagcccagattcatgttcaacatcgccgacggcggcttcaccgagctgcacaccctgtggcagaacgaggagagagccgccatcagcagcggcaagctgaacgagatctggcacagaagacacgactactggctgctggccggcatcgtgctgcacggctacgccagatggcaggacatccagaacgacgcccagttcgccatcatcaacgagcccttcaagaccgaggccaacaagggcaacttcctggagatgaagaacaagttcctggccagaagattcaagctgctggagcaggccctggtgatcgaggagcagctgagaagagccgcctacctgaacctgagccaggagcccgcccaccccgccatggccctgcacgccagattcgccgaggccgagtgcctggccgagagccaccagcacctgagcaaggagagcctggccggcaacaagcccgccaacgccgtgctgcacaaggtgctgaaccagctggaggagctgctgagcgacatgaaggccgacgtgaccagactgcccgccaccctgagcagaatcccccccatcgccgccagactgcagatgagcgagagaagcatcctgagcagactggccagcaagggcaccgagccccaccccacccccgcctacccccccggcccctacgccaccccccccggctacggcgccgccttcagcgccgcccccgtgggcgccctggccgccgccggcgccaactacagccagatgcccgccggcagcttcatcaccgccgccaccaacggcccccccgtgctggtgaagaaggagaaggagatggtgggcgccctggtgagcgacggcctggacagaaaggagcccagagccggcgaggtgatctgcatcgacgactag

SEQ ID NO: 76732 - DNA, 5865 bp, synthetic construct
  misc_feature 1..5865: note = Description of Artificial Sequence: Synthetic coding sequence
  source 1..5865: mol_type = other DNA
atgagaggccccgtgggcaccgaggaggagctgcccagactgttcgccgaggagatggagaacgaggacgagatgagcgaggaggaggacggcggcctggaggccttcgacgacttcttccccgtggagcccgtgagcctgcccaagaagaagaagcccaagaagctgaaggagaacaagtgcaagggcaagagaaagaagaaggagggcagcaacgacgagctgagcgagaacgaggaggacctggaggagaagagcgagagcgagggcagcgactacagccccaacaagaagaagaagaagaagctgaaggacaagaaggagaagaaggccaagagaaagaagaaggacgaggacgaggacgacaacgacgacggctgcctgaaggagcccaagagcagcggccagctgatggccgagtggggcctggacgacgtggactacctgttcagcgaggaggactaccacaccctgaccaactacaaggccttcagccagttcctgagacccctgatcgccaagaagaaccccaagatccccatgagcaagatgatgaccgtgctgggcgccaagtggagagagttcagcgccaacaaccccttcaagggcagcagcgccgccgccgccgccgccgccgtggccgccgccgtggagaccgtgaccatcagcccccccctggccgtgagccccccccaggtgccccagcccgtgcccatcagaaaggccaagaccaaggagggcaagggccccggcgtgagaaagaagatcaagggcagcaaggacggcaagaagaagggcaagggcaagaagaccgccggcctgaagttcagattcggcggcatcagcaacaagagaaagaagggcagcagcagcgaggaggacgagagagaggagagcgacttcgacagcgccagcatccacagcgccagcgtgagaagcgagtgcagcgccgccctgggcaagaagagcaagagaagaagaaagaagaagagaatcgacgacggcgacggctacgagaccgaccaccaggactactgcgaggtgtgccagcagggcggcgagatcatcctgtgcgacacctgccccagagcctaccacctggtgtgcctggaccccgagctggagaaggcccccgagggcaagtggagctgcccccactgcgagaaggagggcatccagtgggagcccaaggacgacgacgacgaggaggaggagggcggctgcgaggaggaggaggacgaccacatggagttctgcagagtgtgcaaggacggcggcgagctgctgtgctgcgacgcctgccccagcagctaccacctgcactgcctgaacccccccctgcccgagatccccaacggcgagtggctgtgccccagatgcacctgcccccccctgaagggcaaggtgcagagaatcctgcactggagatggaccgagccccccgcccccttcatggtgggcctgcccggccccgacgtggagcccagcctgcccccccccaagcccctggagggcatccccgagagagagttcttcgtgaagtgggccggcctgagctactggcactgcagctgggtgaaggagctgcagctggagctgtaccacaccgtgatgtacagaaactaccagagaaagaacgacatggacgagcccccccccttcgactacggcagcggcgacgaggacggcaagagcgagaagagaaagaacaaggaccccctgtacgccaagatggaggagagattctacagatacggcatcaagcccgagtggatgatgatccacagaatcctgaaccacagcttcgacaagaagggcgacgtgcactacctgatcaagtggaaggacctgccctacgaccagtgcacctgggagatcgacgacatcgacatcccctactacgacaacctgaagcaggcctactggggccacagagagctgatgctgggcgaggacaccagactgcccaagagactgctgaagaagggcaagaagctgagagacgacaagcaggagaagccccccgacacccccatcgtggaccccaccgtgaagttcgacaagcagccctggtacatcgacagcaccggcggcaccctgcacccctaccagctggagggcctgaactggctgagattcagctgggcccagggcaccgacaccatcctggccgacgagatgggcctgggcaagaccgtgcagaccatcgtgttcctgtacagcctgtacaaggagggccacagcaagggcccctacctggtgagcgcccccctgagcaccatcatcaactgggagagagagttcgagatgtgggcccccgacttctacgtggtgacctacaccggcgacaaggagagcagaagcgtgatcagagagaacgagttcagcttcgaggacaacgccatcagaagcggcaagaaggtgttcagaatgaagaaggaggtgcagatcaagttccacgtgctgctgaccagctacgagctgatcaccatcgaccaggccatcctgggcagcatcgagtgggcctgcctggtggtggacgaggcccacagactgaagaacaaccagagcaagttcttcagagtgctgaacagctacaagatcgactacaagctgctgctgaccggcacccccctgcagaacaacctggaggagctgttccacctgctgaacttcctgacccccgagagattcaacaacctggagggcttcctggaggagttcgccgacatcagcaaggaggaccagatcaagaagctgcacgacctgctgggcccccacatgctgagaagactgaaggccgacgtgttcaagaacatgcccgccaagaccgagctgatcgtgagagtggagctgagccagatgcagaagaagtactacaagttcatcctgaccagaaacttcgaggccctgaacagcaagggcggcggcaaccaggtgagcctgctgaacatcatgatggacctgaagaagtgctgcaaccacccctacctgttccccgtggccgccgtggaggcccccgtgctgcccaacggcagctacgacggcagcagcctggtgaagagcagcggcaagctgatgctgctgcagaagatgctgaagaagctgagagacgagggccacagagtgctgatcttcagccagatgaccaagatgctggacctgctggaggacttcctggagtacgagggctacaagtacgagagaatcgacggcggcatcaccggcggcctgagacaggaggccatcgacagattcaacgcccccggcgcccagcagttctgcttcctgctgagcaccagagccggcggcctgggcatcaacctggccaccgccgacaccgtgatcatctacgacagcgactggaacccccacaacgacatccaggccttcagcagagcccacagaatcggccagaacaagaaggtgatgatctacagattcgtgaccagagccagcgtggaggagagaatcacccaggtggccaagagaaagatgatgctgacccacctggtggtgagacccggcctgggcagcaagagcggcagcatgaccaagcaggagctggacgacatcctgaagttcggcaccgaggagctgttcaaggacgacgtggagggcatgatgagccagggccagagacccgtgacccccatccccgacgtgcagagcagcaagggcggcaacctggccgccagcgccaagaagaagcacggcagcaccccccccggcgacaacaaggacgtggaggacagcagcgtgatccactacgacgacgccgccatcagcaagctgctggacagaaaccaggacgccaccgacgacaccgagctgcagaacatgaacgagtacctgagcagcttcaaggtggcccagtacgtggtgagagaggaggacggcgtggaggaggtggagagagagatcatcaagcaggaggagaacgtggaccccgactactgggagaagctgctgagacaccactacgagcagcagcaggaggacctggccagaaacctgggcaagggcaagagaatcagaaagcaggtgaactacaacgacgccagccaggaggaccaggagtggcaggacgagctgagcgacaaccagagcgagtacagcatcggcagcgaggacgaggacgaggacttcgaggagagacccgagggccagagcggcagaagacagagcagaagacagctgaagagcgacagagacaagcccctgccccccctgctggccagagtgggcggcaacatcgaggtgctgggcttcaacgccagacagagaaaggccttcctgaacgccatcatgagatggggcatgcccccccaggacgccttcaacagccactggctggtgagagacctgagaggcaagagcgagaaggagttcagagcctacgtgagcctgttcatgagacacctgtgcgagcccggcgccgacggcgccgagaccttcgccgacggcgtgcccagagagggcctgagcagacagcacgtgctgaccagaatcggcgtgatgagcctggtgagaaagaaggtgcaggagttcgagcacgtgaacggcaagtacagcacccccgacctgatccccgagggccccgagggcaagaagagcggcgaggtgatcagcagcgaccccaacacccccgtgcccgccagccccgcccacctgctgcccgcccccctgggcctgcccgacaagatggaggcccagctgggctacatggacgagaaggaccccggcgcccagaagcccagacagcccctggaggtgcaggccctgcccgccgccctggacagagtggagagcgaggacaagcacgagagccccgccagcaaggagagagccagagaggagagacccgaggagaccgagaaggccccccccagccccgagcagctgcccagagaggaggtgctgcccgagaaggagaagatcctggacaagctggagctgagcctgatccacagcagaggcgacagcagcgagctgagacccgacgacaccaaggccgaggagaaggagcccatcgagacccagcagaacggcgacaaggaggaggacgacgagggcaagaaggaggacaagaagggcaagttcaagttcatgttcaacatcgccgacggcggcttcaccgagctgcacaccctgtggcagaacgaggagagagccgccgtgagcagcggcaagatctacgacatctggcacagaagacacgactactggctgctggccggcatcgtgacccacggctacgccagatggcaggacatccagaacgaccccagatacatgatcctgaacgagcccttcaagagcgaggtgcacaagggcaactacctggagatgaagaacaagttcctggccagaagattcaagctgctggagcaggccctggtgatcgaggagcagctgagaagagccgcctacctgaacatgacccaggaccccaaccaccccgccatggccctgaacgccagactggccgaggtggagtgcctggccgagagccaccagcacctgagcaaggagagcctggccggcaacaagcccgccaacgccgtgctgcacaaggtgctgaaccagctggaggagctgctgagcgacatgaaggccgacgtgaccagactgcccagcatgctgagcagaatcccccccgtggccgccagactgcagatgagcgagagaagcatcctgagcagactgaccaacagagccggcgaccccaccatccagcagggcgccttcggcagcagccagatgtacagcaacaacttcggccccaacttcagaggccccggccccggcggcatcgtgaactacaaccagatgcccctgggcccctacgtgaccgacatctag

SEQ ID NO: 76733 - DNA, 2427 bp, synthetic construct
  misc_feature 1..2427: note = Description of Artificial Sequence: Synthetic coding sequence
  source 1..2427: mol_type = other DNA
atgatctacagattcgtgaccagagccagcgtggaggagagaatcacccaggtggccaagagaaagatgatgctgacccacctggtggtgagacccggcctgggcagcaagagcggcagcatgaccaagcaggagctggacgacatcctgaagttcggcaccgaggagctgttcaaggacgacgtggagggcatgatgagccagggccagagacccgtgacccccatccccgacgtgcagagcagcaagggcggcaacctggccgccagcgccaagaagaagcacggcagcaccccccccggcgacaacaaggacgtggaggacagcagcgtgatccactacgacgacgccgccatcagcaagctgctggacagaaaccaggacgccaccgacgacaccgagctgcagaacatgaacgagtacctgagcagcttcaaggtggcccagtacgtggtgagagaggaggacggcgtggaggaggtggagagagagatcatcaagcaggaggagaacgtggaccccgactactgggagaagctgctgagacaccactacgagcagcagcaggaggacctggccagaaacctgggcaagggcaagagaatcagaaagcaggtgaactacaacgacgccagccaggaggaccaggagtggcaggacgagctgagcgacaaccagagcgagtacagcatcggcagcgaggacgaggacgaggacttcgaggagagacccgagggccagagcggcagaagacagagcagaagacagctgaagagcgacagagacaagcccctgccccccctgctggccagagtgggcggcaacatcgaggtgctgggcttcaacgccagacagagaaaggccttcctgaacgccatcatgagatggggcatgcccccccaggacgccttcaacagccactggctggtgagagacctgagaggcaagagcgagaaggagttcagagcctacgtgagcctgttcatgagacacctgtgcgagcccggcgccgacggcgccgagaccttcgccgacggcgtgcccagagagggcctgagcagacagcacgtgctgaccagaatcggcgtgatgagcctggtgagaaagaaggtgcaggagttcgagcacgtgaacggcaagtacagcacccccgacctgatccccgagggccccgagggcaagaagagcggcgaggtgatcagcagcgaccccaacacccccgtgcccgccagccccgcccacctgctgcccgcccccctgggcctgcccgacaagatggaggcccagctgggctacatggacgagaaggaccccggcgcccagaagcccagacagcccctggaggtgcaggccctgcccgccgccctggacagagtggagagcgaggacaagcacgagagccccgccagcaaggagagagccagagaggagagacccgaggagaccgagaaggccccccccagccccgagcagctgcccagagaggaggtgctgcccgagaaggagaagatcctggacaagctggagctgagcctgatccacagcagaggcgacagcagcgagctgagacccgacgacaccaaggccgaggagaaggagcccatcgagacccagcagaacggcgacaaggaggaggacgacgagggcaagaaggaggacaagaagggcaagttcaagttcatgttcaacatcgccgacggcggcttcaccgagctgcacaccctgtggcagaacgaggagagagccgccgtgagcagcggcaagatctacgacatctggcacagaagacacgactactggctgctggccggcatcgtgacccacggctacgccagatggcaggacatccagaacgaccccagatacatgatcctgaacgagcccttcaagagcgaggtgcacaagggcaactacctggagatgaagaacaagttcctggccagaagattcaagctgctggagcaggccctggtgatcgaggagcagctgagaagagccgcctacctgaacatgacccaggaccccaaccaccccgccatggccctgaacgccagactggccgaggtggagtgcctggccgagagccaccagcacctgagcaaggagagcctggccggcaacaagcccgccaacgccgtgctgcacaaggtgctgaaccagctggaggagctgctgagcgacatgaaggccgacgtgaccagactgcccagcatgctgagcagaatcccccccgtggccgccagactgcagatgagcgagagaagcatcctgagcagactgaccaacagagccggcgaccccaccatccagcagatcagcagcagacccagagacttccccgtgctgcagagaagcttccccgccgagcccagactgcccggccacctgcccgacccccacggcagagagaagctgccccccttctag

SEQ ID NO: 76734 - DNA, 3588 bp, synthetic construct
  misc_feature 1..3588: note = Description of Artificial Sequence: Synthetic coding sequence
  source 1..3588: mol_type = other DNA
atggtgggcctgcccggccccgacgtggagcccagcctgcccccccccaagcccctggagggcatccccgagagagagttcttcgtgaagtgggccggcctgagctactggcactgcagctgggtgaaggagctgcagctggagctgtaccacaccgtgatgtacagaaactaccagagaaagaacgacatggacgagcccccccccttcgactacggcagcggcgacgaggacggcaagagcgagaagagaaagaacaaggaccccctgtacgccaagatggaggagagattctacagatacggcatcaagcccgagtggatgatgatccacagaatcctgaaccacagcttcgacaagaagggcgacgtgcactacctgatcaagtggaaggacctgccctacgaccagtgcacctgggagatcgacgacatcgacatcccctactacgacaacctgaagcaggcctactggggccacagagagctgatgctgggcgaggacaccagactgcccaagagactgctgaagaagggcaagaagctgagagacgacaagcaggagaagccccccgacacccccatcgtggaccccaccgtgaagttcgacaagcagccctggtacatcgacagcaccggcggcaccctgcacccctaccagctggagggcctgaactggctgagattcagctgggcccagggcaccgacaccatcctggccgacgagatgggcctgggcaagaccgtgcagaccatcgtgttcctgtacagcctgtacaaggagggccacagcaagggcccctacctggtgagcgcccccctgagcaccatcatcaactgggagagagagttcgagatgtgggcccccgacttctacgtggtgacctacaccggcgacaaggagagcagaagcgtgatcagagagaacgagttcagcttcgaggacaacgccatcagaagcggcaagaaggtgttcagaatgaagaaggaggtgcagatcaagttccacgtgctgctgaccagctacgagctgatcaccatcgaccaggccatcctgggcagcatcgagtgggcctgcctggtggtggacgaggcccacagactgaagaacaaccagagcaagttcttcagagtgctgaacagctacaagatcgactacaagctgctgctgaccggcacccccctgcagaacaacctggaggagctgttccacctgctgaacttcctgacccccgagagattcaacaacctggagggcttcctggaggagttcgccgacatcagcaaggaggaccagatcaagaagctgcacgacctgctgggcccccacatgctgagaagactgaaggccgacgtgttcaagaacatgcccgccaagaccgagctgatcgtgagagtggagctgagccagatgcagaagaagtactacaagttcatcctgaccagaaacttcgaggccctgaacagcaagggcggcggcaaccaggtgagcctgctgaacatcatgatggacctgaagaagtgctgcaaccacccctacctgttccccgtggccgccgtggaggcccccgtgctgcccaacggcagctacgacggcagcagcctggtgaagagcagcggcaagctgatgctgctgcagaagatgctgaagaagctgagagacgagggccacagagtgctgatcttcagccagatgaccaagatgctggacctgctggaggacttcctggagtacgagggctacaagtacgagagaatcgacggcggcatcaccggcggcctgagacaggaggccatcgacagattcaacgcccccggcgcccagcagttctgcttcctgctgagcaccagagccggcggcctgggcatcaacctggccaccgccgacaccgtgatcatctacgacagcgactggaacccccacaacgacatccaggccttcagcagagcccacagaatcggccagaacaagaaggtgatgatctacagattcgtgaccagagccagcgtggaggagagaatcacccaggtggccaagagaaagatgatgctgacccacctggtggtgagacccggcctgggcagcaagagcggcagcatgaccaagcaggagctggacgacatcctgaagttcggcaccgaggagctgttcaaggacgacgtggagggcatgatgagccagggccagagacccgtgacccccatccccgacgtgcagagcagcaagggcggcaacctggccgccagcgccaagaagaagcacggcagcaccccccccggcgacaacaaggacgtggaggacagcagcgtgatccactacgacgacgccgccatcagcaagctgctggacagaaaccaggacgccaccgacgacaccgagctgcagaacatgaacgagtacctgagcagcttcaaggtggcccagtacgtggtgagagaggaggacggcgtggaggaggtggagagagagatcatcaagcaggaggagaacgtggaccccgactactgggagaagctgctgagacaccactacgagcagcagcaggaggacctggccagaaacctgggcaagggcaagagaatcagaaagcaggtgaactacaacgacgccagccaggaggaccaggagtggcaggacgagctgagcgacaaccagagcgagtacagcatcggcagcgaggacgaggacgaggacttcgaggagagacccgagggccagagcggcagaagacagagcagaagacagctgaagagcgacagagacaagcccctgccccccctgctggccagagtgggcggcaacatcgaggtgctgggcttcaacgccagacagagaaaggccttcctgaacgccatcatgagatggggcatgcccccccaggacgccttcaacagccactggctggtgagagacctgagaggcaagagcgagaaggagttcagagcctacgtgagcctgttcatgagacacctgtgcgagcccggcgccgacggcgccgagaccttcgccgacggcgtgcccagagagggcctgagcagacagcacgtgctgaccagaatcggcgtgatgagcctggtgagaaagaaggtgcaggagttcgagcacgtgaacggcaagtacagcacccccgacctgatccccgagggccccgagggcaagaagagcggcgaggtgatcagcagcgaccccaacacccccgtgcccgccagccccgcccacctgctgcccgcccccctgggcctgcccgacaagatggaggcccagctgggctacatggacgagaaggaccccggcgcccagaagcccagacagcccctggaggtgcaggccctgcccgccgccctggacagagtggagagcgaggacaagcacgagagccccgccagcaaggagagagccagagaggagagacccgagcagaccccccccgcccaggcccagctgagaggcggcagacccctgagccccggcaccgcccccggctggcagagagagggccccggcctgggcgccagaagagccagaagccccagccagggcggccccggcggcggcggcagcagcttcggcagccaggcccccctgtag

SEQ ID NO: 76735 - DNA, 2427 bp, synthetic construct; identical to SEQ ID NO: 76733
  misc_feature 1..2427: note = Description of Artificial Sequence: Synthetic coding sequence
  source 1..2427: mol_type = other DNA

SEQ ID NO: 76736 - DNA, 3288 bp, synthetic construct
  misc_feature 1..3288: note = Description of Artificial Sequence: Synthetic coding sequence
  source 1..3288: mol_type = other DNA
atgatccacagaatcctgaaccacagcttcgacaagaagggcgacgtgcactacctgatcaagtggaaggacctgccctacgaccagtgcacctgggagatcgacgacatcgacatcccctactacgacaacctgaagcaggcctactggggccacagagagctgatgctgggcgaggacaccagactgcccaagagactgctgaagaagggcaagaagctgagagacgacaagcaggagaagccccccgacacccccatcgtggaccccaccgtgaagttcgacaagcagccctggtacatcgacagcaccggcggcaccctgcacccctaccagctggagggcctgaactggctgagattcagctgggcccagggcaccgacaccatcctggccgacgagatgggcctgggcaagaccgtgcagaccatcgtgttcctgtacagcctgtacaaggagggccacagcaagggcccctacctggtgagcgcccccctgagcaccatcatcaactgggagagagagttcgagatgtgggcccccgacttctacgtggtgacctacaccggcgacaaggagagcagaagcgtgatcagagagaacgagttcagcttcgaggacaacgccatcagaagcggcaagaaggtgttcagaatgaagaaggaggtgcagatcaagttccacgtgctgctgaccagctacgagctgatcaccatcgaccaggccatcctgggcagcatcgagtgggcctgcctggtggtggacgaggcccacagactgaagaacaaccagagcaagttcttcagagtgctgaacagctacaagatcgactacaagctgctgctgaccggcacccccctgcagaacaacctggaggagctgttccacctgctgaacttcctgacccccgagagattcaacaacctggagggcttcctggaggagttcgccgacatcagcaaggaggaccagatcaagaagctgcacgacctgctgggcccccacatgctgagaagactgaaggccgacgtgttcaagaacatgcccgccaagaccgagctgatcgtgagagtggagctgagccagatgcagaagaagtactacaagttcatcctgaccagaaacttcgaggccctgaacagcaagggcggcggcaaccaggtgagcctgctgaacatcatgatggacctgaagaagtgctgcaaccacccctacctgttccccgtggccgccgtggaggcccccgtgctgcccaacggcagctacgacggcagcagcctggtgaagagcagcggcaagctgatgctgctgcagaagatgctgaagaagctgagagacgagggccacagagtgctgatcttcagccagatgaccaagatgctggacctgctggaggacttcctggagtacgagggctacaagtacgagagaatcgacggcggcatcaccggcggcctgagacaggaggccatcgacagattcaacgcccccggcgcccagcagttctgcttcctgctgagcaccagagccggcggcctgggcatcaacctggccaccgccgacaccgtgatcatctacgacagcgactggaacccccacaacgacatccaggccttcagcagagcccacagaatcggccagaacaagaaggtgatgatctacagattcgtgaccagagccagcgtggaggagagaatcacccaggtggccaagagaaagatgatgctgacccacctggtggtgagacccggcctgggcagcaagagcggcagcatgaccaagcaggagctggacgacatcctgaagttcggcaccgaggagctgttcaaggacgacgtggagggcatgatgagccagggccagagacccgtgacccccatccccgacgtgcagagcagcaagggcggcaacctggccgccagcgccaagaagaagcacggcagcaccccccccggcgacaacaaggacgtggaggacagcagcgtgatccactacgacgacgccgccatcagcaagctgctggacagaaaccaggacgccaccgacgacaccgagctgcagaacatgaacgagtacctgagcagcttcaaggtggcccagtacgtggtgagagaggaggacggcgtggaggaggtggagagagagatcatcaagcaggaggagaacgtggaccccgactactgggagaagctgctgagacaccactacgagcagcagcaggaggacctggccagaaacctgggcaagggcaagagaatcagaaagcaggtgaactacaacgacgccagccaggaggaccaggagtggcaggacgagctgagcgacaaccagagcgagtacagcatcggcagcgaggacgaggacgaggacttcgaggagagacccgagggccagagcggcagaagacagagcagaagacagctgaagagcgacagagacaagcccctgccccccctgctggccagagtgggcggcaacatcgaggtgctgggcttcaacgccagacagagaaaggccttcctgaacgccatcatgagatggggcatgcccccccaggacgccttcaacagccactggctggtgagagacctgagaggcaagagcgagaaggagttcagagcctacgtgagcctgttcatgagacacctgtgcgagcccggcgccgacggcgccgagaccttcgccgacggcgtgcccagagagggcctgagcagacagcacgtgctgaccagaatcggcgtgatgagcctggtgagaaagaaggtgcaggagttcgagcacgtgaacggcaagtacagcacccccgacctgatccccgagggccccgagggcaagaagagcggcgaggtgatcagcagcgaccccaacacccccgtgcccgccagccccgcccacctgctgcccgcccccctgggcctgcccgacaagatggaggcccagctgggctacatggacgagaaggaccccggcgcccagaagcccagacagcccctggaggtgcaggccctgcccgccgccctggacagagtggagagcgaggacaagcacgagagccccgccagcaaggagagagccagagaggagagacccgaggagaccgagaaggccccccccagccccgagcagctgcccagagccagctgcagcgtgacccaggccggcgtgcagtggagacacagactgatgggcgccttcatcagcagcgcccaggccaccctgcccccccagctgcccgagcagagaagatgcttcctgagaagaagaagaagctggaccagctggagctag

SEQ ID NO: 76737 - DNA, 3258 bp, synthetic construct
  misc_feature 1..3258: note = Description of Artificial Sequence: Synthetic coding sequence
  source 1..3258: mol_type = other DNA
atgatccacagaatcctgaaccacagcttcgacaagaagggcgacgtgcactacctgatcaagtggaaggacctgccctacgaccagtgcacctgggagatcgacgacatcgacatcccctactacgacaacctgaagcaggcctactggggccacagagagctgatgctgggcgaggacaccagactgcccaagagactgctgaagaagggcaagaagctgagagacgacaagcaggagaagccccccgacacccccatcgtggaccccaccgtgaagttcgacaagcagccctggtacatcgacagcaccggcggcaccctgcacccctaccagctggagggcctgaactggctgagattcagctgggcccagggcaccgacaccatcctggccgacgagatgggcctgggcaagaccgtgcagaccatcgtgttcctgtacagcctgtacaaggagggccacagcaagggcccctacctggtgagcgcccccctgagcaccatcatcaactgggagagagagttcgagatgtgggcccccgacttctacgtggtgacctacaccggcgacaaggagagcagaagcgtgatcagagagaacgagttcagcttcgaggacaacgccatcagaagcggcaagaaggtgttcagaatgaagaaggaggtgcagatcaagttccacgtgctgctgaccagctacgagctgatcaccatcgaccaggccatcctgggcagcatcgagtgggcctgcctggtggtggacgaggcccacagactgaagaacaaccagagcaagttcttcagagtgctgaacagctacaagatcgactacaagctgctgctgaccggcacccccctgcagaacaacctggaggagctgttccacctgctgaacttcctgacccccgagagattcaacaacctggagggcttcctggaggagttcgccgacatcagcaaggaggaccagatcaagaagctgcacgacctgctgggcccccacatgctgagaagactgaaggccgacgtgttcaagaacatgcccgccaagaccgagctgatcgtgagagtggagctgagccagatgcagaagaagtactacaagttcatcctgaccagaaacttcgaggccctgaacagcaagggcggcggcaaccaggtgagcctgctgaacatcatgatggacctgaagaagtgctgcaaccacccctacctgttccccgtggccgccgtggaggcccccgtgctgcccaacggcagctacgacggcagcagcctggtgaagagcagcggcaagctgatgctgctgcagaagatgctgaagaagctgagagacgagggccacagagtgctgatcttcagccagatgaccaagatgctggacctgctggaggacttcctggagtacgagggctacaagtacgagagaatcgacggcggcatcaccggcggcctgagacaggaggccatcgacagattcaacgcccccggcgcccagcagttctgcttcctgctgagcaccagagccggcggcctgggcatcaacctggccaccgccgacaccgtgatcatctacgacagcgactggaacccccacaacgacatccaggccttcagcagagcccacagaatcggccagaacaagaaggtgatgatctacagattcgtgaccagagccagcgtggaggagagaatcacccaggtggccaagagaaagatgatgctgacccacctggtggtgagacccggcctgggcagcaagagcggcagcatgaccaagcaggagctggacgacatcctgaagttcggcaccgaggagctgttcaaggacgacgtggagggcatgatgagccagggccagagacccgtgacccccatccccgacgtgcagagcagcaagggcggcaacctggccgccagcgccaagaagaagcacggcagcaccccccccggcgacaacaaggacgtggaggacagcagcgtgatccactacgacgacgccgccatcagcaagctgctggacagaaaccaggacgccaccgacgacaccgagctgcagaacatgaacgagtacctgagcagcttcaaggtggcccagtacgtggtgagagaggaggacggcgtggaggaggtggagagagagatcatcaagcaggaggagaacgtggaccccgactactgggagaagctgctgagacaccactacgagcagcagcaggaggacctggccagaaacctgggcaagggcaagagaatcagaaagcaggtgaactacaacgacgccagccaggaggaccaggagtggcaggacgagctgagcgacaaccagagcgagtacagcatcggcagcgaggacgaggacgaggacttcgaggagagacccgagggccagagcggcagaagacagagcagaagacagctgaagagcgacagagacaagcccctgccccccctgctggccagagtgggcggcaacatcgaggtgctgggcttcaacgccagacagagaaaggccttcctgaacgccatcatgagatggggcatgcccccccaggacgccttcaacagccactggctggtgagagacctgagaggcaagagcgagaaggagttcagagcctacgtgagcctgttcatgagacacctgtgcgagcccggcgccgacggcgccgagaccttcgccgacggcgtgcccagagagggcctgagcagacagcacgtgctgaccagaatcggcgtgatgagcctggtgagaaagaaggtgcaggagttcgagcacgtgaacggcaagtacagcacccccgacctgatccccgagggccccgagggcaagaagagcggcgaggtgatcagcagcgaccccaacacccccgtgcccgccagccccgcccacctgctgcccgcccccctgggcctgcccgacaagatggaggcccagctgggctacatggacgagaaggaccccggcgcccagaagcccagacagcccctggaggtgcaggccctgcccgccgccctggacagagtggagagcgaggacaagcacgagagccccgccagcaaggagagagccagagaggagagacccgaggagaccgagaaggccccccccagccccgagcagctgcccagagccagctgcagcgtgacccaggccggcgtgcagtggagacacctgggcagctgggagcccctgagccccagactgaagagacccagccacctgagcttcctgaacagaggcggcgccagctag

SEQ ID NO: 76738 - DNA, 8994 bp, synthetic construct
  misc_feature 1..8994: note = Description of Artificial Sequence: Synthetic coding sequence
  source 1..8994: mol_type = other DNA
atggccgaccccggcatgatgagcctgttcggcgaggacggcaacatcttcagcgagggcctggagggcctgggcgagtgcggctaccccgagaaccccgtgaaccccatgggccagcagatgcccatcgaccagggcttcgccagcctgcagcccagcctgcaccaccccagcaccaaccagaaccagaccaagctgacccacttcgaccactacaaccagtacgagcagcagaagatgcacctgatggaccagcccaacagaatgatgagcaacacccccggcaacggcctggccagcccccacagccagtaccacaccccccccgtgccccaggtgccccacggcggcagcggcggcggccagatgggcgtgtaccccggcatgcagaacgagagacacggccagagcttcgtggacagcagcagcatgtggggccccagagccgtgcaggtgcccgaccagatcagagccccctaccagcagcagcagccccagccccagcccccccagcccgcccccagcggcccccccgcccagggccacccccagcacatgcagcagatgggcagctacatggccagaggcgacttcagcatgcagcagcacggccagccccagcagagaatgagccagttcagccagggccaggagggcctgaaccagggcaaccccttcatcgccaccagcggccccggccacctgagccacgtgccccagcagagccccagcatggcccccagcctgagacacagcgtgcagcagttccaccaccaccccagcaccgccctgcacggcgagagcgtggcccacagccccagattcagccccaaccccccccagcagggcgccgtgagaccccagaccctgaacttcagcagcagaagccagaccgtgcccagccccaccatcaacaacagcggccagtacagcagatacccctacagcaacctgaaccagggcctggtgaacaacaccggcatgaaccagaacctgggcctgaccaacaacacccccatgaaccagagcgtgcccagataccccaacgccgtgggcttccccagcaacagcggccagggcctgatgcaccagcagcccatccaccccagcggcagcctgaaccagatgaacacccagaccatgcaccccagccagccccagggcacctacgccagccccccccccatgagccccatgaaggccatgagcaaccccgccggcaccccccccccccaggtgagacccggcagcgccggcatccccatggaggtgggcagctaccccaacatgccccacccccagcccagccaccagccccccggcgccatgggcatcggccagagaaacatgggccccagaaacatgcagcagagcagacccttcatcggcatgagcagcgcccccagagagctgaccggccacatgagacccaacggctgccccggcgtgggcctgggcgacccccaggccatccaggagagactgatccccggccagcagcaccccggccagcagcccagcttccagcagctgcccacctgcccccccctgcagccccaccccggcctgcaccaccagagcagccccccccacccccaccaccagccctgggcccagctgcaccccagcccccagaacaccccccagaaggtgcccgtgcaccagcacagccccagcgagcccttcctggagaagcccgtgcccgacatgacccaggtgagcggccccaacgcccagctggtgaagagcgacgactacctgcccagcatcgagcagcagccccagcagaagaagaagaagaagaagaacaaccacatcgtggccgaggaccccagcaagggcttcggcaaggacgacttccccggcggcgtggacaaccaggagctgaacagaaacagcctggacggcagccaggaggagaagaagaagaagaagagaagcaaggccaagaaggaccccaaggagcccaaggagcccaaggagaagaaggagcccaaggagcccaagacccccaaggcccccaagatccccaaggagcccaaggagaagaaggccaagaccgccacccccaagcccaagagcagcaagaagagcagcaacaagaagcccgacagcgaggccagcgccctgaagaagaaggtgaacaagggcaagaccgagggcagcgagaacagcgacctggacaagacccccccccccagccccccccccgaggaggacgaggaccccggcgtgcagaagagaagaagcagcagacaggtgaagagaaagagatacaccgaggacctggagttcaagatcagcgacgaggaggccgacgacgccgacgccgccggcagagacagccccagcaacaccagccagagcgagcagcaggagagcgtggacgccgagggccccgtggtggagaagatcatgagcagcagaagcgtgaagaagcagaaggagagcggcgaggaggtggagatcgaggagttctacgtgaagtacaagaacttcagctacctgcactgccagtgggccagcatcgaggacctggagaaggacaagagaatccagcagaagatcaagagattcaaggccaagcagggccagaacaagttcctgagcgagatcgaggacgagctgttcaaccccgactacgtggaggtggacagaatcatggacttcgccagaagcaccgacgacagaggcgagcccgtgacccactacctggtgaagtggtgcagcctgccctacgaggacagcacctgggagagaagacaggacatcgaccaggccaagatcgaggagttcgagaagctgatgagcagagagcccgagaccgagagagtggagagaccccccgccgacgactggaagaagagcgagagcagcagagagtacaagaacaacaacaagctgagagagtaccagctggagggcgtgaactggctgctgttcaactggtacaacatgagaaactgcatcctggccgacgagatgggcctgggcaagaccatccagagcatcaccttcctgtacgagatctacctgaagggcatccacggccccttcctggtgatcgcccccctgagcaccatccccaactgggagagagagttcagaacctggaccgagctgaacgtggtggtgtaccacggcagccaggccagcagaagaaccatccagctgtacgagatgtacttcaaggacccccagggcagagtgatcaagggcagctacaagttccacgccatcatcaccaccttcgagatgatcctgaccgactgccccgagctgagaaacatcccctggagatgcgtggtgatcgacgaggcccacagactgaagaacagaaactgcaagctgctggagggcctgaagatgatggacctggagcacaaggtgctgctgaccggcacccccctgcagaacaccgtggaggagctgttcagcctgctgcacttcctggagcccagcagattccccagcgagaccaccttcatgcaggagttcggcgacctgaagaccgaggagcaggtgcagaagctgcaggccatcctgaagcccatgatgctgagaagactgaaggaggacgtggagaagaacctggcccccaaggaggagaccatcatcgaggtggagctgaccaacatccagaagaagtactacagagccatcctggagaagaacttcaccttcctgagcaagggcggcggccaggccaacgtgcccaacctgctgaacaccatgatggagctgagaaagtgctgcaaccacccctacctgatcaacggcgccgaggagaagatcctggaggagttcaaggagacccacaacgccgagagccccgacttccagctgcaggccatgatccaggccgccggcaagctggtgctgatcgacaagctgctgcccaagctgaaggccggcggccacagagtgctgatcttcagccagatggtgagatgcctggacatcctggaggactacctgatccagagaagatacccctacgagagaatcgacggcagagtgagaggcaacctgagacaggccgccatcgacagattcagcaagcccgacagcgacagattcgtgttcctgctgtgcaccagagccggcggcctgggcatcaacctgaccgccgccgacacctgcatcatcttcgacagcgactggaacccccagaacgacctgcaggcccaggccagatgccacagaatcggccagagcaagagcgtgaagatctacagactgatcaccagaaacagctacgagagagagatgttcgacaaggccagcctgaagctgggcctggacaaggccgtgctgcagagcatgagcggcagagagaacgccaccaacggcgtgcagcagctgagcaagaaggagatcgaggacctgctgagaaagggcgcctacggcgccctgatggacgaggaggacgagggcagcaagttctgcgaggaggacatcgaccagatcctgctgagaagaacccacaccatcaccatcgagagcgagggcaagggcagcaccttcgccaaggccagcttcgtggccagcggcaacagaaccgacatcagcctggacgaccccaacttctggcagaagtgggccaagaaggccgagctggacatcgacgccctgaacggcagaaacaacctggtgatcgacacccccagagtgagaaagcagaccagactgtacagcgccgtgaaggaggacgagctgatggagttcagcgacctggagagcgacagcgaggagaagccctgcgccaagcccagaagaccccaggacaagagccagggctacgccagaagcgagtgcttcagagtggagaagaacctgctggtgtacggctggggcagatggaccgacatcctgagccacggcagatacaagagacagctgaccgagcaggacgtggagaccatctgcagaaccatcctggtgtactgcctgaaccactacaagggcgacgagaacatcaagagcttcatctgggacctgatcacccccaccgccgacggccagaccagagccctggtgaaccacagcggcctgagcgcccccgtgcccagaggcagaaagggcaagaaggtgaaggcccagagcacccagcccgtggtgcaggacgccgactggctggccagctgcaaccccgacgccctgttccaggaggacagctacaagaagcacctgaagcaccactgcaacaaggtgctgctgagagtgagaatgctgtactacctgagacaggaggtgatcggcgaccaggccgacaagatcctggagggcgccgacagcagcgaggccgacgtgtggatccccgagcccttccacgccgaggtgcccgccgactggtgggacaaggaggccgacaagagcctgctgatcggcgtgttcaagcacggctacgagaagtacaacagcatgagagccgaccccgccctgtgcttcctggagagagtgggcatgcccgacgccaaggccatcgccgccgagcagagaggcaccgacatgctggccgacggcggcgacggcggcgagttcgacagagaggacgaggaccccgagtacaagcccaccagaacccccttcaaggacgagatcgacgagttcgccaacagccccagcgaggacaaggaggagagcatggagatccacgccaccggcaagcacagcgagagcaacgccgagctgggccagctgtactggcccaacaccagcaccctgaccaccagactgagaagactgatcaccgcctaccagagaagctacaagagacagcagatgagacaggaggccctgatgaagaccgacagaagaagaagaagacccagagaggaggtgagagccctggaggccgagagagaggccatcatcagcgagaagagacagaagtggaccagaagagaggaggccgacttctacagagtggtgagcaccttcggcgtgatcttcgaccccgtgaagcagcagttcgactggaaccagttcagagccttcgccagactggacaagaagagcgacgagagcctggagaagtacttcagctgcttcgtggccatgtgcagaagagtgtgcagaatgcccgtgaagcccgacgacgagccccccgacctgagcagcatcatcgagcccatcaccgaggagagagccagcagaaccctgtacagaatcgagctgctgagaaagatcagagagcaggtgctgcaccacccccagctgggcgagagactgaagctgtgccagcccagcctggacctgcccgagtggtgggagtgcggcagacacgacagagacctgctggtgggcgccgccaagcacggcgtgagcagaaccgactaccacatcctgaacgaccccgagctgagcttcctggacgcccacaagaacttcgcccagaacagaggcgccggcaacaccagcagcctgaaccccctggccgtgggcttcgtgcagaccccccccgtgatcagcagcgcccacatccaggacgagagagtgctggagcaggccgagggcaaggtggaggagcccgagaaccccgccgccaaggagaagtgcgagggcaaggaggaggaggaggagaccgacggcagcggcaaggagagcaagcaggagtgcgaggccgaggccagcagcgtgaagaacgagctgaagggcgtggaggtgggcgccgacaccggcagcaagagcatcagcgagaagggcagcgaggaggacgaggaggagaagctggaggacgacgacaagagcgaggagagcagccagcccgaggccggcgccgtgagcagaggcaagaacttcgacgaggagagcaacgccagcatgagcaccgccagagacgagaccagagacggcttctacatggaggacggcgaccccagcgtggcccagctgctgcacgagagaaccttcgccttcagcttctggcccaaggacagagtgatgatcaacagactggacaacatctgcgaggccgtgctgaagggcaagtggcccgtgaacagaagacagatgttcgacttccagggcctgatccccggctacacccccaccaccgtggacagccccctgcagaagagaagcttcgccgagctgagcatggtgggccaggccagcatcagcggcagcgaggacatcaccaccagcccccagctgagcaaggaggacgccctgaacctgagcgtgcccagacagagaagaagaagaagaagaaagatcgagatcgaggccgagagagccgccaagagaagaaacctgatggagatggtggcccagctgagagagagccaggtggtgagcgagaacggccaggagaaggtggtggacctgagcaaggccagcagagaggccaccagcagcaccagcaacttcagcagcctgagcagcaagttcatcctgcccaacgtgagcacccccgtgagcgacgccttcaagacccagatggagctgctgcaggccggcctgagcagaacccccaccagacacctgctgaacggcagcctggtggacggcgagccccccatgaagagaagaagaggcagaagaaagaacgtggagggcctggacctgctgttcatgagccacaagagaaccagcctgagcgccgaggacgccgaggtgaccaaggccttcgaggaggacatcgagaccccccccaccagaaacatccccagccccggccagctggaccccgacaccagaatccccgtgatcaacctggaggacggcaccagactggtgggcgaggacgcccccaagaacaaggacctggtggagtggctgaagctgcaccccacctacaccgtggacatgcccagctacgtgcccaagaacgccgacgtgctgttcagcagcttccagaagcccaagcagaagagacacagatgcagaaaccccaacaagctggacatcaacaccctgaccggcgaggagagagtgcccgtggtgaacaagagaaacggcaagaagatgggcggcgccatggccccccccatgaaggacctgcccagatggctggaggagaaccccgagttcgccgtggcccccgactggaccgacatcgtgaagcagagcggcttcgtgcccgagagcatgttcgacagactgctgaccggccccgtggtgagaggcgagggcgccagcagaagaggcagaagacccaagagcgagatcgccagagccgccgccgccgccgccgccgtggccagcaccagcggcatcaaccccctgctggtgaacagcctgttcgccggcatggacctgaccagcctgcagaacctgcagaacctgcagagcctgcagctggccggcctgatgggcttcccccccggcctggccaccgccgccaccgccggcggcgacgccaagaaccccgccgccgtgctgcccctgatgctgcccggcatggccggcctgcccaacgtgttcggcctgggcggcctgctgaacaaccccctgagcgccgccaccggcaacaccaccaccgccagcagccagggcgagcccgaggacagcaccagcaagggcgaggagaagggcaacgagaacgaggacgagaacaaggacagcgagaagagcaccgacgccgtgagcgccgccgacagcgccaacggcagcgtgggcgccgccaccgcccccgccggcctgcccagcaaccccctggccttcaaccccttcctgctgagcaccatggcccccggcctgttctaccccagcatgttcctgccccccggcctgggcggcctgaccctgcccggcttccccgccctggccggcctgcagaacgccgtgggcagcagcgaggagaaggccgccgacaaggccgagggcggccccttcaaggacggcgagaccctggagggcagcgacgccgaggagagcctggacaagaccgccgagagcagcctgctggaggacgagatcgcccagggcgaggagctggacagcctggacggcggcgacgagatcgagaacaacgagaacgacgagtag

SEQ ID NO: 76739 - DNA, 8994 bp, synthetic construct; identical to SEQ ID NO: 76738
  misc_feature 1..8994: note = Description of Artificial Sequence: Synthetic coding sequence
  source 1..8994: mol_type = other DNA

SEQ ID NO: 76740 - DNA, 102 bp, synthetic construct
  misc_feature 1..102: note = Description of Artificial Sequence: Synthetic coding sequence
  source 1..102: mol_type = other DNA
atggccgaccccggcatgatgagcctgttcggcgaggacggcaacatcttcagcgagggcctggagggcctgggcgagtgcggctaccccgagaacccctag

SEQ ID NO: 76741 - DNA, 6906 bp, synthetic construct
  misc_feature 1..6906: note = Description of Artificial Sequence: Synthetic coding sequence
  source 1..6906: mol_type = other DNA
aagggcgagagcaagagaatcaccctggtgctgcagcagccccagagcggcggcccccagggccacagacacgtggtgctgggcagcctgcccggcaagatcgtgctgcagggcaaccagctggccgccctgacccaggccaagaacgcccagggccagcccgccaaggtggtgaccatccagctgcaggtgcagcagccccagcagaagatccagatcgtgccccagccccccagcagccagccccagccccagcagccccccagcacccagcccgtgaccctgagcagcgtgcagcaggcccagatcatgggccccggccagagccccggccagagactgagcgtgcccgtgaaggtggtgctgcagccccaggccggcagcagccagggcgccagcagcggcctgagcgtggtgaaggtgctgagcgccagcgaggtggccgccctgagcagccccgccagcagcgccccccacagcggcggcaagaccggcatggaggagaacagaagactggagcaccagaagaagcaggagaaggccaacagaatcgtggccgaggccatcgccagagccagagccagaggcgagcagaacatccccagagtgctgaacgaggacgagctgcccagcgtgagacccgaggaggagggcgagaagaagagaagaaagaagagcgccggcgagagactgaaggaggagaagcccaagaagagcaagaccagcggcgccagcaagaccaagggcaagagcaagctgaacaccatcacccccgtggtgggcaagaagagaaagagaaacaccagcagcgacaacagcgacgtggaggtgatgcccgcccagagccccagagaggacgaggagagcagcatccagaagagaagaagcaacagacaggtgaagagaaagaagtacaccgaggacctggacatcaagatcaccgacgacgaggaggaggaggaggtggacgtgaccggccccatcaagcccgagcccatcctgcccgagcccgtgcaggagcccgacggcgagaccctgcccagcatgcagttcttcgtggagaaccccagcgaggaggacgccgccatcgtggacaaggtgctgagcatgagaatcgtgaagaaggagctgcccagcggccagtacaccgaggccgaggagttcttcgtgaagtacaagaactacagctacctgcactgcgagtgggccaccatcagccagctggagaaggacaagagaatccaccagaagctgaagagattcaagaccaagatggcccagatgagacacttcttccacgaggacgaggagcccttcaaccccgactacgtggaggtggacagaatcctggacgagagccacagcatcgacaaggacaacggcgagcccgtgatctactacctggtgaagtggtgcagcctgccctacgaggacagcacctgggagctgaaggaggacgtggacgagggcaagatcagagagttcaagagaatccagagcagacaccccgagctgaagagagtgaacagaccccaggccagcgcctggaagaagctggagctgagccacgagtacaagaacagaaaccagctgagagagtaccagctggagggcgtgaactggctgctgttcaactggtacaacagacagaactgcatcctggccgacgagatgggcctgggcaagaccatccagagcatcgccttcctgcaggaggtgtacaacgtgggcatccacggccccttcctggtgatcgcccccctgagcaccatcaccaactgggagagagagttcaacacctggaccgagatgaacaccatcgtgtaccacggcagcctggccagcagacagatgatccagcagtacgagatgtactgcaaggacagcagaggcagactgatccccggcgcctacaagttcgacgccctgatcaccaccttcgagatgatcctgagcgactgccccgagctgagagagatcgagtggagatgcgtgatcatcgacgaggcccacagactgaagaacagaaactgcaagctgctggacagcctgaagcacatggacctggagcacaaggtgctgctgaccggcacccccctgcagaacaccgtggaggagctgttcagcctgctgcacttcctggagcccagccagttccccagcgagagcgagttcctgaaggacttcggcgacctgaagaccgaggagcaggtgcagaagctgcaggccatcctgaagcccatgatgctgagaagactgaaggaggacgtggagaagaacctggcccccaagcaggagaccatcatcgaggtggagctgaccaacatccagaagaagtactacagagccatcctggagaagaacttcagcttcctgagcaagggcgccggccacaccaacatgcccaacctgctgaacaccatgatggagctgagaaagtgctgcaaccacccctacctgatcaacggcgccgaggagaagatcctgaccgagttcagagaggcctgccacatcatcccccacgacttccacctgcaggccatggtgagaagcgccggcaagctggtgctgatcgacaagctgctgcccaagctgaaggccggcggccacaaggtgctgatcttcagccagatggtgagatgcctggacatcctggaggactacctgatccagagaagatacctgtacgagagaatcgacggcagagtgagaggcaacctgagacaggccgccatcgacagattcagcaagcccgacagcgacagattcgtgttcctgctgtgcaccagagccggcggcctgggcatcaacctgaccgccgccgacacctgcatcatcttcgacagcgactggaacccccagaacgacctgcaggcccaggccagatgccacagaatcggccagagcaaggccgtgaaggtgtacagactgatcaccagaaacagctacgagagagagatgttcgacaaggccagcctgaagctgggcctggacaaggccgtgctgcagagcatgagcggcagagacggcaacatcaccggcatccagcagttcagcaagaaggagatcgaggacctgctgagaaagggcgcctacgccgccatcatggaggaggacgacgagggcagcaagttctgcgaggaggacatcgaccagatcctgctgagaagaaccaccaccatcaccatcgagagcgagggcaagggcagcaccttcgccaaggccagcttcgtggccagcgagaacagaaccgacatcagcctggacgaccccaacttctggcagaagtgggccaagaaggccgacctggacatggacctgctgaacagcaagaacaacctggtgatcgacacccccagagtgagaaagcagaccagacacttcagcaccctgaaggacgacgacctggtggagttcagcgacctggagagcgaggacgacgagagacccagaagcagaagacacgacagacaccacgcctacggcagaaccgactgcttcagagtggagaagcacctgctggtgtacggctggggcagatggagagacatcctgagccacggcagattcaagagaagaatgaccgagagagacgtggagaccatctgcagagccatcctggtgtactgcctgctgcactacagaggcgacgagaacatcaagggcttcatctgggacctgatcagccccgccgagaacggcaagaccaaggagctgcagaaccacagcggcctgagcatccccgtgcccagaggcagaaagggcaagaaggtgaagagccagagcaccttcgacatccacaaggccgactggatcagaaagtacaaccccgacaccctgttccaggacgagagctacaagaagcacctgaagcaccagtgcaacaaggtgctgctgagagtgagaatgctgtactacctgagacaggaggtgatcggcgaccaggccgagaaggtgctgggcggcgccatcgccagcgagatcgacatctggttccccgtggtggaccagctggaggtgcccaccacctggtgggacagcgaggccgacaagagcctgctgatcggcgtgttcaagcacggctacgagaagtacaacaccatgagagccgaccccgccctgtgcttcctggagaaggccggcagacccgacgacaaggccatcgccgccgagcacagagtgctggacaacttcagcgacatcgtggagggcgtggacttcgacaaggactgcgaggaccccgagtacaagcccctgcagggcccccccaaggaccaggacgacgagggcgaccccctgatgatgatggacgaggagatcagcgtgatcgacggcgacgaggcccaggtgacccagcagcccggccacctgttctggccccccggcagcgccctgaccgccagactgagaagactggtgaccgcctaccagagaagctacaagagagagcagatgaagatcgaggccgccgagagaggcgacagaagaagaagaagatgcgaggccgccttcaagctgaaggagatcgccagaagagagaagcagcagagatggaccagaagagagcagaccgacttctacagagtggtgagcaccttcggcgtggagtacgaccccgacaccatgcagttccactgggacagattcagaaccttcgccagactggacaagaagaccgacgagagcctgaccaagtacttccacggcttcgtggccatgtgcagacaggtgtgcagactgccccccgccgccggcgacgagccccccgaccccaacctgttcatcgagcccatcaccgaggagagagccagcagaaccctgtacagaatcgagctgctgagaagactgagagagcaggtgctgtgccaccccctgctggaggacagactggccctgtgccagccccccggccccgagctgcccaagtggtgggagcccgtgagacacgacggcgagctgctgagaggcgccgccagacacggcgtgagccagaccgactgcaacatcatgcaggaccccgacttcagcttcctggccgccagaatgaactacatgcagaaccaccaggccggcgcccccgcccccagcctgagcagatgcagcacccccctgctgcaccagcagtacaccagcagaaccgccagccccctgcccctgagacccgacgcccccgtggagaagagccccgaggagaccgccacccaggtgcccagcctggagagcctgaccctgaagctggagcacgaggtggtggccagaagcagacccaccccccaggactacgagatgagagtgagccccagcgacaccacccccctggtgagcagaagcgtgccccccgtgaagctggaggacgaggacgacagcgacagcgagctggacctgagcaagctgagccccagcagcagcagcagcagcagcagcagcagcagcagcagcagcaccgacgagagcgaggacgagaaggaggagaagctgaccgaccagagcagaagcaagctgtacgacgaggagagcctgctgagcctgaccatgagccaggacggcttccccaacgaggacggcgagcagatgacccccgagctgctgctgctgcaggagagacagagagccagcgagtggcccaaggacagagtgctgatcaacagaatcgacctggtgtgccaggccgtgctgagcggcaagtggcccagcagcagaagaagccaggagatggtgaccggcggcatcctgggccccggcaaccacctgctggacagccccagcctgacccccggcgagtacggcgacagccccgtgcccacccccagaagcagcagcgccgccagcatggccgaggaggaggccagcgccgtgagcaccgccgccgcccagttcaccaagctgagaagaggcatggacgagaaggagttcaccgtgcagatcaaggacgaggagggcctgaagctgaccttccagaagcacaagctgatggccaacggcgtgatgggcgacggccaccccctgttccacaagaagaagggcaacagaaagaagctggtggagctggaggtggagtgcatggaggagcccaaccacctggacgtggacctggagaccagaatccccgtgatcaacaaggtggacggcaccctgctggtgggcgaggacgcccccagaagagccgagctggagatgtggctgcagggccaccccgagttcgccgtggaccccagattcctggcctacatggaggacagaagaaagcagaagtggcagagatgcaagaagaacaacaaggccgagctgaactgcctgggcatggagcccgtgcagaccgccaacagcagaaacggcaagaagggccaccacaccgagaccgtgttcaacagagtgctgcccggccccatcgcccccgagagcagcaagaagagagccagaagaatgagacccgacctgagcaagatgatggccctgatgcagggcggcagcaccggcagcctgagcctgcacaacaccttccagcacagcagcagcggcctgcagagcgtgagcagcctgggccacagcagcgccaccagcgccagcctgcccttcatgcccttcgtgatgggcggcgcccccagcagcccccacgtggacagcagcaccatgctgcaccaccaccaccaccacccccacccccaccaccaccaccaccaccaccccggcctgagagcccccggctaccccagcagccccgtgaccaccgccagcggcaccaccctgagactgccccccctgcagcccgaggaggacgacgacgaggacgaggaggacgacgacgacctgagccagggctacgacagcagcgagagagacttcagcctgatcgacgaccccatgatgcccgccaacagcgacagcagcgaggacgccgacgactag

SEQ ID NO: 76742 - DNA, 7746 bp, synthetic construct
  misc_feature 1..7746: note = Description of Artificial Sequence: Synthetic coding sequence
  source 1..7746: mol_type = other DNA
atggccgaccccatcatggacctgttcgacgaccccaacctgttcggcctggacagcctgaccgacgacagcttcaaccaggtgacccaggaccccatcgaggaggccctgggcctgcccagcagcctggacagcctggaccagatgaaccaggacggcggcggcggcgacgtgggcaacagcagcgccagcgagctggtgcccccccccgaggagaccgcccccaccgagctgagcaaggagagcaccgcccccgcccccgagagcatcaccctgcacgactacaccacccagcccgccagccaggagcagcccgcccagcccgtgctgcagaccagcacccccaccagcggcctgctgcaggtgagcaagagccaggagatcctgagccagggcaaccccttcatgggcgtgagcgccaccgccgtgagcagcagcagcgccggcggccagcccccccagagcgcccccaagatcgtgatcctgaaggccccccccagcagcagcgtgaccggcgcccacgtggcccagatccaggcccagggcatcaccagcaccgcccagcccctggtggccggcaccgccaacggcggcaaggtgaccttcaccaaggtgctgaccggcacccccctgagacccggcgtgagcatcgtgagcggcaacaccgtgctggccgccaaggtgcccggcaaccaggccgccgtgcagagaatcgtgcagcccagcagacccgtgaagcagctggtgctgcagcccgtgaagggcagcgcccccgccggcaaccccggcgccaccggcccccccctgaagcccgccgtgaccctgaccagcacccccacccagggcgagagcaagagaatcaccctggtgctgcagcagccccagagcggcggcccccagggccacagacacgtggtgctgggcagcctgcccggcaagatcgtgctgcagggcaaccagctggccgccctgacccaggccaagaacgcccagggccagcccgccaaggtggtgaccatccagctgcaggtgcagcagccccagcagaagatccagatcgtgccccagccccccagcagccagccccagccccagcagccccccagcacccagcccgtgaccctgagcagcgtgcagcaggcccagatcatgggccccggccagagccccggccagagactgagcgtgcccgtgaaggtggtgctgcagccccaggccggcagcagccagggcgccagcagcggcctgagcgtggtgaaggtgctgagcgccagcgaggtggccgccctgagcagccccgccagcagcgccccccacagcggcggcaagaccggcatggaggagaacagaagactggagcaccagaagaagcaggagaaggccaacagaatcgtggccgaggccatcgccagagccagagccagaggcgagcagaacatccccagagtgctgaacgaggacgagctgcccagcgtgagacccgaggaggagggcgagaagaagagaagaaagaagagcgccggcgagagactgaaggaggagaagcccaagaagagcaagaccagcggcgccagcaagaccaagggcaagagcaagctgaacaccatcacccccgtggtgggcaagaagagaaagagaaacaccagcagcgacaacagcgacgtggaggtgatgcccgcccagagccccagagaggacgaggagagcagcatccagaagagaagaagcaacagacaggtgaagagaaagaagtacaccgaggacctggacatcaagatcaccgacgacgaggaggaggaggaggtggacgtgaccggccccatcaagcccgagcccatcctgcccgagcccgtgcaggagcccgacggcgagaccctgcccagcatgcagttcttcgtggagaaccccagcgaggaggacgccgccatcgtggacaaggtgctgagcatgagaatcgtgaagaaggagctgcccagcggccagtacaccgaggccgaggagttcttcgtgaagtacaagaactacagctacctgcactgcgagtgggccaccatcagccagctggagaaggacaagagaatccaccagaagctgaagagattcaagaccaagatggcccagatgagacacttcttccacgaggacgaggagcccttcaaccccgactacgtggaggtggacagaatcctggacgagagccacagcatcgacaaggacaacggcgagcccgtgatctactacctggtgaagtggtgcagcctgccctacgaggacagcacctgggagctgaaggaggacgtggacgagggcaagatcagagagttcaagagaatccagagcagacaccccgagctgaagagagtgaacagaccccaggccagcgcctggaagaagctggagctgagccacgagtacaagaacagaaaccagctgagagagtaccagctggagggcgtgaactggctgctgttcaactggtacaacagacagaactgcatcctggccgacgagatgggcctgggcaagaccatccagagcatcgccttcctgcaggaggtgtacaacgtgggcatccacggccccttcctggtgatcgcccccctgagcaccatcaccaactgggagagagagttcaacacctggaccgagatgaacaccatcgtgtaccacggcagcctggccagcagacagatgatccagcagtacgagatgtactgcaaggacagcagaggcagactgatccccggcgcctacaagttcgacgccctgatcaccaccttcgagatgatcctgagcgactgccccgagctgagagagatcgagtggagatgcgtgatcatcgacgaggcccacagactgaagaacagaaactgcaagctgctggacagcctgaagcacatggacctggagcacaaggtgctgctgaccggcacccccctgcagaacaccgtggaggagctgttcagcctgctgcacttcctggagcccagccagttccccagcgagagcgagttcctgaaggacttcggcgacctgaagaccgaggagcaggtgcagaagctgcaggccatcctgaagcccatgatgctgagaagactgaaggaggacgtggagaagaacctggcccccaagcaggagaccatcatcgaggtggagctgaccaacatccagaagaagtactacagagccatcctggagaagaacttcagcttcctgagcaagggcgccggccacaccaacatgcccaacctgctgaacaccatgatggagctgagaaagtgctgcaaccacccctacctgatcaacggcgccgaggagaagatcctgaccgagttcagagaggcctgccacatcatcccccacgacttccacctgcaggccatggtgagaagcgccggcaagctggtgctgatcgacaagctgctgcccaagctgaaggccggcggccacaaggtgctgatcttcagccagatggtgagatgcctggacatcctggaggactacctgatccagagaagatacctgtacgagagaatcgacggcagagtgagaggcaacctgagacaggccgccatcgacagattcagcaagcccgacagcgacagattcgtgttcctgctgtgcaccagagccggcggcctgggcatcaacctgaccgccgccgacacctgcatcatcttcgacagcgactggaacccccagaacgacctgcaggcccaggccagatgccacagaatcggccagagcaaggccgtgaaggtgtacagactgatcaccagaaacagctacgagagagagatgttcgacaaggccagcctgaagctgggcctggacaaggccgtgctgcagagcatgagcggcagagacggcaacatcaccggcatccagcagttcagcaagaaggagatcgaggacctgctgagaaagggcgcctacgccgccatcatggaggaggacgacgagggcagcaagttctgcgaggaggacatcgaccagatcctgctgagaagaaccaccaccatcaccatcgagagcgagggcaagggcagcaccttcgccaaggccagcttcgtggccagcgagaacagaaccgacatcagcctggacgaccccaacttctggcagaagtgggccaagaaggccgacctggacatggacctgctgaacagcaagaacaacctggtgatcgacacccccagagtgagaaagcagaccagacacttcagcaccctgaaggacgacgacctggtggagttcagcgacctggagagcgaggacgacgagagacccagaagcagaagacacgacagacaccacgcctacggcagaaccgactgcttcagagtggagaagcacctgctggtgtacggctggggcagatggagagacatcctgagccacggcagattcaagagaagaatgaccgagagagacgtggagaccatctgcagagccatcctggtgtactgcctgctgcactacagaggcgacgagaacatcaagggcttcatctgggacctgatcagccccgccgagaacggcaagaccaaggagctgcagaaccacagcggcctgagcatccccgtgcccagaggcagaaagggcaagaaggtgaagagccagagcaccttcgacatccacaaggccgactggatcagaaagtacaaccccgacaccctgttccaggacgagagctacaagaagcacctgaagcaccagtgcaacaaggtgctgctgagagtgagaatgctgtactacctgagacaggaggtgatcggcgaccaggccgagaaggtgctgggcggcgccatcgccagcgagatcgacatctggttccccgtggtggaccagctggaggtgcccaccacctggtgggacagcgaggccgacaagagcctgctgatcggcgtgttcaagcacggctacgagaagtacaacaccatgagagccgaccccgccctgtgcttcctggagaaggccggcagacccgacgacaaggccatcgccgccgagcacagagtgctggacaacttcagcgacatcgtggagggcgtggacttcgacaaggactgcgaggaccccgagtacaagcccctgcagggcccccccaaggaccaggacgacgagggcgaccccctgatgatgatggacgaggagatcagcgtgatcgacggcgacgaggcccaggtgacccagcagcccggccacctgttctggccccccggcagcgccctgaccgccagactgagaagactggtgaccgcctaccagagaagctacaagagagagcagatgaagatcgaggccgccgagagaggcgacagaagaagaagaagatgcgaggccgccttcaagctgaaggagatcgccagaagagagaagcagcagagatggaccagaagagagcagaccgacttctacagagtggtgagcaccttcggcgtggagtacgaccccgacaccatgcagttccactgggacagattcagaaccttcgccagactggacaagaagaccgacgagagcctgaccaagtacttccacggcttcgtggccatgtgcagacaggtgtgcagactgccccccgccgccggcgacgagccccccgaccccaacctgttcatcgagcccatcaccgaggagagagccagcagaaccctgtacagaatcgagctgctgagaagactgagagagcaggtgctgtgccaccccctgctggaggacagactggccctgtgccagccccccggccccgagctgcccaagtggtgggagcccgtgagacacgacggcgagctgctgagaggcgccgccagacacggcgtgagccagaccgactgcaacatcatgcaggaccccgacttcagcttcctggccgccagaatgaactacatgcagaaccaccaggccggcgcccccgcccccagcctgagcagatgcagcacccccctgctgcaccagcagtacaccagcagaaccgccagccccctgcccctgagacccgacgcccccgtggagaagagccccgaggagaccgccacccaggtgcccagcctggagagcctgaccctgaagctggagcacgaggtggtggccagaagcagacccaccccccaggactacgagatgagagtgagccccagcgacaccacccccctggtgagcagaagcgtgccccccgtgaagctggaggacgaggacgacagcgacagcgagctggacctgagcaagctgagccccagcagcagcagcagcagcagcagcagcagcagcagcagcagcaccgacgagagcgaggacgagaaggaggagaagctgaccgaccagagcagaagcaagctgtacgacgaggagagcctgctgagcctgaccatgagccaggacggcttccccaacgaggacggcgagcagatgacccccgagctgctgctgctgcaggagagacagagagccagcgagtggcccaaggacagagtgctgatcaacagaatcgacctggtgtgccaggccgtgctgagcggcaagtggcccagcagcagaagaagccaggagatggtgaccggcggcatcctgggccccggcaaccacctgctggacagccccagcctgacccccggcgagtacggcgacagccccgtgcccacccccagaagcagcagcgccgccagcatggccgaggaggaggccagcgccgtgagcaccgccgccgcccagttcaccaagctgagaagaggcatggacgagaaggagttcaccgtgcagatcaaggacgaggagggcctgaagctgaccttccagaagcacaagctgatggccaacggcgtgatgggcgacggccaccccctgttccacaagaagaagggcaacagaaagaagctggtggagctggaggtggagtgcatggaggagcccaaccacctggacgtggacctggagaccagaatccccgtgatcaacaaggtggacggcaccctgctggtgggcgaggacgcccccagaagagccgagctggagatgtggctgcagggccaccccgagttcgccgtggaccccagattcctggcctacatggaggacagaagaaagcagaagtggcagagatgcaagaagaacaacaaggccgagctgaactgcctgggcatggagcccgtgcagaccgccaacagcagaaacggcaagaagggccaccacaccgagaccgtgttcaacagagtgctgcccggccccatcgcccccgagagcagcaagaagagagccagaagaatgagacccgacctgagcaagatgatggccctgatgcagggcggcagcaccggcagcctgagcctgcacaacaccttccagcacagcagcagcggcctgcagagcgtgagcagcctgggccacagcagcgccaccagcgccagcctgcccttcatgcccttcgtgatgggcggcgcccccagcagcccccacgtggacagcagcaccatgctgcaccaccaccaccaccacccccacccccaccaccaccaccaccaccaccccggcctgagagcccccggctaccccagcagccccgtgaccaccgccagcggcaccaccctgagactgccccccctgcagcccgaggaggacgacgacgaggacgaggaggacgacgacgacctgagccagggctacgacagcagcgagagagacttcagcctgatcgacgaccccatgatgcccgccaacagcgacagcagcgaggacgccgacgactag

SEQ ID NO: 76743 - DNA, 6909 bp, synthetic construct
  misc_feature 1..6909: note = Description of Artificial Sequence: Synthetic coding sequence
  source 1..6909: mol_type = other DNA
atgaagggcgagagcaagagaatcaccctggtgctgcagcagccccagagcggcggcccccagggccacagacacgtggtgctgggcagcctgcccggcaagatcgtgctgcagggcaaccagctggccgccctgacccaggccaagaacgcccagggccagcccgccaaggtggtgaccatccagctgcaggtgcagcagccccagcagaagatccagatcgtgccccagccccccagcagccagccccagccccagcagccccccagcacccagcccgtgaccctgagcagcgtgcagcaggcccagatcatgggccccggccagagccccggccagagactgagcgtgcccgtgaaggtggtgctgcagccccaggccggcagcagccagggcgccagcagcggcctgagcgtggtgaaggtgctgagcgccagcgaggtggccgccctgagcagccccgccagcagcgccccccacagcggcggcaagaccggcatggaggagaacagaagactggagcaccagaagaagcaggagaaggccaacagaatcgtggccgaggccatcgccagagccagagccagaggcgagcagaacatccccagagtgctgaacgaggacgagctgcccagcgtgagacccgaggaggagggcgagaagaagagaagaaagaagagcgccggcgagagactgaaggaggagaagcccaagaagagcaagaccagcggcgccagcaagaccaagggcaagagcaagctgaacaccatcacccccgtggtgggcaagaagagaaagagaaacaccagcagcgacaacagcgacgtggaggtgatgcccgcccagagccccagagaggacgaggagagcagcatccagaagagaagaagcaacagacaggtgaagagaaagaagtacaccgaggacctggacatcaagatcaccgacgacgaggaggaggaggaggtggacgtgaccggccccatcaagcccgagcccatcctgcccgagcccgtgcaggagcccgacggcgagaccctgcccagcatgcagttcttcgtggagaaccccagcgaggaggacgccgccatcgtggacaaggtgctgagcatgagaatcgtgaagaaggagctgcccagcggccagtacaccgaggccgaggagttcttcgtgaagtacaagaactacagctacctgcactgcgagtgggccaccatcagccagctggagaaggacaagagaatccaccagaagctgaagagattcaagaccaagatggcccagatgagacacttcttccacgaggacgaggagcccttcaaccccgactacgtggaggtggacagaatcctggacgagagccacagcatcgacaaggacaacggcgagcccgtgatctactacctggtgaagtggtgcagcctgccctacgaggacagcacctgggagctgaaggaggacgtggacgagggcaagatcagagagttcaagagaatccagagcagacaccccgagctgaagagagtgaacagaccccaggccagcgcctggaagaagctggagctgagccacgagtacaagaacagaaaccagctgagagagtaccagctggagggcgtgaactggctgctgttcaactggtacaacagacagaactgcatcctggccgacgagatgggcctgggcaagaccatccagagcatcgccttcctgcaggaggtgtacaacgtgggcatccacggccccttcctggtgatcgcccccctgagcaccatcaccaactgggagagagagttcaacacctggaccgagatgaacaccatcgtgtaccacggcagcctggccagcagacagatgatccagcagtacgagatgtactgcaaggacagcagaggcagactgatccccggcgcctacaagttcgacgccctgatcaccaccttcgagatgatcctgagcgactgccccgagctgagagagatcgagtggagatgcgtgatcatcgacgaggcccacagactgaagaacagaaactgcaagctgctggacagcctgaagcacatggacctggagcacaaggtgctgctgaccggcacccccctgcagaacaccgtggaggagctgttcagcctgctgcacttcctggagcccagccagttccccagcgagagcgagttcctgaaggacttcggcgacctgaagaccgaggagcaggtgcagaagctgcaggccatcctgaagcccatgatgctgagaagactgaaggaggacgtggagaagaacctggcccccaagcaggagaccatcatcgaggtggagctgaccaacatccagaagaagtactacagagccatcctggagaagaacttcagcttcctgagcaagggcgccggccacaccaacatgcccaacctgctgaacaccatgatggagctgagaaagtgctgcaaccacccctacctgatcaacggcgccgaggagaagatcctgaccgagttcagagaggcctgccacatcatcccccacgacttccacctgcaggccatggtgagaagcgccggcaagctggtgctgatcgacaagctgctgcccaagctgaaggccggcggccacaaggtgctgatcttcagccagatggtgagatgcctggacatcctggaggactacctgatccagagaagatacctgtacgagagaatcgacggcagagtgagaggcaacctgagacaggccgccatcgacagattcagcaagcccgacagcgacagattcgtgttcctgctgtgcaccagagccggcggcctgggcatcaacctgaccgccgccgacacctgcatcatcttcgacagcgactggaacccccagaacgacctgcaggcccaggccagatgccacagaatcggccagagcaaggccgtgaaggtgtacagactgatcaccagaaacagctacgagagagagatgttcgacaaggccagcctgaagctgggcctggacaaggccgtgctgcagagcatgagcggcagagacggcaacatcaccggcatccagcagttcagcaagaaggagatcgaggacctgctgagaaagggcgcctacgccgccatcatggaggaggacgacgagggcagcaagttctgcgaggaggacatcgaccagatcctgctgagaagaaccaccaccatcaccatcgagagcgagggcaagggcagcaccttcgccaaggccagcttcgtggccagcgagaacagaaccgacatcagcctggacgaccccaacttctggcagaagtgggccaagaaggccgacctggacatggacctgctgaacagcaagaacaacctggtgatcgacacccccagagtgagaaagcagaccagacacttcagcaccctgaaggacgacgacctggtggagttcagcgacctggagagcgaggacgacgagagacccagaagcagaagacacgacagacaccacgcctacggcagaaccgactgcttcagagtggagaagcacctgctggtgtacggctggggcagatggagagacatcctgagccacggcagattcaagagaagaatgaccgagagagacgtggagaccatctgcagagccatcctggtgtactgcctgctgcactacagaggcgacgagaacatcaagggcttcatctgggacctgatcagccccgccgagaacggcaagaccaaggagctgcagaaccacagcggcctgagcatccccgtgcccagaggcagaaagggcaagaaggtgaagagccagagcaccttcgacatccacaaggccgactggatcagaaagtacaaccccgacaccctgttccaggacgagagctacaagaagcacctgaagcaccagtgcaacaaggtgctgctgagagtgagaatgctgtactacctgagacaggaggtgatcggcgaccaggccgagaaggtgctgggcggcgccatcgccagcgagatcgacatctggttccccgtggtggaccagctggaggtgcccaccacctggtgggacagcgaggccgacaagagcctgctgatcggcgtgttcaagcacggctacgagaagtacaacaccatgagagccgaccccgccctgtgcttcctggagaaggccggcagacccgacgacaaggccatcgccgccgagcacagagtgctggacaacttcagcgacatcgtggagggcgtggacttcgacaaggactgcgaggaccccgagtacaagcccctgcagggcccccccaaggaccaggacgacgagggcgaccccctgatgatgatggacgaggagatcagcgtgatcgacggcgacgaggcccaggtgacccagcagcccggccacctgttctggccccccggcagcgccctgaccgccagactgagaagactggtgaccgcctaccagagaagctacaagagagagcagatgaagatcgaggccgccgagagaggcgacagaagaagaagaagatgcgaggccgccttcaagctgaaggagatcgccagaagagagaagcagcagagatggaccagaagagagcagaccgacttctacagagtggtgagcaccttcggcgtggagtacgaccccgacaccatgcagttccactgggacagattcagaaccttcgccagactggacaagaagaccgacgagagcctgaccaagtacttccacggcttcgtggccatgtgcagacaggtgtgcagactgccccccgccgccggcgacgagccccccgaccccaacctgttcatcgagcccatcaccgaggagagagccagcagaaccctgtacagaatcgagctgctgagaagactgagagagcaggtgctgtgccaccccctgctggaggacagactggccctgtgccagccccccggccccgagctgcccaagtggtgggagcccgtgagacacgacggcgagctgctgagaggcgccgccagacacggcgtgagccagaccgactgcaacatcatgcaggaccccgacttcagcttcctggccgccagaatgaactacatgcagaaccaccaggccggcgcccccgcccccagcctgagcagatgcagcacccccctgctgcaccagcagtacaccagcagaaccgccagccccctgcccctgagacccgacgcccccgtggagaagagccccgaggagaccgccacccaggtgcccagcctggagagcctgaccctgaagctggagcacgaggtggtggccagaagcagacccaccccccaggactacgagatgagagtgagccccagcgacaccacccccctggtgagcagaagcgtgccccccgtgaagctggaggacgaggacgacagcgacagcgagctggacctgagcaagctgagccccagcagcagcagcagcagcagcagcagcagcagcagcagcagcaccgacgagagcgaggacgagaaggaggagaagctgaccgaccagagcagaagcaagctgtacgacgaggagagcctgctgagcctgaccatgagccaggacggcttccccaacgaggacggcgagcagatgacccccgagctgctgctgctgcaggagagacagagagccagcgagtggcccaaggacagagtgctgatcaacagaatcgacctggtgtgccaggccgtgctgagcggcaagtggcccagcagcagaagaagccaggagatggtgaccggcggcatcctgggccccggcaaccacctgctggacagccccagcctgacccccggcgagtacggcgacagccccgtgcccacccccagaagcagcagcgccgccagcatggccgaggaggaggccagcgccgtgagcaccgccgccgcccagttcaccaagctgagaagaggcatggacgagaaggagttcaccgtgcagatcaaggacgaggagggcctgaagctgaccttccagaagcacaagctgatggccaacggcgtgatgggcgacggccaccccctgttccacaagaagaagggcaacagaaagaagctggtggagctggaggtggagtgcatggaggagcccaaccacctggacgtggacctggagaccagaatccccgtgatcaacaaggtggacggcaccctgctggtgggcgaggacgcccccagaagagccgagctggagatgtggctgcagggccaccccgagttcgccgtggaccccagattcctggcctacatggaggacagaagaaagcagaagtggcagagatgcaagaagaacaacaaggccgagctgaactgcctgggcatggagcccgtgcagaccgccaacagcagaaacggcaagaagggccaccacaccgagaccgtgttcaacagagtgctgcccggccccatcgcccccgagagcagcaagaagagagccagaagaatgagacccgacctgagcaagatgatggccctgatgcagggcggcagcaccggcagcctgagcctgcacaacaccttccagcacagcagcagcggcctgcagagcgtgagcagcctgggccacagcagcgccaccagcgccagcctgcccttcatgcccttcgtgatgggcggcgcccccagcagcccccacgtggacagcagcaccatgctgcaccaccaccaccaccacccccacccccaccaccaccaccaccaccaccccggcctgagagcccccggctaccccagcagccccgtgaccaccgccagcggcaccaccctgagactgccccccctgcagcccgaggaggacgacgacgaggacgaggaggacgacgacgacctgagccagggctacgacagcagcgagagagacttcagcctgatcgacgaccccatgatgcccgccaacagcgacagcagcgaggacgccgacgactag

SEQ ID NO: 76744 - DNA, 7746 bp, synthetic construct; identical to SEQ ID NO: 76742
  misc_feature 1..7746: note = Description of Artificial Sequence: Synthetic coding sequence
  source 1..7746: mol_type = other DNA

SEQ ID NO: 76745 - DNA, 1797 bp, synthetic construct
  misc_feature 1..1797: note = Description of Artificial Sequence: Synthetic coding sequence
  source 1..1797: mol_type = other DNA
atgaccttccaggccagccacagaagcgcctggggcaagagcagaaagaagaactggcagtacgagggccccacccagaagctgttcctgaagagaaacaacgtgagcgcccccgacggccccagcgaccccagcatcagcgtgagcagcgagcagagcggcgcccagcagccccccgccctgcaggtggagagaatcgtggacaagagaaagaacaagaagggcaagaccgagtacctggtgagatggaagggctacgacagcgaggacgacacctgggagcccgagcagcacctggtgaactgcgaggagtacatccacgacttcaacagaagacacaccgagaagcagaaggagagcaccctgaccagaaccaacagaaccagccccaacaacgccagaaagcagatcagcagaagcaccaacagcaacttcagcaagaccagccccaaggccctggtgatcggcaaggaccacgagagcaagaacagccagctgttcgccgccagccagaagttcagaaagaacaccgcccccagcctgagcagcagaaagaacatggacctggccaagagcggcatcaagatcctggtgcccaagagccccgtgaagagcagaaccgccgtggacggcttccagagcgagagccccgagaagctggaccccgtggagcagggccaggaggacaccgtggcccccgaggtggccgccgagaagcccgtgggcgccctgctgggccccggcgccgagagagccagaatgggcagcagacccagaatccaccccctggtgccccaggtgcccggccccgtgaccgccgccatggccaccggcctggccgtgaacggcaagggcaccagccccttcatggacgccctgaccgccaacggcaccaccaacatccagaccagcgtgaccggcgtgaccgccagcaagagaaagttcatcgacgacagaagagaccagcccttcgacaagagactgagattcagcgtgagacagaccgagagcgcctacagatacagagacatcgtggtgagaaagcaggacggcttcacccacatcctgctgagcaccaagagcagcgagaacaacagcctgaaccccgaggtgatgagagaggtgcagagcgccctgagcaccgccgccgccgacgacagcaagctggtgctgctgagcgccgtgggcagcgtgttctgctgcggcctggacttcatctacttcatcagaagactgaccgacgacagaaagagagagagcaccaagatggccgaggccatcagaaacttcgtgaacaccttcatccagttcaagaagcccatcatcgtggccgtgaacggccccgccatcggcctgggcgccagcatcctgcccctgtgcgacgtggtgtgggccaacgagaaggcctggttccagaccccctacaccaccttcggccagagccccgacggctgcagcaccgtgatgttccccaagatcatgggcggcgccagcgccaacgagatgctgctgagcggcagaaagctgaccgcccaggaggcctgcggcaagggcctggtgagccaggtgttctggcccggcaccttcacccaggaggtgatggtgagaatcaaggagctggccagctgcaaccccgtggtgctggaggagagcaaggccctggtgagatgcaacatgaagatggagctggagcaggccaacgagagagagtgcgaggtgctgaagaagatctggggcagcgcccagggcatggacagcatgctgaagtacctgcagagaaagatcgacgagttctag

SEQ ID NO: 76746 - DNA, 1239 bp, synthetic construct
  misc_feature 1..1239: note = Description of Artificial Sequence: Synthetic coding sequence
  source 1..1239: mol_type = other DNA
atggacctggccaagagcggcatcaagatcctggtgcccaagagccccgtgaagagcagaaccgccgtggacggcttccagagcgagagccccgagaagctggaccccgtggagcagggccaggaggacaccgtggcccccgaggtggccgccgagaagcccgtgggcgccctgctgggccccggcgccgagagagccagaatgggcagcagacccagaatccaccccctggtgccccaggtgcccggccccgtgaccgccgccatggccaccggcctggccgtgaacggcaagggcaccagccccttcatggacgccctgaccgccaacggcaccaccaacatccagaccagcgtgaccggcgtgaccgccagcaagagaaagttcatcgacgacagaagagaccagcccttcgacaagagactgagattcagcgtgagacagaccgagagcgcctacagatacagagacatcgtggtgagaaagcaggacggcttcacccacatcctgctgagcaccaagagcagcgagaacaacagcctgaaccccgaggtgatgagagaggtgcagagcgccctgagcaccgccgccgccgacgacagcaagctggtgctgctgagcgccgtgggcagcgtgttctgctgcggcctggacttcatctacttcatcagaagactgaccgacgacagaaagagagagagcaccaagatggccgaggccatcagaaacttcgtgaacaccttcatccagttcaagaagcccatcatcgtggccgtgaacggccccgccatcggcctgggcgccagcatcctgcccctgtgcgacgtggtgtgggccaacgagaaggcctggttccagaccccctacaccaccttcggccagagccccgacggctgcagcaccgtgatgttccccaagatcatgggcggcgccagcgccaacgagatgctgctgagcggcagaaagctgaccgcccaggaggcctgcggcaagggcctggtgagccaggtgttctggcccggcaccttcacccaggaggtgatggtgagaatcaaggagctggccagctgcaaccccgtggtgctggaggagagcaaggccctggtgagatgcaacatgaagatggagctggagcaggccaacgagagagagtgcgaggtgctgaagaagatctggggcagcgcccagggcatggacagcatgctgaagtacctgcagagaaagatcgacgagttctag

SEQ ID NO: 76747 - DNA, 1635 bp, synthetic construct
  misc_feature 1..1635: note = Description of Artificial Sequence: Synthetic coding sequence
  source 1..1635: mol_type = other DNA
atggccagcgaggagctgtacgaggtggagagaatcgtggacaagagaaagaacaagaagggcaagaccgagtacctggtgagatggaagggctacgacagcgaggacgacacctgggagcccgagcagcacctggtgaactgcgaggagtacatccacgacttcaacagaagacacaccgagaagcagaaggagagcaccctgaccagaaccaacagaaccagccccaacaacgccagaaagcagatcagcagaagcaccaacagcaacttcagcaagaccagccccaaggccctggtgatcggcaaggaccacgagagcaagaacagccagctgttcgccgccagccagaagttcagaaagaacaccgcccccagcctgagcagcagaaagaacatggacctggccaagagcggcatcaagatcctggtgcccaagagccccgtgaagagcagaaccgccgtggacggcttccagagcgagagccccgagaagctggaccccgtggagcagggccaggaggacaccgtggcccccgaggtggccgccgagaagcccgtgggcgccctgctgggccccggcgccgagagagccagaatgggcagcagacccagaatccaccccctggtgccccaggtgcccggccccgtgaccgccgccatggccaccggcctggccgtgaacggcaagggcaccagccccttcatggacgccctgaccgccaacggcaccaccaacatccagaccagcgtgaccggcgtgaccgccagcaagagaaagttcatcgacgacagaagagaccagcccttcgacaagagactgagattcagcgtgagacagaccgagagcgcctacagatacagagacatcgtggtgagaaagcaggacggcttcacccacatcctgctgagcaccaagagcagcgagaacaacagcctgaaccccgaggtgatgagagaggtgcagagcgccctgagcaccgccgccgccgacgacagcaagctggtgctgctgagcgccgtgggcagcgtgttctgctgcggcctggacttcatctacttcatcagaagactgaccgacgacagaaagagagagagcaccaagatggccgaggccatcagaaacttcgtgaacaccttcatccagttcaagaagcccatcatcgtggccgtgaacggccccgccatcggcctgggcgccagcatcctgcccctgtgcgacgtggtgtgggccaacgagaaggcctggttccagaccccctacaccaccttcggccagagccccgacggctgcagcaccgtgatgttccccaagatcatgggcggcgccagcgccaacgagatgctgctgagcggcagaaagctgaccgcccaggaggcctgcggcaagggcctggtgagccaggtgttctggcccggcaccttcacccaggaggtgatggtgagaatcaaggagctggccagctgcaaccccgtggtgctggaggagagcaaggccctggtgagatgcaacatgaagatggagctggagcaggccaacgagagagagtgcgaggtgctgaagaagatctggggcagcgcccagggcatggacagcatgctgaagtacctgcagagaaagatcgacgagttctag

SEQ ID NO: 76748 - DNA, 1239 bp, synthetic construct; identical to SEQ ID NO: 76746
  misc_feature 1..1239: note = Description of Artificial Sequence: Synthetic coding sequence
  source 1..1239: mol_type = other DNA

SEQ ID NO: 76749 - DNA, 1665 bp, synthetic construct
  misc_feature 1..1665: note = Description of Artificial Sequence: Synthetic coding sequence
  source 1..1665: mol_type = other DNA
atggccagccaggagttcgaggtggaggccatcgtggacaagagacaggacaagaacggcaacacccagtacctggtgagatggaagggctacgacaagcaggacgacacctgggagcccgagcagcacctgatgaactgcgagaagtgcgtgcacgacttcaacagaagacagaccgagaagcagaagaagctgacctggaccaccaccagcagaatcttcagcaacaacgccagaagaagaaccagcagaagcaccaaggccaactacagcaagaacagccccaagacccccgtgaccgacaagcaccacagaagcaagaacagaaagctgttcgccgccagcaagaacgtgagaagaaaggccgccagcatcctgagcgacaccaagaacatggagatcatcaacagcaccatcgagaccctggcccccgacagccccttcgaccacaagaccgtgagcggcttccagaagctggagaagctggaccccatcgccgccgaccagcaggacaccgtggtgttcaaggtgaccgagggcaagctgctgagagaccccctgagcagacccggcgccgagcagaccggcatccagaacaagacccagatccaccccctgatgagccagatgagcggcagcgtgaccgccagcatggccaccggcagcgccaccagaaagggcatcgtggtgctgatcgaccccctggccgccaacggcaccaccgacatgcacaccagcgtgcccagagtgaagggcggccagagaaacatcaccgacgacagcagagaccagcccttcatcaagaagatgcacttcaccatcagactgaccgagagcgccagcacctacagagacatcgtggtgaagaaggaggacggcttcacccagatcgtgctgagcaccagaagcaccgagaagaacgccctgaacaccgaggtgatcaaggagatcgtgaacgccctgaacagcgccgccgccgacgacagcaagctggtgctgttcagcgccgccggcagcgtgttctgctgcggcctggacttcggctacttcgtgaagcacctgagaaacaacagaaacaccgccagcctggagatggtggacaccatcaagaacttcgtgaacaccttcatccagttcaagaagcccatcgtggtgagcgtgaacggccccgccatcggcctgggcgccagcatcctgcccctgtgcgacctggtgtgggccaacgagaaggcctggttccagaccccctacaccaccttcggccagagccccgacggctgcagcagcatcaccttccccaagatgatgggcaaggccagcgccaacgagatgctgatcgccggcagaaagctgaccgccagagaggcctgcgccaagggcctggtgagccaggtgttcctgaccggcaccttcacccaggaggtgatgatccagatcaaggagctggccagctacaaccccatcgtgctggaggagtgcaaggccctggtgagatgcaacatcaagctggagctggagcaggccaacgagagagagtgcgaggtgctgagaaagatctggagcagcgcccagggcatcgagagcatgctgaagatccccctgctgggctacaaggccgccttcccccccagaaagacccagaacgaccagagatggtgcccctag

SEQ ID NO: 76750 - DNA, 1623 bp, synthetic construct
  misc_feature 1..1623: note = Description of Artificial Sequence: Synthetic coding sequence
  source 1..1623: mol_type = other DNA
atggccagccaggagttcgaggtggaggccatcgtggacaagagacaggacaagaacggcaacacccagtacctggtgagatggaagggctacgacaagcaggacgacacctgggagcccgagcagcacctgatgaactgcgagaagtgcgtgcacgacttcaacagaagacagaccgagaagcagaagaagctgacctggaccaccaccagcagaatcttcagcaacaacgccagaagaagaaccagcagaagcaccaaggccaactacagcaagaacagccccaagacccccgtgaccgacaagcaccacagaagcaagaacagaaagctgttcgccgccagcaagaacgtgagaagaaaggccgccagcatcctgagcgacaccaagaacatggagatcatcaacagcaccatcgagaccctggcccccgacagccccttcgaccacaagaccgtgagcggcttccagaagctggagaagctggaccccatcgccgccgaccagcaggacaccgtggtgttcaaggtgaccgagggcaagctgctgagagaccccctgagcagacccggcgccgagcagaccggcatccagaacaagacccagatccaccccctgatgagccagatgagcggcagcgtgaccgccagcatggccaccggcagcgccaccagaaagggcatcgtggtgctgatcgaccccctggccgccaacggcaccaccgacatgcacaccagcgtgcccagagtgaagggcggccagagaaacatcaccgacgacagcagagaccagcccttcatcaagaagatgcacttcaccatcagactgaccgagagcgccagcacctacagagacatcgtggtgaagaaggaggacggcttcacccagatcgtgctgagcaccagaagcaccgagaagaacgccctgaacaccgaggtgatcaaggagatcgtgaacgccctgaacagcgccgccgccgacgacagcaagctggtgctgttcagcgccgccggcagcgtgttctgctgcggcctggacttcggctacttcgtgaagcacctgagaaacaacagaaacaccgccagcctggagatggtggacaccatcaagaacttcgtgaacaccttcatccagttcaagaagcccatcgtggtgagcgtgaacggccccgccatcggcctgggcgccagcatcctgcccctgtgcgacctggtgtgggccaacgagaaggcctggttccagaccccctacaccaccttcggccagagccccgacggctgcagcagcatcaccttccccaagatgatgggcaaggccagcgccaacgagatgctgatcgccggcagaaagctgaccgccagagaggcctgcgccaagggcctggtgagccaggtgttcctgaccggcaccttcacccaggaggtgatgatccagatcaaggagctggccagctacaaccccatcgtgctggaggagtgcaaggccctggtgagatgcaacatcaagctggagctggagcaggccaacgagagagagtgcgaggtgctgagaaagatctggagcagcgcccagggcatcgagagcatgctgaagtacgtggagaacaagatcgacgagttctag

SEQ ID NO: 76751 - DNA, 1170 bp, synthetic construct
  misc_feature 1..1170: note = Description of Artificial Sequence: Synthetic coding sequence
  source 1..1170: mol_type = other DNA
atgggcaagatggccgccgccgtgggcagcgtggccaccctggccaccgagcccggcgaggacgccttcagaaagctgttcagattctacagacagagcagacccggcaccgccgacctggagggcgtgatcgacttcagcgccgcccacgccgccagaggcaagggccccggcgcccagaaggtgatcaagagccagctgaacgtgagcagcgtgagcgagcagaacgcctacagagccggcctgcagcccgtgagcaagtggcaggcctacggcctgaagggctaccccggcttcatcttcatccccaaccccttcctgcccggctaccagtggcactgggtgaagcagtgcctgaagctgtacagccagaagcccaacgtgtgcaacctggacaagcacatgagcaaggaggagacccaggacctgtgggagcagagcaaggagttcctgagatacaaggaggccaccaagagaagacccagaagcctgctggagaagctgagatgggtgaccgtgggctaccactacaactgggacagcaagaagtacagcgccgaccactacacccccttccccagcgacctgggcttcctgagcgagcaggtggccgccgcctgcggcttcgaggacttcagagccgaggccggcatcctgaactactacagactggacagcaccctgggcatccacgtggacagaagcgagctggaccacagcaagcccctgctgagcttcagcttcggccagagcgccatcttcctgctgggcggcctgcagagagacgaggcccccaccgccatgttcatgcacagcggcgacatcatgatcatgagcggcttcagcagactgctgaaccacgccgtgcccagagtgctgcccaaccccgagggcgagggcctgccccactgcctggaggcccccctgcccgccgtgctgcccagagacagcatggtggagccctgcagcatggaggactggcaggtgtgcgccagctacctgaagaccgccagagtgaacatgaccgtgagacaggtgctggccaccgaccagaacttccccctggagcccatcgaggacgagaagagagacatcagcaccgagggcttctgccacctggacgaccagaacagcgaggtgaagagagccagaatcaaccccgacagctag

SEQ ID NO: 76752 - DNA, 921 bp, synthetic construct
  misc_feature 1..921: note = Description of Artificial Sequence: Synthetic coding sequence
  source 1..921: mol_type = other DNA
atgagaagcgccgccgtgctggccctgctgctgtgcgccggccaggtgaccgccctgcccgtgaacagccccatgaacaagggcgacaccgaggtgatgaagtgcatcgtggaggtgatcagcgacaccctgagcaagcccagccccatgcccgtgagccaggagtgcttcgagaccctgagaggcgacgagagaatcctgagcatcctgagacaccagaacctgctgaaggagctgcaggacctggccctgcagggcgccaaggagagagcccaccagcagaagaagcacagcggcttcgaggacgagctgagcgaggtgctggagaaccagagcagccaggccgagctgaagggcagaagcgaggccctggccgtggacggcgccggcaagcccggcgccgaggaggcccaggaccccgagggcaagggcgagcaggagcacagccagcagaaggaggaggaggaggagatggccgtggtgccccagggcctgttcagaggcggcaagagcggcgagctggagcaggaggaggagagactgagcaaggagtgggaggacagcaagagatggagcaagatggaccagctggccaaggagctgaccgccgagaagagactggagggccaggaggaggaggaggacaacagagacagcagcatgaagctgagcttcagagccagagcctacggcttcagaggccccggcccccagctgagaagaggctggagacccagcagcagagaggacagcctggaggccggcctgcccctgcaggtgagaggctaccccgaggagaagaaggaggaggagggcagcgccaacagaagacccgaggaccaggagctggagagcctgagcgccatcgaggccgagctggagaaggtggcccaccagctgcaggccctgagaagaggctag

SEQ ID NO: 76753 - DNA, 2034 bp, synthetic construct
  misc_feature 1..2034: note = Description of Artificial Sequence: Synthetic coding sequence
  source 1..2034: mol_type = other DNA
atgcagcccaccctgctgctgagcctgctgggcgccgtgggcctggccgccgtgaacagcatgcccgtggacaacagaaaccacaacgagggcatggtgaccagatgcatcatcgaggtgctgagcaacgccctgagcaagagcagcgccccccccatcacccccgagtgcagacaggtgctgaagaccagcagaaaggacgtgaaggacaaggagaccaccgagaacgagaacaccaagttcgaggtgagactgctgagagaccccgccgacgccagcgaggcccacgagagcagcagcagaggcgaggccggcgcccccggcgaggaggacatccagggccccaccaaggccgacaccgagaagtgggccgagggcggcggccacagcagagagagagccgacgagccccagtggagcctgtaccccagcgacagccaggtgagcgaggaggtgaagaccagacacagcgagaagagccagagagaggacgaggaggaggaggagggcgagaactaccagaagggcgagagaggcgaggacagcagcgaggagaagcacctggaggagcccggcgagacccagaacgccttcctgaacgagagaaagcaggccagcgccatcaagaaggaggagctggtggccagaagcgagacccacgccgccggccacagccaggagaagacccacagcagagagaagagcagccaggagagcggcgaggagaccggcagccaggagaaccacccccaggagagcaagggccagcccagaagccaggaggagagcgaggagggcgaggaggacgccaccagcgaggtggacaagagaagaaccagacccagacaccaccacggcagaagcagacccgacagaagcagccagggcggcagcctgcccagcgaggagaagggccacccccaggaggagagcgaggagagcaacgtgagcatggccagcctgggcgagaagagagaccaccacagcacccactacagagccagcgaggaggagcccgagtacggcgaggagatcaagggctaccccggcgtgcaggcccccgaggacctggagtgggagagatacagaggcagaggcagcgaggagtacagagcccccagaccccagagcgaggagagctgggacgaggaggacaagagaaactaccccagcctggagctggacaagatggcccacggctacggcgaggagagcgaggaggagagaggcctggagcccggcaagggcagacaccacagaggcagaggcggcgagcccagagcctacttcatgagcgacaccagagaggagaagagattcctgggcgagggccaccacagagtgcaggagaaccagatggacaaggccagaagacacccccagggcgcctggaaggagctggacagaaactacctgaactacggcgaggagggcgcccccggcaagtggcagcagcagggcgacctgcaggacaccaaggagaacagagaggaggccagattccaggacaagcagtacagcagccaccacaccgccgagaagagaaagagactgggcgagctgttcaacccctactacgaccccctgcagtggaagagcagccacttcgagagaagagacaacatgaacgacaacttcctggagggcgaggaggagaacgagctgaccctgaacgagaagaacttcttccccgagtacaactacgactggtgggagaagaagcccttcagcgaggacgtgaactggggctacgagaagagaaacctggccagagtgcccaagctggacctgaagagacagtacgacagagtggcccagctggaccagctgctgcactacagaaagaagagcgccgagttccccgacttctacgacagcgaggagcccgtgagcacccaccaggaggccgagaacgagaaggacagagccgaccagaccgtgctgaccgaggacgagaagaaggagctggagaacctggccgccatggacctggagctgcagaagatcgccgagaagttcagccagagaggctag

SEQ ID NO: 76754 - DNA, 870 bp, synthetic construct
  misc_feature 1..870: note = Description of Artificial Sequence: Synthetic coding sequence
  source 1..870: mol_type = other DNA
atgcccgtggacaacagaaaccacaacgagggcatggtgaccagatgcatcatcgaggtgctgagcaacgccctgagcaagagcagcgccccccccatcacccccgagtgcagacaggtgctgaagaccagcagaaaggacgtgaaggacaaggagaccaccgagaacgagaacaccaagttcgaggtgagactgctgagagaccccgccgacgccagcgaggcccacgagagcagcagcagaggcgaggccggcgcccccggcgaggaggacatccagggccccaccaaggccgacaccgagaagtgggccgagggcggcggccacagcagagagagagccgacgagccccagtggagcctgtaccccagcgacagccaggtgagcgaggaggtgaagaccagacacagcgagaagagccagagagaggacgaggaggaggaggagggcgagaactaccagaagggcgagagaggcgaggacagcagcgaggagaagcacctggaggagcccggcgagacccagaacgccttcctgaacgagagaaagcaggccagcgccatcaagaaggaggagctggtggccagaagcgagacccacgccgccggccacagccaggagaagacccacagcagagagaagagcagccaggagagcggcgaggagaccggcagccaggagaaccacccccaggagagcaagggccagcccagaagccaggaggagagcgaggagggcgaggaggacgccaccagcgaggtggacaagagaagaaccagacccagacaccaccacggcagaagcagacccgacagaagcagccagggcggcagcctgcccagcgaggagaagggccacccccaggagtag

SEQ ID NO: 76755 - DNA, 1806 bp, synthetic construct
  misc_feature 1..1806: note = Description of Artificial Sequence: Synthetic coding sequence
  source 1..1806: mol_type = other DNA
atgcccgagagagagctgtggcccgccggcaccggcagcgagcccgtgaccagagtgggcagctgcgacagcatgatgagcagcaccagcaccagaagcggcagcagcgacagcagctacgacttcctgagcaccgaggagaaggagtgcctgctgttcctggaggagaccatcggcagcctggacaccgaggccgacagcggcctgagcaccgacgagagcgagcccgccaccacccccagaggcttcagagccctgcccatcacccagcccacccccagaggcggccccgaggagaccatcacccagcagggcagaacccccagaaccgtgaccgagagcagcagcagccacccccccgagccccagggcctgggcctgagaagcggcagctacagcctgcccagaaacatccacatcgccagaagccagaacttcagaaagagcaccacccaggccagcagccacaaccccggcgagcccggcagactggcccccgagcccgagaaggagcaggtgagccagagcagccagcccagacaggcccccgccagcccccaggaggccgccctggacctggacgtggtgctgatccccccccccgaggccttcagagacacccagcccgagcagtgcagagaggccagcctgcccgagggccccggccagcagggccacaccccccagctgcacacccccagcagcagccaggagagagagcagacccccagcgaggccatgagccagaaggccaaggagaccgtgagcaccagatacacccagccccagcccccccccgccggcctgccccagaacgccagagccgaggacgcccccctgagcagcggcgaggaccccaacagcagactggcccccctgaccacccccaagcccagaaagctgccccccaacatcgtgctgaagagcagcagaagcagcttccacagcgacccccagcactggctgagcagacacaccgaggccgcccccggcgacagcggcctgatcagctgcagcctgcaggagcagagaaaggccagaaaggaggccctggagaagctgggcctgccccaggaccaggacgagcccggcctgcacctgagcaagcccaccagcagcatcagacccaaggagaccagagcccagcacctgagccccgcccccggcctggcccagcccgccgcccccgcccaggccagcgccgccatccccgccgccggcaaggccctggcccaggcccccgcccccgcccccggccccgcccagggccccctgcccatgaagagccccgcccccggcaacgtggccgccagcaagagcatgcccatcagcatccccaaggcccccagagccaacagcgccctgaccccccccaagcccgagagcggcctgaccctgcaggagagcaacacccccggcctgagacagatgaacttcaagagcaacaccctggagagaagcggcgtgggcctgagcagctacctgagcaccgagaaggacgccagccccaagaccagcaccagcctgggcaagggcagcttcctggacaagatcagccccagcgtgctgagaaacagcagacccagacccgccagcctgggcaccggcaaggacttcgccggcatccaggtgggcaagctggccgacctggagcaggagcagagcagcaagagactgagctaccagggccagagcagagacaagctgcccagacccccctgcgtgagcgtgaagatcagccccaagggcgtgcccaacgagcacagaagagaggccctgaagaagctgggcctgctgaaggagtag

SEQ ID NO: 76756 - DNA, 1068 bp, synthetic construct
  misc_feature 1..1068: note = Description of Artificial Sequence: Synthetic coding sequence
  source 1..1068: mol_type = other DNA
atgagccagaaggccaaggagaccgtgagcaccagatacacccagccccagcccccccccgccggcctgccccagaacgccagagccgaggacgcccccctgagcagcggcgaggaccccaacagcagactggcccccctgaccacccccaagcccagaaagctgccccccaacatcgtgctgaagagcagcagaagcagcttccacagcgacccccagcactggctgagcagacacaccgaggccgcccccggcgacagcggcctgatcagctgcagcctgcaggagcagagaaaggccagaaaggaggccctggagaagctgggcctgccccaggaccaggacgagcccggcctgcacctgagcaagcccaccagcagcatcagacccaaggagaccagagcccagcacctgagccccgcccccggcctggcccagcccgccgcccccgcccaggccagcgccgccatccccgccgccggcaaggccctggcccaggcccccgcccccgcccccggccccgcccagggccccctgcccatgaagagccccgcccccggcaacgtggccgccagcaagagcatgcccatcagcatccccaaggcccccagagccaacagcgccctgaccccccccaagcccgagagcggcctgaccctgcaggagagcaacacccccggcctgagacagatgaacttcaagagcaacaccctggagagaagcggcgtgggcctgagcagctacctgagcaccgagaaggacgccagccccaagaccagcaccagcctgggcaagggcagcttcctggacaagatcagccccagcgtgctgagaaacagcagacccagacccgccagcctgggcaccggcaaggacttcgccggcatccaggtgggcaagctggccgacctggagcaggagcagagcagcaagagactgagctaccagggccagagcagagacaagctgcccagacccccctgcgtgagcgtgaagatcagccccaagggcgtgcccaacgagcacagaagagaggccctgaagaagctgggcctgctgaaggagtag

SEQ ID NO: 76757 - DNA, 1050 bp, synthetic construct
  misc_feature 1..1050: note = Description of Artificial Sequence: Synthetic coding sequence
  source 1..1050: mol_type = other DNA
atggccggccccgccatccacaccgcccccatgctgttcctggtgctgctgctgcccctggagctgagcctggccggcgccctggcccccggcacccccgccagaaacctgcccgagaaccacatcgacctgcccggccccgccctgtggaccccccaggccagccaccacagaagaagaggccccggcaagaaggagtggggccccggcctgcccagccaggcccaggacggcgccgtggtgaccgccaccagacaggccagcagactgcccgaggccgagggcctgctgcccgagcagagccccgccggcctgctgcaggacaaggacctgctgctgggcctggccctgccctaccccgagaaggagaacagaccccccggctgggagagaaccagaaagagaagcagagagcacaagagaagaagagacagactgagactgcaccagggcagagccctggtgagaggccccagcagcctgatgaagaaggccgagctgagcgaggcccaggtgctggacgccgccatggaggagagcagcaccagcctggcccccaccatgttcttcctgaccaccttcgaggccgcccccgccaccgaggagagcctgatcctgcccgtgaccagcctgagaccccagcaggcccagcccagaagcgacggcgaggtgatgcccaccctggacatggccctgttcgactggaccgactacgaggacctgaagcccgacggctggcccagcgccaagaagaaggagaagcacagaggcaagctgagcagcgacggcaacgagaccagccccgccgagggcgagccctgcgaccaccaccaggactgcctgcccggcacctgctgcgacctgagagagcacctgtgcaccccccacaacagaggcctgaacaacaagtgcttcgacgactgcatgtgcgtggagggcctgagatgctacgccaagttccacagaaacagaagagtgaccagaagaaagggcagatgcgtggagcccgagaccgccaacggcgaccagggcagcttcatcaacgtgtag

SEQ ID NO: 76758 - DNA, 477 bp, synthetic construct
  misc_feature 1..477: note = Description of Artificial Sequence: Synthetic coding sequence
  source 1..477: mol_type = other DNA
atgtgcttcagcagagccgacgccgccgacaactaccccttcggcacctgccagcagagaaagctgttcccccacttccacccccccaacctgatcggcaacaagttcgtgcccctgagaggcagcccccacagaggccccggctgctacttcagcgacgagatgaccccccacgccggcagataccagaaggtgagcccccagcaggagaagcacaagcagaacttcgcccccttcaacgtgctggtgcccagattcaagaactaccccaaggacacctactaccccagccccggcgcctacaaccccgagaagaagcccccccccaagatcgcctggcccatgaagttcggcagccccgactgggcccaggtgccctgcctgcagaagagaaccctgaaggccgagctgagcaccgacaaggacttcagaaagcacagaaacagagtggcctacctgagcctgtactacaactag

SEQ ID NO: 76759 - DNA, 576 bp, synthetic construct
  misc_feature 1..576: note = Description of Artificial Sequence: Synthetic coding sequence
  source 1..576: mol_type = other DNA
atgtgcttcagcagagccgacgccgccgacaactaccccttcggcacctgccagcagagaaagctgttcccccacttccacccccccaacctgatcggcaacaagttcgtgcccctgagaggcagcccccacagaggccccggctgctacttcagcgacggctacggcctggcctacgacctgagcaagatccccaccagcatcaagggctacaccctgggcgccagaaccgccgtgagattcaagcccatccagaaggagatgaccccccacgccggcagataccagaaggtgagcccccagcaggagaagcacaagcagaacttcgcccccttcaacgtgctggtgcccagattcaagaactaccccaaggacacctactaccccagccccggcgcctacaaccccgagaagaagcccccccccaagatcgcctggcccatgaagttcggcagccccgactgggcccaggtgccctgcctgcagaagagaaccctgaaggccgagctgagcaccgacaaggacttcagaaagcacagaaacagagtggcctacctgagcctgtactacaactag

SEQ ID NO: 76760 - DNA, 2055 bp, synthetic construct
  misc_feature 1..2055: note = Description of Artificial Sequence: Synthetic coding sequence
  source 1..2055: mol_type = other DNA
atgtgggtgctgctgagaagcggctaccccctgagaatcctgctgcccctgagaggcgagtggatgggcagaagaggcctgcccagaaacctggcccccggcccccccagaagaagatacagaaaggagaccctgcaggccctggacatgcccgtgctgcccgtgaccgccaccgagatcagacagtacctgagaggccacggcatccccttccaggacggccacagctgcctgagagccctgagccccttcgccgagagcagccagctgaagggccagaccggcgtgaccaccagcttcagcctgttcatcgacaagaccaccggccacttcctgtgcatgaccagcctggccgagggcagctgggaggacttccaggccagcgtggagggcagaggcgacggcgccagagagggcttcctgctgagcaaggcccccgagttcgaggacagcgaggaggtgagaagaatctggaacagagccatccccctgtgggagctgcccgaccaggaggaggtgcagctggccgacaccatgttcggcctgaccaaggtgaccgacgacaccctgaagagattcagcgtgagatacctgagacccgccagaagcctggtgttcccctggttcagccccggcggcagcggcctgagaggcctgaagctgctggaggccaagtgccagggcgacggcgtgagctacgaggagaccaccatccccagacccagcgcctaccacaacctgttcggcctgcccctgatcagcagaagagacgccgaggtggtgctgaccagcagagagctggacagcctggccctgaaccagagcaccggcctgcccaccctgaccctgcccagaggcaccacctgcctgccccccgccctgctgccctacctggagcagttcagaagaatcgtgttctggctgggcgacgacctgagaagctgggaggccgccaagctgttcgccagaaagctgaaccccaagagatgcttcctggtgagacccggcgaccagcagcccagacccctggaggccctgaacggcggcttcaacctgagcagaatcctgagaaccgccctgcccgcctggcacaagagcatcgtgagcttcagacagctgagagaggaggtgctgggcgagctgagcaacgtggagcaggccgccggcctgagatggagcagattccccgacctgaacagaatcctgaagggccacagaaagggcgagctgaccgtgttcaccggccccaccggcagcggcaagaccaccttcatcagcgagtacgccctggacctgtgcagccagggcgtgaacaccctgtggggcagcttcgagatcagcaacgtgagactggccagagtgatgctgacccagttcgccgagggcagactggaggaccagctggacaagtacgaccactgggccgacagattcgaggacctgcccctgtacttcatgaccttccacggccagcagagcatcagaaccgtgatcgacaccatgcagcacgccgtgtacgtgtacgacatctgccacgtgatcatcgacaacctgcagttcatgatgggccacgagcagctgagcaccgacagaatcgccgcccaggactacatcatcggcgtgttcagaaagttcgccaccgacaacaactgccacgtgaccctggtgatccaccccagaaaggaggacgacgacaaggagctgcagaccgccagcatcttcggcagcgccaaggccagccaggaggccgacaacgtgctgatcctgcaggacagaaagctggtgaccggccccggcaagagatacctgcaggtgagcaagaacagattcgacggcgacgtgggcgtgttccccctggagttcaacaagaacagcctgaccttcagcatcccccccaagaacaaggccagactgaagaagatcaaggacgacaccggccccgtggccaagaagcccagcagcggcaagaagggcgccaccacccagaacagcgagatctgcagcggccaggcccccacccccgaccagcccgacaccagcaagagaagcaagtag

SEQ ID NO: 76761 - DNA, 1749 bp, synthetic construct
  misc_feature 1..1749: note = Description of Artificial Sequence: Synthetic coding sequence
  source 1..1749: mol_type = other DNA
atgtgggtgctgctgagaagcggctaccccctgagaatcctgctgcccctgagaggcgagtggatgggcagaagaggcctgcccagaaacctggcccccggcccccccagaagaagatacagaaaggagaccctgcaggccctggacatgcccgtgctgcccgtgaccgccaccgagatcagacagtacctgagaggccacggcatccccttccaggacggccacagctgcctgagagccctgagccccttcgccgagagcagccagctgaagggccagaccggcgtgaccaccagcttcagcctgttcatcgacaagaccaccggccacttcctgtgcatgaccagcctggccgagggcagctgggaggacttccaggccagcgtggagggcagaggcgacggcgccagagagggcttcctgctgagcaaggcccccgagttcgaggacagcgaggaggtgagaagaatctggaacagagccatccccctgtgggagctgcccgaccaggaggaggtgcagctggccgacaccatgttcggcctgaccaaggtgaccgacgacaccctgaagagattcagcgtgagatacctgagacccgccagaagcctggtgttcccctggttcagccccggcggcagcggcctgagaggcctgaagctgctggaggccaagtgccagggcgacggcgtgagctacgaggagaccaccatccccagacccagcgcctaccacaacctgttcggcctgcccctgatcagcagaagagacgccgaggtggtgctgaccagcagagagctggacagcctggccctgaaccagagcaccggcctgcccaccctgaccctgcccagaggcaccacctgcctgccccccgccctgctgccctacctggagcagttcagaagaatcgtgttctggctgggcgacgacctgagaagctgggaggccgccaagctgttcgccagaaagctgaaccccaagagatgcttcctggtgagacccggcgaccagcagcccagacccctggaggccctgaacggcggcttcaacctgagcagaatcctgagaaccgccctgcccgcctggcacaagagcatcgtgagcttcagacagctgagagaggaggtgctgggcgagctgagcaacgtggagcaggccgccggcctgagatggagcagattccccgacctgaacagaatcctgaagggccacagaaagggcgagctgaccgtgttcaccggccccaccggcagcggcaagaccaccttcatcagcgagtacgccctggacctgtgcagccagggcgtgaacaccctgtggggcagcttcgagatcagcaacgtgagactggccagagtgatgctgacccagttcgccgagggcagactggaggaccagctggacaagtacgaccactgggccgacagattcgaggacctgcccctgtacttcatgaccttccacggccagcagagcatcagaaccgtgatcgacaccatgcagcacgccgtgtacgtgtacgacatctgccacgtgatcatcgacaacctgcagttcatgatgggccacgagcagctgagcaccgacagaatcgccgcccaggactacatcatcggcgtgttcagaaagttcgccaccgacaacaactgccacgtgaccctggtgatccaccccagaaaggaggacgacgacaaggagctgcagaccgccagcatcttcggcagcgccaaggtgagcggcctgtag

SEQ ID NO: 76762 - DNA, 1029 bp, synthetic construct
  misc_feature 1..1029: note = Description of Artificial Sequence: Synthetic coding sequence
  source 1..1029: mol_type = other DNA
atgcccttcctgctgggcctgagacaggacaaggaggcctgcgtgggcaccaacaaccagagctacatctgcgacaccggccactgctgcggccagagccagtgctgcaactactactacgagctgtggtggttctggctggtgtggaccatcatcatcatcctgagctgctgctgcgtgtgccaccacagaagagccaagcacagactgcaggcccagcagagacagcacgagatcaacctgatcgcctacagagaggcccacaactacagcgccctgcccttctacttcagattcctgcccaactacctgctgcccccctacgaggaggtggtgaacagaccccccacccccccccccccctacagcgccttccagctgcagcagcagcagctgctgcccccccagtgcggccccgccggcggcagcccccccggcatcgaccccaccagaggcagccagggcgcccagagcagccccctgagcgagcccagcagaagcagcaccagaccccccagcatcgccgaccccgaccccagcgacctgcccgtggacagagccgccaccaaggcccccggcatggagcccagcggcagcgtggccggcctgggcgagctggaccccggcgccttcctggacaaggacgccgagtgcagagaggagctgctgaaggacgacagcagcgagcacggcgcccccgacagcaaggagaagacccccggcagacacagaagattcaccggcgacagcggcatcgaggtgtgcgtgtgcaacagaggccaccacgacgacgacctgaaggagttcaacaccctgatcgacgacgccctggacggccccctggacttctgcgacagctgccacgtgagaccccccggcgacgaggaggagggcctgtgccagagcagcgaggagcaggccagagagcccggccacccccacctgcccagaccccccgcctgcctgctgctgaacaccatcaacgagcaggacagccccaacagccagagcagcagcagccccagctag

SEQ ID NO: 76763 - DNA, 1092 bp, synthetic construct
  misc_feature 1..1092: note = Description of Artificial Sequence: Synthetic coding sequence
  source 1..1092: mol_type = other DNA
atggagagaagaagactgctgggcggcatggccctgctgctgctgcaggccctgcccagccccctgagcgccagagccgagcccccccaggacaaggaggcctgcgtgggcaccaacaaccagagctacatctgcgacaccggccactgctgcggccagagccagtgctgcaactactactacgagctgtggtggttctggctggtgtggaccatcatcatcatcctgagctgctgctgcgtgtgccaccacagaagagccaagcacagactgcaggcccagcagagacagcacgagatcaacctgatcgcctacagagaggcccacaactacagcgccctgcccttctacttcagattcctgcccaactacctgctgcccccctacgaggaggtggtgaacagaccccccacccccccccccccctacagcgccttccagctgcagcagcagcagctgctgcccccccagtgcggccccgccggcggcagcccccccggcatcgaccccaccagaggcagccagggcgcccagagcagccccctgagcgagcccagcagaagcagcaccagaccccccagcatcgccgaccccgaccccagcgacctgcccgtggacagagccgccaccaaggcccccggcatggagcccagcggcagcgtggccggcctgggcgagctggaccccggcgccttcctggacaaggacgccgagtgcagagaggagctgctgaaggacgacagcagcgagcacggcgcccccgacagcaaggagaagacccccggcagacacagaagattcaccggcgacagcggcatcgaggtgtgcgtgtgcaacagaggccaccacgacgacgacctgaaggagttcaacaccctgatcgacgacgccctggacggccccctggacttctgcgacagctgccacgtgagaccccccggcgacgaggaggagggcctgtgccagagcagcgaggagcaggccagagagcccggccacccccacctgcccagaccccccgcctgcctgctgctgaacaccatcaacgagcaggacagccccaacagccagagcagcagcagccccagctag

SEQ ID NO: 76764 - DNA, 1056 bp, synthetic construct
  misc_feature 1..1056: note = Description of Artificial Sequence: Synthetic coding sequence
  source 1..1056: mol_type = other DNA
atggccaccgacgtgcagctggccgactaccccctgatgagccccaaggccgagctgaagctggagaagaagagcggcagaaagcccagaagccccagagacagcggcccccagaaggagctggtgatccccggcatcgtggacttcgagagaatcagaagagccctgagaacccccaagccccagacccccggcacctactgcttcggcagactgagccaccacagcttcttcagcagacaccacccccacccccagcacgtgacccacatccaggacctgaccggcaagcccgtgtgcgtggtgagagacttccccgcccccctgcccgagagcaccgtgttcagcggctgccagatgggcatccccaccatcagcgtgcccatcggcgacccccagagcaacagaaacccccagctgagcagcgaggcctggaagaaggagctgaaggagctggccagcagagtggccttcctgaccaaggaggacgagctgaagaagaaggagaaggagcagaaggaggagcccctgagagagcagggcgccaagtacagcgccgagaccggcagactgatccccgccagcaccagagccgtgggcagaagaagaagccaccagggccagcagagccagagcagcagcagacacgagggcgtgcaggccttcctgctgcaggaccaggagctgctggtgctggagctgctgtgcagaatcctggagaccgacctgctgagcgccatccagttctggctgctgtacgccccccccaaggagaaggacctggccctgggcctgctgcagaccgccgtggcccagctgctgccccagcccctggtgagcatccccaccgagaagctgctgagccagctgcccgaggtgcacgagcccccccaggagaagcaggagcccccctgcagccagagccccaagaagaccaagatcagccccttcaccaagagcgagaagcccgagtacatcggcgaggcccaggtgctgcagatgcacagcagccagaacaccgagaagaagaccagcaagcccagagccgagagctag

SEQ ID NO: 76765 - DNA, 321 bp, synthetic construct
  misc_feature 1..321: note = Description of Artificial Sequence: Synthetic coding sequence
  source 1..321: mol_type = other DNA
cagtgcgccgagctgtggggcagcgtgagaaagaacagcgacaagttcctgctgagcagaaacctgcaccccagcaaggaggagtacagacagcagatcaagacccccggcgaggagtggagacagatcctggtgcactggagaagcagcagcccccccgacgccttcaagcccgagcacagagaggaggacatcgaggccgagggcagagagctgagaggccccaacacctgcacctgcctggcccaggagcagccccagggcttcagaggcgtgagcgtgagcaccaccttcaccgccgtgcccgacagcctgccctag

SEQ ID NO: 76766 - DNA, 753 bp, synthetic construct
  misc_feature 1..753: note = Description of Artificial Sequence: Synthetic coding sequence
  source 1..753: mol_type = other DNA
atggccaccgacgtgcagctggccgactaccccctgatgagccccaaggccgagctgaagctggagaagaagagcggcagaaagcccagaagccccagagacagcggcccccagaaggagctggtgatccccggcatcgtggacttcgagagaatcagaagagccctgagaacccccaagccccagacccccggcacctactgcttcggcagactgagccaccacagcttcttcagcagacaccacccccacccccagcacgtgacccacatccaggacctgaccggcaagcccgtgtgcgtggtgagagacttccccgcccccctgcccgagagcaccgtgttcagcggctgccagatgggcatccccaccatcagcgtgcccatcggcgacccccagagcaacagaaacccccagctgagcagcgaggcctggaagaaggagctgaaggagctggccagcagagtggccttcctgaccaaggaggacgagctgaagaagaaggagaaggagcagaaggaggagcccctgagagagcagggcgccaagtacagcgccgagaccggcagactgatccccgccagcaccagagccgtgggcagaagaagaagccaccagggccagcagagccagagcagcagcagacacgagggcgtgcaggccttcctgctgcaggaccaggagctgctgaagaagaccagcctgtgggacagctgcagacagcagtggctgagcagcttccccagcccctag

SEQ ID NO: 76767 - DNA, 951 bp, synthetic construct
  misc_feature 1..951: note = Description of Artificial Sequence: Synthetic coding sequence
  source 1..951: mol_type = other DNA
agccccaaggccgagctgaagctggagaagaagagcggcagaaagcccagaagccccagagacagcggcccccagaaggagctggtgatccccggcatcgtggacttcgagagaatcagaagagccctgagaacccccaagccccagacccccggcacctactgcttcggcagactgagccaccacagcttcttcagcagacaccacccccacccccagcacgtgacccacatccaggacctgaccggcaagcccgtgtgcgtggtgagagacttccccgcccccctgcccgagagcaccgtgttcagcggctgccagatgggcatccccaccatcagcgtgcccatcggcgacccccagagcaacagaaacccccagctgagcagcgcctggaagaaggagctgaaggagctggccagcagagtggccttcctgaccaaggaggacgagctgaagaagaaggaggacaccaccagcctgaactggaactgcaagagcagaagaccccaggcccccggcctgagcggcaccgacctgggcgccgccgagctgggcatcaagaaggagcagaaggaggagcccctgagagagcagggcgccaagtacagcgccgagaccggcagactgatccccgccagcaccagagccgtgggcagaagaagaagccaccagggccagcagagccagagcagcagcagacacgagggcgtgcaggccttcctgctgcaggaccaggagctgctgggcggcctgaccagccccggcgcccccgtgagcgaccccggcaacagactggccaagagaaaccccgtgctggccgccctgagaagcgcccagggcaagagacccagaagcggcacccccgccgacagcagcggcagcgcccccagccccgcccccagcctgcacccctacagaaaggcccccaagcccgccagcagaagcgcctag

SEQ ID NO: 76768 - DNA, 498 bp, synthetic construct
  misc_feature 1..498: note = Description of Artificial Sequence: Synthetic coding sequence
  source 1..498: mol_type = other DNA
atgtacatcagccccaaggccgagctgaagctggagaagaagagcggcagaaagcccagaagccccagagacagcggcccccagaaggagctggtgatccccggcatcgtggacttcgagagaatcagaagagccctgagaacccccaagccccagacccccggcacctactgcttcggcagactgagccaccacagcttcttcagcagacaccacccccacccccagcacgtgacccacatccaggacctgaccggcaagcccgtgtgcgtggtgagagacttccccgcccccctgcccgagagcaccgtgttcagcggctgccagatgggcatccccaccatcagcgtgcccatcggcgacccccagagcaacagaaacccccagctgagcagcgcctggaagaaggagctgaaggagctggccagcagagtggccttcctgaccaaggaggacgagctgaagaagaaggaggtgggcgccgagcacagaagctag

SEQ ID NO: 76769 - DNA, 672 bp, synthetic construct
  misc_feature 1..672: note = Description of Artificial Sequence: Synthetic coding sequence
  source 1..672: mol_type = other DNA
atgctgtgggtgcagagaaagagaagaagaaaggagaccagcgagtgccccagcgacaaggacaagagccccgagagccacaaggccaagaacgagagctggatcaagagccacttcagcagactgagcgaggagaagctggccctggacaacaacgccagcgccagcggcaacgccacccagaccgagagcggcagcgaggaggtgagcagcaccgtgcacatcgagaccttcaccaccagacacggcgaggtgggcagcgccctgcacagagagagcttcaccagcagacagaagaccagcggccccagcgtgatccaggagatccaccaggagagcggcaaggcccccagcaccgacgaggccacctgggccgccgtggccgcctgcaccaaggagatcgacacccagggcagacacctggcccacagcatgctgcagagagccatcgcctaccagcacagcggccacctggagagcaaggacatcaaccaggaggagctgagagccctggaggaggtggagatgaagctgcagaagaacttcctgacccagagagagaacaccatcgccggcgccaaccacacccacaccttctacggccacagccaccacagccaccacggccaccccagccaccagagccacagcctgcccaacagaagacactag

SEQ ID NO: 76770 - DNA, 399 bp, synthetic construct
  misc_feature 1..399: note = Description of Artificial Sequence: Synthetic coding sequence
  source 1..399: mol_type = other DNA
atgggcagaacctggtgcggcatgtggagaagaagaagacccggcagaagaagcgccgtgcccagatggccccacctgagcagccagagcggcgtggagccccccgacagatggaccggcacccccggctggcccagcagagaccaggaggcccccggcagcatgatgccccccgccgccgcccagcccagcgcccacggcgccctggtgccccccgccaccgcccacgagcccgtggaccaccccgccctgcactggctggcctgctgctgctgcctgagcctgcccggccagctgcccctggccatcagactgggctgggacctggacctggaggccggccccagcagcggcaagctgtgccccagagccagaagatggcagcccctgcccagctag

SEQ ID NO: 76771 - DNA, 537 bp, synthetic construct
  misc_feature 1..537: note = Description of Artificial Sequence: Synthetic coding sequence
  source 1..537: mol_type = other DNA
atggccagcttcctggtgtggcccctgagaaccgccctgagaggcggcaagagctgggccggccccggcgtgggctgcggcggcgacggcgccagaggcggcggcgagctgagcctgagcaacctggacctgcccggcgccggcgaggccggcctggagcaccaccccctgctgggccacctgttcatcagcgccgtgcccagatggccccacctgagcagccagagcggcgtggagccccccgacagatggaccggcacccccggctggcccagcagagaccaggaggcccccggcagcatgatgccccccgccgccgcccagcccagcgcccacggcgccctggtgccccccgccaccgcccacgagcccgtggaccaccccgccctgcactggctggcctgctgctgctgcctgagcctgcccggccagctgcccctggccatcagactgggctgggacctggacctggaggccggccccagcagcggcaagctgtgccccagagccagaagatggcagcccctgcccagctag

SEQ ID NO: 76772 - DNA, 1350 bp, synthetic construct
  misc_feature 1..1350: note = Description of Artificial Sequence: Synthetic coding sequence
  source 1..1350: mol_type = other DNA
atgtggaccgccctggtgctgatctggatcttcagcctgagcctgagcgagagccacgccgccagcaacgaccccagaaacttcgtgcccaacaagatgtggaagggcctggtgaagagaaacgccagcgtggagaccgtggacaacaagaccagcgaggacgtgaccatggccgccgccagccccgtgaccctgaccaagggcaccagcgccgcccacctgaacagcatggaggtgaccaccgaggacaccagcagaaccgacgtgagcgagcccgccaccagcggcggcgccgccgacggcgtgaccagcatcgcccccaccgccgtggccagcagcaccaccgccgccagcatcaccaccgccgccagcagcatgaccgtggccagcagcgcccccaccaccgccgccagcagcaccaccgtggccagcatcgcccccaccaccgccgccagcagcatgaccgccgccagcagcacccccatgaccctggccctgcccgcccccaccagcaccagcaccggcagaacccccagcaccaccgccaccggccaccccagcctgagcaccgccctggcccaggtgcccaagagcagcgccctgcccagaaccgccaccctggccaccctggccaccagagcccagaccgtggccaccaccgccaacaccagcagccccatgagcaccagacccagccccagcaagcacatgcccagcgacaccgccgccagccccgtgccccccatgagaccccaggcccagggccccatcagccaggtgagcgtggaccagcccgtggtgaacaccaccaacaagagcacccccatgcccagcaacaccacccccgagcccgcccccacccccaccgtggtgaccaccaccaaggcccaggccagagagcccaccgccagccccgtgcccgtgccccacaccagccccatccccgagatggaggccatgagccccaccacccagcccagccccatgccctacacccagagagccgccggccccggcaccagccaggcccccgagcaggtggagaccgaggccacccccggcaccgacagcaccggccccacccccagaagcagcggcggcaccaagatgcccgccaccgacagctgccagcccagcacccagggccagtacatggtggtgaccaccgagcccctgacccaggccgtggtggacaagaccctgctgctggtggtgctgctgctgggcgtgaccctgttcatcaccgtgctggtgctgttcgccctgcaggcctacgagagctacaagaagaaggactacacccaggtggactacctgatcaacggcatgtacgccgacagcgagatgtag

SEQ ID NO: 76773 - DNA, 78 bp, synthetic construct
  misc_feature 1..78: note = Description of Artificial Sequence: Synthetic coding sequence
  source 1..78: mol_type = other DNA
atgtggaccgccctggtgctgatctggatcttcagcctgagcctgagcgagagccacgccgccagcaacgacccctag

SEQ ID NO: 76774 - DNA, 3969 bp, synthetic construct
  misc_feature 1..3969: note = Description of Artificial Sequence: Synthetic coding sequence
  source 1..3969: mol_type = other DNA
atgcccgtggtgtggcccaccctgctggacctgagcagagacgagtgcaagagaatcctgagaaagctggagctggaggcctacgccggcgtgatcagcgccctgagagcccagggcgacctgaccaaggagaagaaggacctgctgggcgagctgagcaaggtgctgagcatcagcaccgagagacacagagccgaggtgagaagagccgtgaacgacgagagactgaccaccatcgcccacaacatgagcggccccaacagcagcagcgagtggagcatcgagggcagaagactggtgcccctgatgcccagactggtgccccagaccgccttcaccgtgaccgccaacgccgtggccaacgccgccatccagcacaacgccagcctgcccgtgcccgccgagaccggcagcaaggaggtggtgtgctacagctacaccagcaccaccagcacccccaccagcacccccgtgcccagcggcagcatcgccaccgtgaagagccccagacccgccagccccgccagcaacgtggtggtgctgcccagcggcagcaccgtgtacgtgaagagcgtgagctgcagcgacgaggacgagaagcccagaaagagaagaagaaccaacagcagcagcagcagccccgtggtgctgaaggaggtgcccaaggccgtggtgcccgtgagcaagaccatcaccgtgcccgtgagcggcagccccaagatgagcaacatcatgcagagcatcgccaacagcctgcccccccacatgagccccgtgaagatcaccttcaccaagcccagcacccagaccaccaacaccaccacccagaaggtgatcatcgtgaccaccagccccagcagcaccttcgtgcccaacatcctgagcaagagccacaactacgccgccgtgaccaagctggtgcccaccagcgtgatcgccagcaccacccagaagccccccgtggtgatcaccgccagccagagcagcctggtgagcaacagcagcagcggcagcagcagcagcacccccagccccatccccaacaccgtggccgtgaccgccgtggtgagcagcacccccagcgtggtgatgagcaccgtggcccagggcgtgagcaccagcgccatcaagatggccagcaccagactgcccagccccaagagcctggtgagcgcccccacccagatcctggcccagttccccaagcagcaccagcagagccccaagcagcagctgtaccaggtgcagcagcagacccagcagcaggtggcccagcccagccccgtgagccaccagcagcagccccagcagagccccctgccccccggcatcaagcccaccatccagatcaagcaggagagcggcgtgaagatcatcacccagcaggtgcagcccagcaagatcctgcccaagcccgtgaccgccaccctgcccaccagcagcaacagccccatcatggtggtgagcagcaacggcgccatcatgaccaccaagctggtgaccacccccaccggcacccaggccacctacaccagacccaccgtgagccccagcatcggcagaatggccgccacccccggcgccgccacctacgtgaagaccaccagcggcagcatcatcaccgtggtgcccaagagcctggccaccctgggcggcaagatcatcagcagcaacatcgtgagcggcaccaccaccaagatcaccaccatccccatgaccagcaagcccaacgtgatcgtggtgcagaagaccaccggcaagggcaccaccatccagggcctgcccggcaagaacgtggtgaccaccctgctgaacgccggcggcgagaagaccatccagaccgtgcccaccggcgccaagcccgccatcctgaccgccaccagacccatcaccaagatgatcgtgacccagcccaagggcatcggcagcaccgtgcagcccgccgccaagatcatccccaccaagatcgtgtacggccagcagggcaagacccaggtgctgatcaagcccaagcccgtgaccttccaggccaccgtggtgagcgagcagaccagacagctggtgaccgagaccctgcagcaggccagcagagtggccgaggccggcaacagcagcatccaggagggcaaggaggagccccagaactacaccgacagcagcagcagcagcaccgagagcagccagagcagccaggacagccagcccgtggtgcacgtgatcgccagcagaagacaggactggagcgagcacgagatcgccatggagaccagccccaccatcatctaccaggacgtgagcagcgagagccagagcgccaccagcaccatcaaggccctgctggagctgcagcagaccaccgtgaaggagaagctggagagcaagcccagacagcccaccatcgacctgagccagatggccgtgcccatccagatgacccaggagaagagacacagccccgagagccccagcatcgccgtggtggagagcgagctggtggccgagtacatcaccaccgagagaaccgacgagggcaccgaggtggccttccccctgctggtgagccacagaagccagccccagcagcccagccagccccagagaaccctgctgcagcacgtggcccagagccagaccgccacccagaccagcgtggtggtgaagagcatccccgccagcagccccggcgccatcacccacatcatgcagcaggccctgagcagccacaccgccttcaccaagcacagcgaggagctgggcaccgaggagggcgaggtggaggagatggacaccctggacccccagaccggcctgttctacagaagcgccctgacccagagccagagcgccaagcagcagaagctgagccagccccccctggagcagacccagctgcaggtgaagaccctgcagtgcttccagaccaagcagaagcagaccatccacctgcaggccgaccagctgcagcacaagctgccccagatgccccagctgagcatcagacaccagaagctgacccccctgcagcaggagcaggcccagcccaagcccgacgtgcagcacacccagcaccccatggtggccaaggacagacagctgcccaccctgatggcccagcccccccagaccgtggtgcaggtgctggccgtgaagaccacccagcagctgcccaagctgcagcaggcccccaaccagcccaagatctacgtgcagccccagaccccccagagccagatgagcctgcccgccagcagcgagaagcagaccgccagccaggtggagcagcccatcatcacccagggcagcagcgtgaccaagatcaccttcgagggcagacagccccccaccgtgaccaagatcaccggcggcagcagcgtgcccaagctgaccagccccgtgaccagcatcagccccatccaggccagcgagaagaccgccgtgagcgacatcctgaagatgagcctgatggaggcccagatcgacaccaacgtggagcacatgatcgtggacccccccaagaaggccctggccaccagcatgctgaccggcgaggccggcagcctgcccagcacccacatggtggtggccggcatggccaacagcaccccccagcagcagaagtgcagagagagctgcagcagccccagcaccgtgggcagcagcctgaccaccagaaagatcgacccccccgccgtgcccgccaccggccagttcatgagaatccagaacgtgggccagaagaaggccgaggagagccccgccgagatcatcatccaggccatcccccagtacgccatcccctgccacagcagcagcaacgtggtggtggagcccagcggcctgctggagctgaacaacttcaccagccagcagctggacgacgaggagaccgccatggagcaggacatcgacagcagcaccgaggacggcaccgagcccagccccagccagagcagcgccgagagaagctag

SEQ ID NO: 76775 - DNA, 3468 bp, synthetic construct
  misc_feature 1..3468: note = Description of Artificial Sequence: Synthetic coding sequence
  source 1..3468: mol_type = other DNA
atgcccgtggtgtggcccaccctgctggacctgagcagagacgagtgcaagagaatcctgagaaagctggagctggaggcctacgccggcgtgatcagcgccctgagagcccagggcgacctgaccaaggagaagaaggacctgctgggcgagctgagcaaggtgctgagcatcagcaccgagagacacagagccgaggtgagaagagccgtgaacgacgagagactgaccaccatcgcccacaacatgagcggccccaacagcagcagcgagtggagcatcgagggcagaagactggtgcccctgatgcccagactggtgccccagaccgccttcaccgtgaccgccaacgccgtggccaacgccgccatccagcacaacgccagcctgcccgtgcccgccgagaccggcagcaaggaggtggtgtgctacagctacaccagcaccaccagcacccccaccagcacccccgtgcccagcggcagcatcgccaccgtgaagagccccagacccgccagccccgccagcaacgtggtggtgctgcccagcggcagcaccgtgtacgtgaagagcgtgagctgcagcgacgaggacgagaagcccagaaagagaagaagaaccaacagcagcagcagcagccccgtggtgctgaaggaggtgcccaaggccgtggtgcccgtgagcaagaccatcaccgtgcccgtgagcggcagccccaagatgagcaacatcatgcagagcatcgccaacagcctgcccccccacatgagccccgtgaagatcaccttcaccaagcccagcacccagaccaccaacaccaccacccagaaggtgatcatcgtgaccaccagccccagcagcaccttcgtgcccaacatcctgagcaagagccacaactacgccgccgtgaccaagctggtgcccaccagcgtgatcgccagcaccacccagaagccccccgtggtgatcaccgccagccagagcagcctggtgagcaacagcagcagcggcagcagcagcagcacccccagccccatccccaacaccgtggccgtgaccgccgtggtgagcagcacccccagcgtggtgatgagcaccgtggcccagggcgtgagcaccagcgccatcaagatggccagcaccagactgcccagccccaagagcctggtgagcgcccccacccagatcctggcccagttccccaagcagcaccagcagagccccaagcagcagctgtaccaggtgcagcagcagacccagcagcaggtggcccagcccagccccgtgagccaccagcagcagccccagcagagccccctgccccccggcatcaagcccaccatccagatcaagcaggagagcggcgtgaagatcatcacccagcaggtgcagcccagcaagatcctgcccaagcccgtgaccgccaccctgcccaccagcagcaacagccccatcatggtggtgagcagcaacggcgccatcatgaccaccaagctggtgaccacccccaccggcacccaggccacctacaccagacccaccgtgagccccagcatcggcagaatggccgccacccccggcgccgccacctacgtgaagaccaccagcggcagcatcatcaccgtggtgcccaagagcctggccaccctgggcggcaagatcatcagcagcaacatcgtgagcggcaccaccaccaagatcaccaccatccccatgaccagcaagcccaacgtgatcgtggtgcagaagaccaccggcaagggcaccaccatccagggcctgcccggcaagaacgtggtgaccaccctgctgaacgccggcggcgagaagaccatccagaccgtgcccaccggcgccaagcccgccatcctgaccgccaccagacccatcaccaagatgatcgtgacccagcccaagggcatcggcagcaccgtgcagcccgccgccaagatcatccccaccaagatcgtgtacggccagcagggcaagacccaggtgctgatcaagcccaagcccgtgaccttccaggccaccgtggtgagcgagcagaccagacagctggtgaccgagaccctgcagcaggccagcagagtggccgaggccggcaacagcagcatccaggagggcaaggaggagccccagaactacaccgacagcagcagcagcagcaccgagagcagccagagcagccaggacagccagcccgtggtgcacgtgatcgccagcagaagacaggactggagcgagcacgagatcgccatggagaccagccccaccatcatctaccaggacgtgagcagcgagagccagagcgccaccagcaccatcaaggccctgctggagctgcagcagaccaccgtgaaggagaagctggagagcaagcccagacagcccaccatcgacctgagccagatggccgtgcccatccagatgacccaggagaagagacacagccccgagagccccagcatcgccgtggtggagagcgagctggtggccgagtacatcaccaccgagagaaccgacgagggcaccgaggtggccttccccctgctggtgagccacagaagccagccccagcagcccagccagccccagagaaccctgctgcagcacgtggcccagagccagaccgccacccagaccagcgtggtggtgaagagcatccccgccagcagccccggcgccatcacccacatcatgcagcaggccctgagcagccacaccgccttcaccaagcacagcgaggagctgggcaccgaggagggcgaggtggaggagatggacaccctggacccccagaccggcctgttctacagaagcgccctgacccagagccagagcgccaagcagcagaagctgagccagccccccctggagcagacccagctgcaggtgaagaccctgcagtgcttccagaccaagcagaagcagaccatccacctgcaggccgaccagctgcagcacaagctgccccagatgccccagctgagcatcagacaccagaagctgacccccctgcagcaggagcaggcccagcccaagcccgacgtgcagcacacccagcaccccatggtggccaaggacagacagctgcccaccctgatggcccagcccccccagaccgtggtgcaggtgctggccgtgaagaccacccagcagctgcccaagctgcagcaggcccccaaccagcccaagatctacgtgcagccccagaccccccagagccagatgagcctgcccgccagcagcgagaagcagaccgccagccaggccatcccccagtacgccatcccctgccacagcagcagcaacgtggtggtggagcccagcggcctgctggagctgaacaacttcaccagccagcagctggacgacgaggagaccgccatggagcaggacatcgacagcagcaccgaggacggcaccgagcccagccccagccagagcagcgccgagagaagctag

SEQ ID NO: 76776 - DNA, 3015 bp, synthetic construct
  misc_feature 1..3015: note = Description of Artificial Sequence: Synthetic coding sequence
  source 1..3015: mol_type = other DNA
atgcccgtggtgtggcccaccctgctggacctgagcagagacgagtgcaagagaatcctgagaaagctggagctggaggcctacgccggcgtgatcagcgccctgagagcccagggcgacctgaccaaggagaagaaggacctgctgggcgagctgagcaaggtgctgagcatcagcaccgagagacacagagccgaggtgagaagagccgtgaacgacgagagactgaccaccatcgcccacaacatgagcggccccaacagcagcagcgagtggagcatcgagggcagaagactggtgcccctgatgcccagactggtgccccagaccgccttcaccgtgaccgccaacgccgtggccaacgccgccatccagcacaacgccagcctgcccgtgcccgccgagaccggcagcaaggagggcgtgagctgcagcgacgaggacgagaagcccagaaagagaagaagaaccaacagcagcagcagcagccccgtggtgctgaaggaggtgcccaaggccgtggtgcccgtgagcaagaccatcaccgtgcccgtgagcggcagccccaagatgagcaacatcatgcagagcatcgccaacagcctgcccccccacatgagccccgtgaagatcaccttcaccaagcccagcacccagaccaccaacaccaccacccagaaggtgatcatcgtgaccaccagccccagcagcaccttcgtgcccaacatcctgagcaagagccacaactacgccgccgtgaccaagctggtgcccaccagcgtgatcgccagcaccacccagaagccccccgtggtgatcaccgccagccagagcagcctggtgagcaacagcagcagcggcagcagcagcagcacccccagccccatccccaacaccgtggccgtgaccgccgtggtgagcagcacccccagcgtggtgatgagcaccgtggcccagggcgtgagcaccagcgccatcaagatggccagcaccagactgcccagccccaagagcctggtgagcgcccccacccagatcctggcccagttccccaagcagcaccagcagagccccaagcagcagctgtaccaggtgcagcagcagacccagcagcaggtggcccagcccagccccgtgagccaccagcagcagccccagcagagccccctgccccccggcatcaagcccaccatccagatcaagcaggagagcggcgtgaagatcatcacccagcaggtgcagcccagcaagatcctgcccaagcccgtgaccgccatcctgaccgccaccagacccatcaccaagatgatcgtgacccagcccaagggcatcggcagcaccgtgcagcccgccgccaagatcatccccaccaagatcgtgtacggccagcagggcaagacccaggtgctgatcaagcccaagcccgtgaccttccaggccaccgtggtgagcgagcagaccagacagctggtgaccgagaccctgcagcaggccagcagagtggccgaggccggcaacagcagcatccaggagggcaaggaggagccccagaactacaccgacagcagcagcagcagcaccgagagcagccagagcagccaggtgagccacagaagccagccccagcagcccagccagccccagagaaccctgctgcagcacgtggcccagagccagaccgccacccagaccagcgtggtggtgaagagcatccccgccagcagccccggcgccatcacccacatcatgcagcaggccctgagcagccacaccgccttcaccaagcacagcgaggagctgggcaccgaggagggcgaggtggaggagatggacaccctggacccccagaccggcctgttctacagaagcgccctgacccagagccagagcgccaagcagcagaagctgagccagccccccctggagcagacccagctgcaggtgaagaccctgcagtgcttccagaccaagcagaagcagaccatccacctgcaggccgaccagctgcagcacaagctgccccagatgccccagctgagcatcagacaccagaagctgacccccctgcagcaggagcaggcccagcccaagcccgacgtgcagcacacccagcaccccatggtggccaaggacagacagctgcccaccctgatggcccagcccccccagaccgtggtgcaggtgctggccgtgaagaccacccagcagctgcccaagctgcagcaggcccccaaccagcccaagatctacgtgcagccccagaccccccagagccagatgagcctgcccgccagcagcgagaagcagaccgccagccaggtggagcagcccatcatcacccagggcagcagcgtgaccaagatcaccttcgagggcagacagccccccaccgtgaccaagatcaccggcggcagcagcgtgcccaagctgaccagccccgtgaccagcatcagccccatccaggccagcgagaagaccgccgtgagcgacatcctgaagatgagcctgatggaggcccagatcgacaccaacgtggagcacatgatcgtggacccccccaagaaggccctggccaccagcatgctgaccggcgaggccggcagcctgcccagcacccacatggtggtggccggcatggccaacagcaccccccagcagcagaagtgcagagagagctgcagcagccccagcaccgtgggcagcagcctgaccaccagaaagatcgacccccccgccgtgcccgccaccggccagttcatgagaatccagaacgtgggccagaagaaggccgaggagagccccgccgagatcatcatccaggccatcccccagtacgccatcccctgccacagcagcagcaacgtggtggtggagcccagcggcctgctggagctgaacaacttcaccagccagcagctggacgacgaggagaccgccatggagcaggacatcgacagcagcaccgaggacggcaccgagcccagccccagccagagcagcgccgagagaagctag

SEQ ID NO: 76777 - DNA, 3969 bp, synthetic construct; identical to SEQ ID NO: 76774
  misc_feature 1..3969: note = Description of Artificial Sequence: Synthetic coding sequence
  source 1..3969: mol_type = other DNA

SEQ ID NO: 76778 - DNA, 624 bp, synthetic construct
  misc_feature 1..624: note = Description of Artificial Sequence: Synthetic coding sequence
  source 1..624: mol_type = other DNA
atggccgtgttccacgacatgctgctgcagcccctgggcatgttcctgtgcctgagcctgcagctgagcagcgccaccttcatcagatacagcagcacctgcttcaccttcgacgagtactacaccatcaccctggacatcaaggccagcagccacatctacgagagcaacgccgtgtacagcgtgttcgtgcccgtgaacgacagcgtgtacgccgtggtgatgaagaccctggacgagaacagcgacagcgccggcctgtggcagagagccgacaagaactgctacagcaacagcacctactacgtgaaggaccagtacatgaccgtgctggaggcccagtggcaggcccccgagcccgagaacatcaccgaggtggagatccaggccttcaccgtgcagatcagagccctgcccatcctgagcaccctgaagctgagagagaagctgagcaccctggccctggccgccaagatcccccagagcagcgccttcaagcccttcttcatgatcacccccaagagcatcagactggagggcctggccaaccaggtgttcagcagccccatcaccgaggccatctacatcctgctggccttcctgaccagcaccctgctgttctag

SEQ ID NO: 76779 - DNA, 3708 bp, synthetic construct
  misc_feature 1..3708: note = Description of Artificial Sequence: Synthetic coding sequence
  source 1..3708: mol_type = other DNA
atggaccacaccgccagccagaacgcccaggacctgatcggcatcccccacctgggcgtgagcggcagcagcaccaagtggcacagcgagctgagccccaccgagggcccccacagcgccggcagcagcacccccggcttcctgagccccatggccgagctgagccaccccagcccccccccccccgccctgggcagcctgctgcagctgcccgacggcagccccagctggagcatgctggaggtggccagcggccccgccagcacccagcagatcaaggccggcgtgcccggcagagtgcacaacggcgtgagcctgcccaccttcaagaacaccgagaccgccacccacgaggccgagccccccctgttccagaccgccgagagcggcgccatcgagatgaccagcagaaagctggccagcgccaccgccaacgacagcgccaaccccctgcacctgagcgccgcccccgagaacagcagaggccccgccctgagcgccgagcacaccagcagcctggtgcccagcctgcacatcaccaccctgggccaggagcaggccatcctgagcggcgccgtgcccgccagccccagcaccggcaccgccgacttccccagcatcctgaccttcctgcagcccaccgagaaccacgccagccccagccccgtgcccgagatgcccaccctgcccgccgagggcagcgacggcagcccccccgccaccagagacctgctgctgagcagcaaggtgcccaacctgctgagcaccagctggaccttccccagatggaagaaggacagcgtgaccgccatcctgggcaagaacgaggaggccaacgtgaccatccccctgcaggccttccccagaaaggaggtgctgagcctgcacaccgtgaacggcttcgtgagcgacttcagcaccggcagcgtgagcagccccatcatcaccgcccccagaaccaaccccctgcccagcggcccccccctgcccagcatcctgagcatccaggccacccagaccgtgttccccagcctgggcttcagcagcaccaagcccgaggcctacgccgccgccgtggaccacagcggcctgcccgccagcgccagcaagcaggtgagagccagccccagcagcatggacgtgtacgacagcctgaccatcggcgacatgaagaagcccgccaccaccgacgtgttctggagcagcctgagcgccgagaccggcagcctgagcaccgagagcatcatcagcggcctgcagcagcagaccaactacgacctgaacggccacaccatcagcaccaccagctgggagacccacctggcccccaccgccccccccaacggcctgaccagcgccgccgacgccatcaagagccaggacttcaaggacaccgccggccacagcgtgaccgccgagggcttcagcatccaggacctggtgctgggcaccagcatcgagcagcccgtgcagcagagcgacatgaccatggtgggcagccacatcgacctgtggcccaccagcaacaacaaccacagcagagacttccagaccgccgaggtggcctactacagccccaccaccagacacagcgtgagccacccccagctgcagctgcccaaccagcccgcccaccccctgctgctgaccagccccggccccaccagcaccggcagcctgcaggagatgctgagcgacggcaccgacaccggcagcgagatcagcagcgacatcaacagcagccccgagagaaacgccagcacccccttccagaacatcctgggctaccacagcgccgccgagagcagcatcagcaccagcgtgttccccagaaccagcagcagagtgctgagagccagccagcaccccaagaagtggaccggcgccgccaccaacgccgccgacaccgtgagcagcaaggtgcagcccaccgccgccgccgccgtgaccctgttcctgagaaagagcagcccccccgccctgagcgccgccctggtggccaagggcaccagcagcagccccctggccgtggccagcggccccgccaagagcagcagcatgaccaccctggccaagaacgtgaccaacaaggccgccagcggccccaagagaacccccggcgccgtgcacaccgccttccccttcacccccacctacatgtacgccagaaccggccacaccaccagcacccacaccgccatgcagggcaacatggacaccgccagcggcctgctgagcaccacctacctgcccagaaagccccaggccatgcacaccggcctgcccaaccccaccaacctggagatgcccagagccagcacccccagacccctgaccgtgaccgccgccctgaccagcatcaccgccagcgtgaaggccaccagactgccccccctgagagccgagaacaccgacgccgtgctgcccgccgccagcgccgccgtggtgaccaccggcaagatggccagcaacctggagtgccagatgagcagcaagctgctggtgaagaccgtgctgttcctgacccagagaagagtgcagatcagcgagagcctgaagttcagcatcgccaagggcctgacccaggccctgagaaaggccttccaccagaacgacgtgagcgcccacgtggacatcctggagtacagccacaacgtgaccgtgggctactacgccaccaagggcaagctggtgtacctgcccgccgtggtgatcgagatgctgggcgtgtacggcgtgagcaacgtgaccgccgacctgaagcagcacaccccccacctgcagagcgtggccgtgctggccagcccctggaacccccagcccgccggctacttccagctgaagaccgtgctgcagttcgtgagccaggccgacaacatccagagctgcaagttcgcccagaccatggagcagagactgcagaaggccttccaggacgccgagagaaaggtgctgaacaccaagagcaacctgaccatccagatcgtgagcaccagcaacgccagccaggccgtgaccctggtgtacgtggtgggcaaccagagcaccttcctgaacggcaccgtggccagcagcctgctgagccagctgagcgccgagctggtgggcttctacctgacctacccccccctgaccatcgccgagcccctggagtaccccaacctggacatcagcgagaccaccagagactactgggtgatcaccgtgctgcagggcgtggacaacagcctggtgggcctgcacaaccagagcttcgccagagtgatggagcagagactggcccagctgttcatgatgagccagcagcagggcagaagattcaagagagccaccaccctgggcagctacaccgtgcagatggtgaagatgcagagagtgcccggccccaaggaccccgccgagctgacctactacaccctgtacaacggcaagcccctgctgggcaccgccgccgccaagatcctgagcaccatcgacagccagagaatggccctgaccctgcaccacgtggtgctgctgcaggccgaccccgtggtgaagaacccccccaacaacctgtggatcatcgccgccgtgctggcccccatcgccgtggtgaccgtgatcatcatcatcatcaccgccgtgctgtgcagaaagaacaagaacgacttcaagcccgacaccatgatcaacctgccccagagagccaagcaggtggcccagtag

SEQ ID NO: 76780 - DNA, 5550 bp, synthetic construct
  misc_feature 1..5550: note = Description of Artificial Sequence: Synthetic coding sequence
  source 1..5550: mol_type = other DNA
atggaccacaccgccagccagaacgcccaggacctgatcggcatcccccacctgggcgtgagcggcagcagcaccaagtggcacagcgagctgagccccaccgagggcccccacagcgccggcagcagcacccccggcttcctgagccccatggccgagctgagccaccccagcccccccccccccgccctgggcagcctgctgcagctgcccgacggcagccccagctggagcatgctggaggtggccagcggccccgccagcacccagcagatcaaggccggcgtgcccggcagagtgcacaacggcgtgagcctgcccaccttcaagaacaccgagaccgccacccacgaggccgagccccccctgttccagaccgccgagagcggcgccatcgagatgaccagcagaaagctggccagcgccaccgccaacgacagcgccaaccccctgcacctgagcgccgcccccgagaacagcagaggccccgccctgagcgccgagcacaccagcagcctggtgcccagcctgcacatcaccaccctgggccaggagcaggccatcctgagcggcgccgtgcccgccagccccagcaccggcaccgccgacttccccagcatcctgaccttcctgcagcccaccgagaaccacgccagccccagccccgtgcccgagatgcccaccctgcccgccgagggcagcgacggcagcccccccgccaccagagacctgctgctgagcagcaaggtgcccaacctgctgagcaccagctggaccttccccagatggaagaaggacagcgtgaccgccatcctgggcaagaacgaggaggccaacgtgaccatccccctgcaggccttccccagaaaggaggtgctgagcctgcacaccgtgaacggcttcgtgagcgacttcagcaccggcagcgtgagcagccccatcatcaccgcccccagaaccaaccccctgcccagcggcccccccctgcccagcatcctgagcatccaggccacccagaccgtgttccccagcctgggcttcagcagcaccaagcccgaggcctacgccgccgccgtggaccacagcggcctgcccgccagcgccagcaagcaggtgagagccagccccagcagcatggacgtgtacgacagcctgaccatcggcgacatgaagaagcccgccaccaccgacgtgttctggagcagcctgagcgccgagaccggcagcctgagcaccgagagcatcatcagcggcctgcagcagcagaccaactacgacctgaacggccacaccatcagcaccaccagctgggagacccacctggcccccaccgccccccccaacggcctgaccagcgccgccgacgccatcaagagccaggacttcaaggacaccgccggccacagcgtgaccgccgagggcttcagcatccaggacctggtgctgggcaccagcatcgagcagcccgtgcagcagagcgacatgaccatggtgggcagccacatcgacctgtggcccaccagcaacaacaaccacagcagagacttccagaccgccgaggtggcctactacagccccaccaccagacacagcgtgagccacccccagctgcagctgcccaaccagcccgcccaccccctgctgctgaccagccccggccccaccagcaccggcagcctgcaggagatgctgagcgacggcaccgacaccggcagcgagatcagcagcgacatcaacagcagccccgagagaaacgccagcacccccttccagaacatcctgggctaccacagcgccgccgagagcagcatcagcaccagcgtgttccccagaaccagcagcagagtgctgagagccagccagcaccccaagaagtggaccgccgacaccgtgagcagcaaggtgcagcccaccgccgccgccgccgtgaccctgttcctgagaaagagcagcccccccgccctgagcgccgccctggtggccaagggcaccagcagcagccccctggccgtggccagcggccccgccaagagcagcagcatgaccaccctggccaagaacgtgaccaacaaggccgccagcggccccaagagaacccccggcgccgtgcacaccgccttccccttcacccccacctacatgtacgccagaaccggccacaccaccagcacccacaccgccatgcagggcaacatggacaccgccagcggcctgctgagcaccacctacctgcccagaaagccccaggccatgcacaccggcctgcccaaccccaccaacctggagatgcccagagccagcacccccagacccctgaccgtgaccgccgccctgaccagcatcaccgccagcgtgaaggccaccagactgccccccctgagagccgagaacaccgacgccgtgctgcccgccgccagcgccgccgtggtgaccaccggcaagatggccagcaacctggagtgccagatgagcagcaagctgctggtgaagaccgtgctgttcctgacccagagaagagtgcagatcagcgagagcctgaagttcagcatcgccaagggcctgacccaggccctgagaaaggccttccaccagaacgacgtgagcgcccacgtggacatcctggagtacagccacaacgtgaccgtgggctactacgccaccaagggcaagctggtgtacctgcccgccgtggtgatcgagatgctgggcgtgtacggcgtgagcaacgtgaccgccgacctgaagcagcacaccccccacctgcagagcgtggccgtgctggccagcccctggaacccccagcccgccggctacttccagctgaagaccgtgctgcagttcgtgagccaggccgacaacatccagagctgcaagttcgcccagaccatggagcagagactgcagaaggccttccaggacgccgagagaaaggtgctgaacaccaagagcaacctgaccatccagatcgtgagcaccagcaacgccagccaggccgtgaccctggtgtacgtggtgggcaaccagagcaccttcctgaacggcaccgtggccagcagcctgctgagccagctgagcgccgagctggtgggcttctacctgacctacccccccctgaccatcgccgagcccctggagtaccccaacctggacatcagcgagaccaccagagactactgggtgatcaccgtgctgcagggcgtggacaacagcctggtgggcctgcacaaccagagcttcgccagagtgatggagcagagactggcccagctgttcatgatgagccagcagcagggcagaagattcaagagagccaccaccctgggcagctacaccgtgcagatggtgaagatgcagagagtgcccggccccaaggaccccgccgagctgacctactacaccctgtacaacggcaagcccctgctgggcaccgccgccgccaagatcctgagcaccatcgacagccagagaatggccctgaccctgcaccacgtggtgctgctgcaggccgaccccgtggtgaagaacccccccaacaacctgtggatcatcgccgccgtgctggcccccatcgccgtggtgaccgtgatcatcatcatcatcaccgccgtgctgtgcagaaagaacaagaacgacttcaagcccgacaccatgatcaacctgccccagagagccaagcccgtgcagggcttcgactacgccaagcagcacctgggccagcagggcgccgacgaggaggtgatccccgtgacccaggagaccgtggtgctgcccctgcccatcagagacgccccccaggagagagacgtggcccaggacggcagcaccatcaagaccgccaagagcaccgagaccagaaagagcagaagccccagcgagaacggcagcgtgatcagcaacgagagcggcaagcccagcagcggcagaagaagcccccagaacgtgatggcccagcagaaggtgaccaaggaggaggccagaaagagaaacgtgcccgccagcgacgaggaggagggcgccgtgctgttcgacaacagcagcaaggtggccgccgagcccttcgacaccagcagcggcagcgtgcagctgatcgccatcaagcccaccgccctgcccatggtgccccccaccagcgacagaagccaggagagcagcgccgtgctgaacggcgaggtgaacaaggccctgaagcagaagagcgacatcgagcactacagaaacaagctgagactgaaggccaagagaaagggctactacgacttccccgccgtggagaccagcaagggcctgaccgagagaaagaagatgtacgagaaggcccccaaggagatggagcacgtgctggaccccgacagcgagctgtgcgcccccttcaccgagagcaagaacagacagcagatgaagaacagcgtgtacagaagcagacagagcctgaacagccccagccccggcgagaccgagatggacctgctggtgaccagagagagacccagaagaggcatcagaaacagcggctacgacaccgagcccgagatcatcgaggagaccaacatcgacagagtgcccgagcccagaggctacagcagaagcagacaggtgaagggccacagcgagaccagcaccctgagcagccagcccagcatcgacgaggtgagacagcagatgcacatgctgctggaggaggccttcagcctggccagcgccggccacgccggccagagcagacaccaggaggcctacggcagcgcccagcacctgccctacagcgaggtggtgaccagcgcccccggcaccatgaccagacccagagccggcgtgcagtgggtgcccacctacagacccgagatgtaccagtacagcctgcccagacccgcctacagattcagccagctgcccgagatggtgatgggcagcccccccccccccgtgccccccagaaccggccccgtggccgtggccagcctgagaagaagcaccagcgacatcggcagcaagaccagaatggccgagagcaccggccccgagcccgcccagctgcacgacagcgccagcttcacccagatgagcagaggccccgtgagcgtgacccagctggaccagagcgccctgaactacagcggcaacaccgtgcccgccgtgttcgccatccccgccgccaacagacccggcttcaccggctacttcatccccaccccccccagcagctacagaaaccaggcctggatgagctacgccggcgagaacgagctgcccagccagtgggccgacagcgtgcccctgcccggctacatcgaggcctaccccagaagcagatacccccagagcagccccagcagactgcccagacagtacagccagcccgccaacctgcaccccagcctggagcaggcccccgcccccagcaccgccgccagccagcagagcctggccgagaacgaccccagcgacgcccccctgaccaacatcagcaccgccgccctggtgaaggccatcagagaggaggtggccaagctggccaagaagcagaccgacatgttcgagttccaggtgtag

SEQ ID NO: 76781 - DNA, 5568 bp, synthetic construct
  misc_feature 1..5568: note = Description of Artificial Sequence: Synthetic coding sequence
  source 1..5568: mol_type = other DNA
atggaccacaccgccagccagaacgcccaggacctgatcggcatcccccacctgggcgtgagcggcagcagcaccaagtggcacagcgagctgagccccaccgagggcccccacagcgccggcagcagcacccccggcttcctgagccccatggccgagctgagccaccccagcccccccccccccgccctgggcagcctgctgcagctgcccgacggcagccccagctggagcatgctggaggtggccagcggccccgccagcacccagcagatcaaggccggcgtgcccggcagagtgcacaacggcgtgagcctgcccaccttcaagaacaccgagaccgccacccacgaggccgagccccccctgttccagaccgccgagagcggcgccatcgagatgaccagcagaaagctggccagcgccaccgccaacgacagcgccaaccccctgcacctgagcgccgcccccgagaacagcagaggccccgccctgagcgccgagcacaccagcagcctggtgcccagcctgcacatcaccaccctgggccaggagcaggccatcctgagcggcgccgtgcccgccagccccagcaccggcaccgccgacttccccagcatcctgaccttcctgcagcccaccgagaaccacgccagccccagccccgtgcccgagatgcccaccctgcccgccgagggcagcgacggcagcccccccgccaccagagacctgctgctgagcagcaaggtgcccaacctgctgagcaccagctggaccttccccagatggaagaaggacagcgtgaccgccatcctgggcaagaacgaggaggccaacgtgaccatccccctgcaggccttccccagaaaggaggtgctgagcctgcacaccgtgaacggcttcgtgagcgacttcagcaccggcagcgtgagcagccccatcatcaccgcccccagaaccaaccccctgcccagcggcccccccctgcccagcatcctgagcatccaggccacccagaccgtgttccccagcctgggcttcagcagcaccaagcccgaggcctacgccgccgccgtggaccacagcggcctgcccgccagcgccagcaagcaggtgagagccagccccagcagcatggacgtgtacgacagcctgaccatcggcgacatgaagaagcccgccaccaccgacgtgttctggagcagcctgagcgccgagaccggcagcctgagcaccgagagcatcatcagcggcctgcagcagcagaccaactacgacctgaacggccacaccatcagcaccaccagctgggagacccacctggcccccaccgccccccccaacggcctgaccagcgccgccgacgccatcaagagccaggacttcaaggacaccgccggccacagcgtgaccgccgagggcttcagcatccaggacctggtgctgggcaccagcatcgagcagcccgtgcagcagagcgacatgaccatggtgggcagccacatcgacctgtggcccaccagcaacaacaaccacagcagagacttccagaccgccgaggtggcctactacagccccaccaccagacacagcgtgagccacccccagctgcagctgcccaaccagcccgcccaccccctgctgctgaccagccccggccccaccagcaccggcagcctgcaggagatgctgagcgacggcaccgacaccggcagcgagatcagcagcgacatcaacagcagccccgagagaaacgccagcacccccttccagaacatcctgggctaccacagcgccgccgagagcagcatcagcaccagcgtgttccccagaaccagcagcagagtgctgagagccagccagcaccccaagaagtggaccggcgccgccaccaacgccgccgacaccgtgagcagcaaggtgcagcccaccgccgccgccgccgtgaccctgttcctgagaaagagcagcccccccgccctgagcgccgccctggtggccaagggcaccagcagcagccccctggccgtggccagcggccccgccaagagcagcagcatgaccaccctggccaagaacgtgaccaacaaggccgccagcggccccaagagaacccccggcgccgtgcacaccgccttccccttcacccccacctacatgtacgccagaaccggccacaccaccagcacccacaccgccatgcagggcaacatggacaccgccagcggcctgctgagcaccacctacctgcccagaaagccccaggccatgcacaccggcctgcccaaccccaccaacctggagatgcccagagccagcacccccagacccctgaccgtgaccgccgccctgaccagcatcaccgccagcgtgaaggccaccagactgccccccctgagagccgagaacaccgacgccgtgctgcccgccgccagcgccgccgtggtgaccaccggcaagatggccagcaacctggagtgccagatgagcagcaagctgctggtgaagaccgtgctgttcctgacccagagaagagtgcagatcagcgagagcctgaagttcagcatcgccaagggcctgacccaggccctgagaaaggccttccaccagaacgacgtgagcgcccacgtggacatcctggagtacagccacaacgtgaccgtgggctactacgccaccaagggcaagctggtgtacctgcccgccgtggtgatcgagatgctgggcgtgtacggcgtgagcaacgtgaccgccgacctgaagcagcacaccccccacctgcagagcgtggccgtgctggccagcccctggaacccccagcccgccggctacttccagctgaagaccgtgctgcagttcgtgagccaggccgacaacatccagagctgcaagttcgcccagaccatggagcagagactgcagaaggccttccaggacgccgagagaaaggtgctgaacaccaagagcaacctgaccatccagatcgtgagcaccagcaacgccagccaggccgtgaccctggtgtacgtggtgggcaaccagagcaccttcctgaacggcaccgtggccagcagcctgctgagccagctgagcgccgagctggtgggcttctacctgacctacccccccctgaccatcgccgagcccctggagtaccccaacctggacatcagcgagaccaccagagactactgggtgatcaccgtgctgcagggcgtggacaacagcctggtgggcctgcacaaccagagcttcgccagagtgatggagcagagactggcccagctgttcatgatgagccagcagcagggcagaagattcaagagagccaccaccctgggcagctacaccgtgcagatggtgaagatgcagagagtgcccggccccaaggaccccgccgagctgacctactacaccctgtacaacggcaagcccctgctgggcaccgccgccgccaagatcctgagcaccatcgacagccagagaatggccctgaccctgcaccacgtggtgctgctgcaggccgaccccgtggtgaagaacccccccaacaacctgtggatcatcgccgccgtgctggcccccatcgccgtggtgaccgtgatcatcatcatcatcaccgccgtgctgtgcagaaagaacaagaacgacttcaagcccgacaccatgatcaacctgccccagagagccaagcccgtgcagggcttcgactacgccaagcagcacctgggccagcagggcgccgacgaggaggtgatccccgtgacccaggagaccgtggtgctgcccctgcccatcagagacgccccccaggagagagacgtggcccaggacggcagcaccatcaagaccgccaagagcaccgagaccagaaagagcagaagccccagcgagaacggcagcgtgatcagcaacgagagcggcaagcccagcagcggcagaagaagcccccagaacgtgatggcccagcagaaggtgaccaaggaggaggccagaaagagaaacgtgcccgccagcgacgaggaggagggcgccgtgctgttcgacaacagcagcaaggtggccgccgagcccttcgacaccagcagcggcagcgtgcagctgatcgccatcaagcccaccgccctgcccatggtgccccccaccagcgacagaagccaggagagcagcgccgtgctgaacggcgaggtgaacaaggccctgaagcagaagagcgacatcgagcactacagaaacaagctgagactgaaggccaagagaaagggctactacgacttccccgccgtggagaccagcaagggcctgaccgagagaaagaagatgtacgagaaggcccccaaggagatggagcacgtgctggaccccgacagcgagctgtgcgcccccttcaccgagagcaagaacagacagcagatgaagaacagcgtgtacagaagcagacagagcctgaacagccccagccccggcgagaccgagatggacctgctggtgaccagagagagacccagaagaggcatcagaaacagcggctacgacaccgagcccgagatcatcgaggagaccaacatcgacagagtgcccgagcccagaggctacagcagaagcagacaggtgaagggccacagcgagaccagcaccctgagcagccagcccagcatcgacgaggtgagacagcagatgcacatgctgctggaggaggccttcagcctggccagcgccggccacgccggccagagcagacaccaggaggcctacggcagcgcccagcacctgccctacagcgaggtggtgaccagcgcccccggcaccatgaccagacccagagccggcgtgcagtgggtgcccacctacagacccgagatgtaccagtacagcctgcccagacccgcctacagattcagccagctgcccgagatggtgatgggcagcccccccccccccgtgccccccagaaccggccccgtggccgtggccagcctgagaagaagcaccagcgacatcggcagcaagaccagaatggccgagagcaccggccccgagcccgcccagctgcacgacagcgccagcttcacccagatgagcagaggccccgtgagcgtgacccagctggaccagagcgccctgaactacagcggcaacaccgtgcccgccgtgttcgccatccccgccgccaacagacccggcttcaccggctacttcatccccaccccccccagcagctacagaaaccaggcctggatgagctacgccggcgagaacgagctgcccagccagtgggccgacagcgtgcccctgcccggctacatcgaggcctaccccagaagcagatacccccagagcagccccagcagactgcccagacagtacagccagcccgccaacctgcaccccagcctggagcaggcccccgcccccagcaccgccgccagccagcagagcctggccgagaacgaccccagcgacgcccccctgaccaacatcagcaccgccgccctggtgaaggccatcagagaggaggtggccaagctggccaagaagcagaccgacatgttcgagttccaggtgtag

SEQ ID NO: 76782 - DNA, 5067 bp, synthetic construct
  misc_feature 1..5067: note = Description of Artificial Sequence: Synthetic coding sequence
  source 1..5067: mol_type = other DNA
atccccgagggcctgagcgccgagcacaccagcagcctggtgcccagcctgcacatcaccaccctgggccaggagcaggccatcctgagcggcgccgtgcccgccagccccagcaccggcaccgccgacttccccagcatcctgaccttcctgcagcccaccgagaaccacgccagccccagccccgtgcccgagatgcccaccctgcccgccgagggcagcgacggcagcccccccgccaccagagacctgctgctgagcagcaaggtgcccaacctgctgagcaccagctggaccttccccagatggaagaaggacagcgtgaccgccatcctgggcaagaacgaggaggccaacgtgaccatccccctgcaggccttccccagaaaggaggtgctgagcctgcacaccgtgaacggcttcgtgagcgacttcagcaccggcagcgtgagcagccccatcatcaccgcccccagaaccaaccccctgcccagcggcccccccctgcccagcatcctgagcatccaggccacccagaccgtgttccccagcctgggcttcagcagcaccaagcccgaggcctacgccgccgccgtggaccacagcggcctgcccgccagcgccagcaagcaggtgagagccagccccagcagcatggacgtgtacgacagcctgaccatcggcgacatgaagaagcccgccaccaccgacgtgttctggagcagcctgagcgccgagaccggcagcctgagcaccgagagcatcatcagcggcctgcagcagcagaccaactacgacctgaacggccacaccatcagcaccaccagctgggagacccacctggcccccaccgccccccccaacggcctgaccagcgccgccgacgccatcaagagccaggacttcaaggacaccgccggccacagcgtgaccgccgagggcttcagcatccaggacctggtgctgggcaccagcatcgagcagcccgtgcagcagagcgacatgaccatggtgggcagccacatcgacctgtggcccaccagcaacaacaaccacagcagagacttccagaccgccgaggtggcctactacagccccaccaccagacacagcgtgagccacccccagctgcagctgcccaaccagcccgcccaccccctgctgctgaccagccccggccccaccagcaccggcagcctgcaggagatgctgagcgacggcaccgacaccggcagcgagatcagcagcgacatcaacagcagccccgagagaaacgccagcacccccttccagaacatcctgggctaccacagcgccgccgagagcagcatcagcaccagcgtgttccccagaaccagcagcagagtgctgagagccagccagcaccccaagaagtggaccgccgacaccgtgagcagcaaggtgcagcccaccgccgccgccgccgtgaccctgttcctgagaaagagcagcccccccgccctgagcgccgccctggtggccaagggcaccagcagcagccccctggccgtggccagcggccccgccaagagcagcagcatgaccaccctggccaagaacgtgaccaacaaggccgccagcggccccaagagaacccccggcgccgtgcacaccgccttccccttcacccccacctacatgtacgccagaaccggccacaccaccagcacccacaccgccgccagaaagcacggccactgcctgtggcccgtggtgtacaacctgccccccagaaagccccaggccatgcacaccggcctgcccaaccccaccaacctggagatgcccagagccagcacccccagacccctgaccgtgaccgccgccctgaccagcatcaccgccagcgtgaaggccaccagactgccccccctgagagccgagaacaccgacgccgtgctgcccgccgccagcgccgccgtggtgaccaccggcaagatggccagcaacctggagtgccagatgagcagcaagctgctggtgaagaccgtgctgttcctgacccagagaagagtgcagatcagcgagagcctgaagttcagcatcgccaagggcctgacccaggccctgagaaaggccttccaccagaacgacgtgagcgcccacgtggacatcctggagtacagccacaacgtgaccgtgggctactacgccaccaagggcaagctggtgtacctgcccgccgtggtgatcgagatgctgggcgtgtacggcgtgagcaacgtgaccgccgacctgaagcagcacaccccccacctgcagagcgtggccgtgctggccagcccctggaacccccagcccgccggctacttccagctgaagaccgtgctgcagttcgtgagccaggccgacaacatccagagctgcaagttcgcccagaccatggagcagagactgcagaaggccttccaggacgccgagagaaaggtgctgaacaccaagagcaacctgaccatccagatcgtgagcaccagcaacgccagccaggccgtgaccctggtgtacgtggtgggcaaccagagcaccttcctgaacggcaccgtggccagcagcctgctgagccagctgagcgccgagctggtgggcttctacctgacctacccccccctgaccatcgccgagcccctggagtaccccaacctggacatcagcgagaccaccagagactactgggtgatcaccgtgctgcagggcgtggacaacagcctggtgggcctgcacaaccagagcttcgccagagtgatggagcagagactggcccagctgttcatgatgagccagcagcagggcagaagattcaagagagccaccaccctgggcagctacaccgtgcagatggtgaagatgcagagagtgcccggccccaaggaccccgccgagctgacctactacaccctgtacaacggcaagcccctgctgggcaccgccgccgccaagatcctgagcaccatcgacagccagagaatggccctgaccctgcaccacgtggtgctgctgcaggccgaccccgtggtgaagaacccccccaacaacctgtggatcatcgccgccgtgctggcccccatcgccgtggtgaccgtgatcatcatcatcatcaccgccgtgctgtgcagaaagaacaagaacgacttcaagcccgacaccatgatcaacctgccccagagagccaagcccgtgcagggcttcgactacgccaagcagcacctgggccagcagggcgccgacgaggaggtgatccccgtgacccaggagaccgtggtgctgcccctgcccatcagagacgccccccaggagagagacgtggcccaggacggcagcaccatcaagaccgccaagagcaccgagaccagaaagagcagaagccccagcgagaacggcagcgtgatcagcaacgagagcggcaagcccagcagcggcagaagaagcccccagaacgtgatggcccagcagaaggtgaccaaggaggaggccagaaagagaaacgtgcccgccagcgacgaggaggagggcgccgtgctgttcgacaacagcagcaaggtggccgccgagcccttcgacaccagcagcggcagcgtgcagctgatcgccatcaagcccaccgccctgcccatggtgccccccaccagcgacagaagccaggagagcagcgccgtgctgaacggcgaggtgaacaaggccctgaagcagaagagcgacatcgagcactacagaaacaagctgagactgaaggccaagagaaagggctactacgacttccccgccgtggagaccagcaagggcctgaccgagagaaagaagatgtacgagaaggcccccaaggagatggagcacgtgctggaccccgacagcgagctgtgcgcccccttcaccgagagcaagaacagacagcagatgaagaacagcgtgtacagaagcagacagagcctgaacagccccagccccggcgagaccgagatggacctgctggtgaccagagagagacccagaagaggcatcagaaacagcggctacgacaccgagcccgagatcatcgaggagaccaacatcgacagagtgcccgagcccagaggctacagcagaagcagacaggtgaagggccacagcgagaccagcaccctgagcagccagcccagcatcgacgaggtgagacagcagatgcacatgctgctggaggaggccttcagcctggccagcgccggccacgccggccagagcagacaccaggaggcctacggcagcgcccagcacctgccctacagcgaggtggtgaccagcgcccccggcaccatgaccagacccagagccggcgtgcagtgggtgcccacctacagacccgagatgtaccagtacagcctgcccagacccgcctacagattcagccagctgcccgagatggtgatgggcagcccccccccccccgtgccccccagaaccggccccgtggccgtggccagcctgagaagaagcaccagcgacatcggcagcaagaccagaatggccgagagcaccggccccgagcccgcccagctgcacgacagcgccagcttcacccagatgagcagaggccccgtgagcgtgacccagctggaccagagcgccctgaactacagcggcaacaccgtgcccgccgtgttcgccatccccgccgccaacagacccggcttcaccggctacttcatccccaccccccccagcagctacagaaaccaggcctggatgagctacgccggcgagaacgagctgcccagccagtgggccgacagcgtgcccctgcccggctacatcgaggcctaccccagaagcagatacccccagagcagccccagcagactgcccagacagtacagccagcccgccaacctgcaccccagcctggagcaggcccccgcccccagcaccgccgccagccagcagagcctggccgagaacgaccccagcgacgcccccctgaccaacatcagcaccgccgccctggtgaaggccatcagagaggaggtggccaagctggccaagaagcagaccgacatgttcgagttccaggtgtag

SEQ ID NO: 76783 - DNA, 783 bp, synthetic construct
  misc_feature 1..783: note = Description of Artificial Sequence: Synthetic coding sequence
  source 1..783: mol_type = other DNA
atgatggacccctgcagcgtgggcgtgcagctgagaaccaccaacgagtgccacaagacctactacaccagacacaccggcttcaagaccctgcaggagctgagcagcaacgacatgctgctgctgcagctgagaaccggcatgaccctgagcggcaacaacaccatctgcttccaccacgtgaagatctacatcgacagattcgaggacctgcagaagagctgctgcgaccccttcaacatccacaagaagctggccaagaagaacctgcacgtgatcgacctggacgacgccaccttcctgagcgccaagttcggcagacagctggtgcccggctggaagctgtgccccaagtgcacccagatcatcaacggcagcgtggacgtggacaccgaggacagacagaagagaaagcccgagagcgacggcagaaccgccaaggccctgagaagcctgcagttcaccaaccccggcagacagaccgagttcgcccccgagaccggcaagagagagaagagaagactgaccaagaacgccaccgccggcagcgacagacaggtgatccccgccaagagcaaggtgtacgacagccagggcctgctgatcttcagcggcatggacctgtgcgactgcctggacgaggactgcctgggctgcttctacgcctgccccgcctgcggcagcaccaagtgcggcgccgagtgcagatgcgacagaaagtggctgtacgagcagatcgagatcgagggcggcgagatcatccacaacaagcacgccggctag

SEQ ID NO: 76784 - DNA, 507 bp, synthetic construct
  misc_feature 1..507: note = Description of Artificial Sequence: Synthetic coding sequence
  source 1..507: mol_type = other DNA
atgatggacccctgcagcgtgggcgtgcagctgagaaccaccaacgagtgccacaagacctactacaccagacacaccggcttcaagaccctgcaggagctgagcagcaacgacatgctgctgctgcagctgagaaccggcatgaccctgagcggcaacaacaccatctgcttccaccacgtgaagatctacatcgacagattcgaggacctgcagaagagctgctgcgaccccttcaacatccacaagaagctggccaagaagaacctgcacgtgatcgacctggacgacgccaccttcctgagcgccaagttcggcagacagctggtgcccggctggaagctgtgccccaagtgcacccagatcatcaacggcagcgtggacgtggacaccgaggacagacagaagagaaagcccgagagcgacggcagaaccgccaaggccctgagaagcctgcagttcaccaaccccggcagacagaccgagttcgcccccgagaccggctag

SEQ ID NO: 76785 - DNA, 180 bp, synthetic construct
  misc_feature 1..180: note = Description of Artificial Sequence: Synthetic coding sequence
  source 1..180: mol_type = other DNA
atgagacagctgaagggcaagcccaagaaggagaccagcaaggacaagaaggagagaaagcaggccatgcaggaggccagacagcagatcaccaccgtggtgctgcccaccctggccgtggtggtgctgctgatcgtggtgttcgtgtacgtggccaccagacccaccatcaccgagtag

SEQ ID NO: 76786 - DNA, 180 bp, synthetic construct; identical to SEQ ID NO: 76785
  misc_feature 1..180: note = Description of Artificial Sequence: Synthetic coding sequence
  source 1..180: mol_type = other DNA

SEQ ID NO: 76787 - DNA, 144 bp, synthetic construct
  misc_feature 1..144: note = Description of Artificial Sequence: Synthetic coding sequence
  source 1..144: mol_type = other DNA
atgagacagctgaagggcaagcccaagaaggagaccagcaaggacaagaaggagagaaagcaggccatgcaggaggccagacagcagatcaccaccgtggtgctgcccaccctggccgtggtggtgctgctgatcgtggtgtag

SEQ ID NO: 76788 - DNA, 180 bp, synthetic construct; identical to SEQ ID NO: 76785
  misc_feature 1..180: note = Description of Artificial Sequence: Synthetic coding sequence
  source 1..180: mol_type = other DNA

SEQ ID NO: 76789 - DNA, 159 bp, synthetic construct
  misc_feature 1..159: note = Description of Artificial Sequence: Synthetic coding sequence
  source 1..159: mol_type = other DNA
atgagacagctgaagggcaagcccaagaaggagaccagcaaggacaagaaggagagaaagcaggccatgcaggaggccagacagcagatcaccaccgtggtgctgcccaccctggccgtggtggtgctgctgatcgtggtgttcgtgtacgtggcctag

SEQ ID NO: 76790 - DNA, 3336 bp, synthetic construct
  misc_feature 1..3336: note = Description of Artificial Sequence: Synthetic coding sequence
  source 1..3336: mol_type = other DNA
atgcactggctgcccgccggccacgacatcaacggcgccctggagcccagcaacatcgacaccagcatcctggaggagtacatcagcaaggaggacgccagcgacctgtgcttccccgacatcagcgcccccgccagcagcgccagctacagccacggccagcccgccatgcccggcagcagcggcgtgcaccacctgagcccccccggcggcggccccagccccggcagacacggccccctgcccccccccggctacggcacccccctgaactgcaacaacaacaacggcatgggcgccgcccccaagcccttccccggcggcaccggcccccccatcaaggccgagcccaaggccccctacgcccccggcaccctgcccgacagcccccccgacagcggcagcgaggcctacagcccccagcaggtgaacgagccccacctgctgagaaccatcacccccgagaccctgtgccacgtgggcgtgcccagcagactggagcaccccccccccccccccgcccacctgcccggcccccccccccccccccccccccccccccactaccccgtgctgcagagagacctgtacatgaaggccgagccccccatcccccactacgccgccatgggccagggcctggtgcccaccgacctgcaccacacccagcagagccagatgctgcaccagctgctgcagcagcacggcgccgagctgcccacccaccccagcaagaagagaaagcacagcgagagcccccccagcaccctgaacgcccagatgctgaacggcatgatcaagcaggagcccggcaccgtgaccgccctgcccctgcaccccaccagagcccccagccccccctggcccccccagggccccctgagccccggccccggcagcctgcccctgagcatcgccagagtgcagacccccccctggcacccccccggcgcccccagccccggcctgctgcaggacagcgacagcctgagcggcagctacctggaccccaactaccagagcatcaagtggcagccccaccagcagaacaagtgggccaccctgtacgacgccaactacaaggagctgcccatgctgacctacagagtggacgccgacaagggcttcaacttcagcgtgggcgacgacgccttcgtgtgccagaagaagaaccacttccaggtgaccgtgtacatcggcatgctgggcgagcccaagtacgtgaagacccccgagggcctgaagcccctggactgcttctacctgaagctgcacggcgtgaagctggaggccctgaaccagagcatcaacatcgagcagagccagagcgacagaagcaagagacccttcaaccccgtgaccgtgaacctgccccccgagcaggtgaccaaggtgaccgtgggcagactgcacttcagcgagaccaccgccaacaacatgagaaagaagggcaagcccaaccccgaccagagatacttcatgctggtggtggccctgcaggcccacgcccagaaccagaactacaccctggccgcccagatcagcgagagaatcatcgtgagagccagcaaccccggccagttcgagagcgacagcgacgtgctgtggcagagagcccaggtgcccgacaccgtgttccaccacggcagagtgggcatcaacaccgacagacccgacgaggccctggtggtgcacggcaacgtgaaggtgatgggcagcctgatgcaccccagcgacctgagagccaaggagcacgtgcaggaggtggacaccaccgagcagctgaagagaatcagcagaatgagactggtgcactacagatacaagcccgagttcgccgccagcgccggcatcgaggccaccgcccccgagaccggcgtgatcgcccaggaggtgaaggagatcctgcccgaggccgtgaaggacaccggcgacatggtgttcgccaacggcaagaccatcgagaacttcctggtggtgaacaaggagagaatcttcatggagaacgtgggcgccgtgaaggagctgtgcaagctgaccgacaacctggagaccagaatcgacgagctggagagatggagccacaagctggccaagctgagaagactggacagcctgaagagcaccggcagcagcggcgccttcagccacgccggcagccagttcagcagagccggcagcgtgccccacaagaagagaccccccaaggtggccagcaagagcagcagcgtggtgcccgaccaggcctgcatcagccagagattcctgcagggcaccatcatcgccctggtggtggtgatggccttcagcgtggtgagcatgagcaccctgtacgtgctgagcctgagaaccgaggaggacctggtggacaccgacggcagaagcagccagagcttcggcaccacccagctgagacagagccccctgaccaccggcctgcccggcatccagcccagcctgctgctggtgaccaccagcctgaccagcagcgcccccggcagcgccgtgagaaccctggacatgtgcagcagccacccctgccccgtgatctgctgcagcagccccaccaccaaccccaccaccggccccagcctgggccccagcttcaaccccggccacgtgctgagccccagccccagccccagcaccaacagaagcggccccagccagatggccctgctgcccgtgaccaacatcagagccaagagctggggcctgagcgtgaacggcatcggccacagcaagcaccacaagagcctggagcccctggccagccccgccgtgcccttccccggcggccagggcaaggccaagaacagccccagcctgggcttccacggcagagccagaagaggcgccctgcagagcagcgtgggccccgccgagcccacctgggcccagggccagagcgagcccgtgcccagcctgaccagcatccaggtgctggagaacagcatgagcatcaccagccagtactgcgcccccggcgacgcctgcagacccggcaacttcacctaccacatccccgtgagcagcggcacccccctgcacctgagcctgaccctgcagatgaacagcagcagccccgtgagcgtggtgctgtgcagcctgagaagcaaggaggagccctgcgaggagggcagcctgccccagagcctgcacacccaccaggacacccagggcaccagccacagatggcccatcaccatcctgagcttcagagagttcacctaccacttcagagtggccctgctgggccaggccaactgcagcagcgaggccctggcccagcccgccaccgactaccacttccacttctacagactgtgcgactag

SEQ ID NO: 76791 - DNA, 3456 bp, synthetic construct
  misc_feature 1..3456: note = Description of Artificial Sequence: Synthetic coding sequence
  source 1..3456: mol_type = other DNA
atggaggtggtggacgagaccgaggccctgcagagattcttcgagggccacgacatcaacggcgccctggagcccagcaacatcgacaccagcatcctggaggagtacatcagcaaggaggacgccagcgacctgtgcttccccgacatcagcgcccccgccagcagcgccagctacagccacggccagcccgccatgcccggcagcagcggcgtgcaccacctgagcccccccggcggcggccccagccccggcagacacggccccctgcccccccccggctacggcacccccctgaactgcaacaacaacaacggcatgggcgccgcccccaagcccttccccggcggcaccggcccccccatcaaggccgagcccaaggccccctacgcccccggcaccctgcccgacagcccccccgacagcggcagcgaggcctacagcccccagcaggtgaacgagccccacctgctgagaaccatcacccccgagaccctgtgccacgtgggcgtgcccagcagactggagcaccccccccccccccccgcccacctgcccggcccccccccccccccccccccccccccccactaccccgtgctgcagagagacctgtacatgaaggccgagccccccatcccccactacgccgccatgggccagggcctggtgcccaccgacctgcaccacacccagcagagccagatgctgcaccagctgctgcagcagcacggcgccgagctgcccacccaccccagcaagaagagaaagcacagcgagagcccccccagcaccctgaacgcccagatgctgaacggcatgatcaagcaggagcccggcaccgtgaccgccctgcccctgcaccccaccagagcccccagccccccctggcccccccagggccccctgagccccggccccggcagcctgcccctgagcatcgccagagtgcagacccccccctggcacccccccggcgcccccagccccggcctgctgcaggacagcgacagcctgagcggcagctacctggaccccaactaccagagcatcaagtggcagccccaccagcagaacaagtgggccaccctgtacgacgccaactacaaggagctgcccatgctgacctacagagtggacgccgacaagggcttcaacttcagcgtgggcgacgacgccttcgtgtgccagaagaagaaccacttccaggtgaccgtgtacatcggcatgctgggcgagcccaagtacgtgaagacccccgagggcctgaagcccctggactgcttctacctgaagctgcacggcgtgaagctggaggccctgaaccagagcatcaacatcgagcagagccagagcgacagaagcaagagacccttcaaccccgtgaccgtgaacctgccccccgagcaggtgaccaaggtgaccgtgggcagactgcacttcagcgagaccaccgccaacaacatgagaaagaagggcaagcccaaccccgaccagagatacttcatgctggtggtggccctgcaggcccacgcccagaaccagaactacaccctggccgcccagatcagcgagagaatcatcgtgagagccagcaaccccggccagttcgagagcgacagcgacgtgctgtggcagagagcccaggtgcccgacaccgtgttccaccacggcagagtgggcatcaacaccgacagacccgacgaggccctggtggtgcacggcaacgtgaaggtgatgggcagcctgatgcaccccagcgacctgagagccaaggagcacgtgcaggaggtggacaccaccgagcagctgaagagaatcagcagaatgagactggtgcactacagatacaagcccgagttcgccgccagcgccggcatcgaggccaccgcccccgagaccggcgtgatcgcccaggaggtgaaggagatcctgcccgaggccgtgaaggacaccggcgacatggtgttcgccaacggcaagaccatcgagaacttcctggtggtgaacaaggagagaatcttcatggagaacgtgggcgccgtgaaggagctgtgcaagctgaccgacaacctggagaccagaatcgacgagctggagagatggagccacaagctggccaagctgagaagactggacagcctgaagagcaccggcagcagcggcgccttcagccacgccggcagccagttcagcagagccggcagcgtgccccacaagaagagaccccccaaggtggccagcaagagcagcagcgtggtgcccgaccaggcctgcatcagccagagattcctgcagggcaccatcatcgccctggtggtggtgatggccttcagcgtggtgagcatgagcaccctgtacgtgctgagcctgagaaccgaggaggacctggtggacaccgacggcagcttcgccgtgagcaccagctgcctgctggccctgctgagaccccagccccccggcggcagcgaggccctgtgcccctggagcagccagagcttcggcaccacccagctgagacagagccccctgaccaccggcctgcccggcatccagcccagcctgctgctggtgaccaccagcctgaccagcagcgcccccggcagcgccgtgagaaccctggacatgtgcagcagccacccctgccccgtgatctgctgcagcagccccaccaccaaccccaccaccggccccagcctgggccccagcttcaaccccggccacgtgctgagccccagccccagccccagcaccaacagaagcggccccagccagatggccctgctgcccgtgaccaacatcagagccaagagctggggcctgagcgtgaacggcatcggccacagcaagcaccacaagagcctggagcccctggccagccccgccgtgcccttccccggcggccagggcaaggccaagaacagccccagcctgggcttccacggcagagccagaagaggcgccctgcagagcagcgtgggccccgccgagcccacctgggcccagggccagagcgccagcctgctggccgagcccgtgcccagcctgaccagcatccaggtgctggagaacagcatgagcatcaccagccagtactgcgcccccggcgacgcctgcagacccggcaacttcacctaccacatccccgtgagcagcggcacccccctgcacctgagcctgaccctgcagatgaacagcagcagccccgtgagcgtggtgctgtgcagcctgagaagcaaggaggagccctgcgaggagggcagcctgccccagagcctgcacacccaccaggacacccagggcaccagccacagatggcccatcaccatcctgagcttcagagagttcacctaccacttcagagtggccctgctgggccaggccaactgcagcagcgaggccctggcccagcccgccaccgactaccacttccacttctacagactgtgcgactag

SEQ ID NO: 76792 - DNA, 1449 bp, synthetic construct
  misc_feature 1..1449: note = Description of Artificial Sequence: Synthetic coding sequence
  source 1..1449: mol_type = other DNA
atgctgacctacagagtggacgccgacaagggcttcaacttcagcgtgggcgacgacgccttcgtgtgccagaagaagaaccacttccaggtgaccgtgtacatcggcatgctgggcgagcccaagtacgtgaagacccccgagggcctgaagcccctggactgcttctacctgaagctgcacggcctggaggccctgaaccagagcatcaacatcgagcagagccagagcgacagaagcaagagacccttcaaccccgtgaccgtgaacctgccccccgagcaggtgaccaaggtgaccgtgggcagactgcacttcagcgagaccaccgccaacaacatgagaaagaagggcaagcccaaccccgaccagagatacttcatgctggtggtggccctgcaggcccacgcccagaaccagaactacaccctggccgcccagatcagcgagagaatcatcgtgagagccagcaaccccggccagttcgagagcgacagcgacgtgctgtggcagagagcccaggtgcccgacaccgtgttccaccacggcagagtgggcatcaacaccgacagacccgacgaggccctggtggtgcacggcaacgtgaaggtgatgggcagcctgatgcaccccagcgacctgagagccaaggagcacgtgcaggaggtggacaccaccgagcagctgaagagaatcagcagaatgagactggtgcactacagatacaagcccgagttcgccgccagcgccggcatcgaggccaccgcccccgagaccggcgtgatcgcccaggaggtgaaggagatcctgcccgaggccgtgaaggacaccggcgacatggtgttcgccaacggcaagaccatcgagaacttcctggtggtgaacaaggtgtgcggcctgaagtacgtggtgtactgcgaggacgacgtgtgccacctgcccgtgctgagcctgggcgccaaggaggcctgggccgtgaaggagctgtgcaagctgaccgacaacctggagaccagaatcgacgagctggagagatggagccacaagctggccaagctgagaagactggacagcctgaagagcaccggcagcagcggcgccttcagccacgccggcagccagttcagcagagccggcagcgtgccccacaagaagagaccccccaaggtggccagcaaggtgggcagcagcagcgtggtgcccgaccaggcctgcatcagccagagattcctgcagggcaccatcatcgccctggtggtggtgatggccttcagacaccacctgggcgcccagccccaggagcagggcccccagccctgccccagagagagagccctggacggcggcagcagcagcaacggccaccccttcctgtggctgcagagaggcgtgcacgtgcacaccgtgagagccgagcccgcccacagaggcggccccggcagacactag

SEQ ID NO: 76793 - DNA, 789 bp, synthetic construct
  misc_feature 1..789: note = Description of Artificial Sequence: Synthetic coding sequence
  source 1..789: mol_type = other DNA
atggccgcccccagcggcaccgtgagcgacagcgagagcagcaacagcagcagcgacgccgaggagctggagagatgcagagaggccgccatgcccgcctggggcctggagcagagaccccacgtggccggcaagcccagagccggcgccgccaacagccagctgagcaccagccagcccagcctgagacacaaggtgaacgagcacgagcaggacggcaacgagctgcagaccacccccgagttcagagcccacgtggccaagaagctgggcgccctgctggacagcttcatcaccatcagcgaggccgccaaggagcccgccaaggccaaggtgcagaaggtggccctggaggacgacggcttcagactgttcttcaccagcgtgcccggcggcagagagaaggaggagagcccccagcccagaagaaagagacagcccagcagcagcagcgaggacagcgacgaggagtggagaagatgcagagaggccgccgtgagcgccagcgacatcctgcaggagagcgccatccacagccccggcaccgtggagaaggaggccaagaagaagagaaagctgaagaagaaggccaagaaggtggccagcgtggacagcgccgtggccgccaccacccccaccagcatggccaccgtgcagaagcagaagagcggcgagctgaacggcgaccaggtgagcctgggcaccaagaagaagaagaaggccaagaaggccagcgagaccagccccttcccccccgccaagagcgccaccgccatccccgccaactag

SEQ ID NO: 76794 - DNA, 666 bp, synthetic construct
  misc_feature 1..666: note = Description of Artificial Sequence: Synthetic coding sequence
  source 1..666: mol_type = other DNA
atgttctgccagaaccccggcgccgccaacagccagctgagcaccagccagcccagcctgagacacaaggtgaacgagcacgagcaggacggcaacgagctgcagaccacccccgagttcagagcccacgtggccaagaagctgggcgccctgctggacagcttcatcaccatcagcgaggccgccaaggagcccgccaaggccaaggtgcagaaggtggccctggaggacgacggcttcagactgttcttcaccagcgtgcccggcggcagagagaaggaggagagcccccagcccagaagaaagagacagcccagcagcagcagcagcgaggacagcgacgaggagtggagaagatgcagagaggccgccgtgagcgccagcgacatcctgcaggagagcgccatccacagccccggcaccgtggagaaggaggccaagaagaagagaaagctgaagaagaaggccaagaaggtggccagcgtggacagcgccgtggccgccaccacccccaccagcatggccaccgtgcagaagcagaagagcggcgagctgaacggcgaccaggtgagcctgggcaccaagaagaagaagaaggccaagaaggccagcgagaccagccccttcccccccgccaagagcgccaccgccatccccgccaactag

SEQ ID NO: 76795 - DNA, 699 bp, synthetic construct
  misc_feature 1..699: note = Description of Artificial Sequence: Synthetic coding sequence
  source 1..699: mol_type = other DNA
atgcccgcctggggcctggagcagagaccccacgtggccggcaagcccagagccggcgccgccaacagccagctgagcaccagccagcccagcctgagacacaaggtgaacgagcacgagcaggacggcaacgagctgcagaccacccccgagttcagagcccacgtggccaagaagctgggcgccctgctggacagcttcatcaccatcagcgaggccgccaaggagcccgccaaggccaaggtgcagaaggtggccctggaggacgacggcttcagactgttcttcaccagcgtgcccggcggcagagagaaggaggagagcccccagcccagaagaaagagacagcccagcagcagcagcgaggacagcgacgaggagtggagaagatgcagagaggccgccgtgagcgccagcgacatcctgcaggagagcgccatccacagccccggcaccgtggagaaggaggccaagaagaagagaaagctgaagaagaaggccaagaaggtggccagcgtggacagcgccgtggccgccaccacccccaccagcatggccaccgtgcagaagcagaagagcggcgagctgaacggcgaccaggtgagcctgggcaccaagaagaagaagaaggccaagaaggccagcgagaccagccccttcccccccgccaagagcgccaccgccatccccgccaactag

SEQ ID NO: 76796 - DNA, 1497 bp, synthetic construct
  misc_feature 1..1497: note = Description of Artificial Sequence: Synthetic coding sequence
  source 1..1497: mol_type = other DNA
atggacgtgaccgaccactacgaggacgtgagaaagatctacgacgacttcctgaagaacagcaacatgctggacctgatcgacgtgtaccagaagtgcagagccctgaccagcaactgcgagaactacaacaccgtgagccccagccagctgctggacttcctgagcggcaagcagtacgccgtgggcgacgagaccgacctgagcatccccaccagccccaccagcaagtacaacagagacaacgagaaggtgcagctgctggccagaaagatcatcttcagctacctgaacctgctggtgaacagcaagaacgacctggccgtggcctacatcctgaacatccccgacagaggcctgggcagagaggccttcaccgacctgaagcacgccgccagagagaagcagatgagcatcttcctggtggccaccagcttcatcagaaccatcgagctgggcggcaagggctacgcccccccccccagcgaccccctgagaacccacgtgaagggcctgagcaacttcatcaacttcatcgacaagctggacgagatcctgggcgagatccccaaccccagcatcgccggcggccagatcctgagcgtgatcaagatgcagctgatcaagggccagaacagcagagaccccttctgcaaggccatcgaggaggtggcccaggacctggacctgagaatcaagaacatcatcaacagccaggagggcgtggtggccctgagcaccaccgacatcagccccgccagacccaagagccacgccatcaaccacggcaccgcctactgcggcagagacaccgtgaaggccctgctggtgctgctggacgaggaggccgccaacgcccccaccaagaacaaggccgagctgctgtacgacgaggagaacaccatccaccaccacggcaccagcatcctgaccctgttcagaagccccacccaggtgaacaacagcatcaagcccctgagagagagaatctgcgtgagcatgcaggagaagaagatcaagatgaagcagaccctgatcagaagccagttcgcctgcacctacaaggacgactacatgatcagcaaggacaactggaacaacgtgaacctggccagcaagcccctgtgcgtgctgtacatggagaacgacctgagcgagggcgtgaaccccagcgtgggcagaagcaccatcggcaccagcttcggcaacgtgcacctggacagaagcaagaacgagaaggtgagcagaaagagcaccagccagaccggcaacaagagcagcaagagaaagcaggtggacctggacggcgagaacatcctgtgcgacaacagaaacgagcccccccagcacaagaacgccaagatccccaagaagagcaacgacagccagaacagactgtacggcaagctggccaaggtggccaagagcaacaagtgcaccgccaaggacaagctgatcagcggccaggccaagctgacccagttcttcagactgtag

SEQ ID NO: 76797 - DNA, 1740 bp, synthetic construct
  misc_feature 1..1740: note = Description of Artificial Sequence: Synthetic coding sequence
  source 1..1740: mol_type = other DNA
atggccgtgttcaaccagaagagcgtgagcgacatgatcaaggagttcagaaagaactggagagccctgtgcaacagcgagagaaccaccctgtgcggcgccgacagcatgctgctggccctgcagctgagcatggccgagaacaacaagcagcacagcggcgagttcaccgtgagcctgagcgacgtgctgctgacctggaagtacctgctgcacgagaagctgaacctgcccgtggagaacatggacgtgaccgaccactacgaggacgtgagaaagatctacgacgacttcctgaagaacagcaacatgctggacctgatcgacgtgtaccagaagtgcagagccctgaccagcaactgcgagaactacaacaccgtgagccccagccagctgctggacttcctgagcggcaagcagtacgccgtgggcgacgagaccgacctgagcatccccaccagccccaccagcaagtacaacagagacaacgagaaggtgcagctgctggccagaaagatcatcttcagctacctgaacctgctggtgaacagcaagaacgacctggccgtggcctacatcctgaacatccccgacagaggcctgggcagagaggccttcaccgacctgaagcacgccgccagagagaagcagatgagcatcttcctggtggccaccagcttcatcagaaccatcgagctgggcggcaagggctacgcccccccccccagcgaccccctgagaacccacgtgaagggcctgagcaacttcatcaacttcatcgacaagctggacgagatcctgggcgagatccccaaccccagcatcgccggcggccagatcctgagcgtgatcaagatgcagctgatcaagggccagaacagcagagaccccttctgcaaggccatcgaggaggtggcccaggacctggacctgagaatcaagaacatcatcaacagccaggagggcgtggtggccctgagcaccaccgacatcagccccgccagacccaagagccacgccatcaaccacggcaccgcctactgcggcagagacaccgtgaaggccctgctggtgctgctggacgaggaggccgccaacgcccccaccaagaacaaggccgagctgctgtacgacgaggagaacaccatccaccaccacggcaccagcatcctgaccctgttcagaagccccacccaggtgaacaacagcatcaagcccctgagagagagaatctgcgtgagcatgcaggagaagaagatcaagatgaagcagaccctgatcagaagccagttcgcctgcacctacaaggacgactacatgatcagcaaggacaactggaacaacgtgaacctggccagcaagcccctgtgcgtgctgtacatggagaacgacctgagcgagggcgtgaaccccagcgtgggcagaagcaccatcggcaccagcttcggcaacgtgcacctggacagaagcaagaacgagaaggtgagcagaaagagcaccagccagaccggcaacaagagcagcaagagaaagcaggtggacctggacggcgagaacatcctgtgcgacaacagaaacgagcccccccagcacaagaacgccaagatccccaagaagagcaacgacagccagaacagactgtacggcaagctggccaaggtggccaagagcaacaagtgcaccgccaaggacaagctgatcagcggccaggccaagctgacccagttcttcagactgtag

SEQ ID NO: 76798 - DNA, 894 bp, synthetic construct
  misc_feature 1..894: note = Description of Artificial Sequence: Synthetic coding sequence
  source 1..894: mol_type = other DNA
atggccgtgttcaaccagaagagcgtgagcgacatgatcaaggagttcagaaagaactggagagccctgtgcaacagcgagagaaccaccctgtgcggcgccgacagcatgctgctggccctgcagctgagcatggccgagaacaacaagcagcacagcggcgagttcaccgtgagcctgagcgacgtgctgctgacctggaagtacctgctgcacgagaagctgaacctgcccgtggagaacatggacgtgaccgaccactacgaggacgtgagaaagatctacgacgacttcctgaagaacagcaacatgctggacctgatcgacgtgtaccagaagtgcagagccctgaccagcaactgcgagaactacaacaccgtgagccccagccagctgctggacttcctgagcggcaagcagtacgccgtgggcgacgagaccgacctgagcatccccaccagccccaccagcaagtacaacagagacaacgagaaggtgcagctgctggccagaaagatcatcttcagctacctgaacctgctggtgaacagcaagaacgacctggccgtggcctacatcctgaacatccccgacagaggcctgggcagagaggccttcaccgacctgaagcacgccgccagagagaagcagatgagcatcttcctggtggccaccagcttcatcagaaccatcgagctgggcggcaagggctacgcccccccccccagcgaccccctgagaacccacgtgaagggcctgagcaacttcatcaacttcatcgacaagctggacgagatcctgggcgagatccccaaccccagaggctgcaagagcatctgctggaagatcaacaactggaacgagttctggaagtgcagcagcggccagaagtag

SEQ ID NO: 76799 - DNA, 1497 bp, synthetic construct; identical to SEQ ID NO: 76796
  misc_feature 1..1497: note = Description of Artificial Sequence: Synthetic coding sequence
  source 1..1497: mol_type = other DNA

SEQ ID NO: 76800 - DNA, 813 bp, synthetic construct
  misc_feature 1..813: note = Description of Artificial Sequence: Synthetic coding sequence
  source 1..813: mol_type = other DNA
atggccagattcgccctgaccgtggtgagacacggcgagaccagattcaacaaggagaagatcatccagggccagggcgtggacgagcccctgagcgagaccggcttcaagcaggccgccgccgccggcatcttcctgaacaacgtgaagttcacccacgccttcagcagcgacctgatgagaaccaagcagaccatgcacggcatcctggagagaagcaagttctgcaaggacatgaccgtgaagtacgacagcagactgagagagagaaagtacggcgtggtggagggcaaggccctgagcgagctgagagccatggccaaggccgccagagaggagtgccccgtgttcaccccccccggcggcgagaccctggaccaggtgaagatgagaggcatcgacttcttcgagttcctgtgccagctgatcctgaaggaggccgaccagaaggagcagttcagccagggcagccccagcaactgcctggagaccagcctggccgagatcttccccctgggcaagaaccacagcagcaaggtgaacagcgacagcggcatccccggcctggccgccagcgtgctggtggtgagccacggcgcctacatgagaagcctgttcgactacttcctgaccgacctgaagtgcagcctgcccgccaccctgagcagaagcgagctgatgagcgtgacccccaacaccggcatgagcctgttcatcatcaacttcgaggagggcagagaggtgaagcccaccgtgcagtgcatctgcatgaacctgcaggaccacctgaacggcctgaccgagaccagatag

SEQ ID NO: 76801 - DNA, 501 bp, synthetic construct
  misc_feature 1..501: note = Description of Artificial Sequence: Synthetic coding sequence
  source 1..501: mol_type = other DNA
atgagcaccgtgggcctgttccacttccccacccccctgaccagaatctgccccgccccctggggcctgagactgtgggagaagctgaccctgctgagccccggcatcgccgtgacccccgtgcagatggccggcaagaaggactaccccgccctgctgagcctggacgagaacgagctggaggagcagttcgtgaagggccacggccccggcggccaggccaccaacaagaccagcaactgcgtggtgctgaagcacatccccagcggcatcgtggtgaagtgccaccagaccagaagcgtggaccagaacagaaagctggccagaaagatcctgcaggagaaggtggacgtgttctacaacggcgagaacagccccgtgcacaaggagaagagagaggccgccaagaagaagcaggagagaaagaagagagccaaggagaccctggagaagaagaagctgctgaaggagctgtgggagagcagcaagaaggtgcactag

SEQ ID NO: 76802 - DNA, 501 bp, synthetic construct; identical to SEQ ID NO: 76801
  misc_feature 1..501: note = Description of Artificial Sequence: Synthetic coding sequence
  source 1..501: mol_type = other DNA

SEQ ID NO: 76803 - DNA, 501 bp, synthetic construct; identical to SEQ ID NO: 76801
  misc_feature 1..501: note = Description of Artificial Sequence: Synthetic coding sequence
  source 1..501: mol_type = other DNA

SEQ ID NO: 76804 - DNA, 111 bp, synthetic construct
  misc_feature 1..111: note = Description of Artificial Sequence: Synthetic coding sequence
  source 1..111: mol_type = other DNA
atgagcaccgtgggcctgttccacttccccacccccctgaccagaatctgccccgccccctggggcctgagactgtgggagaagctgaccctgctgagccccggcatctag

SEQ ID NO: 76805 - DNA, 417 bp, synthetic construct
  misc_feature 1..417: note = Description of Artificial Sequence: Synthetic coding sequence
  source 1..417: mol_type = other DNA
atgagcaccgtgggcctgttccacttccccacccccctgaccagaatctgccccgccccctggggcctgagactgtgggagaagctgaccctgctgagccccggcatcgccgtgacccccgtgcagatggccggcaagaaggactaccccgccctgctgagcctggacgagaacgagctggaggagcagttcgtgaagggccacggccccggcggccaggccaccaacaagaccagcaactgcgtggtgctgaagcacatccccagcggcatcgtggtgaagtgccaccagaccagaagcgtggaccagaacagaaagctggccagaaagatcctgcaggagaaggtggacgtgttctacaacggcgagaacagccccgtgcacaaggagaagagagaggccgccaagaagaagtag

SEQ ID NO: 76806 - DNA, 291 bp, synthetic construct
  misc_feature 1..291: note = Description of Artificial Sequence: Synthetic coding sequence
  source 1..291: mol_type = other DNA
atgagcaccgtgggcctgttccacttccccacccccctgaccagaatctgccccgccccctggggcctgagactgtgggagaagctgaccctgctgagccccggcatcgccgtgacccccgtgcagatggccggcaagaaggactaccccgccctgctgagcctggacgagaacgagctggaggagcagttcgtgaagggccacggccccggcggccaggccaccaacaagaccagcaactgcgtggtgctgaagcacatccccagcggcatcgtggtgaaggtggactag

SEQ ID NO: 76807 - DNA, 423 bp, synthetic construct
  misc_feature 1..423: note = Description of Artificial Sequence: Synthetic coding sequence
  source 1..423: mol_type = other DNA
atgagcagattcctgaacgtgctgagaagctggctggtgatggtgagcatcatcgccatgggcaacaccctgcagagcttcagagaccacaccttcctgtacgagaagctgtacaccggcaagcccaacctggtgaacggcctgcaggccagaaccttcggcatctggaccctgctgagcagcgtgatcagatgcctgtgcgccatcgacatccacaacaagaccctgtaccacatcaccctgtggaccttcctgctggccctgggccacttcctgagcgagctgttcgtgtacggcaccgccgcccccaccatcggcgtgctggcccccctgatggtggccagcttcagcatcctgggcatgctggtgggcctgagatacctggaggtggagcccgtgagcagacagaagaagagaaactag

SEQ ID NO: 76808 - DNA, 1443 bp, synthetic construct
  misc_feature 1..1443: note = Description of Artificial Sequence: Synthetic coding sequence
  source 1..1443: mol_type = other DNA
atgaacagaaccaagggcgacgaggaggagtactggaacagcagcaagttcaaggccttcaccttcgacgacgaggacgacgagctgagccagctgaaggagagcaagagagccgtgaacagcctgagagacttcgtggacgacgacgacgacgacgacctggagagagtgagctggagcggcgagcccgtgggcagcatcagctggagcatcagagagaccgccggcaacagcggcagcacccacgagggcagagagcagctgaagagcagaaacagcttcagcagctacgcccagctgcccaagcccaccagcacctacagcctgagcagcttcttcagagccctgagcgacacccccgccaagagctacgcccccgagctgggcagacccaagggcgagtacagagactacagcaacgactggagccccagcgacaccgtgagaagactgagaaagggcaaggtgtgcagcctggagagattcagaagcctgcaggacaagctgcagctgctggaggaggccgtgagcatgcacgacggcaacgtgatcaccgccgtgctgatcttcctgaagagaaccctgagcaaggagatcctgttcagagagctggaggtgagacaggtggccctgagacacctgatccacttcctgaaggagatcggcgaccagaagctgctgctggacctgttcagattcctggacagaaccgaggagctggccctgagccactacagagagcacctgaacatccaggaccccgacaagagaaaggagttcctgaagacctgcgtgggcctgcccttcagcgccgaggacagcgcccacatccaggaccactacaccctgctggagagacagatcatcatcgaggccaacgacagacacctggagagcgccggccagaccgagatcttcagaaagcaccccagaaaggccagcatcctgaacatgcccctggtgaccaccctgttctacagctgcttctaccactacaccgaggccgagggcaccttcagcagccccgtgaacctgaagaagaccttcaagatccccgacaagcagtacgtgctgaccgccctggccgccagagccaagctgagagcctggaacgacgtggacgccctgttcaccaccaagaactggctgggctacaccaagaagagagcccccatcggcttccacagagtggtggagatcctgcacaagaacaacgcccccgtgcagatcctgcaggagtacgtgaacctggtggaggacgtggacaccaagctgaacctggccaccaagttcaagtgccacgacgtggtgatcgacacctacagagacctgaaggacagacagcagctgctggcctacagaagcaaggtggacaagggcagcgccgaggaggagaagatcgacgccctgctgagcagcagccagatcagatggaagaactag

SEQ ID NO: 76809 - DNA, 1482 bp, synthetic construct
  misc_feature 1..1482: note = Description of Artificial Sequence: Synthetic coding sequence
  source 1..1482: mol_type = other DNA
atgaacagaaccaagggcgacgaggaggagtactggaacagcagcaagttcaaggccttcaccttcgacgacgaggacgacgagctgagccagctgaaggagagcaagagagccgtgaacagcctgagagacttcgtggacgacgacgacgacgacgacctggagagagtgagctggagcggcgagcccgtgggcagcatcagctggagcatcagagagaccgccggcaacagcggcagcacccacgagggcagagagcagctgaagagcagaaacagcttcagcagctacgcccagctgcccaagcccaccagcacctacagcctgagcagcttcttcagaggcagaaccagacccggcagcttccagagcctgagcgacgccctgagcgacacccccgccaagagctacgcccccgagctgggcagacccaagggcgagtacagagactacagcaacgactggagccccagcgacaccgtgagaagactgagaaagggcaaggtgtgcagcctggagagattcagaagcctgcaggacaagctgcagctgctggaggaggccgtgagcatgcacgacggcaacgtgatcaccgccgtgctgatcttcctgaagagaaccctgagcaaggagatcctgttcagagagctggaggtgagacaggtggccctgagacacctgatccacttcctgaaggagatcggcgaccagaagctgctgctggacctgttcagattcctggacagaaccgaggagctggccctgagccactacagagagcacctgaacatccaggaccccgacaagagaaaggagttcctgaagacctgcgtgggcctgcccttcagcgccgaggacagcgcccacatccaggaccactacaccctgctggagagacagatcatcatcgaggccaacgacagacacctggagagcgccggccagaccgagatcttcagaaagcaccccagaaaggccagcatcctgaacatgcccctggtgaccaccctgttctacagctgcttctaccactacaccgaggccgagggcaccttcagcagccccgtgaacctgaagaagaccttcaagatccccgacaagcagtacgtgctgaccgccctggccgccagagccaagctgagagcctggaacgacgtggacgccctgttcaccaccaagaactggctgggctacaccaagaagagagcccccatcggcttccacagagtggtggagatcctgcacaagaacaacgcccccgtgcagatcctgcaggagtacgtgaacctggtggaggacgtggacaccaagctgaacctggccaccaagttcaagtgccacgacgtggtgatcgacacctacagagacctgaaggacagacagcagctgctggcctacagaagcaaggtggacaagggcagcgccgaggaggagaagatcgacgccctgctgagcagcagccagatcagatggaagaactag

SEQ ID NO: 76810 - DNA, 1335 bp, synthetic construct
  misc_feature 1..1335: note = Description of Artificial Sequence: Synthetic coding sequence
  source 1..1335: mol_type = other DNA
atgaacagaaccaagggcgacgaggaggagtactggaacagcagcaagttcaaggccttcaccttcgacgacgaggacgacgagctgagccagctgaaggagagcaagagagccgtgaacagcctgagagacttcgtggacgacgacgacgacgacgacctggagagagtgagctggagcggcgagcccgtgggcagcagaaccagacccggcagcttccagagcctgagcgacgccctgagcgacacccccgccaagagctacgcccccgagctgggcagacccaagggcgagtacagagactacagcaacgactggagccccagcgacaccgtgagaagactgagaaagggcaaggtgtgcagcctggagagattcagaagcctgcaggacaagctgcagctgctggaggaggccgtgagcatgcacgacggcaacgtgatcaccgccgtgctgatcttcctgaagagaaccctgagcaaggagatcctgttcagagagctggaggtgagacaggtggccctgagacacctgatccacttcctgaaggagatcggcgaccagaagctgctgctggacctgttcagattcctggacagaaccgaggagctggccctgagccactacagagagcacctgaacatccaggaccccgacaagagaaaggagttcctgaagacctgcgtgggcctgcccttcagcgccgaggacagcgcccacatccaggaccactacaccctgctggagagacagatcatcatcgaggccaacgacagacacctggagagcgccggccagaccgagatcttcagaaagcaccccagaaaggccagcatcctgaacatgcccctggtgaccaccctgttctacagctgcttctaccactacaccgaggccgagggcaccttcagcagccccgtgaacctgaagaagaccttcaagatccccgacaagcagtacgtgctgaccgccctggccgccagagccaagctgagagcctggaacgacgtggacgccctgttcaccaccaagaactggctgggctacaccaagaagagagcccccatcggcttccacagagtggtggagatcctgcacaagaacaacgcccccgtgcagatcctgcaggagtacgtgaacctggtggaggacgtggacaccaagctgaacctggccaccaagttcaagtgccacgacgtggtgatcgacacctacagagacctgaaggacagacagcagctgctggcctacagaagcaaggtggacaagggcagcgccgaggaggagaagatcgacgccctgctgagcagcagccagatcagatggaagaactag

SEQ ID NO: 76811 - DNA, 1482 bp, synthetic construct; identical to SEQ ID NO: 76809
  misc_feature 1..1482: note = Description of Artificial Sequence: Synthetic coding sequence
  source 1..1482: mol_type = other DNA

SEQ ID NO: 76812 - DNA, 1560 bp, synthetic construct
  misc_feature 1..1560: note = Description of Artificial Sequence: Synthetic coding sequence
  source 1..1560: mol_type = other DNA
atgaccaccggcctgatcctgttcttccagagcggcagacccctgggcgccggcgtgagactgggcctgggcctgagaatgaacagaaccaagggcgacgaggaggagtactggaacagcagcaagttcaaggccttcaccttcgacgacgaggacgacgagctgagccagctgaaggagagcaagagagccgtgaacagcctgagagacttcgtggacgacgacgacgacgacgacctggagagagtgagctggagcggcgagcccgtgggcagcatcagctggagcatcagagagaccgccggcaacagcggcagcacccacgagggcagagagcagctgaagagcagaaacagcttcagcagctacgcccagctgcccaagcccaccagcacctacagcctgagcagcttcttcagaggcagaaccagacccggcagcttccagagcctgagcgacgccctgagcgacacccccgccaagagctacgcccccgagctgggcagacccaagggcgagtacagagactacagcaacgactggagccccagcgacaccgtgagaagactgagaaagggcaaggtgtgcagcctggagagattcagaagcctgcaggacaagctgcagctgctggaggaggccgtgagcatgcacgacggcaacgtgatcaccgccgtgctgatcttcctgaagagaaccctgagcaaggagatcctgttcagagagctggaggtgagacaggtggccctgagacacctgatccacttcctgaaggagatcggcgaccagaagctgctgctggacctgttcagattcctggacagaaccgaggagctggccctgagccactacagagagcacctgaacatccaggaccccgacaagagaaaggagttcctgaagacctgcgtgggcctgcccttcagcgccgaggacagcgcccacatccaggaccactacaccctgctggagagacagatcatcatcgaggccaacgacagacacctggagagcgccggccagaccgagatcttcagaaagcaccccagaaaggccagcatcctgaacatgcccctggtgaccaccctgttctacagctgcttctaccactacaccgaggccgagggcaccttcagcagccccgtgaacctgaagaagaccttcaagatccccgacaagcagtacgtgctgaccgccctggccgccagagccaagctgagagcctggaacgacgtggacgccctgttcaccaccaagaactggctgggctacaccaagaagagagcccccatcggcttccacagagtggtggagatcctgcacaagaacaacgcccccgtgcagatcctgcaggagtacgtgaacctggtggaggacgtggacaccaagctgaacctggccaccaagttcaagtgccacgacgtggtgatcgacacctacagagacctgaaggacagacagcagctgctggcctacagaagcaaggtggacaagggcagcgccgaggaggagaagatcgacgccctgctgagcagcagccagatcagatggaagaactag

SEQ ID NO: 76813 - DNA, 138 bp, synthetic construct
  misc_feature 1..138: note = Description of Artificial Sequence: Synthetic coding sequence
  source 1..138: mol_type = other DNA
atgaacagaaccaagggcgacgaggaggagtactggaacagcagcaagttcaaggccttcaccttcgacgacgaggacgacgagctgagccagctgaaggagagcaagagagccgtgaacagcctgagagacttctag

SEQ ID NO: 76814 - DNA, 1482 bp, synthetic construct; identical to SEQ ID NO: 76809
  misc_feature 1..1482: note = Description of Artificial Sequence: Synthetic coding sequence
  source 1..1482: mol_type = other DNA

SEQ ID NO: 76815 - DNA, 735 bp, synthetic construct
  misc_feature 1..735: note = Description of Artificial Sequence: Synthetic coding sequence
  source 1..735: mol_type = other DNA
atgttcagaagaaagctgaccgccctggactaccacaaccccgccggcttcaactgcaaggacgagaccgagttcagaaacttcatcgtgtggctggaggaccagaagatcagacactacaagatcgaggacagaggcaacctgagaaacatccacagcagcgactggcccaagttcttcgagaagtacctgagagacgtgaactgccccttcaagatccaggacagacaggaggccatcgactggctgctgggcctggccgtgagactggagtacggcgacaacgccgagaagtacaaggacctggtgcccgacaacagcaagaccgccgacaacgccaccaagaacgccgagcccctgatcaacctggacgtgaacaaccccgacttcaaggccggcgtgatggccctggccaacctgctgcagatccagagacacgacgactacctggtgatgctgaaggccatcagaatcctggtgcaggagagactgacccaggacgccgtggccaaggccaaccagaccaaggagggcctgcccgtggccctggacaagcacatcctgggcttcgacaccggcgacgccgtgctgaacgaggccgcccagatcctgagactgctgcacatcgaggagctgagagagctgcagaccaagatcaacgaggccatcgtggccgtgcaggccatcatcgccgaccccaagaccgaccacagactgggcaaggtgggcagatag

SEQ ID NO: 76816 - DNA, 177 bp, synthetic construct
  misc_feature 1..177: note = Description of Artificial Sequence: Synthetic coding sequence
  source 1..177: mol_type = other DNA
atgctgcagagcatcatcaagaacatctggatccccatgaagccctactacaccaaggtgtaccaggagatctggatcggcatgggcctgatgggcttcatcgtgtacaagatcagagccgccgacaagagaagcaaggccctgaaggccagcgcccccgcccccggccaccactag

SEQ ID NO: 76817 - DNA, 228 bp, synthetic construct
  misc_feature 1..228: note = Description of Artificial Sequence: Synthetic coding sequence
  source 1..228: mol_type = other DNA
atgaagctgtacggcaccagaggcagcgacatcagccacttccagtgccagatgctgcagagcatcatcaagaacatctggatccccatgaagccctactacaccaaggtgtaccaggagatctggatcggcatgggcctgatgggcttcatcgtgtacaagatcagagccgccgacaagagaagcaaggccctgaaggccagcgcccccgcccccggccaccactag

SEQ ID NO: 76818 - DNA, 177 bp, synthetic construct; identical to SEQ ID NO: 76816
  misc_feature 1..177: note = Description of Artificial Sequence: Synthetic coding sequence
  source 1..177: mol_type = other DNA

SEQ ID NO: 76819 - DNA, 177 bp, synthetic construct; identical to SEQ ID NO: 76816
  misc_feature 1..177: note = Description of Artificial Sequence: Synthetic coding sequence
  source 1..177: mol_type = other DNA

SEQ ID NO: 76820 - DNA, 2928 bp, synthetic construct
  misc_feature 1..2928: note = Description of Artificial Sequence: Synthetic coding sequence
  source 1..2928: mol_type = other DNA
atgacccagcagccccaggacgacttcgacagaagcgtggaggacgcccaggcctggatgaaggccgtgcaggaccagctgcaggtgaacgacaacacccagggccccagagccgccctggaggccagactgtgggagaccgagaagatctgccagctggagcccgagggcagagtgagagtggacctggtgctgagaatggccgaggccctgctggcctgctgccccggcgaccagaagcccggcatcctggccagactgaaggacatcaaggcccagtgggaggagaccgtgacctacatgacccactgccacagcagaatcgagtgggtgtggctgcactggagcgagtacctgctggccagagacgagttctacagatggttccagaagatgatggtgaccctggagccccacatcgagctgcagctgggcctgaaggagaagcagtggcagctgagccacgcccaggtgctgctgcacaacgtggacaaccaggccgtgctgctggacagactgctggaggaggccgccagcctgttcaacagaatcggcgaccccagcgtggacgaggacgcccagaagagaatgaaggccgagtacgacgccgtgaaggccaaggcccagaagagagtggacctgctggagcaggtggccagagagcacgaggagtaccaggccggcgtggacgagttccagctgtggctgaaggccgtggtggagaaggtgaacggctgcctgggcagaaactgcaagctgcccatcacccagagactgagcaccctgcaggacatcgccaaggacttccccagaggcgaggagagcctggagaccctggaggagcagagcgccggcgtgatcagaaacaccagccccctgggcgccgagaagatcaccggcgagctggaggagatgagaaaggtgctggagaagctgagagccctgtgggaggaggaggaggagagactgagaggcctgctgagaagcagaggcgcctgggagcagcagatcaagcagctggaggccgagctgagcgagttcagaatggtgctgcagagactggcccaggagggcctgcagcccgccgccaaggccggcaccgaggacgagctggtggcccactggagaagatacagcgccaccagagccgccctggccagcgaggagcccagagtggacagactgcaggcccagctgaaggagctgatcgtgttcccccacaacctgaagcccctgagcgacagcgtgatcgccaccatccaggagtaccagagcctgaaggtgaagagcgccagactgagaaacgccgccgccgtggagctgtggcagcacttccagagacccctgcaggacctgcagctgtggaaggccctggcccagagactgctggaggtgaccgccagcctgcccgacctgcccagcctgcacaccttcctgccccagatcgaggccgccctgatggagagcagcagactgaaggagctgctgaccatgctgcagctgaagaaggacctgctgatcggcatcttcggccaggagagagccaccgccctgctggagcaggtggccggcagcatgagagacagagacctgctgcacaacagcctgctgcagagaaagagcaagctgcagagcctgctggcccagcacaaggacttcggcgccgccttcgagcccctgcagagaaagctgctggacctgcaggtgagagtgcaggccgagaagggcctgcagagagacctgcccggcaagcaggcccagctgagcagactgcagggcctgcaggaggagggcctggacctgggcgcccagatggaggccgccagacccctggtgcaggagaaccccaaccaccagcacaagatggaccagctgagcagcgacttccaggccctgcagagaagcctggaggacctggtggacagatgcagacagagcgtgcaggagcactgcaccttcagccaccagctgctggagctgagacagtggatcgtggtgaccacccagaagctggaggcccacagaggcgaggccggccccggcgacgccgagagccaggaggccgagttcgagagactggtggccgagttccccgagaaggaggcccagctgagcctggtggaggcccagggctggctggtgatggagaagagcagccccgagggcgccgccgtggtgcaggaggagctgagagagctggccgagagctggagagccctgagactgctggaggagagcctgctgagcctgatcagaaactggcacctgcagagaatggaggtggacagcggcaagaagatggtgttcaccaacaacatccccaagagcggcttcctgatcaaccccatggaccccatccccagacacagaagaagagccaacctgctgcaggaggaggagggcagccacgaggacttcagccagctgctgagaaacttcggccagtggctgcaggtggagaacagcaagctggtgagaatcatcgccatgagaaccagcaccgccgaggacctgagaaccagaaagagcaagctgcaggagctggaggccagagtgcccgagggccagcacctgttcgagaacctgctgagactgggccccgccagaggcaccagcgacgagctggaggacctgagataccagtggatgctgtacaagagcaagctgaaggacagcggccacctgctgacccagagcagccccggcgagcccaccggcttccagaagaccagaagatggagaggcctgggcagcctgttcagaagagcctgctgcgtggccctgcccctgcagctgctgctgctgctgttcctgctgctgctgttcctgctgcccatcagagaggaggacagaagctgcaccctggccaacaacttcgccagaagcttcaccctgatgctgagatacaacggccccccccccacctag

SEQ ID NO: 76821 - DNA, 1791 bp, synthetic construct
  misc_feature 1..1791: note = Description of Artificial Sequence: Synthetic coding sequence
  source 1..1791: mol_type = other DNA
atgacccagcagccccaggacgacttcgacagaagcgtggaggacgcccaggcctggatgaaggccgtgcaggaccagctgcaggtgaacgacaacacccagggccccagagccgccctggaggccagactgtgggagaccgagaagatctgccagctggagcccgagggcagagtgagagtggacctggtgctgagaatggccgaggccctgctggcctgctgccccggcgaccagaagcccggcatcctggccagactgaaggacatcaaggcccagtgggaggagaccgtgacctacatgacccactgccacagcagaatcgagtgggtgtggctgcactggagcgagtacctgctggccagagacgagttctacagatggttccagaagatgatggtgaccctggagccccacatcgagctgcagctgggcctgaaggagaagcagtggcagctgagccacgcccaggtgctgctgcacaacgtggacaaccaggccgtgctgctggacagactgctggaggaggccgccagcctgttcaacagaatcggcgaccccagcgtggacgaggacgcccagaagagaatgaaggccgagtacgacgccgtgaaggccaaggcccagaagagagtggacctgctggagcaggtggccagagagcacgaggagtaccaggccggcgtggacgagttccagctgtggctgaaggccgtggtggagaaggtgaacggctgcctgggcagaaactgcaagctgcccatcacccagagactgagcaccctgcaggacatcgccaaggacttccccagaggcgaggagagcctggagaccctggaggagcagagcgccggcgtgatcagaaacaccagccccctgggcgccgagaagatcaccggcgagctggaggagatgagaaaggtgctggagaagctgagagccctgtgggaggaggaggaggagagactgagaggcctgctgagaagcagaggcgcctgggagcagcagatcaagcagctggaggccgagctgagcgagttcagaatggtgctgcagagactggcccaggagggcctgcagcccgccgccaaggccggcaccgaggacgagctggtggcccactggagaagatacagcgccaccagagccgccctggccagcgaggagcccagagtggacagactgcaggcccagctgaaggagctgatcgtgttcccccacaacctgaagcccctgagcgacagcgtgatcgccaccatccaggagtaccagagcctgaaggtgaagagcgccagactgagaaacgccgccgccgtggagctgtggcagcacttccagagacccctgcaggacctgcagctgtggaaggccctggcccagagactgctggaggtgaccgccagcctgcccgacctgcccagcctgcacaccttcctgccccagatcgaggccgccctgatggagagcagcagactgaaggagctgctgaccatgctgcagctgaagaaggacctgctgatcggcatcttcggccaggagagagccaccgccctgctggagcaggtggccggcagcatgagagacagagacctgctgcacaacagcctgctgcagagaaagagcaagctgcagagcctgctggcccagcacaaggacttcggcgccgccttcgagcccctgcagagaaagctgctggacctgcaggtgagagtgcaggccgagaagggcctgcagagagacctgcccggcaagcaggcccagctgagcagactgcaggtgagaggcctgtag

SEQ ID NO: 76822 - DNA, 2913 bp, synthetic construct
  misc_feature 1..2913: note = Description of Artificial Sequence: Synthetic coding sequence
  source 1..2913: mol_type = other DNA
atgacccagcagccccaggacgacttcgacagaagcgtggaggacgcccaggcctggatgaaggccgtgcaggaccagctgcaggtgaacgacaacacccagggccccagagccgccctggaggccagactgtgggagaccgagaagatctgccagctggagcccgagggcagagtgagagtggacctggtgctgagaatggccgaggccctgctggcctgctgccccggcgaccagaagcccggcatcctggccagactgaaggacatcaaggcccagtgggaggagaccgtgacctacatgacccactgccacagcagaatcgagtgggtgtggctgcactggagcgagtacctgctggccagagacgagttctacagatggttccagaagatgatggtgaccctggagccccacatcgagctgcagctgggcctgaaggagaagcagtggcagctgagccacgcccaggtgctgctgcacaacgtggacaaccaggccgtgctgctggacagactgctggaggaggccgccagcctgttcaacagaatcggcgaccccagcgtggacgaggacgcccagaagagaatgaaggccgagtacgacgccgtgaaggccaaggcccagaagagagtggacctgctggagcaggtggccagagagcacgaggagtaccaggccggcgtggacgagttccagctgtggctgaaggccgtggtggagaaggtgaacggctgcctgggcagaaactgcaagctgcccatcacccagagactgagcaccctgcaggacatcgccaaggacttccccagaggcgaggagagcctggagaccctggaggagcagagcgccggcgtgatcagaaacaccagccccctgggcgccgagaagatcaccggcgagctggaggagatgagaaaggtgctggagaagctgagagccctgtgggaggaggaggaggagagactgagaggcctgctgagaagcagaggcgcctgggagcagcagatcaagcagctggaggccgagctgagcgagttcagaatggtgctgcagagactggcccaggagggcctgcagcccgccgccaaggccggcaccgaggacgagctggtggcccactggagaagatacagcgccaccagagccgccctggccagcgaggagcccagagtggacagactgcaggcccagctgaaggagctgatcgtgttcccccacaacctgaagcccctgagcgacagcgtgatcgccaccatccaggagtaccagagcctgaaggtgaagagcgccagactgagaaacgccgccgccgtggagctgtggcagcacttccagagacccctgcaggacctgcagctgtggaaggccctggcccagagactgctggaggtgaccgccagcctgcccgacctgcccagcctgcacaccttcctgccccagatcgaggccgccctgatggagagcagcagactgaaggagctgctgaccatgctgcagctgaagaaggacctgctgatcggcatcttcggccaggagagagccaccgccctgctggagcaggtggccggcagcatgagagacagagacctgctgcacaacagcctgctgcagagaaagagcaagctgcagagcctgctggcccagcacaaggacttcggcgccgccttcgagcccctgcagagaaagctgctggacctgcaggtgagagtgcaggccgagaagggcctgcagagagacctgcccggcaagcaggcccagctgagcagactgcagggcctgcaggaggagggcctggacctgggcgcccagatggaggccgccagacccctggtgcaggagaaccccaaccaccagcacaagatggaccagctgagcagcgacttccaggccctgcagagaagcctggaggacctggtggacagatgcagacagagcgtgcaggagcactgcaccttcagccaccagctgctggagctgagacagtggatcgtggtgaccacccagaagctggaggcccacagaggcgaggccggccccggcgacgccgagagccaggaggccgagttcgagagactggtggccgagttccccgagaaggaggcccagctgagcctggtggaggcccagggctggctggtgatggagaagagcagccccgagggcgccgccgtggtgcaggaggagctgagagagctggccgagagctggagagccctgagactgctggaggagagcctgctgagcctgatcagaaactggcacctgcagagaatggaggtggacagcggcaagaagatggtgttcaccaacaacatccccaagagcggcttcctgatcaaccccatggaccccatccccagacacagaagaagagaggaggagggcagccacgaggacttcagccagctgctgagaaacttcggccagtggctgcaggtggagaacagcaagctggtgagaatcatcgccatgagaaccagcaccgccgaggacctgagaaccagaaagagcaagctgcaggagctggaggccagagtgcccgagggccagcacctgttcgagaacctgctgagactgggccccgccagaggcaccagcgacgagctggaggacctgagataccagtggatgctgtacaagagcaagctgaaggacagcggccacctgctgacccagagcagccccggcgagcccaccggcttccagaagaccagaagatggagaggcctgggcagcctgttcagaagagcctgctgcgtggccctgcccctgcagctgctgctgctgctgttcctgctgctgctgttcctgctgcccatcagagaggaggacagaagctgcaccctggccaacaacttcgccagaagcttcaccctgatgctgagatacaacggccccccccccacctag

SEQ ID NO: 76823 - DNA, 3471 bp, synthetic construct
  misc_feature 1..3471: note = Description of Artificial Sequence: Synthetic coding sequence
  source 1..3471: mol_type = other DNA
atgggcaacctgctgagcaagttcagacccggctgcagaagaagacccctgcccggccccggcagaggcgcccccgcccccctgagcagagacgccagcccccccggcagagcccacagcgtgcccacccccagacccttcagaggcctgttcagaagaaacgccagaagaagacccagcgccgccagcatcttcgtggcccccaagagaccctgccccctgcccagagccgccgccgcccccctgggcgtgctgcccgccgtgggctggggcctggccatcagaaagacccccatgctgcccgccagaaacccccccagattcggccaccccagcagcgtgagaatccccccccccagcagaatgttcaccctgctgctgcccagccccagagagcccgccgtgaaggccagaaagcccatccccgccaccctgctggaggagaccgaggtgtgggcccaggagggccccagaagagtgaagaaggacgaggaccccgtgcagatcgagggcgaggacgacgagaagagaacccccctgagcagcggcgaggccagcagcaccagcagaagccagggcacccagggcgacgtggccagcttcagatgcagccccggccccctggagggcaacgtgtaccacaagttcagcgagaacagcatgagcgagaaggcccaggccagccccgccagcagctgcctggagggccccgccatgcccagcacccacagccaggccggctgcgccagacacctgggcaagcccgaccccgacgccaccgccccccccgagcccgccgtgggctgcagcctgctgcagcagaagctggccgccgaggtgctgaacgaggagcccccccccagcagcctgggcctgcccatccccctgatgagcggcaagagaatgcccgacgagaagcccttctgcatcccccccagaagcgccgccccccccagagccgccagaaacagaccctgcaagagaaagatgagcatccccctgctgctgcccctgccccccagcctgcccctgctgtgggacagaggcgagctgcccccccccgccaagctgccctgcctgagcgtggagggcgacctgcacaccctggagaagagccccgagtacaagagaaacagcagaatcctggaggacaagaccgagaccatgaccaacagcagcatcacccagcccgcccccagcttcagccagcccgtgcagaccaccgacagcctgcccctgaccacctacaccagccaggtgagcgcccccctgcccatccccgacctggccgacctggccaccggccccctgatcctgcccatcccccccctgagcaccacccccaagatggacgagaagatcgccttcaccatccccaacagccccctggccctgcccgccgacctggtgcccatcctgggcgaccagagcaacgagaagggcggcagctacaacagcgtggtgggcgccgcccccctgaccagcgacccccccaccccccccagcagcacccccagcttcaagccccccgtgaccagagagagccccatcagcatgtgcgtggacagccccccccccctgagcttcctgaccctgctgcccgtgcccagcaccggcaccagcgtgatcaccagcaagcccatgaacagcaccagcgtgatcagcaccgtgaccaccaacgccagcgcccacctgaccagccagaccgccgtggaccccgaggtggtgaacatggacaccaccgcccccagccaggtggtgatcttcaccagcagcctgagcagcagagtgagcagcctgcccaacagccagatccactgcagcgccgagcagagacaccccggcaagaccagcgtgtacaccagccccctgcccttcatcttccacaacaccacccccagcttcaaccagctgttcggcaaggaggccaccccccagcccaagttcgaggcccccgacggccagccccagaaggccagcctgcccagcgcctgcgtgttcctgagcctgcccatcatccccccccccgacaccagcaccctggtgaacagcgccagcaccgccagcagcagcaagccccccatcgagaccaacgccatgcacaccaccccccccagcaaggccgtgatcctgcagagcgccagcgtgagcaagaagtacctgcccttctacctgggcctgcccggcagcggcaacacccagcccagcggcaacaccgccagcgtgcagggcagcaccagcctgcccgcccagagcgtgagagcccccgccaccgccagcaaccaccccctgaaccccggcgccaccccccagcccaagttcggcgcccccgacggcccccagcagaagaccagcctgcccagcgcccacgacttcctgagcctgcccatcatggtgccccccgacaccagcaccctggtgagcagcgccagcgccgccagcctgagcaagcccgccatcgacaccagcgacatgaacaccaccccccccagcaagaccgtgatcctgcagagcaccttcgtgagcagaaaggaggagtacatcagattctacatgggcctgcccggcagcggcaacaccctgcacagcgacagcatcgccagcgcccaggtgagcaccagcttccccgcccaggccgacagaagacccaccaccaccagcagccaccccctgaacaccggcagcatcagccacagcaccctgggcgccaccgacggccagcagaagagcgacagcagcttcatcctgggcaaccccgccacccccgcccccgtgatcggcctgaccagccccagcgtgcagcccctgagcggcagcatcatcccccccggcttcgccgagctgaccagcccctacaccgccctgggcacccccgtgaacgccgagcccgtggagggccacaacgccagcgccttccccaacggcaccgccaagaccagcggcttcagaatcgccaccggcatgcccggcaccggcgacagcaccctgctggtgggcaacaccatccccggcccccaggtgatcatgggccccggcacccccatggacggcggcagcatcggcttcagcatgagcgcccccggccccagcagcaccagcggcgagctgaacatcggccagggccagagcggcacccccagcaccaccagcgtgttccccttcggccaggccgcctgggaccccaccggccacagcatggccgccgccccccagggcgccagcaacatccccgtgttcggctacaccagcgccgccgcctacatccccggcctggacccccccacccagaacagctgcagcggcatgggcggcgacggcaccagaagcatcgtgggcggcccctgcgtgcccgccttccagcagtgcatcctgcagcacacctggaccgagagaaagttctacaccagcagcacccactactacggccaggagacctacgtgagaagacacgtgtgcttccagctgccctag

SEQ ID NO: 76824 - DNA, 5733 bp, synthetic construct
  misc_feature 1..5733: note = Description of Artificial Sequence: Synthetic coding sequence
  source 1..5733: mol_type = other DNA
atggcctgctgccacaaggtgatgctgctgctggacaccgccggcggcgccgccagacacagcagagtgagaagagccgccctgagactgctgacctacctgagctgcagattcggcctggccagagtgcactgggccttcaagttcttcgacagccagggcgccagaagcagacccagcagagtgagcgacttcagagagctgggcagcagaagctgggaggacttcgaggaggagctggaggccagactggaggacagagcccacctgcccggccccgcccccagagccacccacacccacggcgccctgatggagaccctgctggactaccagtgggacagacccgagatcaccagccccaccaagcccatcctgagaagcagcggcagaagactgctggacgtggagagcgaggccaaggaggccgaggccgccctgggcggcctggtgaacgccgtgttcctgctggccccctgcccccacagccagagagagctgctgcagttcgtgagcggctgcgaggcccaggcccagagactgccccccacccccaagcaggtgatggagaagctgctgcccaagagagtgagagaggtgatggtggccagaaagatcaccttctactgggtggacaccaccgagtggagcaagctgtgggagagccccgaccacctgggctactggaccgtgtgcgagctgctgcaccacggcggcggcaccgtgctgcccagcgagagcttcagctgggacttcgcccaggccggcgagatgctgctgagaagcggcatcaagctgagcagcgagccccacctgagcccctggatcagcatgctgcccaccgacgccaccctgaacagactgctgtacaacagccccgagtacgaggccagcttccccagaatggagggcatgctgttcctgcccgtggaggccggcaaggagatccaggagacctggaccgtgaccctggagcccctggccatgcaccagagacacttccagaagcccgtgagaatcttcctgaagggcagcgtggcccagtggagcctgcccaccagcagcaccctgggcaccgacagctggatgctgggcagccccgaggagagcaccgccacccagagactgctgttccagcagctggtgagcagactgaccgccgaggagctgcacctggtggccgacgtggaccccggcgagggcagaccccccatcaccggcgtgatcagccccctgagcgccagcgccatgatcctgaccgtgtgcagaaccaaggaggccgagttccagagacacgtgctgcagaccgccgtggccgacagccccagagacaccgccagcctgttcagcgacgtggtggacagcatcctgaaccagacccacgacagcctggccgacaccgccagcgccgccagccccgtgcccgagtgggcccagcaggagctgggccacaccaccccctggagccccgccgtggtggagaagtggttccccttctgcaacatcagcggcgccagcagcgacctgatggagagcttcggcctgctgcaggccgccagcgccaacaaggaggagagcagcaagaccgagggcgagctgatccactgcctggccgagctgtaccagagaaagagcagagaggagagcaccatcgcccaccaggaggacagcaagaagaagagaggcgtgcccagaacccccgtgagacagaagatgaacaccatgtgcagaagcctgaagatgctgaacgtggccagactgaacgtgaaggcccagaagctgcaccccgacggcagccccgacgtggccggcgagaagggcatccagaagatccccagcggcagaaccgtggacaagctggaggacagaggcagaaccctgagaagcagcaagcccaaggacttcaagaccgaggaggagctgctgagctacatcagagagaactaccagaagaccgtggccaccggcgagatcatgctgtacgcctgcgccagaaacatgatcagcaccgtgaagatgttcctgaagagcaagggcaccaaggagctggaggtgaactgcctgaaccaggtgaagagcagcctgctgaagaccagcaagagcctgagacagaacctgggcaagaagctggacaaggaggacaaggtgagagagtgccagctgcaggtgttcctgagactggagatgtgcctgcagtgccccagcatcaacgagagcaccgacgacatggagcaggtggtggaggaggtgaccgacctgctgagaatggtgtgcctgaccgaggacagcgcctacctggccgagttcctggaggagatcctgagactgtacatcgacagcatccccaagaccctgggcaacctgtacaacagcctgggcttcgtgatcccccagaagctggccggcgtgctgcccaccgacttcttcagcgacgacagcatgacccaggagaacaagagccccctgctgagcgtgcccttcctgagcagcgccagaagaagcgtgagcggcagccccgagagcgacgagctgcaggagctgagaaccagaagcgccaagaagagaagaaagaacgccctgatcagacacaagagcatcgccgaggtgagccagaacctgagacagatcgagatccccaaggtgagcaagagagccaccaagaaggagaacagccaccccgccccccagcagcccagccagcccgtgaaggacaccgtgcaggaggtgaccaaggtgagaagaaacctgttcaaccaggagctgctgagccccagcaagagaagcctgaagagaggcctgcccagaagccacagcgtgagcgccgtggacggcctggaggacaagctggacaacttcaagaagaacaagggctaccacaagctgctgaccaagagcgtggccgagacccccgtgcacaagcagatcagcaagagactgctgcacagacagatcaagggcagaagcagcgaccccggccccgacatcggcgtggtggaggagagccccgagaagggcgacgagatcagcctgagaagaagccccagaatcaagcagctgagcttcagcagaacccacagcgccagcttctacagcgtgagccagcccaagagcagaagcgtgcagagagtgcacagcttccagcaggacaagagcgaccagagagagaacagccccgtgcagagcatcagaagccccaagagcctgctgttcggcgccatgagcgagatgatcagccccagcgagaagggcagcgccagaatgaagaagagaagcagaaacaccctggacagcgaggtgcccgccgcctaccagacccccaagaagagccaccagaagagcctgagcttcagcaagaccacccccagaagaatcagccacaccccccagacccccctgtacacccccgagagactgcagaagagccccgccaagatgacccccaccaagcaggccgccttcaaggagagcctgaaggacagcagcagccccggccacgacagccccctggacagcaagatcaccccccagaagagacacacccaggccggcgagggcaccagcctggagaccaagacccccagaacccccaagagacagggcacccagccccccggcttcctgcccaactgcacctggccccacagcgtgaacagcagccccgagagccccagctgccccgccccccccaccagcagcaccgcccagcccagaagagagtgcctgacccccatcagagaccccctgagaaccccccccagagccgccgccttcatgggcaccccccagaaccagacccaccagcagccccacgtgctgagagccgccagagccgaggagcccgcccagaagctgaaggacaaggccatcaagacccccaagagacccggcaacagcaccgtgaccagcagcccccccgtgacccccaagaagctgttcaccagccccctgtgcgacgtgagcaagaagagccccttcagaaagagcaagatcgagtgccccagccccggcgagctggaccagaaggagccccagatgagccccagcgtggccgccagcctgagctgccccgtgcccagcaccccccccgagctgagccagagagccaccctggacaccgtgcccccccccccccccagcaaggtgggcaagagatgcagaaagaccagcgaccccagaagaagcatcgtggagtgccagcccgacgccagcgccacccccggcgtgggcaccgccgacagccccgccgcccccaccgacagcagagacgaccagaagggcctgagcctgagcccccagagcccccccgagagaagaggctaccccggccccggcctgagaagcgactggcacgccagcagccccctgctgatcaccagcgacaccgagcacgtgaccctgctgagcgaggccgagcaccacggcatcggcgacctgaagagcaacgtgctgagcgtggaggagggcgagggcctgagaaccgccgacgccgagaagagcagcctgagccaccccggcatcccccccagcccccccagctgcggccccggcagccccctgatgcccagcagagacgtgcactgcaccaccgacggcagacagtgccaggccagcgcccagctggacaacctgcccgccagcgcctggcacagcaccgacagcgccagcccccagacctacgaggtggagctggagatgcaggccagcggcctgcccaagctgagaatcaagaagatcgaccccagcagcagcctggaggccgagcccctgagcaaggaggagagcagcctgggcgaggagagcttcctgcccgccctgagcatgcccagagccagcagaagcctgagcaagcccgagcccacctacgtgagccccccctgccccagactgagccacagcacccccggcaagagcagaggccagacctacatctgccaggcctgcacccccacccacggccccagcagcacccccagccccttccagaccgacggcgtgccctggacccccagccccaagcacagcggcaagaccacccccgacatcatcaaggactggcccagaagaaagagagccgtgggctgcggcgccggcagcagcagcggcagaggcgaggtgggcgccgacctgcccggcagcctgagcctgctggagagcgagggcaaggaccacggcctggagctgagcatccacagaacccccatcctggaggacttcgagctggagggcgtgtgccagctgcccgaccagagcccccccagaaacagcatgcccaaggccgaggaggccagcagctggggccagttcggcctgagcagcagaaagagagtgctgctggccaaggaggaggccgacagaggcgccaagagaatctgcgacctgagagaggacagcgaggtgagcaagagcaaggagggcagccccagctggagcgcctggcagctgcccagcaccggcgacgaggaggtgttcgtgagcggcagcacccccccccccagctgcgccgtgagaagctgcctgagcgccagcgccctgcaggccctgacccagagccccctgctgttccagggcaagacccccagcagccagagcaaggaccccagagacgaggacgtggacgtgctgcccagcaccgtggaggacagccccttcagcagagccttcagcagaagaagacccatcagcagaacctacaccagaaagaagctgatgggcacctggctggaggacctgtag

SEQ ID NO: 76825 - DNA, 354 bp, synthetic construct
  misc_feature 1..354: note = Description of Artificial Sequence: Synthetic coding sequence
  source 1..354: mol_type = other DNA
atgaagctgagcagcgccgccggccaggagagccccggccacccccaccccagcccccccgcctggaccctgaagaagcccagcgagagcgtggcccagagagccatgtgcagcgccagagcctgccccgtggcctgccccgtgggctgccccatcgcctgccccgtgagctgccccgtggcctgccccgtgggctgccccgtgggcagcatggccaccgccccccagggcctgagcccccaggagtgggaggccgacagagagaccggcagcagcagccacgccggcaccacccagtgcagcatccacagccccagcagcagcagcagacacctgagcagaacccagacctag

SEQ ID NO: 76826 - DNA, 627 bp, synthetic construct; identical to SEQ ID NO: 76163
  misc_feature 1..627: note = Description of Artificial Sequence: Synthetic coding sequence
  source 1..627: mol_type = other DNA

SEQ ID NO: 76827 - DNA, 765 bp, synthetic construct
  misc_feature 1..765: note = Description of Artificial Sequence: Synthetic coding sequence
  source 1..765: mol_type = other DNA
atgagcctggccagaggccacggcgacaccgccgccagcaccgccgcccccctgagcgaggagggcgaggtgaccagcggcctgcaggccctggccgtggaggacaccggcggccccagcgccagcgccggcaaggccgaggacgagggcgagggcggcagagaggagaccgagagagagggcagcggcggcgaggaggcccagggcgaggtgcccagcgccggcggcgaggagcccgccgaggaggacagcgaggactggtgcgtgccctgcagcgacgaggaggtggagctgcccgccgacggccagccctggatgcccccccccagcgagatccagagactgtacgagctgctggccgcccacggcaccctggagctgcaggccgagatcctgcccagaagaccccccacccccgaggcccagagcgaggaggagagaagcgacgaggagcccgaggccaaggaggaggaggaggagaagccccacatgcccaccgagttcgacttcgacgacgagcccgtgacccccaaggacagcctgatcgacagaagaagaacccccggcagcagcgccagaagccagaagagagaggccagactggacaaggtgctgagcgacatgaagagacacaagaagctggaggagcagatcctgagaaccggcagagacctgttcagcctggacagcgaggaccccagccccgccagcccccccctgagaagcagcggcagcagcctgttccccagacagagaaagtactag

SEQ ID NO: 76828 - DNA, 2010 bp, synthetic construct
  misc_feature 1..2010: note = Description of Artificial Sequence: Synthetic coding sequence
  source 1..2010: mol_type = other DNA
atgggcagcgaccccagcgcccccggcagacccggctggaccggcagcctgctgggcgacagagaggaggccgccagacccagactgctgcccctgctgctggtgctgctgggctgcctgggcctgggcgtggccgccgaggacgccgaggtgcacgccgagaactggctgagactgtacggctacctgccccagcccagcagacacatgagcaccatgagaagcgcccagatcctggccagcgccctggccgagatgcagagattctacggcatccccgtgaccggcgtgctggacgaggagaccaaggagtggatgaagagacccagatgcggcgtgcccgaccagttcggcgtgagagtgaaggccaacctgagaagaagaagaaagagatacgccctgaccggcagaaagtggaacaaccaccacctgaccttcagcatccagaactacaccgagaagctgggctggtaccacagcatggaggccgtgagaagagccttcagagtgtgggagcaggccacccccctggtgttccaggaggtgccctacgaggacatcagactgagaagacagaaggaggccgacatcatggtgctgttcgccagcggcttccacggcgacagcagccccttcgacggcaccggcggcttcctggcccacgcctacttccccggccccggcctgggcggcgacacccacttcgacgccgacgagccctggaccttcagcagcaccgacctgcacggcaacaacctgttcctggtggccgtgcacgagctgggccacgccctgggcctggagcacagcagcaaccccaacgccatcatggcccccttctaccagtggaaggacgtggacaacttcaagctgcccgaggacgacctgagaggcatccagcagctgtacggcacccccgacggccagccccagcccacccagcccctgcccaccgtgacccccagaagacccggcagacccgaccacagaccccccagacccccccagccccccccccccggcggcaagcccgagagaccccccaagcccggcccccccgtgcagcccagagccaccgagagacccgaccagtacggccccaacatctgcgacggcgacttcgacaccgtggccatgctgagaggcgagatgttcgtgttcaagggcagatggttctggagagtgagacacaacagagtgctggacaactaccccatgcccatcggccacttctggagaggcctgcccggcgacatcagcgccgcctacgagagacaggacggcagattcgtgttcttcaagggcgacagatactggctgttcagagaggccaacctggagcccggctacccccagcccctgaccagctacggcctgggcatcccctacgacagaatcgacaccgccatctggtgggagcccaccggccacaccttcttcttccaggaggacagatactggagattcaacgaggagacccagagaggcgaccccggctaccccaagcccatcagcgtgtggcagggcatccccgccagccccaagggcgccttcctgagcaacgacgccgcctacacctacttctacaagggcaccaagtactggaagttcgacaacgagagactgagaatggagcccggctaccccaagagcatcctgagagacttcatgggctgccaggagcacgtggagcccggccccagatggcccgacgtggccagaccccccttcaacccccacggcggcgccgagcccggcgccgacagcgccgagggcgacgtgggcgacggcgacggcgacttcggcgccggcgtgaacaaggacggcggcagcagagtggtggtgcagatggaggaggtggccagaaccgtgaacgtggtgatggtgctggtgcccctgctgctgctgctgtgcgtgctgggcctgacctacgccctggtgcagatgcagagaaagggcgcccccagagtgctgctgtactgcaagagaagcctgcaggagtgggtgtag

SEQ ID NO: 76829 - DNA, 561 bp, synthetic construct
  misc_feature 1..561: note = Description of Artificial Sequence: Synthetic coding sequence
  source 1..561: mol_type = other DNA
atgagcgccgcccccctggtgggctacagcagcagcggcagcgaggacgagagcgaggacggcatgagaaccagacccggcgacggcagccacagaagaggccagagccccctgcccagacagagattccccgtgcccgacagcgtgctgaacatgttccccggcaccgaggagggccccgaggacgacagcaccaagcacggcggcagagtgagaaccttcccccacgagagaggcaactgggccacccacgtgtacgtgccctacgaggccaaggaggagttcctggacctgctggacgtgctgctgccccacgcccagacctacgtgcccagactggtgagaatgaaggtgttccacctgagcctgagccagagcgtggtgctgagacaccactggatcctgcccttcgtgcaggccctgaaggccagaatgaccagcttccacagcccccaccccggcccccactgcctgatcggcaccaaggacgcccccgtgacccaggagatccccaaggacctgggcgccctgagacaggagcccggcagccagaccagatag

SEQ ID NO: 76830 - DNA, 744 bp, synthetic construct
  misc_feature 1..744: note = Description of Artificial Sequence: Synthetic coding sequence
  source 1..744: mol_type = other DNA
atgagcgccgcccccctggtgggctacagcagcagcggcagcgaggacgagagcgaggacggcatgagaaccagacccggcgacggcagccacagaagaggccagagccccctgcccagacagagattccccgtgcccgacagcgtgctgaacatgttccccggcaccgaggagggccccgaggacgacagcaccaagcacggcggcagagtgagaaccttcccccacgagagaggcaactgggccacccacgtgtacgtgccctacgaggccaaggaggagttcctggacctgctggacgtgctgctgccccacgcccagacctacgtgcccagactggtgagaatgaaggtgttccacctgagcctgagccagagcgtggtgctgagacaccactggatcctgcccttcgtgcaggccctgaaggccagaatgaccagcttccacagaaccttcatcggcctggaggtgaccagcggccacgcccagttcctggacctggtgagcgaggtggacagagtgatggaggagttcaacctgaccaccttctaccaggaccccagcttccacctgagcctggcctggtgcgtgggcgacgccagactgcagctggagggccagtgcctgcaggagctgcaggccatcgtggacggcttcgaggacgccgaggtgctgctgagagtgcacaccgagcaggtgagatgcaagagcggcaacaagttcttcagcatgcccctgaagtag

SEQ ID NO: 76831 - DNA, 642 bp, synthetic construct
  misc_feature 1..642: note = Description of Artificial Sequence: Synthetic coding sequence
  source 1..642: mol_type = other DNA
atgagccccctgcccagacagagattccccgtgcccgacagcgtgctgaacatgttccccggcaccgaggagggccccgaggacgacagcaccaagcacggcggcagagtgagaaccttcccccacgagagaggcaactgggccacccacgtgtacgtgccctacgaggccaaggaggagttcctggacctgctggacgtgctgctgccccacgcccagagcgtggtgctgagacaccactggatcctgcccttcgtgcaggccctgaaggccagaatgaccagcttccacagattcttcttcaccgccaaccaggtgaagatctacaccaaccaggagaagaccagaaccttcatcggcctggaggtgaccagcggccacgcccagttcctggacctggtgagcgaggtggacagagtgatggaggagttcaacctgaccaccttctaccaggaccccagcttccacctgagcctggcctggtgcgtgggcgacgccagactgcagctggagggccagtgcctgcaggagctgcaggccatcgtggacggcttcgaggacgccgaggtgctgctgagagtgcacaccgagcaggtgagatgcaagagcggcaacaagttcttcagcatgcccctgaagtag

SEQ ID NO: 76832 - DNA, 1683 bp, synthetic construct
  misc_feature 1..1683: note = Description of Artificial Sequence: Synthetic coding sequence
  source 1..1683: mol_type = other DNA
atgggcagcaccgacagcaagctgaacttcagaaaggccgtgatccagctgaccaccaagacccagcccgtggaggccaccgacgacgcctacgaccccgtgggctacggcatcccctacaaccacctgctgttcagcgactacagagagcccctggtggaggaggccgcccaggtgctgatcgtgaccctggaccacgacagcgccagcagcgccagccccaccgtggacggcaccaccaccggcaccgccatggacgacgccgacccccccggccccgagaacctgttcgtgaactacctgagcagaatccacagagaggaggacttccagttcatcctgaagggcatcgccagactgctgagcaaccccctgctgcagacctacctgcccaacagcaccaagaagatccagttccaccaggagctgctggtgctgttctggaagctgtgcgacttcaacaagaagttcctgttcttcgtgctgaagagcagcgacgtgctggacatcctggtgcccatcctgttcttcctgaacgacgccagagccgaccagagcagagtgggcctgatgcacatcggcgtgttcatcctgctgctgctgagcggcgagagaaacttcggcgtgagactgaacaagccctacagcatcagagtgcccatggacatccccgtgttcaccggcacccacgccgacctgctgatcgtggtgttccacaagatcatcaccagcggccaccagagactgcagcccctgttcgactgcctgctgaccatcgtggtgaacgtgagcccctacctgaagagcctgagcatggtgaccgccaacaagctgctgcacctgctggaggccttcagcaccacctggttcctgttcagcgccgcccagaaccaccacctggtgttcttcctgctggaggtgttcaacaacatcatccagtaccagttcgacggcaacagcaacctggtgtacgccatcatcagaaagagaagcatcttccaccagctggccaacctgcccaccgacccccccaccatccacaaggccctgcagagaagaagaagaacccccgagcccctgagcagaaccggcagccaggagggcaccagcatggagggcagcagacccgccgcccccgccgagcccggcaccctgaagaccagcctggtggccacccccggcatcgacaagctgaccgagaagagccaggtgagcgaggacggcaccctgagaagcctggagcccgagccccagcagagcctggaggacggcagccccgccaagggcgagcccagccaggcctggagagagcagagaagacccagcaccagcagcgccagcggccagtggagccccacccccgagtgggtgctgagctggaagagcaagctgcccctgcagaccatcatgagactgctgcaggtgctggtgccccaggtggagaagatctgcatcgacaagggcctgaccgacgagagcgagatcctgagattcctgcagcacggcaccctggtgggcctgctgcccgtgccccaccccatcctgatcagaaagtaccaggccaacagcggcaccgccatgtggttcagaacctacatgtggggcgtgatctacctgagaaacgtggacccccccgtgtggtacgacaccgacgtgaagctgttcgagatccagagagtgtag

SEQ ID NO: 76833 - DNA, 2367 bp, synthetic construct
  misc_feature 1..2367: note = Description of Artificial Sequence: Synthetic coding sequence
  source 1..2367: mol_type = other DNA
atgggcagcaccgacagcaagctgaacttcagaaaggccgtgatccagctgaccaccaagacccagcccgtggaggccaccgacgacgccttctgggaccagttctgggccgacaccgccaccagcgtgcaggacgtgttcgccctggtgcccgccgccgagatcagagccgtgagagaggagagccccagcaacctggccaccctgtgctacaaggccgtggagaagctggtgcagggcgccgagagcggctgccacagcgagaaggagaagcagatcgtgctgaactgcagcagactgctgaccagagtgctgccctacatcttcgaggaccccgactggagaggcttcttctggagcaccgtgcccggcgccggcagaggcggccagggcgaggaggacgacgagcacgccagacccctggccgagagcctgctgctggccatcgccgacctgctgttctgccccgacttcaccgtgcagagccacagaagaagcaccgtggacagcgccgaggacgtgcacagcctggacagctgcgagtacatctgggaggccggcgtgggcttcgcccacagcccccagcccaactacatccacgacatgaacagaatggagctgctgaagctgctgctgacctgcttcagcgaggccatgtacctgccccccgcccccgagagcggcagcaccaacccctgggtgcagttcttctgcagcaccgagaacagacacgccctgcccctgttcaccagcctgctgaacaccgtgtgcgcctacgaccccgtgggctacggcatcccctacaaccacctgctgttcagcgactacagagagcccctggtggaggaggccgcccaggtgctgatcgtgaccctggaccacgacagcgccagcagcgccagccccaccgtggacggcaccaccaccggcaccgccatggacgacgccgacccccccggccccgagaacctgttcgtgaactacctgagcagaatccacagagaggaggacttccagttcatcctgaagggcatcgccagactgctgagcaaccccctgctgcagacctacctgcccaacagcaccaagaagatccagttccaccaggagctgctggtgctgttctggaagctgtgcgacttcaacaagaagttcctgttcttcgtgctgaagagcagcgacgtgctggacatcctggtgcccatcctgttcttcctgaacgacgccagagccgaccagagcagagtgggcctgatgcacatcggcgtgttcatcctgctgctgctgagcggcgagagaaacttcggcgtgagactgaacaagccctacagcatcagagtgcccatggacatccccgtgttcaccggcacccacgccgacctgctgatcgtggtgttccacaagatcatcaccagcggccaccagagactgcagcccctgttcgactgcctgctgaccatcgtggtgaacgtgagcccctacctgaagagcctgagcatggtgaccgccaacaagctgctgcacctgctggaggccttcagcaccacctggttcctgttcagcgccgcccagaaccaccacctggtgttcttcctgctggaggtgttcaacaacatcatccagtaccagttcgacggcaacagcaacctggtgtacgccatcatcagaaagagaagcatcttccaccagctggccaacctgcccaccgacccccccaccatccacaaggccctgcagagaagaagaagaacccccgagcccctgagcagaaccggcagccaggagggcaccagcatggagggcagcagacccgccgcccccgccgagcccggcaccctgaagaccagcctggtggccacccccggcatcgacaagctgaccgagaagagccaggtgagcgaggacggcaccctgagaagcctggagcccgagccccagcagagcctggaggacggcagccccgccaagggcgagcccagccaggcctggagagagcagagaagacccagcaccagcagcgccagcggccagtggagccccacccccgagtgggtgctgagctggaagagcaagctgcccctgcagaccatcatgagactgctgcaggtgctggtgccccaggtggagaagatctgcatcgacaagggcctgaccgacgagagcgagatcctgagattcctgcagcacggcaccctggtgggcctgctgcccgtgccccaccccatcctgatcagaaagtaccaggccaacagcggcaccgccatgtggttcagaacctacatgtggggcgtgatctacctgagaaacgtggacccccccgtgtggtacgacaccgacgtgaagctgttcgagatccagagagtgtag

SEQ ID NO: 76834 - DNA, 810 bp, synthetic construct
  misc_feature 1..810: note = Description of Artificial Sequence: Synthetic coding sequence
  source 1..810: mol_type = other DNA
atgagcagcgaccacctgaacaacagcaccctgaaggaggcccagttcaaggacctgttcctgaagaaggccgagctggagttcgcccagatcatcatcatcgtggtggtggtgaccgtgatggtggtggtgatcgtgtgcctgctgaaccactacaaggtgagcaccagaagcttcatcaacagacccaaccagagcagaagaagagaggacggcctgccccaggagggctgcctgtggcccagcgacagcgccgcccccagactgggcgccagcgagatcatgcacgcccccagaagcagagacagattcaccgcccccagcttcatccagagagacagattcagcagattccagcccacctacccctacgtgcagcacgagatcgacctgccccccaccatcagcctgagcgacggcgaggagccccccccctaccagggcccctgcaccctgcagctgagagaccccgagcagcagatggagctgaacagagagagcgtgagagccccccccaacagaaccatcttcgacagcgacctgatcgacatcgccatgtacagcggcggcccctgcccccccagcagcaacagcggcatcagcgccagcacctgcagcagcaacggcagaatggagggccccccccccacctacagcgaggtgatgggccaccaccccggcgccagcttcctgcaccaccagagaagcaacgcccacagaggcagcagactgcagttccagcagaacaacgccgagagcaccatcgtgcccatcaagggcaaggacagaaagcccggcaacctggtgtag

SEQ ID NO: 76835 - DNA, 921 bp, synthetic construct
  misc_feature 1..921: note = Description of Artificial Sequence: Synthetic coding sequence
  source 1..921: mol_type = other DNA
atgcccgaggccggcttccaggccaccaacgccttcaccgagtgcaagttcacctgcaccagcggcaagtgcctgtacctgggcagcctggtgtgcaaccagcagaacgactgcggcgacaacagcgacgaggagaactgcctgctggtgaccgagcaccccccccccggcatcttcaacagcgagctggagttcgcccagatcatcatcatcgtggtggtggtgaccgtgatggtggtggtgatcgtgtgcctgctgaaccactacaaggtgagcaccagaagcttcatcaacagacccaaccagagcagaagaagagaggacggcctgccccaggagggctgcctgtggcccagcgacagcgccgcccccagactgggcgccagcgagatcatgcacgcccccagaagcagagacagattcaccgcccccagcttcatccagagagacagattcagcagattccagcccacctacccctacgtgcagcacgagatcgacctgccccccaccatcagcctgagcgacggcgaggagccccccccctaccagggcccctgcaccctgcagctgagagaccccgagcagcagatggagctgaacagagagagcgtgagagccccccccaacagaaccatcttcgacagcgacctgatcgacatcgccatgtacagcggcggcccctgcccccccagcagcaacagcggcatcagcgccagcacctgcagcagcaacggcagaatggagggccccccccccacctacagcgaggtgatgggccaccaccccggcgccagcttcctgcaccaccagagaagcaacgcccacagaggcagcagactgcagttccagcagaacaacgccgagagcaccatcgtgcccatcaagggcaaggacagaaagcccggcaacctggtgtag

SEQ ID NO: 76836 - DNA, 747 bp, synthetic construct
  misc_feature 1..747: note = Description of Artificial Sequence: Synthetic coding sequence
  source 1..747: mol_type = other DNA
atggccgccgagctggagttcgcccagatcatcatcatcgtggtggtggtgaccgtgatggtggtggtgatcgtgtgcctgctgaaccactacaaggtgagcaccagaagcttcatcaacagacccaaccagagcagaagaagagaggacggcctgccccaggagggctgcctgtggcccagcgacagcgccgcccccagactgggcgccagcgagatcatgcacgcccccagaagcagagacagattcaccgcccccagcttcatccagagagacagattcagcagattccagcccacctacccctacgtgcagcacgagatcgacctgccccccaccatcagcctgagcgacggcgaggagccccccccctaccagggcccctgcaccctgcagctgagagaccccgagcagcagatggagctgaacagagagagcgtgagagccccccccaacagaaccatcttcgacagcgacctgatcgacatcgccatgtacagcggcggcccctgcccccccagcagcaacagcggcatcagcgccagcacctgcagcagcaacggcagaatggagggccccccccccacctacagcgaggtgatgggccaccaccccggcgccagcttcctgcaccaccagagaagcaacgcccacagaggcagcagactgcagttccagcagaacaacgccgagagcaccatcgtgcccatcaagggcaaggacagaaagcccggcaacctggtgtag

SEQ ID NO: 76837 - DNA, 756 bp, synthetic construct
  misc_feature 1..756: note = Description of Artificial Sequence: Synthetic coding sequence
  source 1..756: mol_type = other DNA
atgagcagcgaccacctgaacaacagcaccctgaaggaggcccagttcaaggacctgttcctgaagaaggccgagctggagttcgcccagatcatcatcatcgtggtggtggtgaccgtgatggtggtggtgatcgtgtgcctgctgaaccactacaaggtgagcaccagaagcttcatcaacagacccaaccagagcagaagaagagaggacggcctgccccagatcatgcacgcccccagaagcagagacagattcaccgcccccagcttcatccagagagacagattcagcagattccagcccacctacccctacgtgcagcacgagatcgacctgccccccaccatcagcctgagcgacggcgaggagccccccccctaccagggcccctgcaccctgcagctgagagaccccgagcagcagatggagctgaacagagagagcgtgagagccccccccaacagaaccatcttcgacagcgacctgatcgacatcgccatgtacagcggcggcccctgcccccccagcagcaacagcggcatcagcgccagcacctgcagcagcaacggcagaatggagggccccccccccacctacagcgaggtgatgggccaccaccccggcgccagcttcctgcaccaccagagaagcaacgcccacagaggcagcagactgcagttccagcagaacaacgccgagagcaccatcgtgcccatcaagggcaaggacagaaagcccggcaacctggtgtag

SEQ ID NO: 76838 - DNA, 867 bp, synthetic construct
  misc_feature 1..867: note = Description of Artificial Sequence: Synthetic coding sequence
  source 1..867: mol_type = other DNA
atgcccgaggccggcttccaggccaccaacgccttcaccgagtgcaagttcacctgcaccagcggcaagtgcctgtacctgggcagcctggtgtgcaaccagcagaacgactgcggcgacaacagcgacgaggagaactgcctgctggtgaccgagcaccccccccccggcatcttcaacagcgagctggagttcgcccagatcatcatcatcgtggtggtggtgaccgtgatggtggtggtgatcgtgtgcctgctgaaccactacaaggtgagcaccagaagcttcatcaacagacccaaccagagcagaagaagagaggacggcctgccccagatcatgcacgcccccagaagcagagacagattcaccgcccccagcttcatccagagagacagattcagcagattccagcccacctacccctacgtgcagcacgagatcgacctgccccccaccatcagcctgagcgacggcgaggagccccccccctaccagggcccctgcaccctgcagctgagagaccccgagcagcagatggagctgaacagagagagcgtgagagccccccccaacagaaccatcttcgacagcgacctgatcgacatcgccatgtacagcggcggcccctgcccccccagcagcaacagcggcatcagcgccagcacctgcagcagcaacggcagaatggagggccccccccccacctacagcgaggtgatgggccaccaccccggcgccagcttcctgcaccaccagagaagcaacgcccacagaggcagcagactgcagttccagcagaacaacgccgagagcaccatcgtgcccatcaagggcaaggacagaaagcccggcaacctggtgtag

SEQ ID NO: 76839 - DNA, 693 bp, synthetic construct
  misc_feature 1..693: note = Description of Artificial Sequence: Synthetic coding sequence
  source 1..693: mol_type = other DNA
atggccgccgagctggagttcgcccagatcatcatcatcgtggtggtggtgaccgtgatggtggtggtgatcgtgtgcctgctgaaccactacaaggtgagcaccagaagcttcatcaacagacccaaccagagcagaagaagagaggacggcctgccccagatcatgcacgcccccagaagcagagacagattcaccgcccccagcttcatccagagagacagattcagcagattccagcccacctacccctacgtgcagcacgagatcgacctgccccccaccatcagcctgagcgacggcgaggagccccccccctaccagggcccctgcaccctgcagctgagagaccccgagcagcagatggagctgaacagagagagcgtgagagccccccccaacagaaccatcttcgacagcgacctgatcgacatcgccatgtacagcggcggcccctgcccccccagcagcaacagcggcatcagcgccagcacctgcagcagcaacggcagaatggagggccccccccccacctacagcgaggtgatgggccaccaccccggcgccagcttcctgcaccaccagagaagcaacgcccacagaggcagcagactgcagttccagcagaacaacgccgagagcaccatcgtgcccatcaagggcaaggacagaaagcccggcaacctggtgtag

SEQ ID NO: 76840 - DNA, 1119 bp, synthetic construct
  misc_feature 1..1119: note = Description of Artificial Sequence: Synthetic coding sequence
  source 1..1119: mol_type = other DNA
atggccaagagcaagaccaagcacagactgtgcagccaggagagcagcgtgagcgccctgctggccagctgcaccctgagcggcagcaacagcagcaacagcgacggcagcttccactacaaggacaagctgtacagaagcgccagccaggccctgcaggcctacatcgacgacttcgacctgggccagatctaccccggcgccagcaccggcaagatcaacatcgacgaggacttcaccaacatgagccagttctgcaactacatctacaagcccaacaacgccttcgagaacctggaccacaagaagcacagcaacttcatcagctgcagaagacacaccgtgaacgacatcgacagcatgagcctgaccaccgacgacctgctgagactgcccgccgacggcagcttcagctacacctacgtgggccccagccacagaaccagcaagaagaacaagaagtgcagaggcagactgggcagcctggacatcgagaagaacccccacttccagggcccctacaccagcatgggcaaggacaacttcgtgacccccgtgatcagaagcaacatcaacggcaagcagtgcggcgacaagatcgagctgctgatcctgaaggccaagagaaacctggagcagtgcaccgaggagctgcccaagagcatgaagaaggacgacagcccctgcagcctggacaagctggaggccgacagaagctgggagaacatccccgtgaccttcaagagccccgtgcccgtgaacagcgacgacagcccccagcagaccagcagagccaagagcgccaagggcgtgctggaggacttcctgaacaacgacaaccagagctgcaccctgagcggcggcaagcaccacggccccgtggaggccctgaagcagatgctgttcaacctgcaggccgtgcaggagagattcaaccagaacaagaccaccgaccccaaggaggagatcaagcaggtgagcgaggacgacttcagcaagctgcagctgaaggagagcatgatccccatcaccagaagcctgcagaaggccctgcaccacctgagcagactgagagacctggtggacgacaccaacggcgagagaagccccaagatgtag

SEQ ID NO: 76841 - DNA, 1602 bp, synthetic construct
  misc_feature 1..1602: note = Description of Artificial Sequence: Synthetic coding sequence
  source 1..1602: mol_type = other DNA
atggccaagagcaagaccaagcacagactgtgcagccaggagagcagcgtgagcgccctgctggccagctgcaccctgagcggcagcaacagcagcaacagcgacggcagcttccactacaaggacaagctgtacagaagcgccagccaggccctgcaggcctacatcgacgacttcgacctgggccagatctaccccggcgccagcaccggcaagatcaacatcgacgaggacttcaccaacatgagccagttctgcaactacatctacaagcccaacaacgccttcgagaacctggaccacaagaagcacagcaacttcatcagctgcagaagacacaccgtgaacgacatcgacagcatgagcctgaccaccgacgacctgctgagactgcccgccgacggcagcttcagctacacctacgtgggccccagccacagaaccagcaagaagaacaagaagtgcagaggcagactgggcagcctggacatcgagaagaacccccacttccagggcccctacaccagcatgggcaaggacaacttcgtgacccccgtgatcagaagcaacatcaacggcaagcagtgcggcagactgaagaaccccaagctgatgaacagaaccaacaactgcatcagcgagagcagcctgagcttccccaagaagagcagcttcaaggacagcagcgagcacagcctggagaagaactaccccagatggctgaccagccagaagagcgacctgaacgtgagcggcatcaccagcatccccgacttcaagtaccccgtgtggctgcacaaccaggacctgctgcccgacgccaacagccagagagtgtaccagatcttcaaggacgaccagtgcagccccagacacagccaccaggcccagggcaccagcagactgatcaacaagctggactgcttcgagtacgccttcgagcccagcaacttcagcaacagcctgagcgacgacaaggagctggtgaacgagtacaagtgcgacttcgagcacagccagtgccagtgcgagaaccccctgctgcccggccagagcaccaagcccttcagcggcgacaagatcgagctgctgatcctgaaggccaagagaaacctggagcagtgcaccgaggagctgcccaagagcatgaagaaggacgacagcccctgcagcctggacaagctggaggccgacagaagctgggagaacatccccgtgaccttcaagagccccgtgcccgtgaacagcgacgacagcccccagcagaccagcagagccaagagcgccaagggcgtgctggaggacttcctgaacaacgacaaccagagctgcaccctgagcggcggcaagcaccacggccccgtggaggccctgaagcagatgctgttcaacctgcaggccgtgcaggagagattcaaccagaacaagaccaccgaccccaaggaggagatcaagcaggtgagcgaggacgacttcagcaagctgcagctgaaggagagcatgatccccatcaccagaagcctgcagaaggccctgcaccacctgagcagactgagagacctggtggacgacaccaacggcgagagaagccccaagatgtag

SEQ ID NO: 76842 - DNA, 522 bp, synthetic construct
  misc_feature 1..522: note = Description of Artificial Sequence: Synthetic coding sequence
  source 1..522: mol_type = other DNA
atggccgcccccagcggcggctggaacggcgtgggcgccagcctgtgggccgccctgctgctgggcgccgtggccctgagacccgccgaggccgtgagcgagcccaccaccgtggccttcgacgtgagacccggcggcgtggtgcacagcttcagccacaacgtgggccccggcgacaagtacacctgcatgttcacctacgccagccagggcggcaccaacgagcagtggcagatgagcctgggcaccagcgaggaccaccagcacttcacctgcaccatctggagaccccagggcaagagctacctgtacttcacccagttcaaggccgaggtgagaggcgccgagatcgagtacgccatggcctacagcaaggccgccttcgagagagagagcgacgtgcccctgaagaccgaggagttcgaggtgaccaagaccgccgtggcccacagacccggcgccttcaaggccgagctgagcaagctggtgatcgtggccaaggccagcagaaccgagctgtag

SEQ ID NO: 76843 - DNA, 426 bp, synthetic construct
  misc_feature 1..426: note = Description of Artificial Sequence: Synthetic coding sequence
  source 1..426: mol_type = other DNA
atgaccatcatggtggaggacatcatgaagctgctgtgcagcctgagcggcgagagaaagatgaaggccgccgtgaagcacagcggcaagggcgccctggtgaccggcgccatggccttcgtgggcggcctggtgggcggcccccccggcctggccgtgggcggcgccgtgggcggcctgctgggcgcctggatgaccagcggccagttcaagcccgtgccccagatcctgatggagctgccccccgccgagcagcagagactgttcaacgaggccgccgccatcatcagacacctggagtggaccgacgccgtgcagctgaccgccctggtgatgggcagcgaggccctgcagcagcagctgctggccatgctggtgaactacgtgaccaaggagctgagagccgagatccagtacgacgactag

SEQ ID NO: 76844 - DNA, 324 bp, synthetic construct
  misc_feature 1..324: note = Description of Artificial Sequence: Synthetic coding sequence
  source 1..324: mol_type = other DNA
atgaccatcatggtggaggacatcatgaagctgctgtgcagcctgagcggcgagagaaagatgaaggccgccgtgaagcacagcggcaagggcgccctggtgaccggcgccatggccttcgtgggcggcctggtgggcggcccccccggcctggccgtgggcggcgccgtgggcggcctgctgggcgcctggatgaccagcggccagttcaagcccgtgccccagatcctgatggagctgccccccgccgagcagcagagactgttcaacgaggccgccgccatcaccagaccctgcagcagcagctgctggccctgctggtag

SEQ ID NO: 76845 - DNA, 459 bp, synthetic construct
  misc_feature 1..459: note = Description of Artificial Sequence: Synthetic coding sequence
  source 1..459: mol_type = other DNA
atggagagactgaagagccacaagcccgccaccatgaccatcatggtggaggacatcatgaagctgctgtgcagcctgagcggcgagagaaagatgaaggccgccgtgaagcacagcggcaagggcgccctggtgaccggcgccatggccttcgtgggcggcctggtgggcggcccccccggcctggccgtgggcggcgccgtgggcggcctgctgggcgcctggatgaccagcggccagttcaagcccgtgccccagatcctgatggagctgccccccgccgagcagcagagactgttcaacgaggccgccgccatcatcagacacctggagtggaccgacgccgtgcagctgaccgccctggtgatgggcagcgaggccctgcagcagcagctgctggccatgctggtgaactacgtgaccaaggagctgagagccgagatccagtacgacgactag

SEQ ID NO: 76846 - DNA, 648 bp, synthetic construct
  misc_feature 1..648: note = Description of Artificial Sequence: Synthetic coding sequence
  source 1..648: mol_type = other DNA
atggagaagaacccccccgacgacaccggccccgtgcacgtgcccctgggccacatcgtggccaacgagaagtggagaggcagccagctggcccaggagatgcagggcaagatcaagctgatcttcgaggacggcctgacccccgacttctacctgagcaacagatgctgcatcctgtacgtgaccgaggccgacctggtggccggcaacggctacagaaagagactggtgagagtgagaaacagcaacaacctgaagggcatcgtggtggtggagaagaccagaatgagcgagcagtacttccccgccctgcagaagttcaccgtgctggacctgggcatggtgctgctgcccgtggccagccagatggaggccagctgcctggtgatccagctggtgcaggagcagaccaaggagcccagcaagaaccccctgctgggcaagaagagagccctgctgctgagcgagcccagcctgctgagaaccgtgcagcagatccccggcgtgggcaaggtgaaggcccccctgctgctgcagaagttccccagcatccagcagctgagcaacgccagcatcggcgagctggagcaggtggtgggccaggccgtggcccagcagatccacgccttcttcacccagcccagatag

SEQ ID NO: 76847 - DNA, 648 bp, synthetic construct; identical to SEQ ID NO: 76846
  misc_feature 1..648: note = Description of Artificial Sequence: Synthetic coding sequence
  source 1..648: mol_type = other DNA

SEQ ID NO: 76848 - DNA, 1227 bp, synthetic construct
  misc_feature 1..1227: note = Description of Artificial Sequence: Synthetic coding sequence
  source 1..1227: mol_type = other DNA
atgagcgagcacgtggagcccgccgcccccggccccggccccaacggcggcggcggcggccccgcccccgccagaggccccagaacccccaacctgaaccccaaccccctgatcaacgtgagagacagactgttccacgccctgttcttcaagatggccgtgacctacagcagactgttcccccccgccttcagaagactgttcgagttcttcgtgctgctgaaggccctgttcgtgctgttcgtgctggcctacatccacatcgtgttcagcagaagccccatcaactgcctggagcacgtgagagacaagtggcccagagagggcatcctgagagtggaggtgagacacaacagcagcagagcccccgtgttcctgcagttctgcgacagcggcggcagaggcagcttccccggcctggccgtggagcccggcagcaacctggacatggaggacgaggaggaggaggagctgaccatggagatgttcggcaacagcagcatcaagttcgagctggacatcgagcccaaggtgttcaagccccccagcagcaccgaggccctgaacgacagccaggagttccccttccccgagacccccaccaaggtgtggccccaggacgagtacatcgtggagtacagcctggagtacggcttcctgagactgagccaggccaccagacagagactgagcatccccgtgatggtggtgaccctggaccccaccagagaccagtgcttcggcgacagattcagcagactgctgctggacgagttcctgggctacgacgacatcctgatgagcagcgtgaagggcctggccgagaacgaggagaacaagggcttcctgagaaacgtggtgagcggcgagcactacagattcgtgagcatgtggatggccagaaccagctacctggccgccttcgccatcatggtgatcttcaccctgagcgtgagcatgctgctgagatacagccaccaccagatcttcgtgttcatcgtggacctgctgcagatgctggagatgaacatggccatcgccttccccgccgcccccctgctgaccgtgatcctggccctggtgggcatggaggccatcatgagcgagttcttcaacgacaccaccaccgccttctacatcatcctgatcgtgtggctggccgaccagtacgacgccatctgctgccacaccagcaccagcaagagacactggctgagaatcccctag

SEQ ID NO: 76849 - DNA, 1863 bp, synthetic construct
  misc_feature 1..1863: note = Description of Artificial Sequence: Synthetic coding sequence
  source 1..1863: mol_type = other DNA
atgagcgagcacgtggagcccgccgcccccggccccggccccaacggcggcggcggcggccccgcccccgccagaggccccagaacccccaacctgaaccccaaccccctgatcaacgtgagagacagactgttccacgccctgttcttcaagatggccgtgacctacagcagactgttcccccccgccttcagaagactgttcgagttcttcgtgctgctgaaggccctgttcgtgctgttcgtgctggcctacatccacatcgtgttcagcagaagccccatcaactgcctggagcacgtgagagacaagtggcccagagagggcatcctgagagtggaggtgagacacaacagcagcagagcccccgtgttcctgcagttctgcgacagcggcggcagaggcagcttccccggcctggccgtggagcccggcagcaacctggacatggaggacgaggaggaggaggagctgaccatggagatgttcggcaacagcagcatcaagttcgagctggacatcgagcccaaggtgttcaagccccccagcagcaccgaggccctgaacgacagccaggagttccccttccccgagacccccaccaaggtgtggccccaggacgagtacatcgtggagtacagcctggagtacggcttcctgagactgagccaggccaccagacagagactgagcatccccgtgatggtggtgaccctggaccccaccagagaccagtgcttcggcgacagattcagcagactgctgctggacgagttcctgggctacgacgacatcctgatgagcagcgtgaagggcctggccgagaacgaggagaacaagggcttcctgagaaacgtggtgagcggcgagcactacagattcgtgagcatgtggatggccagaaccagctacctggccgccttcgccatcatggtgatcttcaccctgagcgtgagcatgctgctgagatacagccaccaccagatcttcgtgttcatcgtggacctgctgcagatgctggagatgaacatggccatcgccttccccgccgcccccctgctgaccgtgatcctggccctggtgggcatggaggccatcatgagcgagttcttcaacgacaccaccaccgccttctacatcatcctgatcgtgtggctggccgaccagtacgacgccatctgctgccacaccagcaccagcaagagacactggctgagattcttctacctgtaccacttcgccttctacgcctaccactacagattcaacggccagtacagcagcctggccctggtgaccagctggctgttcatccagcacagcatgatctacttcttccaccactacgagctgcccgccatcctgcagcaggtgagaatccaggagatgctgctgcaggccccccccctgggccccggcacccccaccgccctgcccgacgacatgaacaacaacagcggcgcccccgccaccgcccccgacagcgccggccagccccccgccctgggccccgtgagccccggcgccagcggcagccccggccccgtggccgccgcccccagcagcctggtggccgccgccgccagcgtggccgccgccgccggcggcgacctgggctggatggccgagaccgccgccatcatcaccgacgccagcttcctgagcggcctgagcgccagcctgctggagagaagacccgccagccccctgggccccgccggcggcctgccccacgccccccaggacagcgtgccccccagcgacagcgccgccagcgacaccacccccctgggcgccgccgtgggcggccccagccccgccagcatggcccccaccgaggcccccagcgaggtgggcagctag

SEQ ID NO: 76850 - DNA, 447 bp, synthetic construct
  misc_feature 1..447: note = Description of Artificial Sequence: Synthetic coding sequence
  source 1..447: mol_type = other DNA
atggccgccagccccgccagacccgccgtgctggccctgaccggcctggccctgctgctgctgctgtgctggggccccggcggcatcagcggcaacaagctgaagctgatgctgcagaagagagaggcccccgtgcccaccaagaccaaggtggccgtggacgagaacaaggccaaggagttcctgggcagcctgaagagacagaagagacagctgtgggacagaaccagacccgaggtgcagcagtggtaccagcagttcctgtacatgggcttcgacgaggccaagttcgaggacgacatcacctactggctgaacagagacagaaacggccacgagtactacggcgactactaccagagacactacgacgaggacagcgccatcggccccagaagcccctacggcttcagacacggcgccagcgtgaactacgacgactactag

SEQ ID NO: 76851 - DNA, 2964 bp, synthetic construct
  misc_feature 1..2964: note = Description of Artificial Sequence: Synthetic coding sequence
  source 1..2964: mol_type = other DNA
atgacccccgccctgagagaggccaccgccaagggcatcagcttcagcagcctgcccagcaccatggagagcgacaagatgctgtacatggagagccccagaaccgtggacgagaagctgaagggcgacaccttcagccagatgctgggcttccccacccccgagcccaccctgaacaccaacttcgtgaacctgaagcacttcggcagcccccagagcagcaagcactaccagaccgtgttcctgatgagaagcaacagcaccctgaacaagcacaacgagaactacaagcagaagaagctgggcgagcccagctgcaacaagctgaagaacatcctgtacaacggcagcaacatccagctgagcaagatctgcctgagccacagcgaggagttcatcaagaaggagcccctgagcgacaccaccagccagtgcatgaaggacgtgcagatcatcctggacagcaacatcaccaaggacaccaacgtggacaaggtgcagctgcagaactgcaagtggtaccaggagaacgccctgctggacaaggtgaccgacgccgagatcaagaagggcctgctgcactgcacccagaagaagatcgtgcccggccacagcaacgtgcccgtgagcagcagcgccgccgagaaggaggaggaggtgcacgccagactgctgcactgcgtgagcaagcagaagatcctgctgagccaggccagaagaacccagaagcacctgcagatgctgctggccaagcacgtggtgaagcactacggccagcagatgaagctgagcatgaagcaccagctgcccaagatgaagaccttccacgagcccaccaccatcctgggcaacagcctgcccaagtgcaccgagatcaagcccgaggtgaacaccctgaccgccgagaacaagctgtgggacgacgccaagaacggcttcgccagatgcaccgccgccgagatccagagattcgccttcagcgccaccggcctgctgagccacgtggaggagggcctggacagcgacgccaccgacagcagcagcgacgacgacctggacgagtacaccctgagaaagaacgtggccgtgaactgcagcaccgagtggaagtggctggtggacagagccagagtgggcagcagatggacctggctgcaggcccagatcagcgacctggagtgcaagatccagcagctgaccgacatccacagacagatcagagccagcaagggcatcgtggtgctggaggagtgccagctgcccaaggacatcctgaagaagcagatgcagttcgccgaccaggccgccagcctgaacatcctgggcaacccccaggtgccccaggagtgccaggaccccgtgcccgagcaggacttcgagatgagccccagcagccccaccctgctgctgagaaacatcgagaagcagagcgcccagctgaccgagatcatcaacagcctgatcgcccccctgaacctgagccccaccagcagccccctgagcagcaagagctgcagccacaagtgcctggccaacggcatctacagaagcgccagcgagaacctggacgagctgagcagcagcagcagctggctgctgaaccagaagcacagcaagaagaagagaaaggacagaaccagactgaagagcagcagcctgaccttcatgagcaccagcgccagaaccagacccctgcagagcttccacaagagaaagctgtacagactgagccccaccttctactggaccccccagaccctgcccagcaaggagaccgccttcctgaacaccacccagatgccctgcctgcagagcgccagcacctggagcagctacgagcacaacagcgagagctacctgctgagagagcacgtgagcgagctggacagcagcttccacagcgtgctgagcctgcccagcgacgtgcccctgcacttccacttcgagaccctgctgaagaagaccgagatcaagggcaacctggccgagaacaagttcgtggacgagtacatcatcagccccagccccgtgcacagcaccctgaaccagtggagaaacggctacagccccatctgcaagccccagatcagaagcgagagcagcgcccagctgctgcagggcagaaagaagagacacctgagcgagaccgccctgggcgagagaaccaagctggaggagagcgacttccagcacaccgagagcggcagccacagcaacttcaccgccgtgagcaacgtgaacgtgctgagcagaatccagaacagcagcagaaacaccgccagaagaagactgagaagcgagagcagctacgacatcgacaacatcgtgatccccatgagcctggtggcccccgccaagctggagaagctgcagtacaaggagatcctgacccccagctggagaatggtggtgctgcagcccctggacgagtacaacctgggcaaggaggagatcgaggacctgagcgacgaggtgttcagcctgagacacaagaagtacgaggagagagagcaggccagatggagcctgtgggagcagagcaagtggcacagaagaaacagcagagcctacagcaagaacgtggagggccaggacctgctgctgaaggagtaccccaacaacttcagcagcagccagcagtgcgccgccgccagcccccccggcctgcccagcgagaaccaggacctgtgcgcctacggcctgcccagcctgaaccagagccaggagaccaagagcctgtggtgggagagaagagccttccccctgaagggcgaggacatggccgccctgctgtgccaggacgagaagaaggaccaggtggagagaagcagcaccgccttccacggcgagatcttcggcaccagcgtgcccgagaacggccaccaccccaagaagcagagcgacggcatggaggagtacaagaccttcggcctgggcctgaccaacgtgaagaagaacagatag

SEQ ID NO: 76852 - DNA, 687 bp, synthetic construct
  misc_feature 1..687: note = Description of Artificial Sequence: Synthetic coding sequence
  source 1..687: mol_type = other DNA
atgagctacgccgagaagcccgacgagatcaccaaggacgagtggatggagaagctgaacaacctgcacgtgcagagagccgacatgaacagactgatcatgaactacctggtgaccgagggcttcaaggaggccgccgagaagttcagaatggagagcggcatcgagcccagcgtggacctggagaccctggacgagagaatcaagatcagagagatgatcctgaagggccagatccaggaggccatcgccctgatcaacagcctgcaccccgagctgctggacaccaacagatacctgtacttccacctgcagcagcagcacctgatcgagctgatcagacagagagagaccgaggccgccctggagttcgcccagacccagctggccgagcagggcgaggagagcagagagtgcctgaccgagatggagagaaccctggccctgctggccttcgacagccccgaggagagccccttcggcgacctgctgcacaccatgcagagacagaaggtgtggagcgaggtgaaccaggccgtgctggactacgagaacagagagagcacccccaagctggccaagctgctgaagctgctgctgtgggcccagaacgagctggaccagaagaaggtgaagtaccccaagatgaccgacctgagcaagggcgtgatcgaggagcccaagtag

SEQ ID NO: 76853 - DNA, 468 bp, synthetic construct
  misc_feature 1..468: note = Description of Artificial Sequence: Synthetic coding sequence
  source 1..468: mol_type = other DNA
atgagctacgccgagaagcccgacgagatcaccaaggacgagtggatggagaagctgaacaacctgcacgtgcagagagccgacatgaacagactgatcatgaactacctggtgaccgagggcttcaaggaggccgccgagaagttcagaatggagagcggcatcgagcccagcgtggacctggagaccctggacgagagaatcaagatcagagagatgatcctgaagggccagatccagcaggtggtgcacgactgctggagaaaggagagagtgttcatcctgagcgacctgcccagcagcatcagcgccgccagccacccccccagcagcgccggcagcgccgacgtgctgctgctgttcacccacagaaccgtgccctgcagcgtggtgggcagaagagaggtggtgcagggctgcgtgcactgcctgagagtgggcaccgtggacggccacatggccctgtag

SEQ ID NO: 76854 - DNA, 3534 bp, synthetic construct
  misc_feature 1..3534: note = Description of Artificial Sequence: Synthetic coding sequence
  source 1..3534: mol_type = other DNA
atggacgtgtacccccccagaagacagggcctgcccagagccagaagccccggcggcagcagcagaggcagccccagcgtgagctgcagcagactgagacaggtgcagagcatcctgacccagagcagcaagagcagacccgacggcatcctgtgcatcctgggcatcgacagcagatacaacgagggctgcagagagctggccaactacctgctgttcggcctgtacaaccagaacaccagcgacttcgagaagaccggcttcagcgaggaggtgctggacgacgtgatcatcctgatcaagagcgacagcgtgcacctgtactgcaaccccgtgaacttcagatacctgctgccctacgtggcccactggagaaacctgcacttccactgcatgaccgagaacgagtacgaggacgaggaggccgccgaggagttcaagatcaccagcttcgtggacatggtgagagactgcagcagaatcggcatcccctacagcagccagggccacctgcagatcttcgacatgttcgtggtggagaagtggcccatcgtgcaggccttcgccctggagggcatcggcggcgacggcttcttcaccatgaagtacgagctgcaggacgtgagcctgaacctgtggaacgtgtacagcaagatggaccccatgagcctggagagcctgctgagcgacgacctggtggccttcgagcaccagtggaccagcttcttcgccaacttcgacaccgagatccccttcctgctggagctgagcgagagccaggccggcgagcccttcagaagctacttcagccacggcatgatcagcagccacatcaccgagaacagccccaacagacagcccttcgtgctgttcggcaaccacagcaccagagagaacctgaacgccggcaacttcaacttccccagcgagggccacctggtgagaagcaccggccccggcggcagcttcgccaagcacatggtggcccagtgcgtgagccccaagggccccctggcctgcagcagaacctacttcttcggcgccacccacgtgccctacctgggcggcgacagcaagctgcccaagaagaccgagcagatcagactgctgagccagatctacgccgccgtgatcgaggccgtgctggccggcatcgcctgctacgccaagaccagcagcctgaccaaggccaaggaggtggccgagcagaccctgggcagcggcctggacagcttcgagctgatccccttcaaggccgccctgagaagcaagatgaccttccacatccacgccgtgaacaaccagggcagaatcgtgcccctggacagcgaggacagcctgagcttcgtgaagaccgcctgcatggccgtgtacgacatccccgacctgctgggcggcaacggctgcctgggcagcgtggtgttcagcgagagcttcctgaccagccagatcctggtgaaggagaaggacggcaccgtgaccaccgagaccagcagcgtggtgctgaccgccgccgtgcccagattctgcagctggctggtggaggacaacgaggtgaagctgagcgagaagacccagcaggccgtgagaggcgacgagagcttcctgggcacctacctgaccggcggcgagggcgcctacctgtacagcagcaacctgcagagctggcccgaggagggcaacgtgcacttcttcagcagcggcctgctgttcagccactgcagacacagaagcatcatcatcagcaaggaccacatgaacagcatcagcttctacgacggcgacagcaccagcaccgtggccgccctgctgatcgacttcaagagcagcctgctgccccacctgcccgtgcacttccacggcagcagcaacttcctgatgatcgccctgttccccaagagcaagatctaccaggccttctacagcgaggtgttcagcctgtggaagcagcaggacaacagcggcatcagcctgaaggtgatccaggaggacggcctgagcgtggagcagaagagactgcacagcagcgcccagaagctgttcagcgccctgagccagcccgccggcgagaagagaagcagcctgaagctgctgagcgccaagctgcccgagctggactggttcctgcagcacttcgccatcagcagcatcagccaggagcccgtgatgagaacccacctgcccgtgctgctgcagcaggccgagatcaacaccacccacagaatcgagagcgacaaggtgatcatcagcatcgtgaccggcctgcccggctgccacgccagcgagctgtgcgccttcctggtgaccctgcacaaggagtgcggcagatggatggtgtacagacagatcatggacagcagcgagtgcttccacgccgcccacttccagagatacctgagcagcgccctggaggcccagcagaacagaagcgccagacagagcgcctacatcagaaagaagaccagactgctggtggtgctgcagggctacaccgacgtgatcgacgtggtgcaggccctgcagacccaccccgacagcaacgtgaaggccagcttcaccatcggcgccatcaccgcctgcgtggagcccatgagctgctacatggagcacagattcctgttccccaagtgcctggaccagtgcagccagggcctggtgagcaacgtggtgttcaccagccacaccaccgagcagagacaccccctgctggtgcagctgcagagcctgatcagagccgccaaccccgccgccgccttcatcctggccgagaacggcatcgtgaccagaaacgaggacatcgagctgatcctgagcgagaacagcttcagcagccccgagatgctgagaagcagatacctgatgtaccccggctggtacgagggcaagctgaacgccggcagcgtgtaccccctgatggtgcagatctgcgtgtggttcggcagacccctggagaagaccagattcgtggccaagtgcaaggccatccagagcagcatcaagcccagccccttcagcggcaacatctaccacatcctgggcaaggtgaagttcagcgacagcgagagaaccatggaggtgtgctacaacaccctggccaacagcctgagcatcatgcccgtgctggagggccccacccccccccccgacagcaagagcgtgagccaggacagcagcggccagcaggagtgctacctggtgttcatcggctgcagcctgaaggaggacagcatcaaggactggctgagacagagcgccaagcagaagccccagagaaaggccctgaagaccagaggcatgctgacccagcaggagatcagaagcatccacgtgaagagacacctggagcccctgcccgccggctacttctacaacggcacccagttcgtgaacttcttcggcgacaagaccgacttccaccccctgatggaccagttcatgaacgactacgtggaggaggccaacagagagatcgagaagtacaaccaggagctggagcagcaggagtaccacgacctgttcgagctgaagccctag

SEQ ID NO: 76855 - DNA, 1488 bp, synthetic construct
  misc_feature 1..1488: note = Description of Artificial Sequence: Synthetic coding sequence
  source 1..1488: mol_type = other DNA
atggagggctgcctgggccaggagctgttcagcaaccacatgttcctgaccagcctgagcagccccaacagacagcccttcgtgctgttcggcaaccacagcaccagagagaacctgaacgccggcaacttcaacttccccagcgagggccacctggtgagaagcaccggccccggcggcagcttcgccaagcacatggtggcccagtgcgtgagccccaagggccccctggcctgcagcagaacctacttcttcggcgccacccacgtgccctacctgggcggcgacagcaagctgcccaagaagaccgagcagatgctgctgagccagatctacgccgccgtgatcgaggccgtgctggccggcatcgcctgctacgccaagaccagcagcctgaccaaggccaaggaggtggccgagcagaccctgggcagcggcctggacagcttcgagctgatccccttcaaggccgccctgagaagcaagatgaccttccacatccacgccgtgaacaaccagggcagaatcgtgcccctggacagcgaggacagcctgagcttcgtgaagaccgcctgcatggccgtgtacgacatccccgacctgctgggcggcaacggctgcctgggcagcgtggtgttcagcgagagcttcctgaccagccagatcctggtgaaggagaaggacggcaccgtgaccaccgagaccagcagcgtggtgctgaccgccgccgtgcccagattctgcagctggctggtggaggacaacgaggtgaagctgagcgagaagacccagcaggccgtgagaggcgacgagagcttcctgggcacctacctgaccggcggcgagggcgcctacctgtacagcagcaacctgcagagctggcccgaggagggcaacgtgcacttcttcagcagcggcctgctgttcagccactgcagacacagaagcatcatcatcagcaaggaccacatgaacagcatcagcttctacgacggcgacagcaccagcaccgtggccgccctgctgatcgacttcaagagcagcctgctgccccacctgcccgtgcacttccacggcagcagcaacttcctgatgatcgccctgttccccaagagcaagatctaccaggccttctacagcgaggtgttcagcctgtggaagcagcaggacaacagcggcatcagcctgaaggtgatccaggaggacggcctgagcgtggagcagaagagactgcacagcagcgcccagaagctgttcagcgccctgagccagcccgccggcgagaagagaagcagcctgaagctgctgagcgccaagctgcccgagctggactggttcctgcagcacttcgccatcagcagcatcagccaggagcccgtgatgagaacccacctgcccgtgctgctgcagcaggccgagatcaacaccacccacagaatcgagagcgacaagatggacggcgtgagccccaaccacggccagctgtag

SEQ ID NO: 76856 - DNA, 615 bp, synthetic construct
  misc_feature 1..615: note = Description of Artificial Sequence: Synthetic coding sequence
  source 1..615: mol_type = other DNA
atgggcgaggccgaggtgggcggcggcggcgccgccggcgacaagggccccggcgaggccgccaccagccccgccgaggagaccgtggtgtggagccccgaggtggaggtgtgcctgttccacgccatgctgggccacaagcccgtgggcgtgaacagacacttccacatgatctgcatcagagacaagttcagccagaacatcggcagacaggtgcccagcaaggtgatctgggaccacctgagcaccatgtacgacatgcaggccctgcacgagagcgagatcctgcccttccccaaccccgagagaaacttcgtgctgcccgaggagatcatccaggaggtgagagagggcaaggtgatgatcgaggaggagatgaaggaggagatgaaggaggacgtggacccccacaacggcgccgacgacgtgttcagcagcagcggcagcctgggcaaggccagcgagaagagcagcaaggacaaggagaagaacagcagcgacctgggctgcaaggagggcgccgacaagagaaagagaagcagagtgaccgacaaggtgctgaccgccaacagcaaccccagcagccccagcgccgccaagagaagaagaacctag

SEQ ID NO: 76857 - DNA, 1278 bp, synthetic construct
  misc_feature 1..1278: note = Description of Artificial Sequence: Synthetic coding sequence
  source 1..1278: mol_type = other DNA
atgtaccccagcaacaagaagaagaaggtgtggagagaggagaaggagagactgctgaagatgaccctggaggagagaagaaaggagtacctgagagactacatccccctgaacagcatcctgagctggaaggaggagatgaagggcaagggccagaacgacgaggagaacacccaggagaccagccaggtgaagaagagcctgaccgagaaggtgagcctgtacagaggcgacatcaccctgctggaggtggacgccatcgtgaacgccgccaacgccagcctgctgggcggcggcggcgtggacggctgcatccacagagccgccggcccctgcctgctggccgagtgcagaaacctgaacggctgcgacaccggccacgccaagatcacctgcggctacgacctgcccgccaagtacgtgatccacaccgtgggccccatcgccagaggccacatcaacggcagccacaaggaggacctggccaactgctacaagagcagcctgaagctggtgaaggagaacaacatcagaagcgtggccttcccctgcatcagcaccggcatctacggcttccccaacgagcccgccgccgtgatcgccctgaacaccatcaaggagtggctggccaagaaccaccacgaggtggacagaatcatcttctgcgtgttcctggaggtggacttcaagatctacaagaagaagatgaacgagttcttcagcgtggacgacaacaacgaggaggaggaggacgtggagatgaaggaggacagcgacgagaacggccccgaggagaagcagagcgtggaggagatggaggagcagagccaggacgccgacggcgtgaacaccgtgaccgtgcccggccccgccagcgaggaggccgtggaggactgcaaggacgaggacttcgccaaggacgagaacatcaccaagggcggcgaggtgaccgaccacagcgtgagagaccaggaccaccccgacggccaggagaacgacagcaccaagaacgagatcaagatcgagaccgagagccagagcagctacatggagaccgaggagctgagcagcaaccaggaggacgccgtgatcgtggagcagcccgaggtgatccccctgaccgaggaccaggaggagaaggagggcgagaaggcccccggcgaggacacccccagaatgcccggcaagagcgagggcagcagcgacctggagaacacccccggccccgacgccggcgcccaggacgaggccaaggagcagagaaacggcaccaagtag

SEQ ID NO: 76858 - DNA, 1248 bp, synthetic construct
  misc_feature 1..1248: note = Description of Artificial Sequence: Synthetic coding sequence
  source 1..1248: mol_type = other DNA
atggccttcctgatgcacctgctggtgtgcgtgttcggcatgggcagctgggtgaccatcaacggcctgtgggtggagctgcccctgctggtgatggagctgcccgagggctggtacctgcccagctacctgaccgtggtgatccagctggccaacatcggccccctgctggtgaccctgctgcaccacttcagacccagctgcctgagcgaggtgcccatcatcttcaccctgctgggcgtgggcaccgtgacctgcatcatcttcgccttcctgtggaacatgaccagctgggtgctggacggccaccacagcatcgccttcctggtgctgaccttcttcctggccctggtggactgcaccagcagcgtgaccttcctgcccttcatgagcagactgcccacctactacctgaccaccttcttcgtgggcgagggcctgagcggcctgctgcccgccctggtggccctggcccagggcagcggcctgaccacctgcgtgaacgtgaccgagatcagcgacagcgtgcccagccccgtgcccaccagagagaccgacatcgcccagggcgtgcccagagccctggtgagcgccctgcccggcatggaggcccccctgagccacctggagagcagatacctgcccgcccacttcagccccctggtgttcttcctgctgctgagcatcatgatggcctgctgcctggtggccttcttcgtgctgcagagacagcccagatgctgggaggccagcgtggaggacctgctgaacgaccaggtgaccctgcacagcatcagacccagagaggagaacgacctgggccccgccggcaccgtggacagcagccagggccagggctacctggaggagaaggccgccccctgctgccccgcccacctggccttcatctacaccctggtggccttcgtgaacgccctgaccaacggcatgctgcccagcgtgcagacctacagctgcctgagctacggccccgtggcctaccacctggccgccaccctgagcatcgtggccaaccccctggccagcctggtgagcatgttcctgcccaacagaagcctgctgttcctgggcgtgctgagcgtgctgggcacctgcttcggcggctacaacatggccatggccgtgatgagcccctgccccctgctgcagggccactggggcggcgaggtgctgatcgtgagcatcagacccgtgggcctgctgcccctgagaaccccccacccctag

SEQ ID NO: 76859 - DNA, 1038 bp, synthetic construct
  misc_feature 1..1038: note = Description of Artificial Sequence: Synthetic coding sequence
  source 1..1038: mol_type = other DNA
atgctgagacccgccggcctgtggagactgtgcagaagaccctgggccgccagagtgcccgccgagaacctgggcagaagagaggtgaccagcggcgtgagccccagaggcagcaccagccccagaaccctgaacatcttcgacagagacctgaagagaaagcagaagaactgggccgccagacagcccgagcccaccaagttcgactacctgaaggaggaggtgggcagcagaatcgccgacagagtgtacgacatccccagaaacttccccctggccctggacctgggctgcggcagaggctacatcgcccagtacctgaacaaggagaccatcggcaagttcttccaggccgacatcgccgagaacgccctgaagaacagcagcgagaccgagatccccaccgtgagcgtgctggccgacgaggagttcctgcccttcaaggagaacaccttcgacctggtggtgagcagcctgagcctgcactgggtgaacgacctgcccagagccctggagcagatccactacatcctgaagcccgacggcgtgttcatcggcgccatgttcggcggcgacaccctgtacgagctgagatgcagcctgcagctggccgagaccgagagagagggcggcttcagcccccacatcagccccttcaccgccgtgaacgacctgggccacctgctgggcagagccggcttcaacaccctgaccgtggacaccgacgagatccaggtgaactaccccggcatgttcgagctgatggaggacctgcagggcatgggcgagagcaactgcgcctggaacagaaaggccctgctgcacagagacaccatgctggccgccgccgccgtgtacagagagatgtacagaaacgaggacggcagcgtgcccgccacctaccagatctactacatgatcggctggaagtaccacgagagccaggccagacccgccgagagaggcagcgccaccgtgagcttcggcgagctgggcaagatcaacaacctgatgccccccggcaagaagagccagtag

SEQ ID NO: 76860 - DNA, 954 bp, synthetic construct
  misc_feature 1..954: note = Description of Artificial Sequence: Synthetic coding sequence
  source 1..954: mol_type = other DNA
atgctgagacccgccggcctgtggagactgtgcagaagaccctgggccgccagagtgcccgccgagaacctgggcagaagagaggtgaccagcggcgtgagccccagaggcagcaccagccccagaaccctgaacatcttcgacagagacctgaagagaaagcagaagaactgggccgccagacagcccgagcccaccaagttcgactacctgaaggaggaggtgggcagcagaatcgccgacagagtgtacgacatccccagaaacttccccctggccctggacctgggctgcggcagaggctacatcgcccagtacctgaacaagctgcagctgttccactgcagaaagctgctggagagcttcagcaagctgaccctgcagaagatgctgtgcctgcactgggtgaacgacctgcccagagccctggagcagatccactacatcctgaagcccgacggcgtgttcatcggcgccatgttcggcggcgacaccctgtacgagctgagatgcagcctgcagctggccgagaccgagagagagggcggcttcagcccccacatcagccccttcaccgccgtgaacgacctgggccacctgctgggcagagccggcttcaacaccctgaccgtggacaccgacgagatccaggtgaactaccccggcatgttcgagctgatggaggacctgcagggcatgggcgagagcaactgcgcctggaacagaaaggccctgctgcacagagacaccatgctggccgccgccgccgtgtacagagagatgtacagaaacgaggacggcagcgtgcccgccacctaccagatctactacatgatcggctggaagtaccacgagagccaggccagacccgccgagagaggcagcgccaccgtgagcttcggcgagctgggcaagatcaacaacctgatgccccccggcaagaagagccagtag

SEQ ID NO: 76861 - DNA, 804 bp, synthetic construct
  misc_feature 1..804: note = Description of Artificial Sequence: Synthetic coding sequence
  source 1..804: mol_type = other DNA
atgctgagacccgccggcctgtggagactgtgcagaagaccctgggccgccagagtgcccgccgagaacctgggcagaagagaggtgaccagcggcgtgagccccagaggcagcaccagccccagaaccctgaacatcttcgacagagacctgaagagaaagcagaagaactgggccgccagacagcccgagcccaccaagttcgactacctgaaggaggaggtgggcagcagaatcgccgacagagtgtacgacatccccagaaacttccccctggccctggacctgggctgcggcagaggctacatcgcccagtacctgaacaaggagaccatcggcaagttcttccaggccgacatcgccgagaacgccctgaagaacagcagcgagaccgagatccccaccgtgagcgtgctggccgacgaggagttcctgcccttcaaggagaacaccttcgacctggtggtgagcagcctgagcctgcactgggtgaacgacctgcccagagccctggagcagatccactacatcctgaagcccgacggcgtgttcatcggcgccatgttcggcggcgacaccctgtacgagctgagatgcagcctgcagctggccgagaccgagagagagggcggcttcagcccccacatcagccccttcaccgccgtgaacgacctgggccacctgctgggcagagccggcttcaacaccctgaccgtggacaccgacgagatccaggtgaactaccccggcatgttcgagctgatggaggacctgcaggagcagaagagcagaatgctgacctag

SEQ ID NO: 76862 - DNA, 771 bp, synthetic construct
  misc_feature 1..771: note = Description of Artificial Sequence: Synthetic coding sequence
  source 1..771: mol_type = other DNA
atgaagctgaccagaaagatggtgctgaccagagccaaggccagcgagctgcacagcgtgagaaagctgaactgctggggcagcagactgaccgacatcagcatctgccaggagatgcccagcctggaggtgatcaccctgagcgtgaacagcatcagcaccctggagcccgtgagcagatgccagagactgagcgagctgtacctgagaagaaacagaatccccagcctggccgagctgttctacctgaagggcctgcccagactgagagtgctgtggctggccgagaacccctgctgcggcaccagcccccacagatacagaatgaccgtgctgagaaccctgcccagactgcagaagctggacaaccaggccgtgaccgaggaggagctgagcagagccctgagcgagggcgaggagatcaccgccgcccccgagagagagggcaccggccacggcggccccaagctgtgctgcaccctgagcagcctgagcagcgccgccgagaccggcagagaccccctggacagcgaggaggaggccaccagcggcgcccaggacgagagaggcctgaagccccccagcagaggccagttccccagcctgagcgccagagacgccagcagcagccacagaggcagaaacgtgctgaccgccatcctgctgctgctgagagagctggacgccgagggcctggaggccgtgcagcagaccgtgggcagcagactgcaggccctgagaggcgaggaggtgcaggagcacgccgagtag

SEQ ID NO: 76863 - DNA, 654 bp, synthetic construct
  misc_feature 1..654: note = Description of Artificial Sequence: Synthetic coding sequence
  source 1..654: mol_type = other DNA
gtgacccagggcccccagggcctgagagccagcggcagaagctgcgtgggccccttcctgagccacctgggcagagacagaacccccggcgtgctgaccgagctgagatgcgtggtgcccgccagactgaccgccctggagagaagcagaaagcccagaggcagaggcagaggcagatacatcaccctgctgcccgtgcccgaggccgaccccatcctggagagagtgccccagcccgagttctgcagctgcgtgaacagcatcagcaccctggagcccgtgagcagatgccagagactgagcgagctgtacctgagaagaaacagaatccccagcctggccgagctgttctacctgaagggcctgcccagactgagagtgctgtggctggccgagaacccctgctgcggcaccagcccccacagatacagaatgaccgtgctgagaaccctgcccagactgcagaagctggacaaccaggccgtgaccgaggaggagctgagcagagccctgagcgagggcgaggagatcaccgccgcccccgagagagagggcaccggccacggcggccccaagctgtgctgcaccctgagcagcctgagcagcgccgccgagaccggcagagaccccctggacagcgaggaggaggcctag

SEQ ID NO: 76864 - DNA, 1128 bp, synthetic construct
  misc_feature 1..1128: note = Description of Artificial Sequence: Synthetic coding sequence
  source 1..1128: mol_type = other DNA
atgaagctgaccagaaagatggtgctgaccagagccaaggccagcgagctgcacagcgtgagaaagctgaactgctggggcagcagactgaccgacatcagcatctgccaggagatgcccagcctggaggtgatcaccctgagcgtgaacagcatcagcaccctggagcccgtgagcagatgccagagactgagcgagctgtacctgagaagaaacagaatccccagcctggccgagctgttctacctgaagggcctgcccagactgagagtgctgtggctggccgagaacccctgctgcggcaccagcccccacagatacagaatgaccgtgctgagaaccctgcccagactgcagaagctggacaaccaggccgtgaccgaggaggagctgagcagagccctgagcgagggcgaggagatcaccgccgcccccgagagagagggcaccggccacggcggccccaagctgtgctgcaccctgagcagcctgagcagcgccgccgagaccggcagagaccccctggacagcgaggaggaggccaccggcgcccaggacgagagaggcctgaagccccccagcagaggccagttccccagcctgagcgccagagacgccagcagcagccacagaggcagagtgagcggcggccccctgggcgccgccgccgccagcgcccactgcacccactgcaccgagaccgtgggcagagagcacggcgccagccagggccccgtgggcagagagcacggcgccagccagggcctggaggagctgtgccccagaggcagctgcgtgtgcggcagcgtgaacgcccacaccagagtgaccagagccccccacggcgccgtgctggccccccagcccctgctgctgagctggagcgtggagtgcggccccggcccctgctgggccgagggcaacagaagccacgtggaggaggtgccccacaccagaccccaggccggcctgctgtgcagcgacagccccagcgtgcccaacgtgctgaccgccatcctgctgctgctgagagagctggacgccgagggcctggaggccgtgcagcagaccgtgggcagcagactgcaggccctgagaggcgaggaggtgcaggagcacgccgagtag

SEQ ID NO: 76865 - DNA, 807 bp, synthetic construct
  misc_feature 1..807: note = Description of Artificial Sequence: Synthetic coding sequence
  source 1..807: mol_type = other DNA
atggccgccgtgagagtgctggtggccagcagactggccgccgccagcgccttcaccagcctgagccccggcggcagaacccccagccagagagccgccctgcacctgagcgtgcccagacccgccgccagagtggccctggtgctgagcggctgcggcgtgtacgacggcaccgagatccacgaggccagcgccatcctggtgcacctgagcagaggcggcgccgaggtgcagatcttcgcccccgacgtgccccagatgcacgtgatcgaccacaccaagggccagcccagcgagggcgagagcagaaacgtgctgaccgagagcgccagaatcgccagaggcaagatcaccgacctggccaacctgagcgccgccaaccacgacgccgccatcttccccggcggcttcggcgccgccaagaacctgagcaccttcgccgtggacggcaaggactgcaaggtgaacaaggaggtggagagagtgctgaaggagttccaccaggccggcaagcccatcggcctgtgctgcatcgcccccgtgctggccgccaaggtgctgagaggcgtggaggtgaccgtgggccacgagcaggaggagggcggcaagtggccctacgccggcaccgccgaggccatcaaggccctgggcgccaagcactgcgtgaaggaggtggtggaggcccacgtggaccagaagaacaaggtggtgaccacccccgccttcatgtgcgagaccgccctgcactacatccacgacggcatcggcgccatggtgagaaaggtgctggagctgaccggcaagtag

SEQ ID NO: 76866 - DNA, 714 bp, synthetic construct
  misc_feature 1..714: note = Description of Artificial Sequence: Synthetic coding sequence
  source 1..714: mol_type = other DNA
atggccgccgtgagagtgctggtggccagcagactggccgccgccagcgccttcaccagcctgagccccggcggcagaacccccagccagagagccgccctgcacctgagcgtgcccagacccgccgccagagtggccctggtgctgagcggctgcggcgtgtacgacggcaccgagatccacgaggccagcgccatcctggtgcacctgagcagaggcggcgccgaggtgcagatcttcgcccccgacgtgccccagatgcacgtgatcgaccacaccaagggccagcccagcgagggcgagagcagaaacgtgctgaccgagagcgccagaatcgccagaggcaagatcaccgacctggccaacctgagcgccgccaaccacgacgccgccatcttccccggcggcttcggcgccgccaagaacctgctgtgctgcatcgcccccgtgctggccgccaaggtgctgagaggcgtggaggtgaccgtgggccacgagcaggaggagggcggcaagtggccctacgccggcaccgccgaggccatcaaggccctgggcgccaagcactgcgtgaaggaggtggtggaggcccacgtggaccagaagaacaaggtggtgaccacccccgccttcatgtgcgagaccgccctgcactacatccacgacggcatcggcgccatggtgagaaaggtgctggagctgaccggcaagtag

SEQ ID NO: 76867 - DNA, 1023 bp, synthetic construct
  misc_feature 1..1023: note = Description of Artificial Sequence: Synthetic coding sequence
  source 1..1023: mol_type = other DNA
atggccgagggcggcgagctgatgagcagactgctgagcgagaacgccgacctgaagaagcaggtgagactgctgaaggagaaccagatgctgagaagactgctgagccagagctgccaggagggcggcggccacgacctgctgccccccagagcccacgcctaccccgaggccggcagccccggcagcggcgtgcccgacttcggcagattcaccagcgtggccgacacccccagccagctgcagaccagcagcctggaggacctgctgtgcagccacgcccccctgagcagcgaggacgacaccagccccggctgcgccgcccccagccaggcccccttcaaggccttcctgagcccccccgagccccacagccacagaggcaccgacagaaagctgagccccctgctgagccccctgcaggacagcctggtggacaagaccctgctggagcccagagagatggtgagacccaagaaggtgtgcttcagcgagagcagcctgcccaccggcgacagaaccagaagaagctactacctgaacgagatccagagcttcgccggcgccgagaaggacgccagagtggtgggcgagatcgccttccagctggacagaagaatcctggcctacgtgttccccggcgtgaccagactgtacggcttcaccgtggccaacatccccgagaagatcgagcagaccagcaccaagagcctggacggcagcgtggacgagagaaagctgagagagctgacccagagatacctggccctgagcgccagactggagaagctgggctacagcagagacgtgcaccccgccttcagcgagttcctgatcaacacctacggcatcctgaagcagagacccgacctgagagccaaccccctgcacagcagccccgccgccctgagaaagctggtgatcgacgtggtgccccccaagttcctgggcgacagcctgctgctgctgaactgcctgtgcgagctgagcaaggaggacggcaagcccctgttcgcctggtag

SEQ ID NO: 76868 - DNA, 561 bp, synthetic construct
  misc_feature 1..561: note = Description of Artificial Sequence: Synthetic coding sequence
  source 1..561: mol_type = other DNA
atggtgagacccaagaaggtgtgcttcagcgagagcagcctgcccaccggcgacagaaccagaagaagctactacctgaacgagatccagagcttcgccggcgccgagaaggacgccagagtggtgggcgagatcgccttccagctggacagaagaatcctggcctacgtgttccccggcgtgaccagactgtacggcttcaccgtggccaacatccccgagaagatcgagcagaccagcaccaagagcctggacggcagcgtggacgagagaaagctgagagagctgacccagagatacctggccctgagcgccagactggagaagctgggctacagcagagacgtgcaccccgccttcagcgagttcctgatcaacacctacggcatcctgaagcagagacccgacctgagagccaaccccctgcacagcagccccgccgccctgagaaagctggtgatcgacgtggtgccccccaagttcctgggcgacagcctgctgctgctgaactgcctgtgcgagctgagcaaggaggacggcaagcccctgttcgcctggtag

SEQ ID NO: 76869 - DNA, 438 bp, synthetic construct
  misc_feature 1..438: note = Description of Artificial Sequence: Synthetic coding sequence
  source 1..438: mol_type = other DNA
atggtgcagctgatcgcccccctggaggtgatgtggaacgaggccgccgacctgaagcccctggccctgagcagaagactggagtgcagcggcggcatcatggcccactacagccccgacctgctgggccccgagatggagagcagatacttcgcccaggtgggcctggagcacctggccagcagcagcccccccgccttcggcttcctgaagtgcctggactacagcatcagcgtgctgtgcagcgccaccagcctggccatgctggaggacaaccccaaggtgagcaagctggccaccggcgactggatgctgaccctgaagcccaagagcatcaccgtgcccgtggagatccccagcagccccctggccggcagacccagaagaagaagaagactgagatgcccccacgaccagcacagccagggcacctgctag

SEQ ID NO: 76870 - DNA, 429 bp, synthetic construct
  misc_feature 1..429: note = Description of Artificial Sequence: Synthetic coding sequence
  source 1..429: mol_type = other DNA
atgatcagcaccgccagagtgcccgccgacaagcccgtgagaatcgccttcagcctgaacgacgccagcgacgacaccccccccgaggacagcatccccctggtgttccccgagctggaccagcagctgcagcccctgcccccctgccacgacagcgaggagagcatggaggtgttcaagcagcactgccagatcgccgaggagtaccacgaggtgaagaaggagatcaccctgctggagcagagaaagaaggagctgatcgccaagctggaccaggccgagaaggagaaggtggacgccgccgagctggtgagagagttcgaggccctgaccgaggagaacagaaccctgagactggcccagagccagtgcgtggagcagctggagaagctgagaatccagtaccagaagagacagggcagcagctag

SEQ ID NO: 76871 - DNA, 729 bp, synthetic construct
  misc_feature 1..729: note = Description of Artificial Sequence: Synthetic coding sequence
  source 1..729: mol_type = other DNA
atggtgcagctgatcgcccccctggaggtgatgtggaacgaggccgccgacctgaagcccctggccctgagcagaagactggagtgcagcggcggcatcatggcccactacagccccgacctgctgggccccgagatggagagcagatacttcgcccaggtgggcctggagcacctggccagcagcagcccccccgccttcggcttcctgaagtgcctggactacagcatcagcgtgctgtgcagcgccaccagcctggccatgctggaggacaaccccaaggtgagcaagctggccaccggcgactggatgctgaccctgaagcccaagagcatcaccgtgcccgtggagatccccagcagccccctggacgacaccccccccgaggacagcatccccctggtgttccccgagctggaccagcagctgcagcccctgcccccctgccacgacagcgaggagagcatggaggtgttcaagcagcactgccagatcgccgaggagtaccacgaggtgaagaaggagatcaccctgctggagcagagaaagaaggagctgatcgccaagctggaccaggccgagaaggagaaggtggacgccgccgagctggtgagagagttcgaggccctgaccgaggagaacagaaccctgagactggcccagagccagtgcgtggagcagctggagaagctgagaatccagtaccagaagagacagggcagcagctag

SEQ ID NO: 76872 - DNA, 429 bp, synthetic construct; identical to SEQ ID NO: 76870
  misc_feature 1..429: note = Description of Artificial Sequence: Synthetic coding sequence
  source 1..429: mol_type = other DNA

SEQ ID NO: 76873 - DNA, 429 bp, synthetic construct; identical to SEQ ID NO: 76870
  misc_feature 1..429: note = Description of Artificial Sequence: Synthetic coding sequence
  source 1..429: mol_type = other DNA

SEQ ID NO: 76874 - DNA, 429 bp, synthetic construct; identical to SEQ ID NO: 76870
  misc_feature 1..429: note = Description of Artificial Sequence: Synthetic coding sequence
  source 1..429: mol_type = other DNA

SEQ ID NO: 76875 - DNA, 429 bp, synthetic construct; identical to SEQ ID NO: 76870
  misc_feature 1..429: note = Description of Artificial Sequence: Synthetic coding sequence
  source 1..429: mol_type = other DNA

SEQ ID NO: 76876 - DNA, 429 bp, synthetic construct; identical to SEQ ID NO: 76870
  misc_feature 1..429: note = Description of Artificial Sequence: Synthetic coding sequence
  source 1..429: mol_type = other DNA

SEQ ID NO: 76877 - DNA, 729 bp, synthetic construct; identical to SEQ ID NO: 76871
  misc_feature 1..729: note = Description of Artificial Sequence: Synthetic coding sequence
  source 1..729: mol_type = other DNA

SEQ ID NO: 76878 - DNA, 135 bp, synthetic construct
  misc_feature 1..135: note = Description of Artificial Sequence: Synthetic coding sequence
  source 1..135: mol_type = other DNA
atggtgcagctgatcgcccccctggaggtgatgtggaacgaggccgccgacctgaagcccctggccctgagcagaagactggagtgcagcggcggcatcatggcccactacagccccgacctgctgggcccctag

SEQ ID NO: 76879 - DNA, 285 bp, synthetic construct
  misc_feature 1..285: note = Description of Artificial Sequence: Synthetic coding sequence
  source 1..285: mol_type = other DNA
atgatcagcaccgccagagtgcccgccgacaagcccgtgagaatcgccttcagcctgaacgacgccagcgacgacaccccccccgaggacagcatccccctggtgttccccgagctggaccagcagctgcagcccctgcccccctgccacgacagcgaggagagcatggaggtgttcaagcagcactgccagatcgccgaggagtaccacgaggtgaagaaggagatcaccctgctggagcagagaaagaaggagctgatcgccaagctggaccaggccgagtag

SEQ ID NO: 76880 - DNA, 411 bp, synthetic construct
  misc_feature 1..411: note = Description of Artificial Sequence: Synthetic coding sequence
  source 1..411: mol_type = other DNA
atgctggtgagcagcagcagcctgacccccttcccccccgtgagaaccgccgacgacaccccccccgaggacagcatccccctggtgttccccgagctggaccagcagctgcagcccctgcccccctgccacgacagcgaggagagcatggaggtgttcaagcagcactgccagatcgccgaggagtaccacgaggtgaagaaggagatcaccctgctggagcagagaaagaaggagctgatcgccaagctggaccaggccgagaaggagaaggtggacgccgccgagctggtgagagagttcgaggccctgaccgaggagaacagaaccctgagactggcccagagccagtgcgtggagcagctggagaagctgagaatccagtaccagaagagacagggcagcagctag

SEQ ID NO: 76881 - DNA, 786 bp, synthetic construct
  misc_feature 1..786: note = Description of Artificial Sequence: Synthetic coding sequence
  source 1..786: mol_type = other DNA
atggtggtggtggccgccgcccccaaccccgccgacggcacccccaaggtgctgctgctgagcggccagcccgccagcgccgccggcgcccccgccggccaggccctgcccctgatggtgcccgcccagagaggcgccagccccgaggccgccagcggcggcctgccccaggccagaaagagacagagactgacccacctgagccccgaggagaaggccctgagaagaaagctgaagaacagagtggccgcccagaccgccagagacagaaagaaggccagaatgagcgagctggagcagcaggtggtggacctggaggaggagaaccagaagctgctgctggagaaccagctgctgagagagaagacccacggcctggtggtggagaaccaggagctgagacagagactgggcatggacgccctggtggccgaggaggaggccgaggccaagggcaacgaggtgagacccgtggccggcagcgccgagagcgccgccctgagactgagagcccccctgcagcaggtgcaggcccagctgagccccctgcagaacatcagcccctggatcctggccgtgctgaccctgcagatccagagcctgatcagctgctgggccttctggaccacctggacccagagctgcagcagcaacgccctgccccagagcctgcccgcctggagaagcagccagagaagcacccagaaggaccccgtgccctaccagccccccttcctgtgccagtggggcagacaccagcccagctggaagcccctgatgaactag

SEQ ID NO: 76882 - DNA, 528 bp, synthetic construct
  misc_feature 1..528: note = Description of Artificial Sequence: Synthetic coding sequence
  source 1..528: mol_type = other DNA
atgagcagaagctacaacgacgagctgcagttcctggagaagatcaacaagaactgctggagaatcaagaagggcttcgtgcccaacatgcaggtggagggcgtgttctacgtgaacgacgccctggagaagctgatgttcgaggagctgagaaacgcctgcagaggcggcggcgtgggcggcttcctgcccgccatgaagcagatcggcaacgtggccgccctgcccggcatcgtgcacagaagcatcggcctgcccgacgtgcacagcggctacggcttcgccatcggcaacatggccgccttcgacatgaacgaccccgaggccgtggtgagccccggcggcgtgggcttcgacatcaactgcggcgtgagactgctgagaaccaacctggacgagagcgacgtgcagcccgtgaaggagcagctggcccaggccatgttcgaccacatccccgtgggcgtgggcagcaagggcgacatgatgagagccgtgcactgccccgagcagaacctggacgtgatctag

SEQ ID NO: 76883 - DNA, 2304 bp, synthetic construct
  misc_feature 1..2304: note = Description of Artificial Sequence: Synthetic coding sequence
  source 1..2304: mol_type = other DNA
atgagccacgccgtgaccatcgaggagccccaggcccagccccaggtgagccagaccagatacagagagagaagcagagccggcagccacatcagcagcaacagagcctacgacttcctgtacgaccccctgttcatcgtgagcagcgagaaggaccacacccaggccaacatccaggccaccctgatcagaagcagactgagaaaggtgcccagattcaagaccatgttcagcaacctgatccactaccccagatacagcctgtactggagcaagagcgaccccgtgccccccttcatcagcagagagtggaagggccacaaggagaagcacagagaggccctgagacagctgaccaccaccgacgccagcttccagatgcccaaggaggtgtacgaggaccccgaggtgaccggcaagaacagatacaagtacttcgagagacccttcctgcccttcttccagcagatgcccttcaacgtggtgtacgccgtgagcaaggccgagccctacaccttcccccccaccagcaccaagcacctgagcatccccagcaagagcaccgtgggcacccagaccgactacagagacgccgacgtgcagaccgacccctacagcgccgagtacgtggtgtgccaggacagcatccccgagctgctgaccctggccaccctgacctggggcagaggcctgcccgccggccaggccgaggtggagatgatcgagagagccagagagaagagagcctgggaggccagcctgcccgccctgagcgacaccagccagttcgagaagagaagaaagatgatgaacgagatggagagaaaggagtgggccttcagagagcaggagatcgagaagctgcaggagatcagactggaggtgctgaaggagctgctgagaaagagagaggagaaccagaacgaggtgaacatgaagcacctgaacgccagatggagcaagctgcaggagggcaaggaggccaagatggccaagatccagagaacccacgtgagcaccatcagaaagctggtgggcaagagaaagaacatcgagggcaagctggagagaagaaacatcatcaaggactacagcgactacgccagccaggtgtacggccccctgagcagactgggctgcttccccgacaacaacagcgaggacttcgtggtgaagaactactacctgaacacctacgagggcctggtggagctggagagctgcctgcccgacttcgtgacccagccccagatcagagcccccaagcccaaggtgatcaccaccaaggccggcttcctgaagagagccgccagactggactacgagctggccgaggtgcacaaggccctgctggacaagaagaacaaggtgctggaggtgaagaagccccccagattcctgcagagaaaccccatcccccagcccagactgcccacccccaccctggagatgaccagcaacgaggaggaggagatggagatggccgtgatctacctgcagaagctgctgagaggcagagtggtgcagaacatgatgttcgagggcaaggagaagagactggagctgatccaggagctgagaacctgccacgccctgcaggaggacgagaagctggtgaagaaggccgagaagcaggtgaccctggccctgcagagacagagaaacctgcacgagcacaaggtgagcctggtggagaaccacctggccggcctggagggcagagccctggccgacatgttcgacttcctgagcaaggagctggtgagactgcaggaggagagaagaatccacgccttcgtgatgctggccgagagacagagaagagtgagagaggccgaggagagcggcagaagacaggtggagaagcagagactgagagaggaggacgagatcttcaaggaggtggtgaaggtgcaccacagcaccatcagcagctacctggaggacatcatcctgaacaccgaggccaacaccgccgaggagcaggccagagccgagatcgagaagatggccgagaagatcaacgacatcgcctacgagatggagagcagaagaacctacctgcagagcgaggagatcgtggccgagctggtgtacagcttcctgatccccgaggtgcagaagtacttcgtgaaggagaaggtgagaaacgcccagagaaagcacatcctggccgcccaccagatcatccacagctacaccgagagcatggtgcagaagaagctgaccgagggcgagcaggacgaggccagcaacgccgccatgctgctggagaaggagacccagaacgagaacaacagctag

SEQ ID NO: 76884 - DNA, 564 bp, synthetic construct
  misc_feature 1..564: note = Description of Artificial Sequence: Synthetic coding sequence
  source 1..564: mol_type = other DNA
atgagccacgccgtgaccatcgaggagccccaggcccagccccaggtgagccagaccagatacagagagagaagcagagccggcagccacatcagcagcaacagagcctacgacttcctgtacgaccccctgttcatcgtgagcagcgagaaggaccacacccaggccaacatccaggccaccctgatcagaagcagactgagaaaggtgcccagattcaagaccatgttcagcaacctgatccactaccccagatacagcctgtactggagcaagagcgaccccgtgccccccttcatcagcagagagtggaagggccacaaggagaagcacagagaggccctgagacagctgaccaccaccgacgccagcttccagatgcccaaggaggtgtacgaggaccccgaggtgaccggcaagaacagatacaagggccagaaccacaccctgttcctgctgctgctgctgagcacctaccccagcctgcagagcctgctgtgggccctgagactgatcatcggcatgctgaccttcaagcagatccacaccctgcagaacatgtag

SEQ ID NO: 76885 - DNA, 717 bp, synthetic construct
  misc_feature 1..717: note = Description of Artificial Sequence: Synthetic coding sequence
  source 1..717: mol_type = other DNA
atgagccacgccgtgaccatcgaggagccccaggcccagccccaggtgagccagaccagatacagagagagaagcagagccggcagccacatcagcagcaacagagcctacgacttcctgtacgaccccctgttcatcgtgagcagcgagaaggaccacacccaggccaacatccaggccaccctgatcagaagcagactgagaaaggtgcccagattcaagaccatgttcagcaacctgatccactaccccagatacagcctgtactggagcaagagcgaccccgtgccccccttcatcagcagagagtggaagggccacaaggagaagcacagagaggccctgagacagctgaccaccaccgacgccagcttccagatgcccaaggaggtgtacgaggaccccgaggtgaccggcaagaacagatacaagtacttcgagagacccttcctgcccttcttccagcagatgcccttcaacgtggtgtacgccgtgagcaaggccgagccctacaccttcccccccaccagcaccaagcacctgagcatccccagcaagagcaccgtgggcacccagaccgactacagagacgccgacgtgcagaccgacccctacagcgccgagtacgtggtgtgccaggacagcatccccgagctgctgaccctggccaccctgacctggggcgagctggtgaacctgctgaccatcggcagatag

SEQ ID NO: 76886 - DNA, 654 bp, synthetic construct
  misc_feature 1..654: note = Description of Artificial Sequence: Synthetic coding sequence
  source 1..654: mol_type = other DNA
atggacctggcccagcccagccagcccgtggacgagctggagctgagcgtgctggagagacagcccgaggagaacacccccctgaacggcgccgacaaggtgttccccagcctggacgaggaggtgccccccgccgaggccaacaaggagagcccctggagcagctgcaacaagaacgtggtgggcagatgcaagctgtggatgatcatcaccagcatcttcctgggcgtgatcaccgtgatcatcatcggcctgtgcctggccgccgtgacctacgtggacgaggacgagaacgagatcctggagctgagcagcaacaagaccttcttcatcatgctgaagatccccgaggagtgcgtggccgaggaggagctgccccacctgctgaccgagagactgaccgacgtgtacagcaccagccccagcctgggcagatacttcaccagcgtggagatcgtggacttcagcggcgagaacgccaccgtgacctacgacctgcagttcggcgtgcccagcgacgacgagaacttcatgaagtacatgatgagcgaggagctggtgctgggcatcctgctgcaggacttcagagaccagaacatccccggctgcgagagcctgggcctggaccccaccagcctgctgctgtacgagtag

SEQ ID NO: 76887 - DNA, 444 bp, synthetic construct
  misc_feature 1..444: note = Description of Artificial Sequence: Synthetic coding sequence
  source 1..444: mol_type = other DNA
atggacctggcccagcccagccagcccgtggacgagctggagctgagcgtgctggagagacagcccgaggagaacacccccctgaacggcgccgacaaggtgttccccagcctggacgaggaggtgccccccgccgaggccaacaaggagagcccctggagcagctgcaacaagaacgtggtgggcagatgcaagctgtggatgatcatcaccagcatcttcctgggcgtgatcaccgtgatcatcatcggcctgtgcctggccgccgtgacctacgtggacgaggacgagaacgagatcctggagctgagcagcaacaagaccttcttcatcatgctgaagatccccgaggagtgcgtggccgaggaggagctgccccacctgctgaccgagagagaggtgggcctgaagcccaaccccgaggccctggtgggcttcgagtag

SEQ ID NO: 76888 - DNA, 753 bp, synthetic construct
  misc_feature 1..753: note = Description of Artificial Sequence: Synthetic coding sequence
  source 1..753: mol_type = other DNA
atggacctggcccagcccagccagcccgtggacgagctggagctgagcgtgctggagagacagcccgaggagaacacccccctgaacggcgccgacaaggtgttccccagcctggacgaggaggtgccccccgccgaggccaacaaggagagcccctggagcagctgcaacaagaacgtggtgggcagatgcaagctgtggatgatcatcaccagcatcttcctgggcgtgatcaccgtgatcatcatcggcctgtgcctggccgccgtgacctacgtggacgaggacgagaacgagatcctggagctgagcagcaacaagaccttcttcatcatgctgaagatccccgaggagtgcgtggccgaggaggagctgccccacctgctgaccgagagaaacgaggtgatggaggccggcctgtgcctgaaggccgtgctgtaccaggtgctggagatgaagggcatccacagcgtgctgcagaagagattctgcggcctgatccagaagcaccagcagcaccagagaggcggcgacagcttcctgagcagattctacagcctggccctgagccccgtgaagcagctgcccagcaccgccagcgccggcagcagcctggacaagggcagaaagcccgccagagtgggcgccatcggcagcgccggcatgagccactgctggagaagcctggtgttctgcctgttcctgttctgcttcgtgctgttcttcgagaccggcagcagaagcgtggcctag

SEQ ID NO: 76889 - DNA, 1293 bp, synthetic construct
  misc_feature 1..1293: note = Description of Artificial Sequence: Synthetic coding sequence
  source 1..1293: mol_type = other DNA
atgtggagactggtgccccccaagctgggcagactgagcagaagcctgaagctggccgccctgggcagcctgctggtgctgatggtgctgcacagccccagcctgctggccagctggcagagaaacgagctgaccgacagaagattcctgcagctgaacaagtgccccgcctgcttcggcaccagctggtgcagaagattcctgaacggccaggtggtgttcgaggcctggggcagactgagactgctggacttcctgaacgtgaagaacgtgtacttcgcccagtacggcgagcccagagagggcggcagaagaagagtggtgctgaagagactgggcagccagagagagctggcccagctggaccagagcatctgcaagagagccaccggcagacccagatgcgacctgctgcaggccatgcccagaaccgagttcgccagactgaacggcgacgtgagactgctgacccccgaggccgtggagggctggagcgacctggtgcactgccccagccagagactgctggacagactggtgagaagatacgccgagaccaaggacagcggcagcttcctgctgagaaacctgaaggacagcgagagaatgcagctgctgctgaccctggccttcaaccccgagcccctggtgctgcagagcttccccagcgacgagggctggcccttcgccaagtacctgggcgcctgcggcagaatggtggccgtgaactacgtgggcgaggagctgtggagctacttcaacgccccctgggagaagagagtggacctggcctggcagctgatggagatcgccgagcagctgaccaacaacgacttcgagttcgccctgtacctgctggacgtgagcttcgacaacttcgccgtgggccccagagacggcaaggtgatcatcgtggacgccgagaacgtgctggtggccgacaagagactgatcagacagaacaagcccgagaactgggacgtgtggtacgagagcaagttcgacgactgcgacaaggaggcctgcctgagcttcagcaaggagatcctgtgcgccagagccaccgtggaccacaactactacgccgtgtgccagaacctgctgagcagacacgccacctggagaggcaccagcggcggcctgctgcacgacccccccagcgagatcgccaaggacggcagactggaggccctgctggacgagtgcgccaaccccaagaagagatacggcagattccaggccgccaaggagctgagagagtacctggcccagctgagcaacaacgtgagatag

SEQ ID NO: 76890 - DNA, 666 bp, synthetic construct
  misc_feature 1..666: note = Description of Artificial Sequence: Synthetic coding sequence
  source 1..666: mol_type = other DNA
atgaagagcgagaacggcaccgtggtgggcagcttccccagcgacgagggctggcccttcgccaagtacctgggcgcctgcggcagaatggtggccgtgaactacgtgggcgaggagctgtggagctacttcaacgccccctgggagaagagagtggacctggcctggcagctgatggagatcgccgagcagctgaccaacaacgacttcgagttcgccctgtacctgctggacgtgagcttcgacaacttcgccgtgggccccagagacggcaaggtgatcatcgtggacgccgagaacgtgctggtggccgacaagagactgatcagacagaacaagcccgagaactgggacgtgtggtacgagagcaagttcgacgactgcgacaaggaggcctgcctgagcttcagcaaggagatcctgtgcgccagagccaccgtggaccacaactactacgccgtgtgccagaacctgctgagcagacacgccacctggagaggcaccagcggcggcctgctgcacgacccccccagcgagatcgccaaggacggcagactggaggccctgctggacgagtgcgccaaccccaagaagagatacggcagattccaggccgccaaggagctgagagagtacctggcccagctgagcaacaacgtgagatag

SEQ ID NO: 76891 - DNA, 5079 bp, synthetic construct
  misc_feature 1..5079: note = Description of Artificial Sequence: Synthetic coding sequence
  source 1..5079: mol_type = other DNA
atgagaagacccccccccctgggccccaccaccgccagcggccccgagggcaacgtgagaaacctgcagaagagacaggcccccggccccggcgccgccggcggctgcggccccgaggccggcggctgcagagagaacaagcagaagagaagaatggtggccagagccacccccggcagaggcgaggtggagagcgacaagagcgtggccgccagcggcgccggcaaggccgccagaagacaggtggagggcagaagaggccccgtgagccccagcgacagcagcgaccccagaggcctggaggccgccaaggaggccgagctgcccctgcagaccgagagacacaccaaggagaagagaaaggtgaccgaggccagcagcgacgacccccagcccggcctggacctggtgagaaaggagagcctgaccagcagcgagagcttccagaccgtggagtgcctgcagagcctgggcaaggagagcatcatcgagggcatcaagagaagaatcagaaacaagaagctgaagagcctggagaacccccccctgaagatcaccgagaacgaggccacccagaacatcaaggtggagttccaggacgagctgtacaagaacacccccaagtacagctgcaacatcctgagccccgaggtggagaacaacagcgtgctgaagctgagagactgcaactgcttcccccacagcaagggctgcaacgacgagaacaacctgccctacaagcccgacggcggctgcatgcacgtggccgagaacttcagcaagaaggagaacctgagaagcctggccgagaagagcgacaccaacagcatcccccagctgctgcagaccgaggagaacgtgatgggcgtgaacaagctgctgcccgaggagagcgacctgtaccagagcaagaccaacggcctgctgagctgcctgcagcacgagaagaacaagtacagcatcgaggagagcagcgtgggcagaaagcccagaaagagaatgaagctgagcgagaaggccgacgagaccgtgaccgagatgaacttcagcaacgagtacaacaagagcgagctgatgctgcaggagaaccagatgatcgccgacggcaaggaggccgagaccaagagccccctgaacgtgctgagaaaggtgagccacaacaccgtgagcctgatggaccacctgctgagcgtgcccgagaccgtggagaaggagaccagcagcgagcaccacgtgaacgccgtgttccagaagaccatcgagcccctgctgaaggaggagaccgagaacgccagcgagcccctgggctacgagagcatggccagcaaggaggacttcaagagcatgaagagcttcatcggcaagagccccaacgagtaccacatcgagagaagaagcagcagagaggacctgagaagcgccagcgaggagctgaagctgagctgccagagaaccatccccatgaccggcaagagaacctggccctactacagctgcgccagaatcagcgcctggtgctggaagaaggccagcctgcccgagagcagctacttcctgagaggcagccaggagagctgcagacaggtggacgtgcccaagcaccagaccaaccagacccacctgaccgacagcaagctgctgctgcagagcagcctgaccgagaccaacaccgagagcagcagcaaggagaagctggacagcaacagcaactgcctgagcagcgtgagcgccgtggagcccaccctgatggtgatcaaggagcccatcatcaaggacgacaagaagatcaagagcgaggagctgagcagaagaggcagcgaggtgatcagcaacaccaccgaggacacccagctgaccagcgagacccagagcctgaccggcaacaagaagaaggccagaggcaacctgaccaagctgaacctgaccgccaccagcaaggacggccaggaggccaacaacagcgccggcaagaccatccacagaaaggcctgcatcgcccagcagaccttcatcgtgcccgacctggtgaagatcctgaacaccggcagactgaccaacttcaagatccccctgctgaagaacaagagcgagaagagaaaggaggtgaacgccaagagcagcgagagagaggcctacagccccctggagctgctggacaacctgagcggcgccgacgtgagacagaacagaagcaaggagaacgtgagcatgatgatgctgggcccccagaccctgagcatcagaaacagcgtgacccccgtgcaggccagcagcgacagcttctacaacaagaagagctacagcatcagccccagcttcaccaagcagggcaacaacagcaagcccagcaaccacgtgagcgagcccggcaacatcgtgagcaacaaggaggtggccagcctgaccgtggagaacaacgccttcagctgcgaccccggctacgtggagaagagccccagcttctgctgcaacgagcaggagaccttcagacccgtgagcagcgaggtgagaggcagaaagatcaccaagaacttcagcgaggtgggcttccccgacatcctgaaggcctacgaggacgacgtgctgctgatcgacgtgatccaggacgaccccgacctgttcggcgtgagcaacgagggcgagctgagcttcaccagcgaggtgcccaagatcagccaggagcccaacgtggccggcgagcaccagagcaccgacagcaagtacatggagacccccgtgaagaaggagcccagcgacgacctgagagagctgcccgtgctggactgcggctggatcaagcccgacatctgcgccagcaacagcgccgagagcgagatcaagagagaccccaaggacgtgaacaccagcctgggcgaggtggccaacgagaccagcgagaacgagaccctgggcgacttcagcgagcagatcaagggcagcgacctggacgagaagcacagattcaccgacaaggtgatcaccaaggaggagaaggagaacatctacgaggtgtgcaagagcaaggacagcagaaacgccgacttcatggtgggcgagtgccagttcgccgtgcccgtgcccaagcccctgtgcctgctggtgccccccctgaacctgagcggcagacaggaggacaccatcctgaacacctggatgaacgacttcagattcctgggcaagcacagcgtgctgaagctgcagaaccccgagacctgcgagatcttcaagagagagaagaacgtgggcgtgttccagaagagcctgggcctgatgatcccctacaagtactgcaagttccacttcaacaccctgagaggctgcgagagacccctgtgcaagttcgcccacgtgcccgagcagggcgacgagaaggtgtgcatggacgtgttcaagaagtacatcaacatcaacgagctgtgcctgctgcagagagccgtgaacatcttcatggagtactacagaaagttcccccccggcgtgtacttcgacctgcaggtgctgaacgacctgctgaacagcctgctgaagcactgcctgctgaaggaggtgttccagatcgtgaacctgagcatcatggtgaagatgctgcccagcctgaagatcctgctgaacatcttcgagtacgtggccaccatgaagctgagaaacgccgtgcccgccctgatcgacatcttctgcaagctggtggaggccggcatggtgctggaccccgagcacttcaactacatcgtgaagctgctgtaccaggtgcaggccagcaagcaggagatcaccgccgtgctggagatgaagagcagactgcagatgagaagattcaagaagaactggaagtgcgacctggacagcgccctgaacaagctggagcactgcaaggagaagggcgactggaccaagctgggcaagctgtacatcaacgtgaagatgggctgcgagaagttcgccgacttccagaccttctgcgcctgcatcgccgagaccctgaccaagaactacgaggacgagagacccgacatccccttctgcgagttcgccgagaccgtgagcaaggacccccagaacagcaaggtggacaagggcgtgctgggcagaatcggcatcagcgccatgtacttctaccacaagctgctgcagtggagcaagggcagaaaggtgctggagaagctgtacgagctgaagatccacttcaccagcctgaagggcctgatcggccccgagaagctggccagcagatgccagatcgtgaacgtggccgccgagatcttcctgaagagcggcagcctggacggcgccatctgggtgatgagagagagcgagtggatcatcaacacccccctgtggccctgcgacagactggacgtgctgaacagacacaacctgctgtgcaccatcgcccacgagatcctggccaagagcctgtacagacagaccttcgaggtgctgcagaacctgcccggcttccagaacagccaggagaccgtggaggtgagccagtacagcctgctgttcaacaagctgctgggcagctgcatcgagagcagcagcctgggcatgagcagcagcgtggccgagttcatgatcagcaagagcatccccatcgacttcagcttcctgagaagactgatcaccagcctgggcagaagcagactgtggctgaaggccagagcccactacaagagcgccctgagcctgggctgctacccccccctggagggcaacctgtacagaaagctgctgctgatccccagctacctgagcgagatcgagatgctgctggccatcgagatcttcatggtgagcaacgccagcagcatccagagccccggcaccagcacccagatcctgcagatcgtgctgaagagatgcgaggacaaccagagcagaagcaacgacgactaccaggccgccgtggagagactgatcatggccgccagaatcagcgaccccaagctgttcgtgaagcacatgaccgtgaacgtgaacaaggagcaggtgtacagcctggagcactgcagcgccctgaagtggctgaaggagaacatgaagtgggccggcaaggtgtggctgttcagcaaccactag

SEQ ID NO: 76892 - DNA, 207 bp, synthetic construct
  misc_feature 1..207: note = Description of Artificial Sequence: Synthetic coding sequence
  source 1..207: mol_type = other DNA
atggtgtactaccccgagctgttcgtgtgggtgagccaggagcccttccccaacaaggacatggagggcagactgcccaagggcagactgcccgtgcccaaggaggtgaacagaaagaagaacgacgagaccaacgccgccagcctgacccccctgggcagcagcgagctgagaagccccagaatcagctacctgcacttcttctag

SEQ ID NO: 76893 - DNA, 207 bp, synthetic construct; identical to SEQ ID NO: 76892
  misc_feature 1..207: note = Description of Artificial Sequence: Synthetic coding sequence
  source 1..207: mol_type = other DNA

SEQ ID NO: 76894 - DNA, 339 bp, synthetic construct
  misc_feature 1..339: note = Description of Artificial Sequence: Synthetic coding sequence
  source 1..339: mol_type = other DNA
atgaagggcgtgtggaactacagcgccctgagcagaagagaggacgagaccagaacccagagaagcagaatgaccgacagagtgccctgcagcaagtgcttccaggtgcactgccagatcagcgtgctgaactgcgtgtactaccccgagctgttcgtgtgggtgagccaggagcccttccccaacaaggacatggagggcagactgcccaagggcagactgcccgtgcccaaggaggtgaacagaaagaagaacgacgagaccaacgccgccagcctgacccccctgggcagcagcgagctgagaagccccagaatcagctacctgcacttcttctag

SEQ ID NO: 76895 - DNA, 207 bp, synthetic construct; identical to SEQ ID NO: 76892
  misc_feature 1..207: note = Description of Artificial Sequence: Synthetic coding sequence
  source 1..207: mol_type = other DNA

SEQ ID NO: 76896 - DNA, 207 bp, synthetic construct; identical to SEQ ID NO: 76892
  misc_feature 1..207: note = Description of Artificial Sequence: Synthetic coding sequence
  source 1..207: mol_type = other DNA

SEQ ID NO: 76897 - DNA, 207 bp, synthetic construct; identical to SEQ ID NO: 76892
  misc_feature 1..207: note = Description of Artificial Sequence: Synthetic coding sequence
  source 1..207: mol_type = other DNA

SEQ ID NO: 76898 - DNA, 207 bp, synthetic construct; identical to SEQ ID NO: 76892
  misc_feature 1..207: note = Description of Artificial Sequence: Synthetic coding sequence
  source 1..207: mol_type = other DNA

SEQ ID NO: 76899 - DNA, 207 bp, synthetic construct; identical to SEQ ID NO: 76892
  misc_feature 1..207: note = Description of Artificial Sequence: Synthetic coding sequence
  source 1..207: mol_type = other DNA

SEQ ID NO: 76900 - DNA, 207 bp, synthetic construct; identical to SEQ ID NO: 76892
  misc_feature 1..207: note = Description of Artificial Sequence: Synthetic coding sequence
  source 1..207: mol_type = other DNA

SEQ ID NO: 76901 - DNA, 18 bp, synthetic construct
  misc_feature 1..18: note = Description of Artificial Sequence: Synthetic coding sequence
  source 1..18: mol_type = other DNA
atggtgtactacccctag

SEQ ID NO: 76902 - DNA, 102 bp, synthetic construct
  misc_feature 1..102: note = Description of Artificial Sequence: Synthetic coding sequence
  source 1..102: mol_type = other DNA
atggtgtactaccccgagctgttcgtgtgggtgagccaggagcccttccccaacaaggacatggagggcagactgcccaagggcagactgcccgtgccctag

SEQ ID NO: 76903 - DNA, 207 bp, synthetic construct; identical to SEQ ID NO: 76892
  misc_feature 1..207: note = Description of Artificial Sequence: Synthetic coding sequence
  source 1..207: mol_type = other DNA

SEQ ID NO: 76904 - DNA, 207 bp, synthetic construct; identical to SEQ ID NO: 76892
  misc_feature 1..207: note = Description of Artificial Sequence: Synthetic coding sequence
  source 1..207: mol_type = other DNA

SEQ ID NO: 76905 - DNA, 198 bp, synthetic construct
  misc_feature 1..198: note = Description of Artificial Sequence: Synthetic coding sequence
  source 1..198: mol_type = other DNA
atggtgtactaccccgagctgttcgtgtgggtgagccaggagcccttccccaacaaggacatggagggcagactgcccaagggcagactgcccgtgcccaaggaggtgaacagaaagaagaacgacgagaccaacgccgccagcctgacccccctgggcagcagcgagctgagaagccccagaatcagctacctgtag

SEQ ID NO: 76906 - DNA, 735 bp, synthetic construct
  misc_feature 1..735: note = Description of Artificial Sequence: Synthetic coding sequence
  source 1..735: mol_type = other DNA
atgcactacggcgccgccacccacatccagaacagcagaagccacggcctggagaccgtgcccggccaccagagactggagagaggcgccggcggcgagacccccgagttccccggctgccacagccccgccccccccgagaacttcggcaacgagctgctgcccctgagcgcccccctgcagggcctgagcgagggcctgtacccccccggcagaaacaagaccctgcccgccggcgtgctgagagagggcgccgtgcagttcctgcacagaggcctgtgcaacagcaacctgagcagcgaggccagcgccagacccagcggcacccaggacgagctgcacagcagcagaagaaagaccggccagaccagaagagagggcgccagaaagcacctggtgtgcagcttcagactgtaccccttcaccgtgcacaccgtgagccccggcaacagccacctggccctgtaccaggtgttcaaggccgtgaagctgtgccccagcgagaccagcttcttcctgagcagaaagagcctgaagagcagcgacccctggcacccccccagcctgagccccaacagctggaacagacaggccggcttcagagcctggagcagccacctgatcagcctgagcctgacctgcagcgacagccagagcagaagagtgagcagcagccagcagccccccctgcacagcctgagcagccacagaagagccgcccacgtgcccgagtag

SEQ ID NO: 76907 - DNA, 480 bp, synthetic construct
  misc_feature 1..480: note = Description of Artificial Sequence: Synthetic coding sequence
  source 1..480: mol_type = other DNA
atgtacagaagaaagagcggctggaccggctgcgccatcacctgcagcccctgcaccgccatgacccagctgagaaactgcatgagactgagcagaagctgcagcctgacctgggagacccccagatggtacatggccggcagagtggccaccagcaccagcggctgccactgctggatgagcagaagagacctgacccccctgccccaccccagcgagcccggcgtgctggactgcctgggcccctgccacctgctgcccctgctgagccccggcagcccctgctgggtgctgggcctgcacttcagcctgcacccccccagcgccgccagcgccagccacgccctgaccatcaccagcctgccccccggcctgctgcccttcgtgggcgtggagctgaccgcccacccccaggccctgatgggcagaggcttccccagcggcatgggcgccgccggcagacacctgtgcttcctgtag

SEQ ID NO: 76908 - DNA, 480 bp, synthetic construct; identical to SEQ ID NO: 76907
  misc_feature 1..480: note = Description of Artificial Sequence: Synthetic coding sequence
  source 1..480: mol_type = other DNA

SEQ ID NO: 76909 - DNA, 480 bp, synthetic construct; identical to SEQ ID NO: 76907
  misc_feature 1..480: note = Description of Artificial Sequence: Synthetic coding sequence
  source 1..480: mol_type = other DNA

SEQ ID NO: 76910 - DNA, 480 bp, synthetic construct; identical to SEQ ID NO: 76907
  misc_feature 1..480: note = Description of Artificial Sequence: Synthetic coding sequence
  source 1..480: mol_type = other DNA

SEQ ID NO: 76911 - DNA, 294 bp, synthetic construct
  misc_feature 1..294: note = Description of Artificial Sequence: Synthetic coding sequence
  source 1..294: mol_type = other DNA
atgagcagcgcccccgagccccccaccttcaagaaggagccccccaaggagaaggagttccagagccccggcctgagaggcgtgagaaccaccaccctgttcagagccgtgaaccccgagctgttcatcaagcccaacaagcccgtgatggccttcggcctggtgaccctgagcctgtgcgtggcctacatcggctacctgcacgccatccaggagaacaagaaggacctgtacgaggccatcgacagcgagggccacagctacatgagaagaaagaccagcaagtgggactag

SEQ ID NO: 76912 - DNA, 768 bp, synthetic construct
  misc_feature 1..768: note = Description of Artificial Sequence: Synthetic coding sequence
  source 1..768: mol_type = other DNA
atgaccaagaccagcacctgcatctaccacttcctggtgctgagctggtacaccttcctgaactactacatcagccaggagggcaaggacgaggtgaagcccaagatcctggccaacggcgccagatggaagtacatgaccctgctgaacctgctgctgcagaccatcttctacggcgtgacctgcctggacgacgtgctgaagagaaccaagggcggcaaggacatcaagttcctgaccgccttcagagacctgctgttcaccaccctggccttccccgtgagcaccttcgtgttcctggccttctggatcctgttcctgtacaacagagacctgatctaccccaaggtgctggacaccgtgatccccgtgtggctgaaccacgccatgcacaccttcatcttccccatcaccctggccgaggtggtgctgagaccccacagctaccccagcaagaagaccggcctgaccctgctggccgccgccagcatcgcctacatcagcagaatcctgtggctgtacttcgagaccggcacctgggtgtaccccgtgttcgccaagctgagcctgctgggcctggccgccttcttcagcctgagctacgtgttcatcgccagcatctacctgctgggcgagaagctgaaccactggaagtgggtgagcgtgcagatcctgcagagatggagactggagagcgtgggcatctgcttccagtggcccgactggaagagccccgccaagcaccagctggtgaagaacatcagatag

SEQ ID NO: 76913 - DNA, 510 bp, synthetic construct
  misc_feature 1..510: note = Description of Artificial Sequence: Synthetic coding sequence
  source 1..510: mol_type = other DNA
atgaccaagaccagcacctgcatctaccacttcctggtgctgagctggtacaccttcctgaactactacatcagccaggagggcaaggacgaggtgaagcccaagatcctggccaacggcgccagatggaagtacatgaccctgctgaacctgctgctgcagaccatcttctacggcgtgacctgcctggacgacgtgctgaagagaaccaagggcggcaaggacatcaagttcctgaccgccttcagagacctgctgttcaccaccctggccttccccgtgagcaccttcgtgttcctggccttctggatcctgttcctgtacaacagagacctgatctaccccaaggtgctggacaccgtgatccccgtgtggctgaaccacgccatgcacaccttcatcttccccatcaccctggccgaggtggtgctgagaccccacagctaccccagcaagaagaccggcctgaccctgctggccgccgccagcatcgcctacatcagcagatag

SEQ ID NO: 76914 - DNA, 693 bp, synthetic construct
  misc_feature 1..693: note = Description of Artificial Sequence: Synthetic coding sequence
  source 1..693: mol_type = other DNA
atgaccaagaccagcacctgcatctaccacttcctggtgctgagctggtacaccttcctgaactactacatcagccaggagggcaaggacgaggtgaagcccaagatcctggccaacggcgccagatggaagtacatgaccctgctgaacctgctgctgcagaccatcttctacggcgtgacctgcctggacgacgtgctgaagagaaccaagggcggcaaggacatcaagttcctgaccgccttcagagacctgctgttcaccaccctggccttccccgtgagcaccttcgtgttcctggccttctggatcctgttcctgtacaacagagacctgatctaccccaaggtgctggacaccgtgatccccgtgtggctgaaccacgccatgcacaccttcatcttccccatcaccctggccgaggtggtgctgagaccccacagctaccccagcaagaagaccggcctgaccctgctggccgccgccagcatcgcctacatcagcagaatcctgtggctgtacttcgagaccggcacctgggtgtaccccgtgttcgccaagctgagcctgctgggcctggccgccttcttcagcctgagctacgtgttcatcgccagcatctacctgctgggcgagaagctgaaccactggaagtggggcgacatgagacagcccagaaagaagagaaagtag

SEQ ID NO: 76915 - DNA, 507 bp, synthetic construct
  misc_feature 1..507: note = Description of Artificial Sequence: Synthetic coding sequence
  source 1..507: mol_type = other DNA
atgaccaagaccagcacctgcatctaccacttcctggtgctgagctggtacaccttcctgaactactacatcagccaggagggcaaggacgaggtgaagcccaagatcctggccaacggcgccagatggaagtacatgaccctgctgaacctgctgctgcagaccatcttctacggcgtgacctgcctggacgacgtgctgaagagaaccaagggcggcaaggacatcaagttcctgaccgccttcagagacctgctgttcaccaccctggccttccccgtgagcaccttcgtgttcctggccttctggatcctgttcctgtacaacagagacctgatctaccccaaggtgctggacaccgtgatccccgtgtggctgaaccacgccatgcacaccttcatcttccccatcaccctggccgaggtggtgctgagaccccacagctaccccagcaagaagaccggcctgaccctgctggccgccgccagcatcgcctacatcagctag

SEQ ID NO: 76916 - DNA, 675 bp, synthetic construct
  misc_feature 1..675: note = Description of Artificial Sequence: Synthetic coding sequence
  source 1..675: mol_type = other DNA
atgagcttcgtggaggacgtgaccatcggcgagggcgagagcatcccccccgacacccagttcgtgaagacctggagaatccagaacagcggcgccgaggcctggccccccggcgtgtgcctgaagtacgtgggcggcgaccagttcggccacgtgaacatggtgatggtgagaagcctggagccccaggagatcgccgacgtgagcgtgcagatgtgcagccccagcagagccggcatgtaccagggccagtggagaatgtgcaccgccaccggcctgtactacggcgacgtgatctgggtgatcctgagcgtggaggtgggcggcctgctgggcgtgacccagcagctgagcagcttcgagaccgagttcaacacccagccccacagaaaggtggagggcaacttcaaccccttcgccagcccccagaagaacagacagagcgacgagaacaacctgaaggaccccggcggcagcgagttcgacagcatcagcaagaacacctgggcccccgcccccgacacctgggcccccgcccccgaccagaccgagcaggaccagaacagactgagccagaacagcgtgaacctgagccccagcagccacgccaacaacctgagcgtggtgacctacagcaagggcctgcacggcccctaccccttcggccagagctag

SEQ ID NO: 76917 - DNA, 897 bp, synthetic construct
  misc_feature 1..897: note = Description of Artificial Sequence: Synthetic coding sequence
  source 1..897: mol_type = other DNA
atggagggcatggacgtggacctggaccccgagctgatgcagaagttcagctgcctgggcaccaccgacaaggacgtgctgatcagcgagttccagagactgctgggcttccagctgaaccccgccggctgcgccttcttcctggacatgaccaactggaacctgcaggccgccatcggcgcctactacgacttcgagagccccaacatcagcgtgcccagcatgagcttcgtggaggacgtgaccatcggcgagggcgagagcatcccccccgacacccagttcgtgaagacctggagaatccagaacagcggcgccgaggcctggccccccggcgtgtgcctgaagtacgtgggcggcgaccagttcggccacgtgaacatggtgatggtgagaagcctggagccccaggagatcgccgacgtgagcgtgcagatgtgcagccccagcagagccggcatgtaccagggccagtggagaatgtgcaccgccaccggcctgtactacggcgacgtgatctgggtgatcctgagcgtggaggtgggcggcctgctgggcgtgacccagcagctgagcagcttcgagaccgagttcaacacccagccccacagaaaggtggagggcaacttcaaccccttcgccagcccccagaagaacagacagagcgacgagaacaacctgaaggaccccggcggcagcgagttcgacagcatcagcaagaacacctgggcccccgcccccgacacctgggcccccgcccccgaccagaccgagcaggaccagaacagactgagccagaacagcgtgaacctgagccccagcagccacgccaacaacctgagcgtggtgacctacagcaagggcctgcacggcccctaccccttcggccagagctag

SEQ ID NO: 76918 - DNA, 699 bp, synthetic construct
  misc_feature 1..699: note = Description of Artificial Sequence: Synthetic coding sequence
  source 1..699: mol_type = other DNA
atggagggcatggacgtggacctggaccccgagctgatgcagaagttcagctgcctgggcaccaccgacaaggacgtgctgatcagcgagttccagagactgctgggcttccagctgaaccccgccggctgcgccttcttcctggacatgaccaactggaacctgcaggccgccatcggcgcctactacgacttcgagagccccaacatcagcgtgcccagcatgagcttcgtggaggacgtgaccatcggcgagggcgagagcatcccccccgacacccagttcgtgaagacctggagaatccagaacagcgacgtgatctgggtgatcctgagcgtggaggtgggcggcctgctgggcgtgacccagcagctgagcagcttcgagaccgagttcaacacccagccccacagaaaggtggagggcaacttcaaccccttcgccagcccccagaagaacagacagagcgacgagaacaacctgaaggaccccggcggcagcgagttcgacagcatcagcaagaacacctgggcccccgcccccgacacctgggcccccgcccccgaccagaccgagcaggaccagaacagactgagccagaacagcgtgaacctgagccccagcagccacgccaacaacctgagcgtggtgacctacagcaagggcctgcacggcccctaccccttcggccagagctag

SEQ ID NO: 76919 - DNA, 126 bp, synthetic construct
  misc_feature 1..126: note = Description of Artificial Sequence: Synthetic coding sequence
  source 1..126: mol_type = other DNA
atgggcgacatctacatcacctggatcggctgcggcctggacagactgcagtgggagaacgtgagcgccatgatcgaggaggtgttcgaggccaccgacatcaagatcaccgtgtacaccctgtag

SEQ ID NO: 76920 - DNA, 459 bp, synthetic construct
  misc_feature 1..459: note = Description of Artificial Sequence: Synthetic coding sequence
  source 1..459: mol_type = other DNA
atggccagcagcctgaacgaggaccccgagggcagcagaatcacctacgtgaagggcgacctgttcgcctgccccaagaccgacagcctggcccactgcatcagcgaggactgcagaatgggcgccggcatcgccgtgctgttcaagaagaagttcggcggcgtgcaggagctgctgaaccagcagaagaagagcggcgaggtggccgtgctgaagagagacggcagatacatctactacctgatcaccaagaagagagccagccacaagcccacctacgagaacctgcagaagagcctggaggccatgaagagccactgcctgaagaacggcgtgaccgacctgagcatgcccagaatcggctgcggcctggacagactgcagtgggagaacgtgagcgccatgatcgaggaggtgttcgaggccaccgacatcaagatcaccgtgtacaccctgtag

SEQ ID NO: 76921 - DNA, 459 bp, synthetic construct; identical to SEQ ID NO: 76920
  misc_feature 1..459: note = Description of Artificial Sequence: Synthetic coding sequence
  source 1..459: mol_type = other DNA

SEQ ID NO: 76922 - DNA, 459 bp, synthetic construct; identical to SEQ ID NO: 76920
  misc_feature 1..459: note = Description of Artificial Sequence: Synthetic coding sequence
  source 1..459: mol_type = other DNA

SEQ ID NO: 76923 - DNA, 459 bp, synthetic construct; identical to SEQ ID NO: 76920
  misc_feature 1..459: note = Description of Artificial Sequence: Synthetic coding sequence
  source 1..459: mol_type = other DNA

SEQ ID NO: 76924 - DNA, 396 bp, synthetic construct
  misc_feature 1..396: note = Description of Artificial Sequence: Synthetic coding sequence
  source 1..396: mol_type = other DNA
atggccagcagcctgaacgaggaccccgagggcagcagaatcacctacgtgaagggcgacctgttcgcctgccccaagaccgacagcctggcccactgcatcagcgaggactgcagaatgggcgccggcatcgccgtgctgttcaagaagaagttcggcggcgtgcaggagctgctgaaccagcagaagaagagcggcgaggtggccgtgctgaagagagacggcagatacatctactacctgatcaccaagaagagagccagccacaagcccacctacgagaacctgcagaagagcctggaggccatgaagagccactgcctgaagaacggcgtgaccgacctgagcatgcccagaatcggctgcggcctggacagactgcagtgggagaactag

SEQ ID NO: 76925 - DNA, 1371 bp, synthetic construct
  misc_feature 1..1371: note = Description of Artificial Sequence: Synthetic coding sequence
  source 1..1371: mol_type = other DNA
atggaggccctgggcgacctggagggccccagagcccccggcggcgacgaccccgccggcagcgccggcgagacccccggctggctgagcagagagcaggtgttcgtgctgatcagcgccgccagcgtgaacctgggcagcatgatgtgctacagcatcctgggccccttcttccccaaggaggccgagaagaagggcgccagcaacaccatcatcggcatgatcttcggctgcttcgccctgttcgagctgctggccagcctggtgttcggcaactacctggtgcacatcggcgccaagttcatgttcgtggccggcatgttcgtgagcggcggcgtgaccatcctgttcggcgtgctggacagagtgcccgacggccccgtgttcatcgccatgtgcttcctggtgagagtgatggacgccgtgagcttcgccgccgccatgaccgccagcagcagcatcctggccaaggccttccccaacaacgtggccaccgtgctgggcagcctggagaccttcagcggcctgggcctgatcctgggcccccccgtgggcggcttcctgtaccagagcttcggctacgaggtgcccttcatcgtgctgggctgcgtggtgctgctgatggtgcccctgaacatgtacatcctgcccaactacgagagcgaccccggcgagcacagcttctggaagctgatcgccctgcccaaggtgggcctgatcgccttcgtgatcaacagcctgagcagctgcttcggcttcctggaccccaccctgagcctgttcgtgctggagaagttcaacctgcccgccggctacgtgggcctggtgttcctgggcatggccctgagctacgccatcagcagccccctgttcggcctgctgagcgacaagagaccccccctgagaaagtggctgctggtgttcggcaacctgatcaccgccggctgctacatgctgctgggccccgtgcccatcctgcacatcaagagccagctgtggctgctggtgctgatcctggtggtgagcggcctgagcgccggcatgagcatcatccccaccttccccgagatcctgagctgcgcccacgagaacggcttcgaggagggcctgagcaccctgggcctggtgagcggcctgttcagcgccatgtggagcatcggcgccttcatgggccccaccctgggcggcttcctgtacgagaagatcggcttcgagtgggccgccgccatccagggcctgtgggccctgatcagcggcctggccatgggcctgttctacctgctggagtacagcagaagaaagagaagcaagagccagaacatcctgagcaccgaggaggagagaaccaccctgctgcccaacgagacctag

SEQ ID NO: 76926 - DNA, 324 bp, synthetic construct
  misc_feature 1..324: note = Description of Artificial Sequence: Synthetic coding sequence
  source 1..324: mol_type = other DNA
atggaggccctgggcgacctggagggccccagagcccccggcggcgacgaccccgccggcagcgccggcgagacccccggctggctgagcagagagcaggtgttcgtgctgatcagcgccgccagcgtgaacctgggcagcatgatgtgctacagcatcctgggccccttcttccccaaggaggccgagaagaagggcgccagcaacaccatcatcggcatgatcttcggcttccagttcaccagctggatctgcggcaccagcatccccggctacggcaccgtgctgtgccacctgttcaccaccatctggagccccaagtag

SEQ ID NO: 76927 - DNA, 324 bp, synthetic construct; identical to SEQ ID NO: 76926
  misc_feature 1..324: note = Description of Artificial Sequence: Synthetic coding sequence
  source 1..324: mol_type = other DNA

SEQ ID NO: 76928 - DNA, 711 bp, synthetic construct
  misc_feature 1..711: note = Description of Artificial Sequence: Synthetic coding sequence
  source 1..711: mol_type = other DNA
atgttctgcttcgtgagagtggccggcatcctgggcatctggaagctgagctgcacctactggagcaagatctacgtgtgcagcagaaacgtgtgcctgagaagaagctacaacagcctgtggggcagcctggagaccttcagcggcctgggcctgatcctgggcccccccgtgggcggcttcctgtaccagagcttcggctacgaggtgcccttcatcgtgctgggctgcgtggtgctgctgatggtgcccctgaacatgtacatcctgcccaactacgagagcgaccccggcgagcacagcttctggaagctgatcgccctgcccaaggtgggcctgatcgccttcgtgatcaacagcctgagcagctgcttcggcttcctggaccccaccctgagcctgttcgtgctggagaagttcaacctgcccgccggctacgtgggcctggtgttcctgggcatggccctgagctacgccatcagcagccccctgttcggcctgctgagcgacaagagaccccccctgagaaagtggctgctggtgttcggcaacctgatcaccgccggctgctacatgctgctgggccccgtgcccatcctgcacatcaagagccagctgtggctgctggtgctgatcctggtggtgagcggcctgagcgccggcatgagcatcatccccaccttccccgagatcctgagctgcgcccagtag

SEQ ID NO: 76929 - DNA, 654 bp, synthetic construct
  misc_feature 1..654: note = Description of Artificial Sequence: Synthetic coding sequence
  source 1..654: mol_type = other DNA
atggacgcccccagaagattccccaccctggtgcagctgatgcagcccaaggccatgcccgtggaggtgctgggccacctgcccaagagattcagctggttccacagcgagttcctgaagaaccccaaggtggtgagactggaggtgtggctggtggagaagatcttcggcagaggcggcgagagaatcccccacgtgcagggcatgagccagatcctgatccacgtgaacagactggaccccaacggcgaggccgagatcctggtgttcggcagacccagctaccaggaggacaccatcaagatgatcatgaacctggccgactaccacagacagctgcaggccaagggcagcggcaaggccctggcccaggacgtggccacccagaaggccgagacccagagaagcagcatcgaggtgagagaggccggcacccagagaagcgtggaggtgagagaggccggcacccagagaagcgtggaggtgcaggaggtgggcacccagggcagccccgtggaggtgcaggaggccggcacccagcagagcctgcaggccgccaacaagagcggcacccagagaagccccgaggccgccagcaaggccgtgacccagagattcagagaggacgccagagaccccgtgaccagactgtag

SEQ ID NO: 76930 - DNA, 1416 bp, synthetic construct
  misc_feature 1..1416: note = Description of Artificial Sequence: Synthetic coding sequence
  source 1..1416: mol_type = other DNA
atgcccagcgagacccacgccatgctggccaccctggccagagtggccgccctgagaagaacctgcctgttcagcggcagaggcggcggcagaggcctgtggaccggcagaccccagagcgacatgaacaacatcaagcccctggagggcgtgaagatcctggacctgaccagagtgctggccggccccttcgccaccatgaacctgggcgacctgggcgccgaggtgatcaaggtggagagacccggcgccggcgacgacaccagaacctggggcccccccttcgtgggcaccgagagcacctactacctgagcgtgaacagaaacaagaagagcatcgccgtgaacatcaaggaccccaagggcgtgaagatcatcaaggagctggccgccgtgtgcgacgtgttcgtggagaactacgtgcccggcaagctgagcgccatgggcctgggctacgaggacatcgacgagatcgccccccacatcatctactgcagcatcaccggctacggccagaccggccccatcagccagagagccggctacgacgccgtggccagcgccgtgagcggcctgatgcacatcaccggccccgagaacggcgaccccgtgagacccggcgtggccatgaccgacctggccaccggcctgtacgcctacggcgccatcatggccggcctgatccagaagtacaagaccggcaagggcctgttcatcgactgcaacctgctgagcagccaggtggcctgcctgagccacatcgccgccaactacctgatcggccagaaggaggccaagagatggggcaccgcccacggcagcatcgtgccctaccaggccttcaagaccaaggacggctacatcgtggtgggcgccggcaacaaccagcagttcgccaccgtgtgcaagatcctggacctgcccgagctgatcgacaacagcaagtacaagaccaaccacctgagagtgcacaacagaaaggagctgatcaagatcctgagcgagagattcgaggaggagctgaccagcaagtggctgtacctgttcgagggcagcggcgtgccctacggccccatcaacaacatgaagaacgtgttcgccgagccccagaacgccgtgagcggcttccagagcctgctgcacagcctggcccacggccccttcctgcacctgcagggcagcgccagagtgctgcacaacggcctggtgatggagatggagcaccccaccgtgggcaagatcagcgtgcccggccccgccgtgagatacagcaagttcaagatgagcgaggccagacccccccccctgctgggccagcacaccacccacatcctgaaggaggtgctgagatacgacgacagagccatcggcgagctgctgagcgccggcgtggtggaccagcacgagacccactag

SEQ ID NO: 76931 - DNA, 1338 bp, synthetic construct
  misc_feature 1..1338: note = Description of Artificial Sequence: Synthetic coding sequence
  source 1..1338: mol_type = other DNA
atgcccagcgagacccacgccatgctggccaccctggccagagtggccgccctgagaagaacctgcctgttcagcggcagaggcggcggcagaggcctgtggaccggcagaccccagagcgacatgaacaacatcaagcccctggagggcgtgaagatcctggacctgaccagagtgctggccggccccttcgccaccatgaacctgggcgacctgggcgccgaggtgatcaaggtggagagacccggcgccggcgacgacaccagaacctggggcccccccttcgtgggcaccgagagcacctactacctgagcgtgaacagaaacaagaagagcatcgccgtgaacatcaaggaccccaagggcgtgaagatcatcaaggagctggccgccgtgtgcgacgtgttcgtggagaactacgtgcccggcaagctgagcgccatgggcctgggctacgaggacatcgacgagatcgccccccacatcatctactgcagcatcaccggctacggccagaccggccccatcagccagagagccggctacgacgccgtggccagcgccgtgagcggcctgatgcacatcaccggccccgagaacggcgaccccgtgagacccggcgtggccatgaccgacctggccaccggcctgtacgcctacggcgccatcatggccggcctgatccagaagtacaagaccggcaagggcctgttcatcgactgcaacctgctgagcagccaggtggcctgcctgagccacatcgccgccaactacctgatcggccagaaggaggccaagagatggggcaccgcccacggcagcatcgtgccctaccaggccttcaagaccaaggacggctacatcgtggtgggcgccggcaacaaccagcagttcgccaccgtgtgcaagatcctggacctgcccgagctgatcgacaacagcaagtacaagaccaaccacctgagagtgcacaacagaaaggagctgatcaagatcctgagcgagagattcgaggaggagctgaccagcaagtggctgtacctgttcgagggcagcggcgtgccctacggccccatcaacaacatgaagaacgtgttcgccgagccccaggtgctgcacaacggcctggtgatggagatggagcaccccaccgtgggcaagatcagcgtgcccggccccgccgtgagatacagcaagttcaagatgagcgaggccagacccccccccctgctgggccagcacaccacccacatcctgaaggaggtgctgagatacgacgacagagccatcggcgagctgctgagcgccggcgtggtggaccagcacgagacccactag

SEQ ID NO: 76932 - DNA, 609 bp, synthetic construct
  misc_feature 1..609: note = Description of Artificial Sequence: Synthetic coding sequence
  source 1..609: mol_type = other DNA
atgctggccaccctggccagagtggccgccctgagaagaacctgcctgttcagcggcagaggcggcggcagaggcctgtggaccggcagaccccagagcgacatgaacaacatcaagcccctggagggcgtgaagatcctggacctgaccagagtgctggccggccccttcgccaccatgaacctgggcgacctgggcgccgaggtgatcaaggtggagagacccggcgccggcgacgacaccagaacctggggcccccccttcgtgggcaccgagagcacctactacctgagcgtgaacagaaacaagaagagcatcgccgtgaacatcaaggaccccaagggcgtgaagatcatcaaggagctggccgccgtgtgcgacgtgttcgtggagaactacgtgcccggcaagctgagcgccatgggcctgggctacgaggacatcgacgagatcgccccccacatcatctactgcagcatcaccgagaagggcttcagccacgtggcccaggacggcctggacctgcagaccagcagcaacctgcccgccctggtgagccagagcgccggcatcaccggcatgagccacagagcctggcccaccagctag

SEQ ID NO: 76933 - DNA, 1194 bp, synthetic construct
  misc_feature 1..1194: note = Description of Artificial Sequence: Synthetic coding sequence
  source 1..1194: mol_type = other DNA
atgcccagcgagacccacgccatgctggccaccctggccagagtggccgccctgagaagaacctgcctgttcagcggcagaggcggcggcagaggcctgtggaccggcagaccccagagcgacatgaacaacatcaagcccctggagggcgtgaagatcctggacctgaccagagtgctggccggccccttcgccaccatgaacctgggcgacctgggcgccgaggtgatcaaggtggagagacccggcgccggcgacgacaccagaacctggggcccccccttcgtgggcaccgagagcacctactacctgagcgtgaacagaaacaagaagagcatcgccgtgaacatcaaggaccccaagggcgtgaagatcatcaaggagctggccgccgtgtgcgacgtgttcgtggagaactacgtgcccggcaagctgagcgccatgggcctgggctacgaggacatcgacgagatcgccccccacatcatctactgcagcatcaccggctacggccagaccggccccatcagccagagagccggctacgacgccgtggccagcgccgtgagcggcctgatgcacatcaccggccccgaggtggcctgcctgagccacatcgccgccaactacctgatcggccagaaggaggccaagagatggggcaccgcccacggcagcatcgtgccctaccaggccttcaagaccaaggacggctacatcgtggtgggcgccggcaacaaccagcagttcgccaccgtgtgcaagatcctggacctgcccgagctgatcgacaacagcaagtacaagaccaaccacctgagagtgcacaacagaaaggagctgatcaagatcctgagcgagagattcgaggaggagctgaccagcaagtggctgtacctgttcgagggcagcggcgtgccctacggccccatcaacaacatgaagaacgtgttcgccgagccccaggtgctgcacaacggcctggtgatggagatggagcaccccaccgtgggcaagatcagcgtgcccggccccgccgtgagatacagcaagttcaagatgagcgaggccagacccccccccctgctgggccagcacaccacccacatcctgaaggaggtgctgagatacgacgacagagccatcggcgagctgctgagcgccggcgtggtggaccagcacgagacccactag

SEQ ID NO: 76934 - DNA, 540 bp, synthetic construct
  misc_feature 1..540: note = Description of Artificial Sequence: Synthetic coding sequence
  source 1..540: mol_type = other DNA
atgcagagacagaacttcagaccccccacccccccctaccccggccccggcggcggcggctggggcagcggcagcagcttcagaggcacccccggcggcggcggccccagaccccccagccccagagacggctacggcagcccccaccacacccccccctacggccccagaagcagaccctacggcagcagccacagccccagacacggcggcagcttccccggcggcagattcggcagccccagccccggcggctaccccggcagctacagcagaagccccgccggcagccagcagcagttcggctacagccccggccagcagcagacccacccccagggcagccccagaaccagcacccccttcggcagcggcagagtgagagagaagagaatgagcaacgagctggagaactacttcaagcccagcatgctggaggacccctgggccggcctggagcccgtgagcgtggtggacatcagccagcagtacagcaacacccagaccttcaccggcaagaagggcagatacttctgctag

SEQ ID NO: 76935 - DNA, 480 bp, synthetic construct
  misc_feature 1..480: note = Description of Artificial Sequence: Synthetic coding sequence
  source 1..480: mol_type = other DNA
atgaagatcgtggacgagagagagaagaacctggacgacaaggcctacagaaacatcaaggagctggagaactacgccgagaacacccagagcagcctgctgtacctgaccctggagatcctgggcatcaaggacctgcacgccgaccacgccgccagccacatcggcaaggcccagggcatcgtgacctgcctgagagccaccccctaccacggcagcagaagaaaggtgttcctgcccatggacatctgcatgctgcacggcgtgagccaggaggacttcctgagaagaaaccaggacaagaacgtgagagacgtgatctacgacatcgccagccaggcccacctgcacctgaagcacgccagaagcttccacaagaccgtgcccgtgaaggccttccccgccttcctgcagaccgagatcaaggacgccgacacccagggcgtgtgcctggcccagcccgccagcctgggcaagtag

SEQ ID NO: 76936 - DNA, 1002 bp, synthetic construct
  misc_feature 1..1002: note = Description of Artificial Sequence: Synthetic coding sequence
  source 1..1002: mol_type = other DNA
atggccgccagcgcccacggcagcgtgtggggccccctgagactgggcatccccggcctgtgctgcagaagaccccccctgggcctgtacgccagaatgagaagactgcccggccccgaggtgagcggcagaagcgtggccgccgccagcggccccggcgcctggggcaccgaccactactgcctggagctgctgagaaagagagactacgagggctacctgtgcagcctgctgctgcccgccgagagcagaagcagcgtgttcgccctgagagccttcaacgtggagctggcccaggtgaaggacagcgtgagcgagaagaccatcggcctgatgagaatgcagttctggaagaagaccgtggaggacatctactgcgacaaccccccccaccagcccgtggccatcgagctgtggaaggccgtgaagagacacaacctgaccaagagatggctgatgaagatcgtggacgagagagagaagaacctggacgacaaggcctacagaaacatcaaggagctggagaactacgccgagaacacccagagcagcctgctgtacctgaccctggagatcctgggcatcaaggacctgcacgccgaccacgccgccagccacatcggcaaggcccagggcatcgtgacctgcctgagagccaccccctaccacggcagcagaagaaaggtgttcctgcccatggacatctgcatgctgcacggcgtgagccaggaggacttcctgagaagaaaccaggacaagaacgtgagagacgtgatctacgacatcgccagccaggcccacctgcacctgaagcacgccagaagcttccacaagaccgtgcccgtgaaggccttccccgccttcctgcagaccgtgagcctggaggacttcctgaagaagatccagagagtggacttcgacatcttccaccccagcctgcagcagaagaacaccctgctgcccctgtacctgtacatccagagctggagaaagacctactag

SEQ ID NO: 76937 - DNA, 846 bp, synthetic construct
  misc_feature 1..846: note = Description of Artificial Sequence: Synthetic coding sequence
  source 1..846: mol_type = other DNA
atgcccatcagcatcagccacagcagctggctggtgcagagaaagagagactacgagggctacctgtgcagcctgctgctgcccgccgagagcagaagcagcgtgttcgccctgagagccttcaacgtggagctggcccaggtgaaggacagcgtgagcgagaagaccatcggcctgatgagaatgcagttctggaagaagaccgtggaggacatctactgcgacaaccccccccaccagcccgtggccatcgagctgtggaaggccgtgaagagacacaacctgaccaagagatggctgatgaagatcgtggacgagagagagaagaacctggacgacaaggcctacagaaacatcaaggagctggagaactacgccgagaacacccagagcagcctgctgtacctgaccctggagatcctgggcatcaaggacctgcacgccgaccacgccgccagccacatcggcaaggcccagggcatcgtgacctgcctgagagccaccccctaccacggcagcagaagaaaggtgttcctgcccatggacatctgcatgctgcacggcgtgagccaggaggacttcctgagaagaaaccaggacaagaacgtgagagacgtgatctacgacatcgccagccaggcccacctgcacctgaagcacgccagaagcttccacaagaccgtgcccgtgaaggccttccccgccttcctgcagaccgtgagcctggaggacttcctgaagaagatccagagagtggacttcgacatcttccaccccagcctgcagcagaagaacaccctgctgcccctgtacctgtacatccagagctggagaaagacctactag

SEQ ID NO: 76938 - DNA, 321 bp, synthetic construct
  misc_feature 1..321: note = Description of Artificial Sequence: Synthetic coding sequence
  source 1..321: mol_type = other DNA
atgaaggccaagagaagccaccaggccgtgatcatgagcaccagcctgagagtgagccccagcatccacggctaccacttcgacaccgccagcagaaagaaggccgtgggcaacatcttcgagaacaccgaccaggagagcctggagagactgttcagaaacagcggcgacaagaaggccgaggagagagccaagatcatcttcgccatcgaccaggacgtggaggagaagaccagagccctgatggccctgaagaagagaaccaaggacaagctgttccagttcctgaagctgagaaagtacagcatcaaggtgcactag

SEQ ID NO: 76939 - DNA, 1185 bp, synthetic construct
  misc_feature 1..1185: note = Description of Artificial Sequence: Synthetic coding sequence
  source 1..1185: mol_type = other DNA
atggccggcgccgccatggccgagagaggcagagtgcccccccccgcccccgcccccagcaccgagggcctgcccagagccttcctgcagagcctgagaaccctgttcgacatcctggacgacagaagaagaggctgcgtgcacctgagagagatcgagagcagatggcagggcaccgacgccagagagctgcccagaggcgtgctggagggcctgagacaggtggcccccgccagcggctacctgaccttcgagagattcgtggccggcctgagaaccagcctgctgagcgccgacggcggccccagagaccccaccagagcccccgccagacccggcgaccagccccccccccccccccagagactggtgttcgcccccgccgacgagcccagaaccgtgctggagagaaagcccctgcccctgggcgtgagagcccccctggccggccccagcgccgccgccagaagccccgagcagctgtgcgcccccgccgaggccgccccctgccccgccgagcccgagagaagccagagcgccgccctggagcccagcagcagcgccgacgccggcgccgtggcctgcagagccctggaggccgacagcggcgacgccagaagagcccccagagccagaggcgagagaagaagacacaccatcgccagcggcgtggactgcggcctgctgaagcagatgaaggagctggagcaggagaaggaggtgctgctgcagggcctggagatgatggccagaggcagagactggtaccagcagcagctgcagagagtgcaggagagacagagaagactgggccagagcagagccagcgccgacttcggcgccgccggcagccccagacccctgggcagactgctgcccaaggtgcaggaggtggccagatgcctgggcgagctgctggccgccgcctgcgccagcagagccctgccccccagcagcagcggccccccctgccccgccctgaccagcaccagcccccccgtgtggcagcagcagaccatcctgatgctgaaggagcagaacagactgctgacccaggaggtgaccgagaagagcgagagaatcacccagctggagcaggagaagagcgccctgatcaagcagctgttcgaggccagagccctgagccagcaggacggcggccccctggacagcaccttcatctag

SEQ ID NO: 76940 - DNA, 1035 bp, synthetic construct
  misc_feature 1..1035: note = Description of Artificial Sequence: Synthetic coding sequence
  source 1..1035: mol_type = other DNA
atgagaagacccagacagggcggcggcggcgccggcggcagcgccgccgccagagccagagccggcggcctgggcggcggcagcgtgcccgccagagccagaggcgcccccgccgccgccagagccgcctggctgagagacctgtgcgccagaatggccagaccccccagacagcaccccggcgtgtgggccagcctgctgctgctgctgctgaccggccccgccgcctgcgccgccagccccgccgacgacggcgccggccccggcggcagaggccccagaggcagagccagaggcgacaccggcgccgacgaggccgtgcccagacacgacagcagctacggcaccttcgccggcgagttctacgacctgagatacctgagcgaggagggctaccccttccccaccgccccccccgtggaccccttcgccaagatcaaggtggacgactgcggcaagaccaagggctgcttcagatacggcaagcccggctgcaacgccgagacctgcgactacttcctgagctacagaatgatcggcgccgacgtggagttcgagctgagcgccgacaccgacggctgggtggccgtgggcttcagcagcgacaagaagatgggcggcgacgacgtgatggcctgcgtgcacgacgacaacggcagagtgagaatccagcacttctacaacgtgggccagtgggccaaggagatccagagaaaccccgccagagacgaggagggcgtgttcgagaacaacagagtgacctgcagattcaagagacccgtgaacgtgcccagagacgagaccatcgtggacctgcacctgagctggtactacctgttcgcctggggccccgccatccagggcagcatcaccagacacgacatcgacagcccccccgccagcgagagagtggtgagcatctacaagtacgaggacatcttcatgcccagcgccgcctaccagaccttcagcagccccttctgcctgctgctgatcgtggccctgaccttctacctgctgatgggcaccccctag

SEQ ID NO: 76941 - DNA, 393 bp, synthetic construct
  misc_feature 1..393: note = Description of Artificial Sequence: Synthetic coding sequence
  source 1..393: mol_type = other DNA
atgagcagcagcggcggcgcccccggcgccagcgccagcagcgccccccccgcccaggaggagggcatgacctggtggtacagatggctgtgcagactgagcggcgtgctgggcgccgtgagctgcgccatcagcggcctgttcaactgcatcaccatccaccccctgaacatcgccgccggcgtgtggatgatgatggccgtggtgcccatcgtgatcagcctgaccctgaccaccctgctgggcaacgccatcgccttcgccaccggcgtgctgtacggcctgagcgccctgggcaagaagggcgacgccatcagctacgccagaatccagcagcagagacagcaggccgacgaggagaagctggccgagaccctggagggcgagctgtag

SEQ ID NO: 76942 - DNA, 519 bp, synthetic construct
  misc_feature 1..519: note = Description of Artificial Sequence: Synthetic coding sequence
  source 1..519: mol_type = other DNA
atgagcagcagcggcggcgcccccggcgccagcgccagcagcgccccccccgcccaggaggagggcatgacctggtggtacagatggctgtgcagactgagcggcgtgctgggcgccgtgagctgcgccatcagcggcctgttcaactgcatcaccatccaccccctgaacatcgccgccggcgtgtggatgatcatgaacgccttcatcctgctgctgtgcgaggcccccttctgctgccagttcatcgagttcgccaacaccgtggccgagaaggtggacagactgagaagctggcagaaggccgtgttctactgcggcatggccgtggtgcccatcgtgatcagcctgaccctgaccaccctgctgggcaacgccatcgccttcgccaccggcgtgctgtacggcctgagcgccctgggcaagaagggcgacgccatcagctacgccagaatccagcagcagagacagcaggccgacgaggagaagctggccgagaccctggagggcgagctgtag

SEQ ID NO: 76943 - DNA, 345 bp, synthetic construct
  misc_feature 1..345: note = Description of Artificial Sequence: Synthetic coding sequence
  source 1..345: mol_type = other DNA
atgctgaccgccgccggcagcaccgccgagctgagcgcctgcgccatcagcggcctgttcaactgcatcaccatccaccccctgaacatcgccgccggcgtgtggatgatcatgaacgccttcatcctgctgctgtgcgaggcccccttctgctgccagttcatcgagttcgccaacaccgtggccgagaaggtggacagactgagaagctggcagaaggccgtgttctactgcggcatggccgtggtgcccatcgtgatcagcctgaccctgaccaccctgctgggcaacgccatcgccttcgccaccggcgtgctgtacggcctgagcgccctgggcaagtag

SEQ ID NO: 76944 - DNA, 489 bp, synthetic construct
  misc_feature 1..489: note = Description of Artificial Sequence: Synthetic coding sequence
  source 1..489: mol_type = other DNA
atgagcagcagcgccccccccgcccaggaggagggcatgacctggtggtacagatggctgtgcagactgagcggcgtgctgggcgccgtgagctgcgccatcagcggcctgttcaactgcatcaccatccaccccctgaacatcgccgccggcgtgtggatgatcatgaacgccttcatcctgctgctgtgcgaggcccccttctgctgccagttcatcgagttcgccaacaccgtggccgagaaggtggacagactgagaagctggcagaaggccgtgttctactgcggcatggccgtggtgcccatcgtgatcagcctgaccctgaccaccctgctgggcaacgccatcgccttcgccaccggcgtgctgtacggcctgagcgccctgggcaagaagggcgacgccatcagctacgccagaatccagcagcagagacagcaggccgacgaggagaagctggccgagaccctggagggcgagctgtag

SEQ ID NO: 76945 - DNA, 702 bp, synthetic construct
  misc_feature 1..702: note = Description of Artificial Sequence: Synthetic coding sequence
  source 1..702: mol_type = other DNA
atgagcagcagcggcggcgcccccggcgccagcgccagcagcgccccccccgcccaggaggagggcatgacctggtggtacagatggctgtgcagactgagcggcgtgctgggcgccgtgagctgcgccatcagcggcctgttcaactgcatcaccatccaccccctgaacatcgccgccggcgtgtggatgatcatgaacgccttcatcctgctgctgtgcgaggcccccttctgctgccagttcatcgagttcgccaacaccgtggccgagaaggtggacagactgagaagctggcagaaggccgtgttctactgcggcatggccgtggtgcccatcgtgatcagcctgaccctgaccaccctgctgggcaacgccatcgccttcgccaccggcgtgctgtacggcctgagcgccctgggcaagaaggcccagaccgaggccggcagcttcgccgcccagcaccccagagagcccggccccttcagcgagggcaccagacaggccttcgccacccccgccgtggtgagcggcgagatcagaatgcccgccggcgccatgagaagccccatgcccggcagcagcagcagaggcagcagaagaatgagaagaagcagcagaagaccctggagaggcagctgcgagggcctgggcgccccccccagcctgagccccctgctggccctgtgcggcagcaagtag

SEQ ID NO: 76946 - DNA, 576 bp, synthetic construct
  misc_feature 1..576: note = Description of Artificial Sequence: Synthetic coding sequence
  source 1..576: mol_type = other DNA
atgagcagcagcggcggcgcccccggcgccagcgccagcagcgccccccccgcccaggaggagggcatgacctggtggtacagatggctgtgcagactgagcggcgtgctgggcgccgtgagctgcgccatcagcggcctgttcaactgcatcaccatccaccccctgaacatcgccgccggcgtgtggatgatgatggccgtggtgcccatcgtgatcagcctgaccctgaccaccctgctgggcaacgccatcgccttcgccaccggcgtgctgtacggcctgagcgccctgggcaagaaggcccagaccgaggccggcagcttcgccgcccagcaccccagagagcccggccccttcagcgagggcaccagacaggccttcgccacccccgccgtggtgagcggcgagatcagaatgcccgccggcgccatgagaagccccatgcccggcagcagcagcagaggcagcagaagaatgagaagaagcagcagaagaccctggagaggcagctgcgagggcctgggcgccccccccagcctgagccccctgctggccctgtgcggcagcaagtag

SEQ ID NO: 76947 - DNA, 669 bp, synthetic construct
  misc_feature 1..669: note = Description of Artificial Sequence: Synthetic coding sequence
  source 1..669: mol_type = other DNA
atgagcaccctgtgccccccccccagccccgccgtggccaagaccgagatcgccctgagcggcaagagccccctgctggccgccaccttcgcctactgggacaacatcctgggccccagagtgagacacatctgggcccccaagaccgagcaggtgctgctgagcgacggcgagatcaccttcctggccaaccacaccctgaacggcgagatcctgagaaacgccgagagcggcgccatcgacgtgaagttcttcgtgctgagcgagaagggcgtgatcatcgtgagcctgatcttcgacggcaactggaacggcgacagaagcacctacggcctgagcatcatcctgccccagaccgagctgagcttctacctgcccctgcacagagtgtgcgtggacagactgacccacatcatcagaaagggcagaatctggatgcacaaggagagacaggagaacgtgcagaagatcatcctggagggcaccgagagaatggaggaccagggccagagcatcatccccatgctgaccggcgaggtgatccccgtgatggagctgctgagcagcatgaagagccacagcgtgcccgaggagatcgacatcgccgacaccgtgctgaacgacgacgacatcggcgacagctgccacgagggcttcctgctgaagtag

SEQ ID NO: 76948 - DNA, 669 bp, synthetic construct; identical to SEQ ID NO: 76947
  misc_feature 1..669: note = Description of Artificial Sequence: Synthetic coding sequence
  source 1..669: mol_type = other DNA

SEQ ID NO: 76949 - DNA, 1446 bp, synthetic construct
  misc_feature 1..1446: note = Description of Artificial Sequence: Synthetic coding sequence
  source 1..1446: mol_type = other DNA
atgagcaccctgtgccccccccccagccccgccgtggccaagaccgagatcgccctgagcggcaagagccccctgctggccgccaccttcgcctactgggacaacatcctgggccccagagtgagacacatctgggcccccaagaccgagcaggtgctgctgagcgacggcgagatcaccttcctggccaaccacaccctgaacggcgagatcctgagaaacgccgagagcggcgccatcgacgtgaagttcttcgtgctgagcgagaagggcgtgatcatcgtgagcctgatcttcgacggcaactggaacggcgacagaagcacctacggcctgagcatcatcctgccccagaccgagctgagcttctacctgcccctgcacagagtgtgcgtggacagactgacccacatcatcagaaagggcagaatctggatgcacaaggagagacaggagaacgtgcagaagatcatcctggagggcaccgagagaatggaggaccagggccagagcatcatccccatgctgaccggcgaggtgatccccgtgatggagctgctgagcagcatgaagagccacagcgtgcccgaggagatcgacatcgccgacaccgtgctgaacgacgacgacatcggcgacagctgccacgagggcttcctgctgaacgccatcagcagccacctgcagacctgcggctgcagcgtggtggtgggcagcagcgccgagaaggtgaacaagatcgtgagaaccctgtgcctgttcctgacccccgccgagagaaagtgcagcagactgtgcgaggccgagagcagcttcaagtacgagagcggcctgttcgtgcagggcctgctgaaggacagcaccggcagcttcgtgctgcccttcagacaggtgatgtacgccccctaccccaccacccacatcgacgtggacgtgaacaccgtgaagcagatgcccccctgccacgagcacatctacaaccagagaagatacatgagaagcgagctgaccgccttctggagagccaccagcgaggaggacatggcccaggacaccatcatctacaccgacgagagcttcacccccgacctgaacatcttccaggacgtgctgcacagagacaccctggtgaaggccttcctggaccaggtgttccagctgaagcccggcctgagcctgagaagcaccttcctggcccagttcctgctggtgctgcacagaaaggccctgaccctgatcaagtacatcgaggacgacacccagaagggcaagaagcccttcaagagcctgagaaacctgaagatcgacctggacctgaccgccgagggcgacctgaacatcatcatggccctggccgagaagatcaagcccggcctgcacagcttcatcttcggcagacccttctacaccagcgtgcaggagagagacgtgctgatgaccttctag

SEQ ID NO: 76950 - DNA, 168 bp, synthetic construct
  misc_feature 1..168: note = Description of Artificial Sequence: Synthetic coding sequence
  source 1..168: mol_type = other DNA
atgcagaaccagagcagcaccaaccaccccggcgccagcatgctgatgcacatccacctggacaccagcagcctgaagaccctgcacctgggcaccctgttcttcctgttctacctggccctgacccagaacgaggagaacatctgcgacggcaaggtgaccctgtag

SEQ ID NO: 76951 - DNA, 225 bp, synthetic construct
  misc_feature 1..225: note = Description of Artificial Sequence: Synthetic coding sequence
  source 1..225: mol_type = other DNA
atgcagaaccagagcagcaccaaccaccccggcgccagcatcgccctgagcagacccagcctgaacaaggacttcagagaccacgccgagcagcagcacatcgccgcccagcagaaggccgccctgcagcacgcccacgcccacagcagcggctacttcatcacccaggacagcgccttcggcaacctgatcctgcccgtgctgcccagactggaccccgagtag

SEQ ID NO: 76952 - DNA, 168 bp, synthetic construct; identical to SEQ ID NO: 76950
  misc_feature 1..168: note = Description of Artificial Sequence: Synthetic coding sequence
  source 1..168: mol_type = other DNA

SEQ ID NO: 76953 - DNA, 315 bp, synthetic construct
  misc_feature 1..315: note = Description of Artificial Sequence: Synthetic coding sequence
  source 1..315: mol_type = other DNA
atggccgccaacagcagcggccagggcttccagaacaagaacagagtggccatcctggccgagctggacaaggagaagagaaagctgctgatgcagaaccagagcagcaccaaccaccccggcgccagcatcgccctgagcagacccagcctgaacaaggacttcagagaccacgccgagcagcagcacatcgccgcccagcagaaggccgccctgcagcacgcccacgcccacagcagcggctacttcatcacccaggacagcgccttcggcaacctgatcctgcccgtgctgcccagactggaccccgagtag

SEQ ID NO: 76954 - DNA, 2190 bp, synthetic construct
  misc_feature 1..2190: note = Description of Artificial Sequence: Synthetic coding sequence
  source 1..2190: mol_type = other DNA
atgttcagcgccctgaagaagctggtgggcagcgaccaggcccccggcagagacaagaacatccccgccggcctgcagagcatgaaccaggccctgcagagaagattcgccaagggcgtgcagtacaacatgaagatcgtgatcagaggcgacagaaacaccggcaagaccgccctgtggcacagactgcagggcagacccttcgtggaggagtacatccccacccaggagatccaggtgaccagcatccactggagctacaagaccaccgacgacatcgtgaaggtggaggtgtgggacgtggtggacaagggcaagtgcaagaagagaggcgacggcctgaagatggagaacgacccccaggaggccgagagcgagatggccctggacgccgagttcctggacgtgtacaagaactgcaacggcgtggtgatgatgttcgacatcaccaagcagtggaccttcaactacatcctgagagagctgcccaaggtgcccacccacgtgcccgtgtgcgtgctgggcaactacagagacatgggcgagcacagagtgatcctgcccgacgacgtgagagacttcatcgacaacctggacagaccccccggcagcagctacttcagatacgccgagagcagcatgaagaacagcttcggcctgaagtacctgcacaagttcttcaacatccccttcctgcagctgcagagagagaccctgctgagacagctggagaccaaccagctggacatggacgccaccctggaggagctgagcgtgcagcaggagaccgaggaccagaactacggcatcttcctggagatgatggaggccagaagcagaggccacgccagccccctggccgccaacggccagagccccagccccggcagccagagccccgtggtgcccgccggcgccgtgagcaccggcagcagcagccccggcaccccccagcccgccccccagctgcccctgaacgccgccccccccagcagcgtgccccccgtgccccccagcgaggccctgcccccccccgcctgccccagcgcccccgcccccagaagaagcatcatcagcagactgttcggcaccagccccgccaccgaggccgccccccccccccccgagcccgtgcccgccgccgagggccccgccaccgtgcagagcgtggaggacttcgtgcccgacgacagactggacagaagcttcctggaggacaccacccccgccagagacgagaagaaggtgggcgccaaggccgcccagcaggacagcgacagcgacggcgaggccctgggcggcaaccccatggtggccggcttccaggacgacgtggacctggaggaccagcccagaggcagcccccccctgcccgccggccccgtgcccagccaggacatcaccctgagcagcgaggaggaggccgaggtggccgcccccaccaagggccccgcccccgccccccagcagtgcagcgagcccgagaccaagtggagcagcatccccgccagcaagcccagaagaggcaccgcccccaccagaaccgccgcccccccctggcccggcggcgtgagcgtgagaaccggccccgagaagagaagcagcaccagaccccccgccgagatggagcccggcaagggcgagcaggccagcagcagcgagagcgaccccgagggccccatcgccgcccagatgctgagcttcgtgatggacgaccccgacttcgagagcgagggcagcgacacccagagaagagccgacgacttccccgtgagagacgaccccagcgacgtgaccgacgaggacgagggccccgccgagcccccccccccccccaagctgcccctgcccgccttcagactgaagaacgacagcgacctgttcggcctgggcctggaggaggccggccccaaggagagcagcgaggagggcaaggagggcaagacccccagcaaggagaagaagaagaagaagaagaagggcaaggaggaggaggagaaggccgccaagaagaagagcaagcacaagaagagcaaggacaaggaggagggcaaggaggagagaagaagaagacagcagagaccccccagaagcagagagagaaccgccgccgacgagctggaggccttcctgggcggcggcgcccccggcggcagacaccccggcggcggcgactacgaggagctgtag

SEQ ID NO: 76955 - DNA, 1563 bp, synthetic construct
  misc_feature 1..1563: note = Description of Artificial Sequence: Synthetic coding sequence
  source 1..1563: mol_type = other DNA
atgttcagcgccctgaagaagctggtgggcagcgaccaggcccccggcagagacaagaacatccccgccggcctgcagagcatgaaccaggccctgcagagaagattcgccaagggcgtgcagtacaacatgaagatcgtgatcagaggcgacagaaacaccggcaagaccgccctgtggcacagactgcagggcagacccttcgtggaggagtacatccccacccaggagatccaggtgaccagcatccactggagctacaagaccaccgacgacatcgtgaaggtggaggtgtgggacgtggtggacaagggcaagtgcaagaagagaggcgacggcctgaagatggagaacgacccccaggaggccgagagcgagatggccctggacgccgagttcctggacgtgtacaagaactgcaacggcgtggtgatgatgttcgacatcaccaagcagtggaccttcaactacatcctgagagagctgcccaaggtgcccacccacgtgcccgtgtgcgtgctgggcaactacagagacatgggcgagcacagagtgatcctgcccgacgacgtgagagacttcatcgacaacctggacagaccccccggcagcagctacttcagatacgccgagagcagcatgaagaacagcttcggcctgaagtacctgcacaagttcttcaacatccccttcctgcagctgcagagagagaccctgctgagacagctggagaccaaccagctggacatggacgccaccctggaggagctgagcgtgcagcaggagaccgaggaccagaactacggcatcttcctggagatgatggaggccagaagcagaggccacgccagccccctggccgccaacggccagagccccagccccggcagccagagccccgtggtgcccgccggcgccgtgagcaccggcagcagcagccccggcaccccccagcccgccccccagctgcccctgaacgccgccccccccagcagcgtgccccccgtgccccccagcgaggccctgcccccccccgcctgccccagcgcccccgcccccagaagaagcatcatcagcagaccccccccctggggctggagactgagaggcgccctgggcagaagaggccagtggcccccctggggcggcggcagagcctgccactgcctgggcagacacctgcccctgtaccacagactgtgcagatgccccgtggccgccgtgtgcgccagcgagctggaggaggccggccactggtggagccccggctgggccctgcaggtgctgggcctgcaggcccagtgcgagcccgccctgcaggagggcagaggccagctggccagcgccagactgggcggccaccccggccccctgggcgccgagccccccgtgttcctgagagacgtgaccgaggcccaggagggccccgtgagagtgtgcctgcagagactgggcagaggcagactggccgtgggctgcgccctgcccagacacctgctggccctgagagcccacctgggcccccagcacgcctacggcagcgccagcggcagagagccctag

SEQ ID NO: 76956 - DNA, 2193 bp, synthetic construct
  misc_feature 1..2193: note = Description of Artificial Sequence: Synthetic coding sequence
  source 1..2193: mol_type = other DNA
atgttcagcgccctgaagaagctggtgggcagcgaccaggcccccggcagagacaagaacatccccgccggcctgcagagcatgaaccaggccctgcagagaagattcgccaagggcgtgcagtacaacatgaagatcgtgatcagaggcgacagaaacaccggcaagaccgccctgtggcacagactgcagggcagacccttcgtggaggagtacatccccacccaggagatccaggtgaccagcatccactggagctacaagaccaccgacgacatcgtgaaggtggaggtgtgggacgtggtggacaagggcaagtgcaagaagagaggcgacggcctgaagatggagaacgacccccaggaggccgagagcgagatggccctggacgccgagttcctggacgtgtacaagaactgcaacggcgtggtgatgatgttcgacatcaccaagcagtggaccttcaactacatcctgagagagctgcccaaggtgcccacccacgtgcccgtgtgcgtgctgggcaactacagagacatgggcgagcacagagtgatcctgcccgacgacgtgagagacttcatcgacaacctggacagcagaccccccggcagcagctacttcagatacgccgagagcagcatgaagaacagcttcggcctgaagtacctgcacaagttcttcaacatccccttcctgcagctgcagagagagaccctgctgagacagctggagaccaaccagctggacatggacgccaccctggaggagctgagcgtgcagcaggagaccgaggaccagaactacggcatcttcctggagatgatggaggccagaagcagaggccacgccagccccctggccgccaacggccagagccccagccccggcagccagagccccgtggtgcccgccggcgccgtgagcaccggcagcagcagccccggcaccccccagcccgccccccagctgcccctgaacgccgccccccccagcagcgtgccccccgtgccccccagcgaggccctgcccccccccgcctgccccagcgcccccgcccccagaagaagcatcatcagcagactgttcggcaccagccccgccaccgaggccgccccccccccccccgagcccgtgcccgccgccgagggccccgccaccgtgcagagcgtggaggacttcgtgcccgacgacagactggacagaagcttcctggaggacaccacccccgccagagacgagaagaaggtgggcgccaaggccgcccagcaggacagcgacagcgacggcgaggccctgggcggcaaccccatggtggccggcttccaggacgacgtggacctggaggaccagcccagaggcagcccccccctgcccgccggccccgtgcccagccaggacatcaccctgagcagcgaggaggaggccgaggtggccgcccccaccaagggccccgcccccgccccccagcagtgcagcgagcccgagaccaagtggagcagcatccccgccagcaagcccagaagaggcaccgcccccaccagaaccgccgcccccccctggcccggcggcgtgagcgtgagaaccggccccgagaagagaagcagcaccagaccccccgccgagatggagcccggcaagggcgagcaggccagcagcagcgagagcgaccccgagggccccatcgccgcccagatgctgagcttcgtgatggacgaccccgacttcgagagcgagggcagcgacacccagagaagagccgacgacttccccgtgagagacgaccccagcgacgtgaccgacgaggacgagggccccgccgagcccccccccccccccaagctgcccctgcccgccttcagactgaagaacgacagcgacctgttcggcctgggcctggaggaggccggccccaaggagagcagcgaggagggcaaggagggcaagacccccagcaaggagaagaagaagaagaagaagaagggcaaggaggaggaggagaaggccgccaagaagaagagcaagcacaagaagagcaaggacaaggaggagggcaaggaggagagaagaagaagacagcagagaccccccagaagcagagagagaaccgccgccgacgagctggaggccttcctgggcggcggcgcccccggcggcagacaccccggcggcggcgactacgaggagctgtag

SEQ ID NO: 76957 - DNA, 945 bp, synthetic construct
  misc_feature 1..945: note = Description of Artificial Sequence: Synthetic coding sequence
  source 1..945: mol_type = other DNA
atgttcagcgccctgaagaagctggtgggcagcgaccaggcccccggcagagacaagaacatccccgccggcctgcagagcatgaaccaggccctgcagagaagattcgccaagggcgtgcagtacaacatgaagatcgtgatcagaggcgacagaaacaccggcaagaccgccctgtggcacagactgcagggcagacccttcgtggaggagtacatccccacccaggagatccaggtgaccagcatccactggagctacaagaccaccgacgacatcgtgaaggtggaggtgtgggacgtggtggacaagggcaagtgcaagaagagaggcgacggcctgaagatggagaacgacccccaggaggccgagagcgagatggccctggacgccgagttcctggacgtgtacaagaactgcaacggcgtggtgatgatgttcgacatcaccaagcagtggaccttcaactacatcctgagagagctgcccaaggtgcccacccacgtgcccgtgtgcgtgctgggcaactacagagacatgggcgagcacagagtgatcctgcccgacgacgtgagagacttcatcgacaacctggacagaccccccggcagcagctacttcagatacgccgagagcagcatgaagaacagcttcggcctgaagtacctgcacaagttcttcaacatccccttcctgcagctgcagaaggacgtgagactggcccaggagagaggctgcgccgtggtgctggtgagcgaggaggtgagaatgcccgccggctgggactgctgctggggcagactgggctggaaggagggcggcagccagacctgccccgtgcccgccctgctgggcagacccctgctgcccgccgagcccagcccccaccactgggtggactacagcctggagagcagccccctgctgagctgcagcatcccctag

SEQ ID NO: 76958 - DNA, 1566 bp, synthetic construct
  misc_feature 1..1566: note = Description of Artificial Sequence: Synthetic coding sequence
  source 1..1566: mol_type = other DNA
atgttcagcgccctgaagaagctggtgggcagcgaccaggcccccggcagagacaagaacatccccgccggcctgcagagcatgaaccaggccctgcagagaagattcgccaagggcgtgcagtacaacatgaagatcgtgatcagaggcgacagaaacaccggcaagaccgccctgtggcacagactgcagggcagacccttcgtggaggagtacatccccacccaggagatccaggtgaccagcatccactggagctacaagaccaccgacgacatcgtgaaggtggaggtgtgggacgtggtggacaagggcaagtgcaagaagagaggcgacggcctgaagatggagaacgacccccaggaggccgagagcgagatggccctggacgccgagttcctggacgtgtacaagaactgcaacggcgtggtgatgatgttcgacatcaccaagcagtggaccttcaactacatcctgagagagctgcccaaggtgcccacccacgtgcccgtgtgcgtgctgggcaactacagagacatgggcgagcacagagtgatcctgcccgacgacgtgagagacttcatcgacaacctggacagcagaccccccggcagcagctacttcagatacgccgagagcagcatgaagaacagcttcggcctgaagtacctgcacaagttcttcaacatccccttcctgcagctgcagagagagaccctgctgagacagctggagaccaaccagctggacatggacgccaccctggaggagctgagcgtgcagcaggagaccgaggaccagaactacggcatcttcctggagatgatggaggccagaagcagaggccacgccagccccctggccgccaacggccagagccccagccccggcagccagagccccgtggtgcccgccggcgccgtgagcaccggcagcagcagccccggcaccccccagcccgccccccagctgcccctgaacgccgccccccccagcagcgtgccccccgtgccccccagcgaggccctgcccccccccgcctgccccagcgcccccgcccccagaagaagcatcatcagcagaccccccccctggggctggagactgagaggcgccctgggcagaagaggccagtggcccccctggggcggcggcagagcctgccactgcctgggcagacacctgcccctgtaccacagactgtgcagatgccccgtggccgccgtgtgcgccagcgagctggaggaggccggccactggtggagccccggctgggccctgcaggtgctgggcctgcaggcccagtgcgagcccgccctgcaggagggcagaggccagctggccagcgccagactgggcggccaccccggccccctgggcgccgagccccccgtgttcctgagagacgtgaccgaggcccaggagggccccgtgagagtgtgcctgcagagactgggcagaggcagactggccgtgggctgcgccctgcccagacacctgctggccctgagagcccacctgggcccccagcacgcctacggcagcgccagcggcagagagccctag

SEQ ID NO: 76959 - DNA, 1845 bp, synthetic construct
  misc_feature 1..1845: note = Description of Artificial Sequence: Synthetic coding sequence
  source 1..1845: mol_type = other DNA
atggagaacgacccccaggaggccgagagcgagatggccctggacgccgagttcctggacgtgtacaagaactgcaacggcgtggtgatgatgttcgacatcaccaagcagtggaccttcaactacatcctgagagagctgcccaaggtgcccacccacgtgcccgtgtgcgtgctgggcaactacagagacatgggcgagcacagagtgatcctgcccgacgacgtgagagacttcatcgacaacctggacagaccccccggcagcagctacttcagatacgccgagagcagcatgaagaacagcttcggcctgaagtacctgcacaagttcttcaacatccccttcctgcagctgcagagagagaccctgctgagacagctggagaccaaccagctggacatggacgccaccctggaggagctgagcgtgcagcaggagaccgaggaccagaactacggcatcttcctggagatgatggaggccagaagcagaggccacgccagccccctggccgccaacggccagagccccagccccggcagccagagccccgtggtgcccgccggcgccgtgagcaccggcagcagcagccccggcaccccccagcccgccccccagctgcccctgaacgccgccccccccagcagcgtgccccccgtgccccccagcgaggccctgcccccccccgcctgccccagcgcccccgcccccagaagaagcatcatcagcagactgttcggcaccagccccgccaccgaggccgccccccccccccccgagcccgtgcccgccgccgagggccccgccaccgtgcagagcgtggaggacttcgtgcccgacgacagactggacagaagcttcctggaggacaccacccccgccagagacgagaagaaggtgggcgccaaggccgcccagcaggacagcgacagcgacggcgaggccctgggcggcaaccccatggtggccggcttccaggacgacgtggacctggaggaccagcccagaggcagcccccccctgcccgccggccccgtgcccagccaggacatcaccctgagcagcgaggaggaggccgaggtggccgcccccaccaagggccccgcccccgccccccagcagtgcagcgagcccgagaccaagtggagcagcatccccgccagcaagcccagaagaggcaccgcccccaccagaaccgccgcccccccctggcccggcggcgtgagcgtgagaaccggccccgagaagagaagcagcaccagaccccccgccgagatggagcccggcaagggcgagcaggccagcagcagcgagagcgaccccgagggccccatcgccgcccagatgctgagcttcgtgatggacgaccccgacttcgagagcgagggcagcgacacccagagaagagccgacgacttccccgtgagagacgaccccagcgacgtgaccgacgaggacgagggccccgccgagcccccccccccccccaagctgcccctgcccgccttcagactgaagaacgacagcgacctgttcggcctgggcctggaggaggccggccccaaggagagcagcgaggagggcaaggagggcaagacccccagcaaggagaagaagaagaagaagaagaagggcaaggaggaggaggagaaggccgccaagaagaagagcaagcacaagaagagcaaggacaaggaggagggcaaggaggagagaagaagaagacagcagagaccccccagaagcagagagagaaccgccgccgacgagctggaggccttcctgggcggcggcgcccccggcggcagacaccccggcggcggcgactacgaggagctgtag

SEQ ID NO: 76960 - DNA, 678 bp, synthetic construct
  misc_feature 1..678: note = Description of Artificial Sequence: Synthetic coding sequence
  source 1..678: mol_type = other DNA
tgagacgacatcgtgaaggtggaggtgtgggacgtggtggacaagggcaagtgcaagaagagaggcgacggcctgaagatggagaacgacccccaggaggccgagagcgagatggccctggacgccgagttcctggacgtgtacaagaactgcaacggcgtggtgatgatgttcgacatcaccaagcagtggaccttcaactacatcctgagagagctgcccaaggtgcccacccacgtgcccgtgtgcgtgctgggcaactacagagacatgggcgagcacagagtgatcctgcccgacgacgtgagagacttcatcgacaacctggacagaccccccggcagcagctacttcagatacgccgagagcagcatgaagaacagcttcggcctgaagtacctgcacaagttcttcaacatccccttcctgcagctgcagaaggacgtgagactggcccaggagagaggctgcgccgtggtgctggtgagcgaggaggtgagaatgcccgccggctgggactgctgctggggcagactgggctggaaggagggcggcagccagacctgccccgtgcccgccctgctgggcagacccctgctgcccgccgagcccagcccccaccactgggtggactacagcctggagagcagccccctgctgagctgcagcatcccctag

SEQ ID NO: 76961 - DNA, 1416 bp, synthetic construct
  misc_feature 1..1416: note = Description of Artificial Sequence: Synthetic coding sequence
  source 1..1416: mol_type = other DNA
atgaccgtgggcaccgtgaagatcgtgatcagaggcgacagaaacaccggcaagaccgccctgtggcacagactgcagggcagacccttcgtggaggagtacatccccacccaggagatccaggtgaccagcatccactggagctacaagaccaccgacgacatcgtgaaggtggaggtgtgggacgtggtggacaagggcaagtgcaagaagagaggcgacggcctgaagatggagaacgacccccaggaggccgagagcgagatggccctggacgccgagttcctggacgtgtacaagaactgcaacggcgtggtgatgatgttcgacatcaccaagcagtggaccttcaactacatcctgagagagctgcccaaggtgcccacccacgtgcccgtgtgcgtgctgggcaactacagagacatgggcgagcacagagtgatcctgcccgacgacgtgagagacttcatcgacaacctggacagaccccccggcagcagctacttcagatacgccgagagcagcatgaagaacagcttcggcctgaagtacctgcacaagttcttcaacatccccttcctgcagctgcagagagagaccctgctgagacagctggagaccaaccagctggacatggacgccaccctggaggagctgagcgtgcagcaggagaccgaggaccagaactacggcatcttcctggagatgatggaggccagaagcagaggccacgccagccccctggccgccaacggccagagccccagccccggcagccagagccccgtggtgcccgccggcgccgtgagcaccggcagcagcagccccggcaccccccagcccgccccccagctgcccctgaacgccgccccccccagcagcgtgccccccgtgccccccagcgaggccctgcccccccccgcctgccccagcgcccccgcccccagaagaagcatcatcagcagactgttcggcaccagccccgccaccgaggccgccccccccccccccgagcccgtgcccgccgccgagggccccgccaccgtgcagagcgtggaggacttcgtgcccgacgacagactggacagaagcttcctggaggacaccacccccgccagagacgagaagaaggtgggcgccaaggccgcccagcaggacagcgacagcgacggcgaggccctgggcggcaaccccatggtggccggcttccaggacgacgtggacctggaggaccagcccagaggcagcccccccctgcccgccggccccgtgcccagccaggacatcaccctgagcagcgaggaggaggccgaggtggccgcccccaccaagggccccgcccccgccccccagcagtgcagcgagcccgagaccaagtggagcggcgaggcccagcagcaccaggccccctgctag

SEQ ID NO: 76962 - DNA, 1347 bp, synthetic construct
  misc_feature 1..1347: note = Description of Artificial Sequence: Synthetic coding sequence
  source 1..1347: mol_type = other DNA
atgagccacagagcctggctggccctgctgcccctggaggtggacggcgacgacggcctgtgcggcgccggcggccccgagcacagcggcagcagccagccccagcagcagcagcagagagccccctgccacctgagagccagcggcagaggcagaggcgccagactgctgaccagactgctgcccttcagcttcctggagatgatggaggccagaagcagaggccacgccagccccctggccgccaacggccagagccccagccccggcagccagagccccgtggtgcccgccggcgccgtgagcaccggcagcagcagccccggcaccccccagcccgccccccagctgcccctgaacgccgccccccccagcagcgtgccccccgtgccccccagcgaggccctgcccccccccgcctgccccagcgcccccgcccccagaagaagcatcatcagcagactgttcggcaccagccccgccaccgaggccgccccccccccccccgagcccgtgcccgccgccgagggccccgccaccgtgcagagcgtggaggacttcgtgcccgacgacagactggacagaagcttcctggaggacaccacccccgccagagacgagaagaaggtgggcgccaaggccgcccagcaggacagcgacagcgacggcgaggccctgggcggcaaccccatggtggccggcttccaggacgacgtggacctggaggaccagcccagaggcagcccccccctgcccgccggccccgtgcccagccaggacatcaccctgagcagcgaggaggaggccgaggtggccgcccccaccaagggccccgcccccgccccccagcagtgcagcgagcccgagaccaagtggagcagcatccccgccagcaagcccagaagaggcaccgcccccaccagaaccgccgcccccccctggcccggcggcgtgagcgtgagaaccggccccgagaagagaagcagcaccagaccccccgccgagatggagcccggcaagggcgagcaggccagcagcagcgagagcgaccccgagggccccatcgccgcccagatgctgagcttcgtgatggacgaccccgacttcgagagcgagggcagcgacacccagagaagagccgacgacttccccgtgagagacgaccccagcgacgtgaccgacgaggacgagggccccgccgagcccccccccccccccaagctgcccctgcccgccttcagactgaagaacgacagcgacctgttcggcctgggcctggaggaggccggccccaaggagagcagcgaggagggcaaggagggcaagacccccagcaaggagaagtag

SEQ ID NO: 76963 - DNA, 648 bp, synthetic construct
  misc_feature 1..648: note = Description of Artificial Sequence: Synthetic coding sequence
  source 1..648: mol_type = other DNA
tgaaagatcgtgatcagaggcgacagaaacaccggcaagaccgccctgtggcacagactgcagggcagacccttcgtggaggagtacatccccacccaggagatccaggtgaccagcatccactggagctacaagaccaccgacgacatcgtgaaggtggaggtgtgggacgtggtggacaagggcaagtgcaagaagagaggcgacggcctgaagatggagaacgacccccaggaggccgagagcgagatggccctggacgccgagttcctggacgtgtacaagaactgcaacggcgtggtgatgatgttcgacatcaccaagcagtggaccttcaactacatcctgagagagctgcccaaggtgcccacccacgtgcccgtgtgcgtgctgggcaactacagagacatgggcgagcacagagtgatcctgcccgacgacgtgagagacttcatcgacaacctggacagcagaccccccggcagcagctacttcagatacgccgagagcagcatgaagaacagcttcggcctgaagtacctgcacaagttcttcaacatccccttcctgcagctgcaggtgagcacccaccacgtgggctggagcggctgctggagcctgaccagcttccaggtgagccccgtgtag

SEQ ID NO: 76964 - DNA, 336 bp, synthetic construct
  misc_feature 1..336: note = Description of Artificial Sequence: Synthetic coding sequence
  source 1..336: mol_type = other DNA
atgtacagcagactgttctacctgaagagcagctacatcatctacttcgagcccctgttcagcaacgccatcatcaacatcctgagcttcatcaacagcctggccagccccctgaccatcttctgcttcgccctgagcgcccaggccctgagcaccatcttctacttcagaatcttcatcttcatcttccacagctggatcctgctgttccacttctacttcacctgcagcttcaagacctacgagcaccagcacagcaagatggtgcccgcctacagaatgcagagccccagagccctgcccagaacctacctgtacgtgtggccctacaagtag

SEQ ID NO: 76965 - DNA, 342 bp, synthetic construct
  misc_feature 1..342: note = Description of Artificial Sequence: Synthetic coding sequence
  source 1..342: mol_type = other DNA
atgaacttctacctgctgctggccagcagcatcctgtgcgccctgatcgtgttctggaagtacagaagattccagagaaacaccggcgagatgagcagcaacagcaccgccctggccctggtgagacccagcagcagcggcctgatcaacagcaacaccgacaacaacctggccgtgtacgacctgagcagagacatcctgaacaacttcccccacagcatcgccagacagaagagaatcctggtgaacctgagcatggtggagaacaagctggtggagctggagcacaccctgctgagcaagggcttcagaggcgccagcccccacagaaagagcacctag

SEQ ID NO: 76966 - DNA, 2853 bp, synthetic construct
  misc_feature 1..2853: note = Description of Artificial Sequence: Synthetic coding sequence
  source 1..2853: mol_type = other DNA
atgacctggagaatgggccccagattcaccatgctgctggccatgtggctggtgtgcggcagcgagccccacccccacgccaccatcagaggcagccacggcggcagaaaggtgcccctggtgagccccgacagcagcagacccgccagattcctgagacacaccggcagaagcagaggcatcgagagaagcaccctggaggagcccaacctgcagcccctgcagagaagaagaagcgtgcccgtgctgagactggccagacccaccgagccccccgccagaagcgacatcaacggcgccgccgtgagacccgagcagagacccgccgccagaggcagccccagagagatgatcagagacgagggcagcagcgccagaagcagaatgctgagattccccagcggcagcagcagccccaacatcctggccagcttcgccggcaagaacagagtgtgggtgatcagcgccccccacgccagcgagggctactacagactgatgatgagcctgctgaaggacgacgtgtactgcgagctggccgagagacacatccagcagatcgtgctgttccaccaggccggcgaggagggcggcaaggtgagaagaatcaccagcgagggccagatcctggagcagcccctggaccccagcctgatccccaagctgatgagcttcctgaagctggagaagggcaagttcggcatggtgctgctgaagaagaccctgcaggtggaggagagatacccctaccccgtgagactggaggccatgtacgaggtgatcgaccagggccccatcagaagaatcgagaagatcagacagaagggcttcgtgcagaagtgcaaggccagcggcgtggagggccaggtggtggccgagggcaacgacggcggcggcggcgccggcagacccagcctgggcagcgagaagaagaaggaggaccccagaagagcccaggtgccccccaccagagagagcagagtgaaggtgctgagaaagctggccgccaccgcccccgccctgccccagccccccagcacccccagagccaccaccctgccccccgcccccgccaccaccgtgaccagaagcaccagcagagccgtgaccgtggccgccagacccatgaccaccaccgccttccccaccacccagagaccctggacccccagccccagccacagaccccccaccaccaccgaggtgatcaccgccagaagacccagcgtgagcgagaacctgtacccccccagcagaaaggaccagcacagagagagaccccagaccaccagaagacccagcaaggccaccagcctggagagcttcaccaacgccccccccaccaccatcagcgagcccagcaccagagccgccggccccggcagattcagagacaacagaatggacagaagagagcacggccacagagaccccaacgtggtgcccggcccccccaagcccgccaaggagaagccccccaagaagaaggcccaggacaagatcctgagcaacgagtacgaggagaagtacgacctgagcagacccaccgccagccagctggaggacgagctgcaggtgggcaacgtgcccctgaagaaggccaaggagagcaagaagcacgagaagctggagaagcccgagaaggagaagaagaagaagatgaagaacgagaacgccgacaagctgctgaagagcgagaagcagatgaagaagagcgagaagaagagcaagcaggagaaggagaagagcaagaagaagaagggcggcaagaccgagcaggacggctaccagaagcccaccaacaagcacttcacccagagccccaagaagagcgtggccgacctgctgggcagcttcgagggcaagagaagactgctgctgatcaccgcccccaaggccgagaacaacatgtacgtgcagcagagagacgagtacctggagagcttctgcaagatggccaccagaaagatcagcgtgatcaccatcttcggccccgtgaacaacagcaccatgaagatcgaccacttccagctggacaacgagaagcccatgagagtggtggacgacgaggacctggtggaccagagactgatcagcgagctgagaaaggagtacggcatgacctacaacgacttcttcatggtgctgaccgacgtggacctgagagtgaagcagtactacgaggtgcccatcaccatgaagagcgtgttcgacctgatcgacaccttccagagcagaatcaaggacatggagaagcagaagaaggagggcatcgtgtgcaaggaggacaagaagcagagcctggagaacttcctgagcagattcagatggagaagaagactgctggtgatcagcgcccccaacgacgaggactgggcctacagccagcagctgagcgccctgagcggccaggcctgcaacttcggcctgagacacatcaccatcctgaagctgctgggcgtgggcgaggaggtgggcggcgtgctggagctgttccccatcaacggcagcagcgtggtggagagagaggacgtgcccgcccacctggtgaaggacatcagaaactacttccaggtgagccccgagtacttcagcatgctgctggtgggcaaggacggcaacgtgaagagctggtaccccagccccatgtggagcatggtgatcgtgtacgacctgatcgacagcatgcagctgagaagacaggagatggccatccagcagagcctgggcatgagatgccccgaggacgagtacgccggctacggctaccacagctaccaccagggctaccaggacggctaccaggacgactacagacaccacgagagctaccaccacggctacccctactag

SEQ ID NO: 76967 - DNA, 744 bp, synthetic construct
  misc_feature 1..744: note = Description of Artificial Sequence: Synthetic coding sequence
  source 1..744: mol_type = other DNA
atgctgctgctgcccctgcccctgctgctgttcctgctgtgcagcagagccgaggccggcgagatcatcggcggcaccgagtgcaagccccacagcagaccctacatggcctacctggagatcgtgaccagcaacggccccagcaagttctgcggcggcttcctgatcagaagaaacttcgtgctgaccgccgcccactgcgccggcagaagcatcaccgtgaccctgggcgcccacaacatcaccgaggaggaggacacctggcagaagctggaggtgatcaagcagttcagacaccccaagtacaacaccagcaccctgcaccacgacatcatgctgctgaagctgaaggagaaggccagcctgaccctggccgtgggcaccctgcccttccccagccagttcaacttcgtgccccccggcagaatgtgcagagtggccggctggggcagaaccggcgtgctgaagcccggcagcgacaccctgcaggaggtgaagctgagactgatggacccccaggcctgcagccacttcagagacttcgaccacaacctgcagctgtgcgtgggcaaccccagaaagaccaagagcgccttcaagggcgacagcggcggccccctgctgtgcgccggcgtggcccagggcatcgtgagctacggcagaagcgacgccaagccccccgccgtgttcaccagaatcagccactacagaccctggatcaaccagatcctgcaggccaactag

SEQ ID NO: 76968 - DNA, 210 bp, synthetic construct
  misc_feature 1..210: note = Description of Artificial Sequence: Synthetic coding sequence
  source 1..210: mol_type = other DNA
atgctgggcatcaccgtgctggccgccctgctggcctgcgccacccccggccccaccgtgtggccctgggagagaaccacctggagatggaagaccaagaaggacccctgcctgtgggtgtggacccccagcaccagcaccagagacggcatgcccagctgctgcgccatgatcctgcccagcagcagcctgcagagcatgtggagctag

SEQ ID NO: 76969 - DNA, 807 bp, synthetic construct
  misc_feature 1..807: note = Description of Artificial Sequence: Synthetic coding sequence
  source 1..807: mol_type = other DNA
atgctgggcatcaccgtgctggccgccctgctggcctgcgccagcagctgcggcgtgcccagcttcccccccaacctgagcgccagagtggtgggcggcgaggacgccagaccccacagctggccctggcagatcagcctgcagtacctgaagaacgacacctggagacacacctgcggcggcaccctgatcgccagcaacttcgtgctgaccgccgcccactgcatcagcaacaccagaacctacagagtggccgtgggcaagaacaacctggaggtggaggacgaggagggcagcctgttcgtgggcgtggacaccatccacgtgcacaagagatggaacgccctgctgctgagaaacgacatcgccctgatcaagctggccgagcacgtggagctgagcgacaccatccaggtggcctgcctgcccgagaaggacagcctgctgcccaaggactacccctgctacgtgaccggctggggcagactgtggaccaacggccccatcgccgacaagctgcagcagggcctgcagcccgtggtggaccacgccacctgcagcagaatcgactggtggggcttcagagtgaagaagaccatggtgtgcgccggcggcgacggcgtgatcagcgcctgcaacggcgacagcggcggccccctgaactgccagctggagaacggcagctgggaggtgttcggcatcgtgagcttcggcagcagaagaggctgcaacaccagaaagaagcccgtggtgtacaccagagtgagcgcctacatcgactggatcaacgagaagatgcagctgtag

SEQ ID NO: 76970 - DNA, 795 bp, synthetic construct
  misc_feature 1..795: note = Description of Artificial Sequence: Synthetic coding sequence
  source 1..795: mol_type = other DNA
atgctgctgctgagcctgaccctgagcctggtgctgctgggcagcagctggggctgcggcatccccgccatcaagcccgccctgagcttcagccagagaatcgtgaacggcgagaacgccgtgctgggcagctggccctggcaggtgagcctgcaggacagcagcggcttccacttctgcggcggcagcctgatcagccagagctgggtggtgaccgccgcccactgcaacgtgagccccggcagacacttcgtggtgctgggcgagtacgacagaagcagcaacgccgagcccctgcaggtgctgagcgtgagcagagccatcacccaccccagctggaacagcaccaccatgaacaacgacgtgaccctgctgaagctggccagccccgcccagtacaccaccagaatcagccccgtgtgcctggccagcagcaacgaggccctgaccgagggcctgacctgcgtgaccaccggctggggcagactgagcggcgtgggcaacgtgacccccgcccacctgcagcaggtggccctgcccctggtgaccgtgaaccagtgcagacagtactggggcagcagcatcaccgacagcatgatctgcgccggcggcgccggcgccagcagctgccagggcgacagcggcggccccctggtgtgccagaagggcaacacctgggtgctgatcggcatcgtgagctggggcaccaagaactgcaacgtgagagcccccgccgtgtacaccagagtgagcaagttcagcacctggatcaaccaggtgatcgcctacaactag

SEQ ID NO: 76971 - DNA, 795 bp, synthetic construct; identical to SEQ ID NO: 76970
  misc_feature 1..795: note = Description of Artificial Sequence: Synthetic coding sequence
  source 1..795: mol_type = other DNA

SEQ ID NO: 76972 - DNA, 792 bp, synthetic construct
  misc_feature 1..792: note = Description of Artificial Sequence: Synthetic coding sequence
  source 1..792: mol_type = other DNA
atggccagcctgtggctgctgagctgcttcagcctggtgggcgccgccttcggctgcggcgtgcccgccatccaccccgtgctgagcggcctgagcagaatcgtgaacggcgaggacgccgtgcccggcagctggccctggcaggtgagcctgcaggacaagaccggcttccacttctgcggcggcagcctgatcagcgaggactgggtggtgaccgccgcccactgcggcgtgagaaccagcgacgtggtggtggccggcgagttcgaccagggcagcgacgaggagaacatccaggtgctgaagatcgccaaggtgttcaagaaccccaagttcagcatcctgaccgtgaacaacgacatcaccctgctgaagctggccacccccgccagattcagccagaccgtgagcgccgtgtgcctgcccagcgccgacgacgacttccccgccggcaccctgtgcgccaccaccggctggggcaagaccaagtacaacgccaacaagacccccgacaagctgcagcaggccgccctgcccctgctgagcaacgccgagtgcaagaagagctggggcagaagaatcaccgacgtgatgatctgcgccggcgccagcggcgtgagcagctgcatgggcgacagcggcggccccctggtgtgccagaaggacggcgcctggaccctggtgggcatcgtgagctggggcagcgacacctgcagcaccagcagccccggcgtgtacgccagagtgaccaagctgatcccctgggtgcagaagatcctggccgccaactag

SEQ ID NO: 76973 - DNA, 1119 bp, synthetic construct
  misc_feature 1..1119: note = Description of Artificial Sequence: Synthetic coding sequence
  source 1..1119: mol_type = other DNA
atggccgcccccgtgccctgggcctgctgcgccgtgctggccgccgccgccgccgtggtgtacgcccagagacacagcccccaggaggccccccacgtgcagtacgagagactgggcagcgacgtgaccctgccctgcggcaccgccaactgggacgccgccgtgacctggagagtgaacggcaccgacctggcccccgacctgctgaacggcagccagctggtgctgcacggcctggagctgggccacagcggcctgtacgcctgcttccacagagacagctggcacctgagacaccaggtgctgctgcacgtgggcctgccccccagagagcccgtgctgagctgcagaagcaacacctaccccaagggcttctactgcagctggcacctgcccacccccacctacatccccaacaccttcaacgtgaccgtgctgcacggcagcaagatcatggtgtgcgagaaggaccccgccctgaagaacagatgccacatcagatacatgcacctgttcagcaccatcaagtacaaggtgagcatcagcgtgagcaacgccctgggccacaacgccaccgccatcaccttcgacgagttcaccatcgtgaagcccgacccccccgagaacgtggtggccagacccgtgcccagcaaccccagaagactggaggtgacctggcagacccccagcacctggcccgaccccgagagcttccccctgaagttcttcctgagatacagacccctgatcctggaccagtggcagcacgtggagctgagcgacggcaccgcccacaccatcaccgacgcctacgccggcaaggagtacatcatccaggtggccgccaaggacaacgagatcggcacctggagcgactggagcgtggccgcccacgccaccccctggaccgaggagcccagacacctgaccaccgaggcccaggccgccgagaccaccaccagcaccaccagcagcctggcccccccccccaccaccaagatctgcgaccccggcgagctgggcagcggcggcggccccagcgcccccttcctggtgagcgtgcccatcaccctggccctggccgccgccgccgccaccgccagcagcctgctgatctag

SEQ ID NO: 76974 - DNA, 1119 bp, synthetic construct; identical to SEQ ID NO: 76973
  misc_feature 1..1119: note = Description of Artificial Sequence: Synthetic coding sequence
  source 1..1119: mol_type = other DNA

SEQ ID NO: 76975 - DNA, 771 bp, synthetic construct
  misc_feature 1..771: note = Description of Artificial Sequence: Synthetic coding sequence
  source 1..771: mol_type = other DNA
atggccgcccccgtgccctgggcctgctgcgccgtgctggccgccgccgccgccgtggtgtacgcccagagacacagcccccaggaggccccccacgtgcagtacgagagactgggcagcgacgtgaccctgccctgcggcaccgccaactgggacgccgccgtgacctggagagtgaacggcaccgacctggcccccgacctgctgaacggcagccagctggtgctgcacggcctggagctgggccacagcggcctgtacgcctgcttccacagagacagctggcacctgagacaccaggtgctgctgcacgtgggcctgccccccagagagcccgtgctgagctgcagaagcaacacctaccccaagggcttctactgcagctggcacctgcccacccccacctacatccccaacaccttcaacgtgaccgtgctgcacggcagcaagatcatggtgtgcgagaaggaccccgccctgaagaacagatgccacatcagatacatgcacctgttcagcaccatcaagtacaaggtgagcatcagcgtgagcaacgccctgggccacaacgccaccgccatcaccttcgacgagttcaccatcgtgaagcccgacccccccgagaacgtggtggccagacccgtgcccagcaaccccagaagactggaggtgacctggcagacccccagcacctggcccgaccccgagagcttccccctgaagttcttcctgagatacagacccctgatcctggaccagtggcagcactag

SEQ ID NO: 76976 - DNA, 3909 bp, synthetic construct
  misc_feature 1..3909: note = Description of Artificial Sequence: Synthetic coding sequence
  source 1..3909: mol_type = other DNA
atggagctgtacttcggcgagtaccagcacgtgcagcaggagtacggcgtgcacctgagactggccagcgacgacacccagaagagcagaagcagccagaacagcaaggccggcagctacggcgtgagcatcagagtgcagggcatcgacggccacccctacatcgtgctgaacaacaccgagagatgcctggccggcaccagcttcagcgagaacggcccccccttccccccccccgtgatcaacaacctgcccctgcacagcagcaacggcagcgtgcccaaggagaacagcgaggagctgcagctgcccgagaacccctacgcccagcccagccccatcagaaacctgaagcagcccctgctgcacgagggcaagaacggcgtgctggacagaaaggacggcagcgtgaagcccagccacctgctgaacttccagagacaccccgagctgctgcagccctacgaccccgagaagaacgagctgaacctgcagaaccaccagcccagcgagagcaactggctgaagaccctgaccgaggagggcatcaacaacaagaagccctggacctgcttccccaagcccagcaacagccagcccaccagccccagcctggaggaccccgccaagagcggcgtgaccgccatcagactgtgcagcagcgtggtgatcgaggaccccaagaagcagaccagcgtgtgcgtgaacgtgcagagctgcaccaaggagagagtgggcgaggaggccctgttcaccagcggcagacccctgaccgcccacagcccccacgcccaccccgagaccaagaagaccagacccgacgtgctgcccttcagaagacaggacagcgccggccccgtgctggacggcgccagaagcagaagaagcagcagcagcagcaccacccccaccagcgccaacagcctgtacagattcctgctggacgaccaggagtgcgccatccacgccgacaacgtgaacagacacgagaacagaagatacatccccttcctgcccggcaccggcagagacatcgacaccggcagcatccccggcgtggaccagctgatcgagaagttcgaccagaagcccggcctgcagagaagaggcagaagcggcaagagaaacagaatcaacaccgacgacagaaagagaagcagaagcgtggacagcgccttccccttcggcctgcagggcaacagcgagtacctgatcgagttcagcagaaacctgggcaagagcagcgagcacctgctgagacccagccaggtgtgcccccagagacccctgagccaggagagaagaggcaagcagagcgtgggcagaaccttcgccaagctgcagggcgccgcccacggcgccagctgcgcccacagcagacccccccagcccaacatcgacggcaaggtgctggagaccgagggcagccaggagagcaccgtgatcagagcccccagcctgggcgcccagagcaagaaggaggaggaggtgaagaccgccaccgccaccctgatgctgcagaacagagccaccgccaccagccccgacagcggcgccaagaagatcagcgtgaagaccttccccagcgccagcaacacccaggccacccccgacctgctgaagggccagcaggagctgacccagcagaccaacgaggagaccgccaagcagatcctgtacaactacctgaaggagggcagcaccgacaacgacgacgccaccaagagaaaggtgaacctggtgttcgagaagatccagaccctgaagagcagagccgccggcagcgcccagggcaacaaccaggcctgcaacagcaccagcgaggtgaaggacctgctggagcagaagagcaagctgaccatcgaggtggccgagctgcagagacagctgcagctggaggtgaagaaccagcagaacatcaaggaggagagagagagaatgagagccaacctggaggagctgagaagccagcacaacgagaaggtggaggagaacagcaccctgcagcagagactggaggagagcgagggcgagctgagaaagaacctggaggagctgttccaggtgaagatggagagagagcagcaccagaccgagatcagagacctgcaggaccagctgagcgagatgcacgacgagctggacagcgccaagagaagcgaggacagagagaagggcgccctgatcgaggagctgctgcaggccaagcaggacctgcaggacctgctgatcgccaaggaggagcaggaggacctgctgagaaagagagagagagagctgaccgccctgaagggcgccctgaaggaggaggtgagcagccacgaccaggagatggacaagctgaaggagcagtacgacgccgagctgcaggccctgagagagagcgtggaggaggccaccaagaacgtggaggtgctggccagcagaagcaacaccagcgagcaggaccaggccggcaccgagatgagagtgaagctgctgcaggaggagaacgagaagctgcagggcagaagcgaggagctggagagaagagtggcccagctgcagagacagatcgaggacctgaagggcgacgaggccaaggccaaggagaccctgaagaagtacgagggcgagatcagacagctggaggaggccctggtgcacgccagaaaggaggagaaggaggccgtgagcgccagaagagccctggagaacgagctggaggccgcccagggcaacctgagccagaccacccaggagcagaagcagctgagcgagaagctgaaggaggagagcgagcagaaggagcagctgagaagactgaagaacgagatggagaacgagagatggcacctgggcaagaccatcgagaagctgcagaaggagatggccgacatcgtggaggccagcagaaccagcaccctggagctgcagaaccagctggacgagtacaaggagaagaacagaagagagctggccgagatgcagagacagctgaaggagaagaccctggaggccgagaagagcagactgaccgccatgaagatgcaggacgagatgagactgatggaggaggagctgagagactaccagagagcccaggacgaggccctgaccaagagacagctgctggagcagaccctgaaggacctggagtacgagctggaggccaagagccacctgaaggacgacagaagcagactggtgaagcagatggaggacaaggtgagccagctggagatggagctggaggaggagagaaacaacagcgacctgctgagcgagagaatcagcagaagcagagagcagatggagcagctgagaaacgagctgctgcaggagagagccgccagacaggacctggagtgcgacaagatcagcctggagagacagaacaaggacctgaagagcagaatcatccacctggagggcagctacagaagcagcaaggagggcctggtggtgcagatggaggccagaatcgccgagctggaggacagactggagagcgaggagagagacagagccaacctgcagctgagcaacagaagactggagagaaaggtgaaggagctggtgatgcaggtggacgacgagcacctgagcctgaccgaccagaaggaccagctgagcctgagactgaaggccatgaagagacaggtggaggaggccgaggaggagatcgacagactggagagcagcaagaagaagctgcagagagagctggaggagcagatggacatgaacgagcacctgcagggccagctgaacagcatgaagaaggacctgagactgaagaagctgcccagcaaggtgctggacgacatggacgacgacgacgacctgagcaccgacggcggcagcctgtacgaggcccccgtgagctacaccttcagcaaggacagcaccgtggccagccagatctag

SEQ ID NO: 76977 - DNA, 2061 bp, synthetic construct
  misc_feature 1..2061: note = Description of Artificial Sequence: Synthetic coding sequence
  source 1..2061: mol_type = other DNA
atgggcgagttcaaggtgcacagagtgagattcttcaactacgtgcccagcggcatcagatgcgtggcctacaacaaccagagcaacagactggccgtgagcagaaccgacggcaccgtggagatctacaacctgagcgccaactacttccaggagaagttcttccccggccacgagagcagagccaccgaggccctgtgctgggccgagggccagagactgttcagcgccggcctgaacggcgagatcatggagtacgacctgcaggccctgaacatcaagtacgccatggacgccttcggcggccccatctggagcatggccgccagccccagcggcagccagctgctggtgggctgcgaggacggcagcgtgaagctgttccagatcacccccgacaagatccagttcgagagaaacttcgacagacagaagagcagaatcctgagcctgagctggcaccccagcggcacccacatcgccgccggcagcatcgactacatcagcgtgttcgacgtgaagagcggcagcgccgtgcacaagatgatcgtggacagacagtacatgggcgtgagcaagagaaagtgcatcgtgtggggcgtggccttcctgagcgacggcaccatcatcagcgtggacagcgccggcaaggtgcagttctgggacagcgccaccggcaccctggtgaagagccacctgatcgccaacgccgacgtgcagagcatcgccgtggccgaccaggaggacagcttcgtggtgggcaccgccgagggcaccgtgttccacttccagctggtgcccgtgaccagcaacagcagcgagaagcagtgggtgagaaccaagcccttccagcaccacacccacgacgtgagaaccgtggcccacagccccaccgccctgatcagcggcggcaccgacacccacctggtgttcagacccctgatggagaaggtggaggtgaagaactacgacgccgccctgagaaagatcaccttcccccacagatgcctgatcagctgcagcaagaagagacagctgctgctgttccagttcgcccaccacctggagctgtggagactgggcagcaccgtggccaccggcaagaacggcgacaccctgcccctgagcaagaacgccgaccacctgctgcacctgaagaccaagggccccgagaacatcatctgcagctgcatcagcccctgcggcagctggatcgcctacagcaccgtgagcagattcttcctgtacagactgaactacgagcacgacaacatcagcctgaagagagtgagcaagatgcccgccttcctgagaagcgccctgcagatcctgttcagcgaggacagcaccaagctgttcgtggccagcaaccagggcgccctgcacatcgtgcagctgagcggcggcagcttcaagcacctgcacgccttccagccccagagcggcaccgtggaggccatgtgcctgctggccgtgagccccgacggcaactggctggccgccagcggcaccagcgccggcgtgcacgtgtacaacgtgaagcagctgaagctgcactgcaccgtgcccgcctacaacttccccgtgaccgccatggccatcgcccccaacaccaacaacctggtgatcgcccacagcgaccagcaggtgttcgagtacagcatccccgacaagcagtacaccgactggagcagaaccgtgcagaagcagggcttccaccacctgtggctgcagagagacacccccatcacccacatcagcttccaccccaagagacccatgcacatcctgctgcacgacgcctacatgttctgcatcatcgacaagagcctgcccctgcccaacgacaagaccctgctgtacaaccccttcccccccaccaacgagagcgacgtgatcagaagaagaaccgcccacgccttcaagatcagcaagatctacaagcccctgctgttcatggacctgctggacgagagaaccctggtggccgtggagagacccctggacgacatcatcgcccagctgcccccccccatcaagaagaagaagttcggcacctag

SEQ ID NO: 76978 - DNA, 1716 bp, synthetic construct
  misc_feature 1..1716: note = Description of Artificial Sequence: Synthetic coding sequence
  source 1..1716: mol_type = other DNA
atgggcgagttcaaggtgcacagagtgagattcttcaactacgtgcccagcggcatcagatgcgtggcctacaacaaccagagcaacagactggccgtgagcagaaccgacggcaccgtggagatctacaacctgagcgccaactacttccaggagaagttcttccccggccacgagagcagagccaccgaggccctgtgctgggccgagggccagagactgttcagcgccggcctgaacggcgagatcatggagtacgacctgcaggccctgaacatcaagtacgccatggacgccttcggcggccccatctggagcatggccgccagccccagcggcagccagctgctggtgggctgcgaggacggcagcgtgaagctgttccagatcacccccgacaagatccagttcgagagaaacttcgacagacagaagagcagaatcctgagcctgagctggcaccccagcggcacccacatcgccgccggcagcatcgactacatcagcgtgttcgacgtgaagagcggcagcgccgtgcacaagatgatcgtggacagacagtacatgggcgtgagcaagagaaagtgcatcgtgtggggcgtggccttcctgagcgacggcaccatcatcagcgtggacagcgccggcaaggtgcagttctgggacagcgccaccggcaccctggtgaagagccacctgatcgccaacgccgacgtgcagagcatcgccgtggccgaccaggaggacagcttcgtggtgggcaccgccgagggcaccgtgttccacttccagctggtgcccgtgaccagcaacagcagcgagaagcagtgggtgagaaccaagcccttccagcaccacacccacgacgtgagaaccgtggcccacagccccaccgccctgatcagcggcggcaccgacacccacctggtgttcagacccctgatggagaaggtggaggtgaagaactacgacgccgccctgagaaagatcaccttcccccacagatgcctgatcagctgcagcaagaagagacagctgctgctgttccagttcgcccaccacctggagctgtggagactgggcagcaccgtggccaccggcaccgtggaggccatgtgcctgctggccgtgagccccgacggcaactggctggccgccagcggcaccagcgccggcgtgcacgtgtacaacgtgaagcagctgaagctgcactgcaccgtgcccgcctacaacttccccgtgaccgccatggccatcgcccccaacaccaacaacctggtgatcgcccacagcgaccagcaggtgttcgagtacagcatccccgacaagcagtacaccgactggagcagaaccgtgcagaagcagggcttccaccacctgtggctgcagagagacacccccatcacccacatcagcttccaccccaagagacccatgcacatcctgctgcacgacgcctacatgttctgcatcatcgacaagagcctgcccctgcccaacgacaagaccctgctgtacaaccccttcccccccaccaacgagagcgacgtgatcagaagaagaaccgcccacgccttcaagatcagcaagatctacaagcccctgctgttcatggacctgctggacgagagaaccctggtggccgtggagagacccctggacgacatcatcgcccagctgcccccccccatcaagaagaagaagttcggcacctag

SEQ ID NO: 76979 - DNA, 1023 bp, synthetic construct
  misc_feature 1..1023: note = Description of Artificial Sequence: Synthetic coding sequence
  source 1..1023: mol_type = other DNA
atggccctgagactgctgagaagagccgccagaggcgccgccgccgccgccctgctgagactgaaggccagcctggccgccgacatccccagactgggctacagcagcagcagccaccacaagtacatccccagaagagccgtgctgtacgtgcccggcaacgacgagaagaagatcaagaagatccccagcctgaacgtggactgcgccgtgctggactgcgaggacggcgtggccgccaacaagaagaacgaggccagactgagaatcgtgaagaccctggaggacatcgacctgggccccaccgagaagtgcgtgagagtgaacagcgtgagcagcggcctggccgaggaggacctggagaccctgctgcagagcagagtgctgcccagcagcctgatgctgcccaaggtggagagccccgaggagatccagtggttcgccgacaagttcagcttccacctgaagggcagaaagctggagcagcccatgaacctgatccccttcgtggagaccgccatgggcctgctgaacttcaaggccgtgtgcgaggagaccctgaaggtgggcccccaggtgggcctgttcctggacgccgtggtgttcggcggcgaggacttcagagccagcatcggcgccaccagcagcaaggagaccctggacatcctgtacgccagacagaagatcgtggtgatcgccaaggccttcggcctgcaggccatcgacctggtgtacatcgacttcagagacggcgccggcctgctgagacagagcagagagggcgccgccatgggcttcaccggcaagcaggtgatccaccccaaccagatcgccgtggtgcaggagcagttcagccccagccccgagaagatcaagtgggccgaggagctgatcgccgccttcaaggagcaccagcagctgggcaagggcgccttcaccttccagggcagcatgatcgacatgcccctgctgaagcaggcccagaacaccgtgaccctggccaccagcatcaaggagaagtag

SEQ ID NO: 76980 - DNA, 921 bp, synthetic construct
  misc_feature 1..921: note = Description of Artificial Sequence: Synthetic coding sequence
  source 1..921: mol_type = other DNA
atggccctgagactgctgagaagagccgccagaggcgccgccgccgccgccctgctgagactgaaggccagcctggccgccgacatccccagactgggctacagcagcagcagccaccacaagtacatccccagaagagccgtgctgtacgtgcccggcaacgacgagaagaagatcaagaagatccccagcctgaacgtggactgcgccgtgctggactgcgaggacggcgtggccgccaacaagaagaacgaggccagactgagaatcgtgaagaccctggaggacatcgacctgggccccaccgagaagtgcgtgagagtgaacagcgtgagcagcggcctggccgaggaggacctggagaccctgctgcagagcagagtgctgcccagcagcctgatgctgcccaaggtggagagccccgaggagatccagtgggccgtgtgcgaggagaccctgaaggtgggcccccaggtgggcctgttcctggacgccgtggtgttcggcggcgaggacttcagagccagcatcggcgccaccagcagcaaggagaccctggacatcctgtacgccagacagaagatcgtggtgatcgccaaggccttcggcctgcaggccatcgacctggtgtacatcgacttcagagacggcgccggcctgctgagacagagcagagagggcgccgccatgggcttcaccggcaagcaggtgatccaccccaaccagatcgccgtggtgcaggagcagttcagccccagccccgagaagatcaagtgggccgaggagctgatcgccgccttcaaggagcaccagcagctgggcaagggcgccttcaccttccagggcagcatgatcgacatgcccctgctgaagcaggcccagaacaccgtgaccctggccaccagcatcaaggagaagtag

SEQ ID NO: 76981 - DNA, 921 bp, synthetic construct; identical to SEQ ID NO: 76980
  misc_feature 1..921: note = Description of Artificial Sequence: Synthetic coding sequence
  source 1..921: mol_type = other DNA

SEQ ID NO: 76982 - DNA, 1023 bp, synthetic construct; identical to SEQ ID NO: 76979
  misc_feature 1..1023: note = Description of Artificial Sequence: Synthetic coding sequence
  source 1..1023: mol_type = other DNA

SEQ ID NO: 76983 - DNA, 546 bp, synthetic construct
  misc_feature 1..546: note = Description of Artificial Sequence: Synthetic coding sequence
  source 1..546: mol_type = other DNA
aacgaggccagactgagaatcgtgaagaccctggaggacatcgacctgggccccaccgagaagtgcgtgagagtgaacagcgtgagcagcggcctggccgaggaggacctggagaccctgctgcagagcagagtgctgcccagcagcctgatgctgcccaaggtggagagccccgaggagatccagtggttcgccgacaagttcagcttccacctgaagggcagaaagctggagcagcccatgaacctgatccccttcgtggagaccgccatgggcctgctgaacttcaaggccgtgtgcgaggagaccctgaaggtgggcccccaggtgggcctgttcctggacgccgtggtgttcggcggcgaggacttcagagccagcatcggcgtgaaggacatcagcctgagcctgttcctgtgcgtgtgcgtgtacatgtgcgtgtacatcttcagcctgcccctgaaggacggccacctgcacaacaacgtgtacctgcccaccatgaccatggtgttccacgacaacggcatggacaccaccagctag

SEQ ID NO: 76984 - DNA, 312 bp, synthetic construct
  misc_feature 1..312: note = Description of Artificial Sequence: Synthetic coding sequence
  source 1..312: mol_type = other DNA
ctgcaggccatcgacctggtgtacatcgacttcagagacggcgccggcctgctgagacagagcagagagggcgccgccatgggcttcaccggcaagcaggtgatccaccccaaccagatcgccgtggtgcaggagcagttcagccccagccccgagaagatcaagtgggccgaggagctgatcgccgccttcaaggagcaccagcagctgggcaagggcgccttcaccttccagggcagcatgatcgacatgcccctgctgaagcaggcccagaacaccgtgaccctggccaccagcatcaaggagaagtag

SEQ ID NO: 76985 - DNA, 270 bp, synthetic construct
  misc_feature 1..270: note = Description of Artificial Sequence: Synthetic coding sequence
  source 1..270: mol_type = other DNA
gaggagctgatcgccgccttcaaggagcaccagcagctgggcaaggtgggcagatactgctgcagctggctgtgcatccagcccttccccagcagccccggccagagaagccagagcatcagcagagtgcccggcagatactgggtgctgggcgccagaagctgggagagcaagggcgccttcaccttccagggcagcatgatcgacatgcccctgctgaagcaggcccagaacaccgtgaccctggccaccagcatcaaggagaagtag

SEQ ID NO: 76986 - DNA, 444 bp, synthetic construct
  misc_feature 1..444: note = Description of Artificial Sequence: Synthetic coding sequence
  source 1..444: mol_type = other DNA
aacgaggccagactgagaatcgtgaagaccctggaggacatcgacctgggccccaccgagaagtgcgtgagagtgaacagcgtgagcagcggcctggccgaggaggacctggagaccctgctgcagagcagagtgctgcccagcagcctgatgctgcccaaggtggagagccccgaggagatccagtgggccgtgtgcgaggagaccctgaaggtgggcccccaggtgggcctgttcctggacgccgtggtgttcggcggcgaggacttcagagccagcatcggcgtgaaggacatcagcctgagcctgttcctgtgcgtgtgcgtgtacatgtgcgtgtacatcttcagcctgcccctgaaggacggccacctgcacaacaacgtgtacctgcccaccatgaccatggtgttccacgacaacggcatggacaccaccagctag

SEQ ID NO: 76987 - DNA, 909 bp, synthetic construct
  misc_feature 1..909: note = Description of Artificial Sequence: Synthetic coding sequence
  source 1..909: mol_type = other DNA
atggccctgagactgctgagaagagccgccagaggcgccgccgccgccgccctgctgagactgaaggccagcctggccgccgacatccccagactgggctacagcagcagcagccaccacaagtacatccccagaagagccgtgctgtacgtgcccggcaacgacgagaagaagatcaagaagatccccagcctgaacgtggactgcgccgtgctggactgcgaggacggcgtggccgccaacaagaagaacgaggccagactgagaatcgtgaagaccctggaggacatcgacctgggccccaccgagaagtgcgtgagagtgaacagcgtgagcagcggcctggccgaggaggacctggagaccctgctgcagagcagagtgctgcccagcagcctgatgctgcccaaggtggagagccccgaggagatccagtgggccgtgtgcgaggagaccctgaaggtgggcccccaggtgggcctgttcctggacgccgtggtgttcggcggcgaggacttcagagccagcatcggcgccaccagcagcaaggagaccctggacatcctgtacgccagacagaagatcgtggtgatcgccaaggccttcggcctgcaggccatcgacctggtgtacatcgacttcagagacggcgccggcctgctgagacagagcagagagggcgccgccatgggcttcaccggcaagcaggtgatccaccccaaccagatcgccgtggtgcaggagcagttcagccccagccccgagaagatcaagtgggccgaggagctgatcgccgccttcaaggagcaccagcagctgggcaagaccgtgagctgcagcgccagccaggccggcgtgcagtggagagacctgggcagcctgcagccccccccccccggcttcaagtag

SEQ ID NO: 76988 - DNA, 1401 bp, synthetic construct
  misc_feature 1..1401: note = Description of Artificial Sequence: Synthetic coding sequence
  source 1..1401: mol_type = other DNA
atggccctgctgaccgccgccgccagactgctgggcaccaagaacgccagctgcctggtgctggccgccagacacgccagcgccagcagcaccaacctgaaggacatcctggccgacctgatccccaaggagcaggccagaatcaagaccttcagacagcagcacggcaagaccgtggtgggccagatcaccgtggacatgatgtacggcggcatgagaggcatgaagggcctggtgtacgagaccagcgtgctggaccccgacgagggcatcagattcagaggcttcagcatccccgagtgccagaagctgctgcccaaggccaagggcggcgaggagcccctgcccgagggcctgttctggctgctggtgaccggccacatccccaccgaggagcaggtgagctggctgagcaaggagtgggccaagagagccgccctgcccagccacgtggtgaccatgctggacaacttccccaccaacctgcaccccatgagccagctgagcgccgccgtgaccgccctgaacagcgagagcaacttcgccagagcctacgcccagggcatcagcagaaccaagtactgggagctgatctacgaggacagcatggacctgatcgccaagctgccctgcgtggccgccaagatctacagaaacctgtacagagagggcagcggcatcggcgccatcgacagcaacctggactggagccacaacttcaccaacatgctgggctacaccgaccaccagttcaccgagctgaccagactgtacctgaccatccacagcgaccacgagggcggcaacgtgagcgcccacaccagccacctggtgggcagcgccctgagcgacccctacctgagcttcgccgccgccatgaacggcctggccggccccctgcacggcctggccaaccaggaggtgctggtgtggctgacccagctgcagaaggaggtgggcaaggacgtgagcgacgagaagctgagagactacatctggaacaccctgaacagcggcagagtggtgcccggctacggccacgccgtgctgagaaagaccgaccccagatacacctgccagagagagttcgccctgaagcacctgcccaacgaccccatgttcaagctggtggcccagctgtacaagatcgtgcccaacgtgctgctggagcagggcaaggccaagaacccctggcccaacgtggacgcccacagcggcgtgctgctgcagtactacggcatgaccgagatgaactactacaccgtgctgttcggcgtgagcagagccctgggcgtgctggcccagctgatctggagcagagccctgggcttccccctggagagacccaagagcatgagcaccgagggcctgatgaagttcgtggacagcaagagcggctag

SEQ ID NO: 76989 - DNA, 537 bp, synthetic construct
  misc_feature 1..537: note = Description of Artificial Sequence: Synthetic coding sequence
  source 1..537: mol_type = other DNA
atggccctgctgaccgccgccgccagactgctgggcaccaagaacgccagctgcctggtgctggccgccagacacgccagcgccagcagcaccaacctgaaggacatcctggccgacctgatccccaaggagcaggccagaatcaagaccttcagacagcagcacggcaagaccgtggtgggccagatcaccgtggacatgatgtacggcggcatgagaggcatgaagggcctggtgtacgagaccagcgtgctggaccccgacgagggcatcagattcagaggcttcagcatccccgagtgccagaagctgctgcccaaggccaagggcggcgaggagcccctgcccgagggcctgttctggctgctggtgaccggccacatccccaccgaggagcaggtgagctggctgagcaaggagtgggccaagagagccgccctgcccagccacgtggtgaccatgctggacaacttccccaccaacctgcaccccatgagccagctgagcgccgccgtgaccgccctgaacagcgagtag

SEQ ID NO: 76990 - DNA, 6084 bp, synthetic construct
  misc_feature 1..6084: note = Description of Artificial Sequence: Synthetic coding sequence
  source 1..6084: mol_type = other DNA
atgctgaagttcaagtacggcgccagaaaccccctggacgccggcgccgccgagcccatcgccagcagagccagcagactgaacctgttcttccagggcaagccccccttcatgacccagcagcagatgagccccctgagcagagagggcatcctggacgccctgttcgtgctgttcgaggagtgcagccagcccgccctgatgaagatcaagcacgtgagcaacttcgtgagaaagtacagcgacaccatcgccgagctgcaggagctgcagcccagcgccaaggacttcgaggtgagaagcctggtgggctgcggccacttcgccgaggtgcaggtggtgagagagaaggccaccggcgacatctacgccatgaaggtgatgaagaagaaggccctgctggcccaggagcaggtgagcttcttcgaggaggagagaaacatcctgagcagaagcaccagcccctggatcccccagctgcagtacgccttccaggacaagaaccacctgtacctggtgatggagtaccagcccggcggcgacctgctgagcctgctgaacagatacgaggaccagctggacgagaacctgatccagttctacctggccgagctgatcctggccgtgcacagcgtgcacctgatgggctacgtgcacagagacatcaagcccgagaacatcctggtggacagaaccggccacatcaagctggtggacttcggcagcgccgccaagatgaacagcaacaagatggtgaacgccaagctgcccatcggcacccccgactacatggcccccgaggtgctgaccgtgatgaacggcgacggcaagggcacctacggcctggactgcgactggtggagcgtgggcgtgatcgcctacgagatgatctacggcagaagccccttcgccgagggcaccagcgccagaaccttcaacaacatcatgaacttccagagattcctgaagttccccgacgaccccaaggtgagcagcgacttcctggacctgatccagagcctgctgtgcggccagaaggagagactgaagttcgagggcctgtgctgccaccccttcttcagcaagatcgactggaacaacatcagaaacagccccccccccttcgtgcccaccctgaagagcgacgacgacaccagcaacttcgacgagcccgagaagaacagctgggtgagcagcagcccctgccagctgagccccagcggcttcagcggcgaggagctgcccttcgtgggcttcagctacagcaaggccctgggcatcctgggcagaagcgagagcgtggtgagcggcctggacagccccgccaagaccagcagcatggagaagaagctgctgatcaagagcaaggagctgcaggacagccaggacaagtgccacaagatggagcaggagatgaccagactgcacagaagagtgagcgaggtggaggccgtgctgagccagaaggaggtggagctgaaggccagcgagacccagagaagcctgctggagcaggacctggccacctacatcaccgagtgcagcagcctgaagagaagcctggagcaggccagaatggaggtgagccaggaggacgacaaggccctgcagctgctgcacgacatcagagagcagagcagaaagctgcaggagatcaaggagcaggagtaccaggcccaggtggaggagatgagactgatgatgaaccagctggaggaggacctggtgagcgccagaagaagaagcgacctgtacgagagcgagctgagagagagcagactggccgccgaggagttcaagagaaaggccaccgagtgccagcacaagctgctgaaggccaaggaccagggcaagcccgaggtgggcgagtacgccaagctggagaagatcaacgccgagcagcagctgaagatccaggagctgcaggagaagctggagaaggccgtgaaggccagcaccgaggccaccgagctgctgcagaacatcagacaggccaaggagagagccgagagagagctggagaagctgcagaacagagaggacagcagcgagggcatcagaaagaagctggtggaggccgaggagctggaggagaagcacagagaggcccaggtgagcgcccagcacctggaggtgcacctgaagcagaaggagcagcactacgaggagaagatcaaggtgctggacaaccagatcaagaaggacctggccgacaaggagaccctggagaacatgatgcagagacacgaggaggaggcccacgagaagggcaagatcctgagcgagcagaaggccatgatcaacgccatggacagcaagatcagaagcctggagcagagaatcgtggagctgagcgaggccaacaagctggccgccaacagcagcctgttcacccagagaaacatgaaggcccaggaggagatgatcagcgagctgagacagcagaagttctacctggagacccaggccggcaagctggaggcccagaacagaaagctggaggagcagctggagaagatcagccaccaggaccacagcgacaagaacagactgctggagctggagaccagactgagagaggtgagcctggagcacgaggagcagaagctggagctgaagagacagctgaccgagctgcagctgagcctgcaggagagagagagccagctgaccgccctgcaggccgccagagccgccctggagagccagctgagacaggccaagaccgagctggaggagaccaccgccgaggccgaggaggagatccaggccctgaccgcccacagagacgagatccagagaaagttcgacgccctgagaaacagctgcaccgtgatcaccgacctggaggagcagctgaaccagctgaccgaggacaacgccgagctgaacaaccagaacttctacctgagcaagcagctggacgaggccagcggcgccaacgacgagatcgtgcagctgagaagcgaggtggaccacctgagaagagagatcaccgagagagagatgcagctgaccagccagaagcagaccatggaggccctgaagaccacctgcaccatgctggaggagcaggtgatggacctggaggccctgaacgacgagctgctggagaaggagagacagtgggaggcctggagaagcgtgctgggcgacgagaagagccagttcgagtgcagagtgagagagctgcagagaatgctggacaccgagaagcagagcagagccagagccgaccagagaatcaccgagagcagacaggtggtggagctggccgtgaaggagcacaaggccgagatcctggccctgcagcaggccctgaaggagcagaagctgaaggccgagagcctgagcgacaagctgaacgacctggagaagaagcacgccatgctggagatgaacgccagaagcctgcagcagaagctggagaccgagagagagctgaagcagagactgctggaggagcaggccaagctgcagcagcagatggacctgcagaagaaccacatcttcagactgacccagggcctgcaggaggccctggacagagccgacctgctgaagaccgagagaagcgacctggagtaccagctggagaacatccaggtgctgtacagccacgagaaggtgaagatggagggcaccatcagccagcagaccaagctgatcgacttcctgcaggccaagatggaccagcccgccaagaagaagaagggcctgttcagcagaagaaaggaggaccccgccctgcccacccaggtgcccctgcagtacaacgagctgaagctggccctggagaaggagaaggccagatgcgccgagctggaggaggccctgcagaagaccagaatcgagctgagaagcgccagagaggaggccgcccacagaaaggccaccgaccacccccaccccagcacccccgccaccgccagacagcagatcgccatgagcgccatcgtgagaagccccgagcaccagcccagcgccatgagcctgctggccccccccagcagcagaagaaaggagagcagcacccccgaggagttcagcagaagactgaaggagagaatgcaccacaacatcccccacagattcaacgtgggcctgaacatgagagccaccaagtgcgccgtgtgcctggacaccgtgcacttcggcagacaggccagcaagtgcctggagtgccaggtgatgtgccaccccaagtgcagcacctgcctgcccgccacctgcggcctgcccgccgagtacgccacccacttcaccgaggccttctgcagagacaagatgaacagccccggcctgcagaccaaggagcccagcagcagcctgcacctggagggctggatgaaggtgcccagaaacaacaagagaggccagcagggctgggacagaaagtacatcgtgctggagggcagcaaggtgctgatctacgacaacgaggccagagaggccggccagagacccgtggaggagttcgagctgtgcctgcccgacggcgacgtgagcatccacggcgccgtgggcgccagcgagctggccaacaccgccaaggccgacgtgccctacatcctgaagatggagagccacccccacaccacctgctggcccggcagaaccctgtacctgctggcccccagcttccccgacaagcagagatgggtgaccgccctggagagcgtggtggccggcggcagagtgagcagagagaaggccgaggccgacgccaagctgctgggcaacagcctgctgaagctggagggcgacgacagactggacatgaactgcaccctgcccttcagcgaccaggtggtgctggtgggcaccgaggagggcctgtacgccctgaacgtgctgaagaacagcctgacccacgtgcccggcatcggcgccgtgttccagatctacatcatcaaggacctggagaagctgctgatgatcgccggcgaggagagagccctgtgcctggtggacgtgaagaaggtgaagcagagcctggcccagagccacctgcccgcccagcccgacatcagccccaacatcttcgaggccgtgaagggctgccacctgttcggcgccggcaagatcgagaacggcctgtgcatctgcgccgccatgcccagcaaggtggtgatcctgagatacaacgagaacctgagcaagtactgcatcagaaaggagatcgagaccagcgagccctgcagctgcatccacttcaccaactacagcatcctgatcggcaccaacaagttctacgagatcgacatgaagcagtacaccctggaggagttcctggacaagaacgaccacagcctggcccccgccgtgttcgccgccagcagcaacagcttccccgtgagcatcgtgcaggtgaacagcgccggccagagagaggagtacctgctgtgcttccacgagttcggcgtgttcgtggacagctacggcagaagaagcagaaccgacgacctgaagtggagcagactgcccctggccttcgcctacagagagccctacctgttcgtgacccacttcaacagcctggaggtgatcgagatccaggccagaagcagcgccggcacccccgccagagcctacctggacatccccaaccccagatacctgggccccgccatcagcagcggcgccatctacctggccagcagctaccaggacaagctgagagtgatctgctgcaagggcaacctggtgaaggagagcggcaccgagcaccacagaggccccagcaccagcagaagcagccccaacaagagaggcccccccacctacaacgagcacatcaccaagagagtggccagcagccccgccccccccgagggccccagccaccccagagagcccagcaccccccacagatacagagagggcagaaccgagctgagaagagacaagagccccggcagacccctggagagagagaagagccccggcagaatgctgagcaccagaagagagagaagccccggcagactgttcgaggacagcagcagaggcagactgcccgccggcgccgtgagaacccccctgagccaggtgaacaaggtgtgggaccagagcagcgtgtag

SEQ ID NO: 76991 - DNA, 6210 bp, synthetic construct
  misc_feature 1..6210: note = Description of Artificial Sequence: Synthetic coding sequence
  source 1..6210: mol_type = other DNA
atgctgaagttcaagtacggcgccagaaaccccctggacgccggcgccgccgagcccatcgccagcagagccagcagactgaacctgttcttccagggcaagccccccttcatgacccagcagcagatgagccccctgagcagagagggcatcctggacgccctgttcgtgctgttcgaggagtgcagccagcccgccctgatgaagatcaagcacgtgagcaacttcgtgagaaagtacagcgacaccatcgccgagctgcaggagctgcagcccagcgccaaggacttcgaggtgagaagcctggtgggctgcggccacttcgccgaggtgcaggtggtgagagagaaggccaccggcgacatctacgccatgaaggtgatgaagaagaaggccctgctggcccaggagcaggtgagcttcttcgaggaggagagaaacatcctgagcagaagcaccagcccctggatcccccagctgcagtacgccttccaggacaagaaccacctgtacctggtgatggagtaccagcccggcggcgacctgctgagcctgctgaacagatacgaggaccagctggacgagaacctgatccagttctacctggccgagctgatcctggccgtgcacagcgtgcacctgatgggctacgtgcacagagacatcaagcccgagaacatcctggtggacagaaccggccacatcaagctggtggacttcggcagcgccgccaagatgaacagcaacaagatggtgaacgccaagctgcccatcggcacccccgactacatggcccccgaggtgctgaccgtgatgaacggcgacggcaagggcacctacggcctggactgcgactggtggagcgtgggcgtgatcgcctacgagatgatctacggcagaagccccttcgccgagggcaccagcgccagaaccttcaacaacatcatgaacttccagagattcctgaagttccccgacgaccccaaggtgagcagcgacttcctggacctgatccagagcctgctgtgcggccagaaggagagactgaagttcgagggcctgtgctgccaccccttcttcagcaagatcgactggaacaacatcagaaacagccccccccccttcgtgcccaccctgaagagcgacgacgacaccagcaacttcgacgagcccgagaagaacagctgggtgagcagcagcccctgccagctgagccccagcggcttcagcggcgaggagctgcccttcgtgggcttcagctacagcaaggccctgggcatcctgggcagaagcgagagcgtggtgagcggcctggacagccccgccaagaccagcagcatggagaagaagctgctgatcaagagcaaggagctgcaggacagccaggacaagtgccacaagatggagcaggagatgaccagactgcacagaagagtgagcgaggtggaggccgtgctgagccagaaggaggtggagctgaaggccagcgagacccagagaagcctgctggagcaggacctggccacctacatcaccgagtgcagcagcctgaagagaagcctggagcaggccagaatggaggtgagccaggaggacgacaaggccctgcagctgctgcacgacatcagagagcagagcagaaagctgcaggagatcaaggagcaggagtaccaggcccaggtggaggagatgagactgatgatgaaccagctggaggaggacctggtgagcgccagaagaagaagcgacctgtacgagagcgagctgagagagagcagactggccgccgaggagttcaagagaaaggccaccgagtgccagcacaagctgctgaaggccaaggaccagggcaagcccgaggtgggcgagtacgccaagctggagaagatcaacgccgagcagcagctgaagatccaggagctgcaggagaagctggagaaggccgtgaaggccagcaccgaggccaccgagctgctgcagaacatcagacaggccaaggagagagccgagagagagctggagaagctgcagaacagagaggacagcagcgagggcatcagaaagaagctggtggaggccgaggagagaagacacagcctggagaacaaggtgaagagactggagaccatggagagaagagagaacagactgaaggacgacatccagaccaagagccagcagatccagcagatggccgacaagatcctggagctggaggagaagcacagagaggcccaggtgagcgcccagcacctggaggtgcacctgaagcagaaggagcagcactacgaggagaagatcaaggtgctggacaaccagatcaagaaggacctggccgacaaggagaccctggagaacatgatgcagagacacgaggaggaggcccacgagaagggcaagatcctgagcgagcagaaggccatgatcaacgccatggacagcaagatcagaagcctggagcagagaatcgtggagctgagcgaggccaacaagctggccgccaacagcagcctgttcacccagagaaacatgaaggcccaggaggagatgatcagcgagctgagacagcagaagttctacctggagacccaggccggcaagctggaggcccagaacagaaagctggaggagcagctggagaagatcagccaccaggaccacagcgacaagaacagactgctggagctggagaccagactgagagaggtgagcctggagcacgaggagcagaagctggagctgaagagacagctgaccgagctgcagctgagcctgcaggagagagagagccagctgaccgccctgcaggccgccagagccgccctggagagccagctgagacaggccaagaccgagctggaggagaccaccgccgaggccgaggaggagatccaggccctgaccgcccacagagacgagatccagagaaagttcgacgccctgagaaacagctgcaccgtgatcaccgacctggaggagcagctgaaccagctgaccgaggacaacgccgagctgaacaaccagaacttctacctgagcaagcagctggacgaggccagcggcgccaacgacgagatcgtgcagctgagaagcgaggtggaccacctgagaagagagatcaccgagagagagatgcagctgaccagccagaagcagaccatggaggccctgaagaccacctgcaccatgctggaggagcaggtgatggacctggaggccctgaacgacgagctgctggagaaggagagacagtgggaggcctggagaagcgtgctgggcgacgagaagagccagttcgagtgcagagtgagagagctgcagagaatgctggacaccgagaagcagagcagagccagagccgaccagagaatcaccgagagcagacaggtggtggagctggccgtgaaggagcacaaggccgagatcctggccctgcagcaggccctgaaggagcagaagctgaaggccgagagcctgagcgacaagctgaacgacctggagaagaagcacgccatgctggagatgaacgccagaagcctgcagcagaagctggagaccgagagagagctgaagcagagactgctggaggagcaggccaagctgcagcagcagatggacctgcagaagaaccacatcttcagactgacccagggcctgcaggaggccctggacagagccgacctgctgaagaccgagagaagcgacctggagtaccagctggagaacatccaggtgctgtacagccacgagaaggtgaagatggagggcaccatcagccagcagaccaagctgatcgacttcctgcaggccaagatggaccagcccgccaagaagaagaagggcctgttcagcagaagaaaggaggaccccgccctgcccacccaggtgcccctgcagtacaacgagctgaagctggccctggagaaggagaaggccagatgcgccgagctggaggaggccctgcagaagaccagaatcgagctgagaagcgccagagaggaggccgcccacagaaaggccaccgaccacccccaccccagcacccccgccaccgccagacagcagatcgccatgagcgccatcgtgagaagccccgagcaccagcccagcgccatgagcctgctggccccccccagcagcagaagaaaggagagcagcacccccgaggagttcagcagaagactgaaggagagaatgcaccacaacatcccccacagattcaacgtgggcctgaacatgagagccaccaagtgcgccgtgtgcctggacaccgtgcacttcggcagacaggccagcaagtgcctggagtgccaggtgatgtgccaccccaagtgcagcacctgcctgcccgccacctgcggcctgcccgccgagtacgccacccacttcaccgaggccttctgcagagacaagatgaacagccccggcctgcagaccaaggagcccagcagcagcctgcacctggagggctggatgaaggtgcccagaaacaacaagagaggccagcagggctgggacagaaagtacatcgtgctggagggcagcaaggtgctgatctacgacaacgaggccagagaggccggccagagacccgtggaggagttcgagctgtgcctgcccgacggcgacgtgagcatccacggcgccgtgggcgccagcgagctggccaacaccgccaaggccgacgtgccctacatcctgaagatggagagccacccccacaccacctgctggcccggcagaaccctgtacctgctggcccccagcttccccgacaagcagagatgggtgaccgccctggagagcgtggtggccggcggcagagtgagcagagagaaggccgaggccgacgccaagctgctgggcaacagcctgctgaagctggagggcgacgacagactggacatgaactgcaccctgcccttcagcgaccaggtggtgctggtgggcaccgaggagggcctgtacgccctgaacgtgctgaagaacagcctgacccacgtgcccggcatcggcgccgtgttccagatctacatcatcaaggacctggagaagctgctgatgatcgccggcgaggagagagccctgtgcctggtggacgtgaagaaggtgaagcagagcctggcccagagccacctgcccgcccagcccgacatcagccccaacatcttcgaggccgtgaagggctgccacctgttcggcgccggcaagatcgagaacggcctgtgcatctgcgccgccatgcccagcaaggtggtgatcctgagatacaacgagaacctgagcaagtactgcatcagaaaggagatcgagaccagcgagccctgcagctgcatccacttcaccaactacagcatcctgatcggcaccaacaagttctacgagatcgacatgaagcagtacaccctggaggagttcctggacaagaacgaccacagcctggcccccgccgtgttcgccgccagcagcaacagcttccccgtgagcatcgtgcaggtgaacagcgccggccagagagaggagtacctgctgtgcttccacgagttcggcgtgttcgtggacagctacggcagaagaagcagaaccgacgacctgaagtggagcagactgcccctggccttcgcctacagagagccctacctgttcgtgacccacttcaacagcctggaggtgatcgagatccaggccagaagcagcgccggcacccccgccagagcctacctggacatccccaaccccagatacctgggccccgccatcagcagcggcgccatctacctggccagcagctaccaggacaagctgagagtgatctgctgcaagggcaacctggtgaaggagagcggcaccgagcaccacagaggccccagcaccagcagaagcagccccaacaagagaggcccccccacctacaacgagcacatcaccaagagagtggccagcagccccgccccccccgagggccccagccaccccagagagcccagcaccccccacagatacagagagggcagaaccgagctgagaagagacaagagccccggcagacccctggagagagagaagagccccggcagaatgctgagcaccagaagagagagaagccccggcagactgttcgaggacagcagcagaggcagactgcccgccggcgccgtgagaacccccctgagccaggtgaacaaggtgtgggaccagagcagcgtgtag

SEQ ID NO: 76992 - DNA, 696 bp, synthetic construct
  misc_feature 1..696: note = Description of Artificial Sequence: Synthetic coding sequence
  source 1..696: mol_type = other DNA
atggaccccgagcacgccaagcccgagagcagcgaggcccccagcggcaacctgaagcagcccgagaccgccgccgccctggccagcagcggcagcgtggtgagcagcgtgcccaaggcccagagaaacatcagcgccaagaccgcccccagaaagcaccccgccgtgagcatcagaagcgcccagagcgccgccgccgccagaccccagggcagcgagggcaccgcccccagcagaaaggccaccaccagacccccccccaagcccaccctgcccccccccacccccagcgcccacaccgagagcaagctgctgaacgagatggccatcaaggagagagtggagggcagagccaaggtgccctacaagttcagagacagcctgaagagattcagcttcagccccaccggcatgctgaagatcctgagactgagcctgatcctgggcgccctggcctgcttcatcatcacccaggccaacgagagcttcatcaccatcaccagcctggagatctgcatcgtggtgttcttcatcctgatctacgtgctgaccctgcaccacctgctgacctacctgcactggcccctgctggacctgaccaacagcatcatcaccgccgtgttcctgagcgtggtggccatcctggccatgcaggagaagaagagaagacacctgctgtacgtgggcggcagatag

SEQ ID NO: 76993 - DNA, 369 bp, synthetic construct
  misc_feature 1..369: note = Description of Artificial Sequence: Synthetic coding sequence
  source 1..369: mol_type = other DNA
atggaccccgagcacgccaagcccgagagcagcgaggcccccagcggcaacctgaagcagcccgagaccgccgccgccctggccagcagcggcagcgtggacctgaccaacagcatcatcaccgccgtgttcctgagcgtggtggccatcctggccatgcaggagaagaagagaagacacctgctgtacgtgggcggcagcctgtgcctgaccgccgtgatcgtgtgctgcatcgacgccttcgtggtgaccaccaagatgagaaccaacctgaagagattcctgggcgtggaggtggagagaaagctgagccccgccaaggacgcctaccccgagaccggccccgacgccccccagagacccgcctag

SEQ ID NO: 76994 - DNA, 351 bp, synthetic construct
  misc_feature 1..351: note = Description of Artificial Sequence: Synthetic coding sequence
  source 1..351: mol_type = other DNA
atggaccccgagcacgccaagcccgagagcagcgaggcccccagcggcaacctgaagcagcccgagaccgccgccgccctggacctgaccaacagcatcatcaccgccgtgttcctgagcgtggtggccatcctggccatgcaggagaagaagagaagacacctgctgtacgtgggcggcagcctgtgcctgaccgccgtgatcgtgtgctgcatcgacgccttcgtggtgaccaccaagatgagaaccaacctgaagagattcctgggcgtggaggtggagagaaagctgagccccgccaaggacgcctaccccgagaccggccccgacgccccccagagacccgcctag

SEQ ID NO: 76995 - DNA, 279 bp, synthetic construct
  misc_feature 1..279: note = Description of Artificial Sequence: Synthetic coding sequence
  source 1..279: mol_type = other DNA
atggaccccgagcacgccaagcccgagagcagcgaggcccccagcggcaacctgaagcagcccgagaccgccgccgccctggccagcagcggcagcgtggtgagcagcgtgcccaaggcccagagaaacatcagcgccaagaccgcccccagaaagcaccccgccgtgagcatcagaagcgcccagagcgccgccgccgccagaccccagggcagcgagggcaccgcccccagcagaatcctgcccaccgtgagcctgcagctgtgcagcttccagtag

SEQ ID NO: 76996 - DNA, 861 bp, synthetic construct
  misc_feature 1..861: note = Description of Artificial Sequence: Synthetic coding sequence
  source 1..861: mol_type = other DNA
atggaccccgagcacgccaagcccgagagcagcgaggcccccagcggcaacctgaagcagcccgagaccgccgccgccctggccagcagcggcagcgtggtgagcagcgtgcccaaggcccagagaaacatcagcgccaagaccgcccccagaaagcaccccgccgtgagcatcagaagcgcccagagcgccgccgccgccagaccccagggcagcgagggcaccgcccccagcagaaaggccaccaccagacccccccccaagcccaccctgcccccccccacccccagcgcccacaccgagagcaagctgctgaacgagatggccatcaaggagagagtggagggcagagccaaggtgccctacaagttcagagacagcctgaagagattcagcttcagccccaccggcatgctgaagatcctgagactgagcctgatcctgggcgccctggcctgcttcatcatcacccaggccaacgagagcttcatcaccatcaccagcctggagatctgcatcgtggtgttcttcatcctgatctacgtgctgaccctgcaccacctgctgacctacctgcactggcccctgctggacctgaccaacagcatcatcaccgccgtgttcctgagcgtggtggccatcctggccatgcaggagaagaagagaagacacctgctgtacgtgggcggcagcctgtgcctgaccgccgtgatcgtgtgctgcatcgacgccttcgtggtgaccaccaagatgagaaccaacctgaagagattcctgggcgtggaggtggagagaaagctgagccccgccaaggacgcctaccccgagaccggccccgacgccccccagagacccgcctag

SEQ ID NO: 76997 - DNA, 510 bp, synthetic construct
  misc_feature 1..510: note = Description of Artificial Sequence: Synthetic coding sequence
  source 1..510: mol_type = other DNA
atggaccccgagcacgccaagcccgagagcagcgaggcccccagcggcaacctgaagcagcccgagaccgccgccgccctgagcctgatcctgggcgccctggcctgcttcatcatcacccaggccaacgagagcttcatcaccatcaccagcctggagatctgcatcgtggtgttcttcatcctgatctacgtgctgaccctgcaccacctgctgacctacctgcactggcccctgctggacctgaccaacagcatcatcaccgccgtgttcctgagcgtggtggccatcctggccatgcaggagaagaagagaagacacctgctgtacgtgggcggcagcctgtgcctgaccgccgtgatcgtgtgctgcatcgacgccttcgtggtgaccaccaagatgagaaccaacctgaagagattcctgggcgtggaggtggagagaaagctgagccccgccaaggacgcctaccccgagaccggccccgacgccccccagagacccgcctag

SEQ ID NO: 76998 - DNA, 345 bp, synthetic construct
  misc_feature 1..345: note = Description of Artificial Sequence: Synthetic coding sequence
  source 1..345: mol_type = other DNA
atggaccccgagcacgccaagcccgagagcagcgaggcccccagcggcaacctgaagcagcccgagaccgccgccgccctgagcctgatcctgggcgccctggcctgcttcatcatcacccaggccaacgagagcttcatcaccatcaccagcctggagatctgcatcgtggtgttcttcatcctgatctacgtgctgaccctgcaccacctgctgacctacctgcactggcccctgctggacctgaccaacagcatcatcaccgccgtgttcctgagcgtggtggccatcctggccatgcaggagaagaagagaagacacctgctgtacgtgggcggcagatag

SEQ ID NO: 76999 - DNA, 117 bp, synthetic construct
  misc_feature 1..117: note = Description of Artificial Sequence: Synthetic coding sequence
  source 1..117: mol_type = other DNA
atggaccccgagcacgccaagcccgagagcagcgaggcccccagcggcaacctgaagcagcccgagaccgccgccgccctggaggccgacaaggccaacatgagcaacttcaactag

SEQ ID NO: 77000 - DNA, 87 bp, synthetic construct
  misc_feature 1..87: note = Description of Artificial Sequence: Synthetic coding sequence
  source 1..87: mol_type = other DNA
atggaccccgagcacgccaagcccgagagcagcgaggcccccagcggcaacctgaagcagcccgagaccgccgccgccctgagatag

SEQ ID NO: 77001 - DNA, 747 bp, synthetic construct
  misc_feature 1..747: note = Description of Artificial Sequence: Synthetic coding sequence
  source 1..747: mol_type = other DNA
atggcccccaaggccgccaagggcgccaagcccgagcccgcccccgccccccccccccccggcgccaagcccgaggaggacaagaaggacggcaaggagcccagcgacaagccccagaaggccgtgcaggaccacaaggagcccagcgacaagccccagaaggccgtgcagcccaagcacgaggtgggcaccagaagaggctgcagaagatacagatgggagctgaaggacagcaacaaggagttctggctgctgggccacgccgagatcaagatcagaagcctgggctgcctgatcgccgccatgatcctgctgagcagcctgaccgtgcaccccatcctgagactgatcatcaccatggagatcagcttcttcagcttcttcatcctgctgtacagcttcgccatccacagatacatccccttcatcctgtggcccatcagcgacctgttcaacgacctgatcgcctgcgccttcctggtgggcgccgtggtgttcgccgtgagaagcagaagaagcatgaacctgcactacctgctggccgtgatcctgatcggcgccgccggcgtgttcgccttcatcgacgtgtgcctgcagagaaaccacttcagaggcaagaaggccaagaagcacatgctggtgcccccccccggcaaggagaagggcccccagcagggcaagggccccgagcccgccaagccccccgagcccggcaagccccccggccccgccaagggcaagaagtag

SEQ ID NO: 77002 - DNA, 588 bp, synthetic construct
  misc_feature 1..588: note = Description of Artificial Sequence: Synthetic coding sequence
  source 1..588: mol_type = other DNA
atggcccccaaggccgccaagggcgccaagcccgagcccgcccccgccccccccccccccggcgccaagcccgaggaggacaagaaggacggcaaggagcccagcgacaagccccagaaggccgtgcaggaccacaaggagcccagcgacaagccccagaaggccgtgcagcccaagcacgaggtgggcaccagaagaggctgcagaagatacagatgggagctgaaggacagcaacaaggagttctggctgctgggccacgccgagatcaagatcagaagcctggacctgttcaacgacctgatcgcctgcgccttcctggtgggcgccgtggtgttcgccgtgagaagcagaagaagcatgaacctgcactacctgctggccgtgatcctgatcggcgccgccggcgtgttcgccttcatcgacgtgtgcctgcagagaaaccacttcagaggcaagaaggccaagaagcacatgctggtgcccccccccggcaaggagaagggcccccagcagggcaagggccccgagcccgccaagccccccgagcccggcaagccccccggccccgccaagggcaagaagtag

SEQ ID NO: 77003 - DNA, 180 bp, synthetic construct
  misc_feature 1..180: note = Description of Artificial Sequence: Synthetic coding sequence
  source 1..180: mol_type = other DNA
atgtggccccccgaccccgaccccgaccccgaccccgagcccgccggcggcagcagacccggccccgccgtgcccggcctgagagccctgctgcccgccagagccttcctgtgcagcctgaagggccccggcggcttcgtgtgcacctggtgcagctgcccccaccagcccctgtggtag

SEQ ID NO: 77004 - DNA, 549 bp, synthetic construct
  misc_feature 1..549: note = Description of Artificial Sequence: Synthetic coding sequence
  source 1..549: mol_type = other DNA
atgtggccccccgaccccgaccccgaccccgaccccgagcccgccggcggcagcagacccggccccgccgtgcccggcctgagagccctgctgcccgccagagccttcctgtgcagcctgaagggcagactgctgctggccgagagcggcctgagcttcatcaccttcatctgctacgtggccagcagcgccagcgccttcctgaccgcccccctgctggagttcctgctggccctgtacttcctgttcgccgacgccatgcagctgaacgacaagtggcagggcctgtgctggcccatgatggacttcctgagatgcgtgaccgccgccctgatctacttcgccatcagcatcaccgccatcgccaagtacagcgacggcgccagcaaggccgccggcgtgttcggcttcttcgccaccatcgtgttcgccaccgacttctacctgatcttcaacgacgtggccaagttcctgaagcagggcgacagcgccgacgagaccaccgcccacaagaccgaggaggagaacagcgacagcgacagcgactag

SEQ ID NO: 77005 - DNA, 549 bp, synthetic construct; identical to SEQ ID NO: 77004
  misc_feature 1..549: note = Description of Artificial Sequence: Synthetic coding sequence
  source 1..549: mol_type = other DNA

SEQ ID NO: 77006 - DNA, 549 bp, synthetic construct; identical to SEQ ID NO: 77004
  misc_feature 1..549: note = Description of Artificial Sequence: Synthetic coding sequence
  source 1..549: mol_type = other DNA

SEQ ID NO: 77007 - DNA, 705 bp, synthetic construct
  misc_feature 1..705: note = Description of Artificial Sequence: Synthetic coding sequence
  source 1..705: mol_type = other DNA
atgagaagcggcgaggagctggacggcttcgagggcgaggccagcagcaccagcatgatcagcggcgccagcagcccctaccagcccaccaccgagcccgtgagccagagaagaggcctggccggcctgagatgcgaccccgactacctgagaggcgccctgggcagactgaaggtggcccaggtgatcctggccctgatcgccttcatctgcatcgagaccatcatggcctgcagcccctgcgagggcctgtacttcttcgagttcgtgagctgcagcgccttcgtggtgaccggcgtgctgctgatcatgttcagcctgaacctgcacatgagaatcccccagatcaactggaacctgaccgacctggtgaacaccggcctgagcgccttcctgttcttcatcgccagcatcgtgctggccgccctgaaccacagagccggcgccgagatcgccgccgtgatcttcggcttcctggccaccgccgcctacgccgtgaacaccttcctggccgtgcagaagtggagagtgagcgtgagacagcagagcaccaacgactacatcagagccagaaccgagagcagagacgtggacagcagacccgagatccagagactggacaccttcagctacagcaccaacgtgaccgtgagaaagaagagccccaccaacctgctgagcctgaaccactggcagctggcctag

SEQ ID NO: 77008 - DNA, 627 bp, synthetic construct
  misc_feature 1..627: note = Description of Artificial Sequence: Synthetic coding sequence
  source 1..627: mol_type = other DNA
atgagaagcggcgaggagctggacggcttcgagggcgaggccagcagcaccagcatgatcagcggcgccagcagcccctaccagcccaccaccgagcccgtgagccagagaagaggcctggccggcctgagatgcgaccccgactacctgagaggcgccctgggcagactgaaggtggcccaggtgatcctggccctgatcgccttcatctgcatcgagaccatcatggcctgcagcccctgcgagggcctgtacttcttcgagttcgtgagctgcagcgccttcgtggtgaccggcgtgctgctgatcatgttcagcctgaacctgcacatgagaatcccccagatcaactggaacctgaccgacctggtgaacaccggcctgagcgccttcctgttcttcatcgccagcatcgtgctggccgccctgaaccacagagccggcgccgagatcgccgccgtgatcttcggcttcctggccaccgccgcctacgccgtgaacaccttcctggccgtgcagaagtggagagtgagcgtgagacagcagagcaccaacgactacatcagagccagaaccgagagcagagacgtggacagcagacccgagatccagagactggacacctag

SEQ ID NO: 77009 - DNA, 672 bp, synthetic construct
  misc_feature 1..672: note = Description of Artificial Sequence: Synthetic coding sequence
  source 1..672: mol_type = other DNA
atgctgagcgccagagacagaagagacagacaccccgaggagggcgtggtggccgagctgcagggcttcgccgtggacaaggccttcctgaccagccacaagggcatcctgctggagaccgagctggccctgaccctgatcatcttcatctgcttcaccgccagcatcagcgcctacatggccgccgccctgctggagttcttcatcaccctggccttcctgttcctgtacgccacccagtactaccagagattcgacagaatcaactggccctgcctgctgcagggccacggccagagcggcggcccccaccccctggacctgctgagccacagcgccaaggtgcagccccagccctggcccggcctgaccccccccggctggcacacccccgccgccgtgccctgggtgcccgcccccgcccccggcttctggagctggctgctgtggttcatctgcttccacagcctgggcagcagcgacttcctgagatgcgtgagcgccatcatcatcttcctggtggtgagcttcgccgccgtgaccagcagagacggcgccgccatcgccgccttcgtgttcggcatcatcctggtgagcatcttcgcctacgacgccttcaagatctacagaaccgagatggcccccggcgccagccagggcgaccagcagtag

SEQ ID NO: 77010 - DNA, 225 bp, synthetic construct
  misc_feature 1..225: note = Description of Artificial Sequence: Synthetic coding sequence
  source 1..225: mol_type = other DNA
atgctgagcgccagagacagaagagacagacaccccgaggagggcgtggtggccgagctgcagggcttcgccgtggacaaggccttcctgaccagccacaagggcatcctgctggagaccgagctggtgttcggcatcatcctggtgagcatcttcgcctacgacgccttcaagatctacagaaccgagatggcccccggcgccagccagggcgaccagcagtag

SEQ ID NO: 77011 - DNA, 471 bp, synthetic construct
  misc_feature 1..471: note = Description of Artificial Sequence: Synthetic coding sequence
  source 1..471: mol_type = other DNA
atgctgagcgccagagacagaagagacagacaccccgaggagggcgtggtggccgagctgcagggcttcgccgtggacaaggccttcctgaccagccacaagggcatcctgctggagaccgagctggccctgaccctgatcatcttcatctgcttcaccgccagcatcagcgcctacatggccgccgccctgctggagttcttcatcaccctggccttcctgttcctgtacgccacccagtactaccagagattcgacagaatcaactggccctgcctggacttcctgagatgcgtgagcgccatcatcatcttcctggtggtgagcttcgccgccgtgaccagcagagacggcgccgccatcgccgccttcgtgttcggcatcatcctggtgagcatcttcgcctacgacgccttcaagatctacagaaccgagatggcccccggcgccagccagggcgaccagcagtag

SEQ ID NO: 77012 - DNA, 378 bp, synthetic construct
  misc_feature 1..378: note = Description of Artificial Sequence: Synthetic coding sequence
  source 1..378: mol_type = other DNA
atgctgagcgccagagacagaagagacagacaccccgaggagggcgtggtggccgagctgcagggcttcgccgtggacaaggccttcctgaccagccacaagggcatcctgctggagaccgagctggccctgaccctgatcatcttcatctgcttcaccgccagcatcagcgcctacatggccgccgccctgctggagttcttcatcaccctggccttcctgttcctgtacgccacccagtactaccagagattcgacagaatcaactggccctgcctggtgttcggcatcatcctggtgagcatcttcgcctacgacgccttcaagatctacagaaccgagatggcccccggcgccagccagggcgaccagcagtag

SEQ ID NO: 77013 - DNA, 318 bp, synthetic construct
  misc_feature 1..318: note = Description of Artificial Sequence: Synthetic coding sequence
  source 1..318: mol_type = other DNA
atgctgagcgccagagacagaagagacagacaccccgaggagggcgtggtggccgagctgcagggcttcgccgtggacaaggccttcctgaccagccacaagggcatcctgctggagaccgagctggacttcctgagatgcgtgagcgccatcatcatcttcctggtggtgagcttcgccgccgtgaccagcagagacggcgccgccatcgccgccttcgtgttcggcatcatcctggtgagcatcttcgcctacgacgccttcaagatctacagaaccgagatggcccccggcgccagccagggcgaccagcagtag

SEQ ID NO: 77014 - DNA, 1326 bp, synthetic construct
  misc_feature 1..1326: note = Description of Artificial Sequence: Synthetic coding sequence
  source 1..1326: mol_type = other DNA
cccagccccgccatcggcctgttcgccagcatggccgccgtgctgctgggcggcgccagagccagcagactgctgttccagagactgctgtgggacgtggtgagaagccccatcagcttcttcgagagaacccccatcggccacctgctgaacagattcagcaaggagaccgacaccgtggacgtggacatccccgacaagctgagaagcctgctgatgtacgccttcggcctgctggaggtgagcctggtggtggccgtggccacccccctgcccctgtggcccagctgccactgcttcagcagcaccctgggcttcagatggctggccgccaacgtggagctgctgggcaacggcctggtgttcgccgccgccacctgcgccgtgctgagcaaggcccacctgagcgccggcctggtgggcttcagcgtgagcgccgccctgcaggtgacccagaccctgcagtgggtggtgagaaactggaccgacctggagaacagcatcgtgagcgtggagagaatgcaggactacgcctggacccccaaggaggccccctggagactgcccacctgcgccgcccagcccccctggccccagggcggccagatcgagttcagagacttcggcctgagatacagacccgagctgcccctggccgtgcagggcgtgagcttcaagatccacgccggcgagaaggtgggcatcgtgggcagaaccggcgccggcaagagcagcctggccagcggcctgctgagactgcaggaggccgccgagggcggcatctggatcgacggcgtgcccatcgcccacgtgggcctgcacaccctgagaagcagaatcagcatcatcccccaggaccccatcctgttccccggcagcctgagaatgaacctggacctgctgcaggagcacagcgacgaggccatctgggccgccctggagaccgtgcagctgaaggccctggtggccagcctgcccggccagctgcagtacaagtgcgccgacagaggcgaggacctgagcgtgggccagaagcagctgctgtgcctggccagagccctgctgagaaagacccagatcctgatcctggacgaggccaccgccgccgtggaccccggcaccgagctgcagatgcaggccatgctgggcagctggttcgcccagtgcaccgtgctgctgatcgcccacagactgagaagcgtgatggactgcgccagagtgctggtgatggacaagggccaggtggccgagagcggcagccccgcccagctgctggcccagaagggcctgttctacagactggcccaggagagcggcctggtgtag

SEQ ID NO: 77015 - DNA, 528 bp, synthetic construct
  misc_feature 1..528: note = Description of Artificial Sequence: Synthetic coding sequence
  source 1..528: mol_type = other DNA
atgagccacggcgccggcctggtgagaaccacctgcagcagcggcagcgccctgggccccggcgccggcgccgcccagcccagcgccagccccctggagggcctgctggacctgagctaccccagaacccacgccgccctgctgaaggtggcccagatggtgaccctgctgatcgccttcatctgcgtgagaagcagcctgtggaccaactacagcgcctacagctacttcgaggtggtgaccatctgcgacctgatcatgatcctggccttctacctggtgcacctgttcagattctacagagtgctgacctgcatcagctggcccctgagcgagctgctgcactacctgatcggcaccctgctgctgctgatcgccagcatcgtggccgccagcaagagctacaaccagagcggcctggtggccggcgccatcttcggcttcatggccaccttcctgtgcatggccagcatctggctgagctacaagatcagctgcgtgacccagagcaccgacgccgccgtgtag

SEQ ID NO: 77016 - DNA, 429 bp, synthetic construct
  misc_feature 1..429: note = Description of Artificial Sequence: Synthetic coding sequence
  source 1..429: mol_type = other DNA
atgagccacggcgccggcctggtgagaaccacctgcagcagcggcagcgccctgggccccggcgccggcgccgcccagcccagcgccagccccctggagggcctgctggacctgagctaccccagaacccacgccgccctgctgaaggtggcccagatggtgaccctgctgatcgccttcatctgcgtgagaagcagcctgtggaccaactacagcgcctacagctacttcgaggtggtgaccatctgcgacctgatcatgatcctggccttctacctggtgcacctgttcagattctacagagtgctgacctgcatcagctggcccctgagcatcttcggcttcatggccaccttcctgtgcatggccagcatctggctgagctacaagatcagctgcgtgacccagagcaccgacgccgccgtgtag

SEQ ID NO: 77017 - DNA, 522 bp, synthetic construct
  misc_feature 1..522: note = Description of Artificial Sequence: Synthetic coding sequence
  source 1..522: mol_type = other DNA
atggaggagccccagagagccagaagccacaccgtgaccaccaccgccagcagcttcgccgagaacttcagcaccagcagcagcagcttcgcctacgacagagagttcctgagaaccctgcccggcttcctgatcgtggccgagatcgtgctgggcctgctggtgtggaccctgatcgccggcaccgagtacttcagagtgcccgccttcggctgggtgatgttcgtggccgtgttctactgggtgctgaccgtgttcttcctgatcatctacatcaccatgacctacaccagaatcccccaggtgccctggaccaccgtgggcctgtgcttcaacggcagcgccttcgtgctgtacctgagcgccgccgtggtggacgccagcagcgtgagccccgagagagacagccacaacttcaacagctgggccgccagcagcttcttcgccttcctggtgaccatctgctacgccggcaacacctacttcagcttcatcgcctggagaagcagaaccatccagtag

SEQ ID NO: 77018 - DNA, 363 bp, synthetic construct
  misc_feature 1..363: note = Description of Artificial Sequence: Synthetic coding sequence
  source 1..363: mol_type = other DNA
atgcaggccctgcagcagcagcccgtgttccccgacctgctgaaggccatccccgtgagcatccacgtgaacgtgatcctgttcagcgccatcctgatcgtgctgaccatggtgggcaccgccttcttcatgtacaacgccttcggcaagcccttcgagaccctgcacggccccctgggcctgtacctgctgagcttcatcagcggcagctgcggctgcctggtgatgatcctgttcgccagcgaggtgaagatccaccacctgagcgagaagatcgccaactacaaggagggcacctacgtgtacaagacccagagcgagaagtacaccaccagcttctggctgaccaagggccacagctag

SEQ ID NO: 77019 - DNA, 699 bp, synthetic construct
  misc_feature 1..699: note = Description of Artificial Sequence: Synthetic coding sequence
  source 1..699: mol_type = other DNA
atgcccagccagcagaagaagatcatcttctgcatggccggcgtgttcagcttcgcctgcgccctgggcgtggtgaccgccctgggcacccccctgtggatcaaggccaccgtgctgtgcaagaccggcgccctgctggtgaacgccagcggccaggagctggacaagttcatgggcgagatgcagtacggcctgttccacggcgagggcgtgagacagtgcggcctgggcgccagacccttcagattcagcttcttccccgacctgctgaaggccatccccgtgagcatccacgtgaacgtgatcctgttcagcgccatcctgatcgtgctgaccatggtgggcaccgccttcttcatgtacaacgccttcggcaagcccttcgagaccctgcacggccccctgggcctgtacctgctgagcttcatcagcggcagctgcggctgcctggtgatgatcctgttcgccagcgaggtgaagatccaccacctgagcgagaagatcgccaactacaaggagggcacctacgtgtacaagacccagagcgagaagtacaccaccagcttctgggtgatcttcttctgcttcttcgtgcacttcctgaacggcctgctgatcagactggccggcttccagttccccttcgccaagagcaaggacgccgagaccaccaacgtggccgccgacctgatgtactag

SEQ ID NO: 77020 - DNA, 738 bp, synthetic construct
  misc_feature 1..738: note = Description of Artificial Sequence: Synthetic coding sequence
  source 1..738: mol_type = other DNA
atgcccagccagcagaagaagatcatcttctgcatggccggcgtgttcagcttcgcctgcgccctgggcgtggtgaccgccctgggcacccccctgtggatcaaggccaccgtgctgtgcaagaccggcgccctgctggtgaacgccagcggccaggagctggacaagttcatgggcgagatgcagtacggcctgttccacggcgagggcgtgagacagtgcggcctgggcgccagacccttcagattcagcttcttccccgacctgctgaaggccatccccgtgagcatccacgtgaacgtgatcctgttcagcgccatcctgatcgtgctgaccatggtgggcaccgccttcttcatgtacaacgccttcggcaagcccttcgagaccctgcacggccccctgggcctgtacctgctgagcttcatcagcgtggccctgtggctgcccgccaccagacaccaggcccagggcagctgcggctgcctggtgatgatcctgttcgccagcgaggtgaagatccaccacctgagcgagaagatcgccaactacaaggagggcacctacgtgtacaagacccagagcgagaagtacaccaccagcttctgggtgatcttcttctgcttcttcgtgcacttcctgaacggcctgctgatcagactggccggcttccagttccccttcgccaagagcaaggacgccgagaccaccaacgtggccgccgacctgatgtactag

SEQ ID NO: 77021 - DNA, 348 bp, synthetic construct
  misc_feature 1..348: note = Description of Artificial Sequence: Synthetic coding sequence
  source 1..348: mol_type = other DNA
atgcaggccctgcagcagcagcccgtgttccccgacctgctgaaggccatccccgtgagcatccacgtgaacgtgatcctgttcagcgccatcctgatcgtgctgaccatggtgggcaccgccttcttcatgtacaacgccttcggcaagcccttcgagaccctgcacggccccctgggcctgtacctgctgagcttcatcagcggcagctgcggctgcctggtgatgatcctgttcgccagcgaggtgaagatccaccacctgagcgagaagatcgccaactacaaggagggcacctacgtgtacaagacccagagcgagaagtacaccaccagcttctgggtgtag

SEQ ID NO: 77022 - DNA, 1878 bp, synthetic construct
  misc_feature 1..1878: note = Description of Artificial Sequence: Synthetic coding sequence
  source 1..1878: mol_type = other DNA
atgaactacagcgagatcgagagcaaggtgagagaggccaccaacgacgacccctggggccccagcggccagctgatgggcgagatcgccaaggccaccttcatgtacgagcagttccccgagctgatgaacatgctgtggagcagaatgctgaaggacaacaagaagaactggagaagagtgtacaagagcctgctgctgctggcctacctgatcagaaacggcagcgagagagtggtgaccagcgccagagagcacatctacgacctgagaagcctggagaactaccacttcgtggacgagcacggcaaggaccagggcatcaacatcagacagaaggtgaaggagctggtggagttcgcccaggacgacgacagactgagagaggagagaaagaaggccaagaagaacaaggacaagtacgtgggcgtgagcagcgacagcgtgggcggcttcagatacagcgagagatacgaccccgagcccaagagcaagtgggacgaggagtgggacaagaacaagagcgccttccccttcagcgacaagctgggcgagctgagcgacaagatcggcagcaccatcgacgacaccatcagcaagttcagaagaaaggacagagaggacagccccgagagatgcagcgacagcgacgaggagaagaaggccagaagaggcagaagccccaagggcgagttcaaggacgaggaggagaccgtgaccaccaagcacatccacatcacccaggccaccgagaccaccaccaccagacacaagagaaccgccaaccccagcaagaccatcgacctgggcgccgccgcccactacaccggcgacaaggccagccccgaccagaacgccagcacccacaccccccagagcagcgtgaagaccagcgtgcccagcagcaagagcagcggcgacctggtggacctgttcgacggcaccagccagagcaccggcggcagcgccgacctgttcggcggcttcgccgacttcggcagcgccgccgccagcggcagcttccccagccaggtgaccgccaccagcggcaacggcgacttcggcgactggagcgccttcaaccaggcccccagcggccccgtggccagcagcggcgagttcttcggcagcgccagccagcccgccgtggagctggtgagcggcagccagagcgccctgggccccccccccgccgccagcaacagcagcgacctgttcgacctgatgggcagcagccaggccaccatgaccagcagccagagcatgaacttcagcatgatgagcaccaacaccgtgggcctgggcctgcccatgagcagaagccagcccctgcagaacgtgagcaccgtgctgcagaagcccaaccccctgtacaaccagaacaccgacatggtgcagaagagcgtgagcaagaccctgcccagcacctggagcgaccccagcgtgaacatcagcctggacaacctgctgcccggcatgcagcccagcaagccccagcagcccagcctgaacaccatgatccagcagcagaacatgcagcagcccatgaacgtgatgacccagagcttcggcgccgtgaacctgagcagccccagcaacatgctgcccgtgagaccccagaccaacgccctgatcggcggccccatgcccatgagcatgcccaacgtgatgaccggcaccatgggcatggcccccctgggcaacacccccatgatgaaccagagcatgatgggcatgaacatgaacatcggcatgagcgccgccggcatgggcctgaccggcaccatgggcatgggcatgcccaacatcgccatgaccagcggcaccgtgcagcccaagcaggacgccttcgccaacttcgccaacttcagcaagtag

SEQ ID NO: 77023 - DNA, 1878 bp, synthetic construct
  misc_feature 1..1878: note = Description of Artificial Sequence: Synthetic coding sequence
  source 1..1878: mol_type = other DNA
atgctgaacatgtggaaggtgagagagctggtggacaaggccaccaacgtggtgatgaactacagcgagatcgagagcaaggtgagagaggccaccaacgacgacccctggggccccagcggccagctgatgggcgagatcgccaaggccaccttcatgtacgagcagttccccgagctgatgaacatgctgtggagcagaatgctgaaggacaacaagaagaactggagaagagtgtacaagagcctgctgctgctggcctacctgatcagaaacggcagcgagagagtggtgaccagcgccagagagcacatctacgacctgagaagcctggagaactaccacttcgtggacgagcacggcaaggaccagggcatcaacatcagacagaaggtgaaggagctggtggagttcgcccaggacgacgacagactgagagaggagagaaagaaggccaagaagaacaaggacaagtacgtgggcgtgagcagcgacagcgtgggcggcttcagatacagcgagagatacgaccccgagcccaagagcaagtgggacgaggagtgggacaagaacaagagcgccttccccttcagcgacaagctgggcgagctgagcgacaagatcggcagcaccatcgacgacaccatcagcaagttcagaagaaaggacagagaggacagccccgagagatgcagcgacagcgacgaggagaagaaggccagaagaggcagaagccccaagggcgagttcaaggacgaggaggagaccgtgaccaccaagcacatccacatcacccaggccaccgagaccaccaccaccagacacaagagaaccgccaaccccagcaagaccatcgacctgggcgccgccgcccactacaccggcgacaaggccagccccgaccagaacgccagcacccacaccccccagagcagcgtgaagaccagcgtgcccagcagcaagagcagcggcgacctggtggacctgttcgacggcaccagccagagcaccggcggcagcgccgacctgttcggcggcttcgccgacttcggcagcgccgccgccagcggcagcttccccagccaggtgaccgccaccagcggcaacggcgacttcggcgactggagcgccttcaaccaggcccccagcggccccgtggccagcagcggcgagttcttcggcagcgccagccagcccgccgtggagctggtgagcggcagccagagcgccctgggccccccccccgccgccagcaacagcagcgacctgttcgacctgatgggcagcagccaggccaccatgaccagcagccagagcatgaacttcagcatgatgagcaccaacaccgtgggcctgggcctgcccatgagcagaagccagaacaccgacatggtgcagaagagcgtgagcaagaccctgcccagcacctggagcgaccccagcgtgaacatcagcctggacaacctgctgcccggcatgcagcccagcaagccccagcagcccagcctgaacaccatgatccagcagcagaacatgcagcagcccatgaacgtgatgacccagagcttcggcgccgtgaacctgagcagccccagcaacatgctgcccgtgagaccccagaccaacgccctgatcggcggccccatgcccatgagcatgcccaacgtgatgaccggcaccatgggcatggcccccctgggcaacacccccatgatgaaccagagcatgatgggcatgaacatgaacatcggcatgagcgccgccggcatgggcctgaccggcaccatgggcatgggcatgcccaacatcgccatgaccagcggcaccgtgcagcccaagcaggacgccttcgccaacttcgccaacttcagcaagtag

SEQ ID NO: 77024 - DNA, 1878 bp, synthetic construct; identical to SEQ ID NO: 77022
  misc_feature 1..1878: note = Description of Artificial Sequence: Synthetic coding sequence
  source 1..1878: mol_type = other DNA

SEQ ID NO: 77025 - DNA, 1878 bp, synthetic construct; identical to SEQ ID NO: 77022
  misc_feature 1..1878: note = Description of Artificial Sequence: Synthetic coding sequence
  source 1..1878: mol_type = other DNA

SEQ ID NO: 77026 - DNA, 1932 bp, synthetic construct
  misc_feature 1..1932: note = Description of Artificial Sequence: Synthetic coding sequence
  source 1..1932: mol_type = other DNA
atgctgaacatgtggaaggtgagagagctggtggacaaggccaccaacgtggtgatgaactacagcgagatcgagagcaaggtgagagaggccaccaacgacgacccctggggccccagcggccagctgatgggcgagatcgccaaggccaccttcatgtacgagcagttccccgagctgatgaacatgctgtggagcagaatgctgaaggacaacaagaagaactggagaagagtgtacaagagcctgctgctgctggcctacctgatcagaaacggcagcgagagagtggtgaccagcgccagagagcacatctacgacctgagaagcctggagaactaccacttcgtggacgagcacggcaaggaccagggcatcaacatcagacagaaggtgaaggagctggtggagttcgcccaggacgacgacagactgagagaggagagaaagaaggccaagaagaacaaggacaagtacgtgggcgtgagcagcgacagcgtgggcggcttcagatacagcgagagatacgaccccgagcccaagagcaagtgggacgaggagtgggacaagaacaagagcgccttccccttcagcgacaagctgggcgagctgagcgacaagatcggcagcaccatcgacgacaccatcagcaagttcagaagaaaggacagagaggacagccccgagagatgcagcgacagcgacgaggagaagaaggccagaagaggcagaagccccaagggcgagttcaaggacgaggaggagaccgtgaccaccaagcacatccacatcacccaggccaccgagaccaccaccaccagacacaagagaaccgccaaccccagcaagaccatcgacctgggcgccgccgcccactacaccggcgacaaggccagccccgaccagaacgccagcacccacaccccccagagcagcgtgaagaccagcgtgcccagcagcaagagcagcggcgacctggtggacctgttcgacggcaccagccagagcaccggcggcagcgccgacctgttcggcggcttcgccgacttcggcagcgccgccgccagcggcagcttccccagccaggtgaccgccaccagcggcaacggcgacttcggcgactggagcgccttcaaccaggcccccagcggccccgtggccagcagcggcgagttcttcggcagcgccagccagcccgccgtggagctggtgagcggcagccagagcgccctgggccccccccccgccgccagcaacagcagcgacctgttcgacctgatgggcagcagccaggccaccatgaccagcagccagagcatgaacttcagcatgatgagcaccaacaccgtgggcctgggcctgcccatgagcagaagccagcccctgcagaacgtgagcaccgtgctgcagaagcccaaccccctgtacaaccagaacaccgacatggtgcagaagagcgtgagcaagaccctgcccagcacctggagcgaccccagcgtgaacatcagcctggacaacctgctgcccggcatgcagcccagcaagccccagcagcccagcctgaacaccatgatccagcagcagaacatgcagcagcccatgaacgtgatgacccagagcttcggcgccgtgaacctgagcagccccagcaacatgctgcccgtgagaccccagaccaacgccctgatcggcggccccatgcccatgagcatgcccaacgtgatgaccggcaccatgggcatggcccccctgggcaacacccccatgatgaaccagagcatgatgggcatgaacatgaacatcggcatgagcgccgccggcatgggcctgaccggcaccatgggcatgggcatgcccaacatcgccatgaccagcggcaccgtgcagcccaagcaggacgccttcgccaacttcgccaacttcagcaagtag

SEQ ID NO: 77027 - DNA, 5028 bp, synthetic construct
  misc_feature 1..5028: note = Description of Artificial Sequence: Synthetic coding sequence
  source 1..5028: mol_type = other DNA
atggcccagatcctgcccatcagattccaggagcacctgcagctgcagaacctgggcatcaaccccgccaacatcggcttcagcaccctgaccatggagagcgacaagttcatctgcatcagagagaaggtgggcgagcaggcccaggtggtgatcatcgacatgaacgaccccagcaaccccatcagaagacccatcagcgccgacagcgccatcatgaaccccgccagcaaggtgatcgccctgaaggccggcaagaccctgcagatcttcaacatcgagatgaagagcaagatgaaggcccacaccatgaccgacgacgtgaccttctggaagtggatcagcctgaacaccgtggccctggtgaccgacaacgccgtgtaccactggagcatggagggcgagagccagcccgtgaagatgttcgacagacacagcagcctggccggctgccagatcatcaactacagaaccgacgccaagcagaagtggctgctgctgaccggcatcagcgcccagcagaacagagtggtgggcgccatgcagctgtacagcgtggacagaaaggtgagccagcccatcgagggccacgccgccagcttcgcccagttcaagatggagggcaacgccgaggagagcaccctgttctgcttcgccgtgagaggccaggccggcggcaagctgcacatcatcgaggtgggcaccccccccaccggcaaccagcccttccccaagaaggccgtggacgtgttcttcccccccgaggcccagaacgacttccccgtggccatgcagatcagcgagaagcacgacgtggtgttcctgatcaccaagtacggctacatccacctgtacgacctggagaccggcacctgcatctacatgaacagaatcagcggcgagaccatcttcgtgaccgccccccacgaggccaccgccggcatcatcggcgtgaacagaaagggccaggtgctgagcgtgtgcgtggaggaggagaacatcatcccctacatcaccaacgtgctgcagaaccccgacctggccctgagaatggccgtgagaaacaacctggccggcgccgaggagctgttcgccagaaagttcaacgccctgttcgcccagggcaactacagcgaggccgccaaggtggccgccaacgcccccaagggcatcctgagaacccccgacaccatcagaagattccagagcgtgcccgcccagcccggccagaccagccccctgctgcagtacttcggcatcctgctggaccagggccagctgaacaagtacgagagcctggagctgtgcagacccgtgctgcagcagggcagaaagcagctgctggagaagtggctgaaggaggacaagctggagtgcagcgaggagctgggcgacctggtgaagagcgtggaccccaccctggccctgagcgtgtacctgagagccaacgtgcccaacaaggtgatccagtgcttcgccgagaccggccaggtgcagaagatcgtgctgtacgccaagaaggtgggctacacccccgactggatcttcctgctgagaaacgtgatgagaatcagccccgaccagggccagcagttcgcccagatgctggtgcaggacgaggagcccctggccgacatcacccagatcgtggacgtgttcatggagtacaacctgatccagcagtgcaccgccttcctgctggacgccctgaagaacaacagacccagcgagggccccctgcagaccagactgctggagatgaacctgatgcacgccccccaggtggccgacgccatcctgggcaaccagatgttcacccactacgacagagcccacatcgcccagctgtgcgagaaggccggcctgctgcagagagccctggagcacttcaccgacctgtacgacatcaagagagccgtggtgcacacccacctgctgaaccccgagtggctggtgaactacttcggcagcctgagcgtggaggacagcctggagtgcctgagagccatgctgagcgccaacatcagacagaacctgcagatctgcgtgcaggtggccagcaagtaccacgagcagctgagcacccagagcctgatcgagctgttcgagagcttcaagagcttcgagggcctgttctacttcctgggcagcatcgtgaacttcagccaggaccccgacgtgcacttcaagtacatccaggccgcctgcaagaccggccagatcaaggaggtggagagaatctgcagagagagcaactgctacgaccccgagagagtgaagaacttcctgaaggaggccaagctgaccgaccagctgcccctgatcatcgtgtgcgacagattcgacttcgtgcacgacctggtgctgtacctgtacagaaacaacctgcagaagtacatcgagatctacgtgcagaaggtgaaccccagcagactgcccgtggtgatcggcggcctgctggacgtggactgcagcgaggacgtgatcaagaacctgatcctggtggtgagaggccagttcagcaccgacgagctggtggccgaggtggagaagagaaacagactgaagctgctgctgccctggctggaggccagaatccacgagggctgcgaggagcccgccacccacaacgccctggccaagatctacatcgacagcaacaacaaccccgagagattcctgagagagaacccctactacgacagcagagtggtgggcaagtactgcgagaagagagacccccacctggcctgcgtggcctacgagagaggccagtgcgacctggagctgatcaacgtgtgcaacgagaacagcctgttcaagagcctgagcagatacctggtgagaagaaaggaccccgagctgtggggcagcgtgctgctggagagcaacccctacagaagacccctgatcgaccaggtggtgcagaccgccctgagcgagacccaggaccccgaggaggtgagcgtgaccgtgaaggccttcatgaccgccgacctgcccaacgagctgatcgagctgctggagaagatcgtgctggacaacagcgtgttcagcgagcacagaaacctgcagaacctgctgatcctgaccgccatcaaggccgacagaaccagagtgatggagtacatcaacagactggacaactacgacgcccccgacatcgccaacatcgccatcagcaacgagctgttcgaggaggccttcgccatcttcagaaagttcgacgtgaacaccagcgccgtgcaggtgctgatcgagcacatcggcaacctggacagagcctacgagttcgccgagagatgcaacgagcccgccgtgtggagccagctggccaaggcccagctgcagaagggcatggtgaaggaggccatcgacagctacatcaaggccgacgaccccagcagctacatggaggtggtgcaggccgccaacaccagcggcaactgggaggagctggtgaagtacctgcagatggccagaaagaaggccagagagagctacgtggagaccgagctgatcttcgccctggccaagaccaacagactggccgagctggaggagttcatcaacggccccaacaacgcccacatccagcaggtgggcgacagatgctacgacgagaagatgtacgacgccgccaagctgctgtacaacaacgtgagcaacttcggcagactggccagcaccctggtgcacctgggcgagtaccaggccgccgtggacggcgccagaaaggccaacagcaccagaacctggaaggaggtgtgcttcgcctgcgtggacggcaaggagttcagactggcccagatgtgcggcctgcacatcgtggtgcacgccgacgagctggaggagctgatcaactactaccaggacagaggctacttcgaggagctgatcaccatgctggaggccgccctgggcctggagagagcccacatgggcatgttcaccgagctggccatcctgtacagcaagttcaagccccagaagatgagagagcacctggagctgttctggagcagagtgaacatccccaaggtgctgagagccgccgagcaggcccacctgtgggccgagctggtgttcctgtacgacaagtacgaggagtacgacaacgccatcatcaccatgatgaaccaccccaccgacgcctggaaggagggccagttcaaggacatcatcaccaaggtggccaacgtggagctgtactacagagccatccagttctacctggagttcaagcccctgctgctgaacgacctgctgatggtgctgagccccagactggaccacaccagagccgtgaactacttcagcaaggtgaagcagctgcccctggtgaagccctacctgagaagcgtgcagaaccacaacaacaagagcgtgaacgagagcctgaacaacctgttcatcaccgaggaggactaccaggccctgagaaccagcatcgacgcctacgacaacttcgacaacatcagcctggcccagagactggagaagcacgagctgatcgagttcagaagaatcgccgcctacctgttcaagggcaacaacagatggaagcagagcgtggagctgtgcaagaaggacagcctgtacaaggacgccatgcagtacgccagcgagagcaaggacaccgagctggccgaggagctgctgcagtggttcctgcaggaggagaagagagagtgcttcggcgcctgcctgttcacctgctacgacctgctgagacccgacgtggtgctggagaccgcctggagacacaacatcatggacttcgccatgccctacttcatccaggtgatgaaggagtacctgaccaaggtggacaagctggacgccagcgagagcctgagaaaggaggaggagcaggccaccgagacccagcccatcgtgtacggccagccccagctgatgctgaccgccggccccagcgtggccgtgcccccccaggcccccttcggctacggctacaccgcccccccctacggccagccccagcccggcttcggctacagcatgtag

SEQ ID NO: 77028 - DNA, 4923 bp, synthetic construct
  misc_feature 1..4923: note = Description of Artificial Sequence: Synthetic coding sequence
  source 1..4923: mol_type = other DNA
atggcccagatcctgcccgtgagattccaggagcacttccagctgcagaacctgggcatcaaccccgccaacatcggcttcagcaccctgaccatggagagcgacaagttcatctgcatcagagagaaggtgggcgagcaggcccaggtgaccatcatcgacatgagcgaccccatggcccccatcagaagacccatcagcgccgagagcgccatcatgaaccccgccagcaaggtgatcgccctgaaggccggcaagaccctgcagatcttcaacatcgagatgaagagcaagatgaaggcccacaccatggccgaggaggtgatcttctggaagtgggtgagcgtgaacaccgtggccctggtgaccgagaccgccgtgtaccactggagcatggagggcgacagccagcccatgaagatgttcgacagacacaccagcctggtgggctgccaggtgatccactacagaaccgacgagtaccagaagtggctgctgctggtgggcatcagcgcccagcagaacagagtggtgggcgccatgcagctgtacagcgtggacagaaaggtgagccagcccatcgagggccacgccgccgccttcgccgagttcaagatggagggcaacgccaagcccgccaccctgttctgcttcgccgtgagaaaccccaccggcggcaagctgcacatcatcgaggtgggccagcccgccgccggcaaccagcccttcgtgaagaaggccgtggacgtgttcttcccccccgaggcccagaacgacttccccgtggccatgcagatcggcgccaagcacggcgtgatctacctgatcaccaagtacggctacctgcacctgtacgacctggagagcggcgtgtgcatctgcatgaacagaatcagcgccgacaccatcttcgtgaccgccccccacaagcccaccagcggcatcatcggcgtgaacaagaagggccaggtgctgagcgtgtgcgtggaggaggacaacatcgtgaactacgccaccaacgtgctgcagaaccccgacctgggcctgagactggccgtgagaagcaacctggccggcgccgagaagctgttcgtgagaaagttcaacaccctgttcgcccagggcagctacgccgaggccgccaaggtggccgccagcgcccccaagggcatcctgagaaccagagagaccgtgcagaagttccagagcatccccgcccagagcggccaggccagccccctgctgcagtacttcggcatcctgctggaccagggccagctgaacaagctggagagcctggagctgtgccacctggtgctgcagcagggcagaaagcagctgctggagaagtggctgaaggaggacaagctggagtgcagcgaggagctgggcgacctggtgaagaccaccgaccccatgctggccctgagcgtgtacctgagagccaacgtgcccagcaaggtgatccagtgcttcgccgagaccggccagttccagaagatcgtgctgtacgccaagaaggtgggctacacccccgactggatcttcctgctgagaggcgtgatgaagatcagccccgagcagggcctgcagttcagcagaatgctggtgcaggacgaggagcccctggccaacatcagccagatcgtggacatcttcatggagaacagcctgatccagcagtgcaccagcttcctgctggacgccctgaagaacaacagacccgccgagggcctgctgcagacctggctgctggagatgaacctggtgcacgccccccaggtggccgacgccatcctgggcaacaagatgttcacccactacgacagagcccacatcgcccagctgtgcgagaaggccggcctgctgcagcaggccctggagcactacaccgacctgtacgacatcaagagagccgtggtgcacacccacctgctgaaccccgagtggctggtgaacttcttcggcagcctgagcgtggaggacagcgtggagtgcctgcacgccatgctgagcgccaacatcagacagaacctgcagctgtgcgtgcaggtggccagcaagtaccacgagcagctgggcacccaggccctggtggagctgttcgagagcttcaagagctacaagggcctgttctacttcctgggcagcatcgtgaacttcagccaggaccccgacgtgcacctgaagtacatccaggccgcctgcaagaccggccagatcaaggaggtggagagaatctgcagagagagcagctgctacaaccccgagagagtgaagaacttcctgaaggaggccaagctgaccgaccagctgcccctgatcatcgtgtgcgacagattcggcttcgtgcacgacctggtgctgtacctgtacagaaacaacctgcagagatacatcgagatctacgtgcagaaggtgaaccccagcagaacccccgccgtgatcggcggcctgctggacgtggactgcagcgaggaggtgatcaagcacctgatcatggccgtgagaggccagttcagcaccgacgagctggtggccgaggtggagaagagaaacagactgaagctgctgctgccctggctggagagccagatccaggagggctgcgaggagcccgccacccacaacgccctggccaagatctacatcgacagcaacaacagccccgagtgcttcctgagagagaacgcctactacgacagcagcgtggtgggcagatactgcgagaagagagacccccacctggcctgcgtggcctacgagagaggccagtgcgacctggagctgatcaaggtgtgcaacgagaacagcctgttcaagagcgaggccagatacctggtgtgcagaaaggaccccgagctgtgggcccacgtgctggaggagaccaaccccagcagaagacagctgatcgaccaggtggtgcagaccgccctgagcgagaccagagaccccgaggagatcagcgtgaccgtgaaggccttcatgaccgccgacctgcccaacgagctgatcgagctgctggagaagatcgtgctggacaacagcgtgttcagcgagcacagaaacctgcagaacctgctgatcctgaccgccatcaaggccgacagaaccagagtgatggagtacatcagcagactggacaactacgacgccctggacatcgccagcatcgccgtgagcagcgccctgtacgaggaggccttcaccgtgttccacaagttcgacatgaacgccagcgccatccaggtgctgatcgagcacatcggcaacctggacagagcctacgagttcgccgagagatgcaacgagcccgccgtgtggagccagctggcccaggcccagctgcagaaggacctggtgaaggaggccatcaacagctacatcagaggcgacgaccccagcagctacctggaggtggtgcagagcgccagcagaagcaacaactgggaggacctggtgaagttcctgcagatggccagaaagaagggcagagagagctacatcgagaccgagctgatcttcgccctggccaagaccagcagagtgagcgagctggaggacttcatcaacggccccaacaacgcccacatccagcaggtgggcgacagatgctacgaggagggcatgtacgaggccgccaagctgctgtacagcaacgtgagcaacttcgccagactggccagcaccctggtgcacctgggcgagtaccaggccgccgtggacaacagcagaaaggccagcagcaccagaacctggaaggaggtgtgcttcgcctgcatggacggccaggagttcagattcgcccagctgtgcggcctgcacatcgtgatccacgccgacgagctggaggagctgatgtgctactaccaggacagaggctacttcgaggagctgatcctgctgctggaggccgccctgggcctggagagagcccacatgggcatgttcaccgagctggccatcctgtacagcaagttcaagccccagaagatgctggagcacctggagctgttctggagcagagtgaacatccccaaggtgctgagagccgccgagcaggcccacctgtgggccgagctggtgttcctgtacgacaagtacgaggagtacgacaacgccgtgctgaccatgatgagccaccccaccgaggcctggaaggagggccagttcaaggacatcatcaccaaggtggccaacgtggagctgtgctacagagccctgcagttctacctggactacaagcccctgctgatcaacgacctgctgctggtgctgagccccagactggaccacacctggaccgtgagcttcttcagcaaggccggccagctgcccctggtgaagccctacctgagaagcgtgcagagccacaacaacaagagcgtgaacgaggccctgaaccacctgctgaccgaggaggaggactaccagggcctgagagccagcatcgacgcctacgacaacttcgacaacatcagcctggcccagcagctggagaagcaccagctgatggagttcagatgcatcgccgcctacctgtacaagggcaacaactggtgggcccagagcgtggagctgtgcaagaaggaccacctgtacaaggacgccatgcagcacgccgccgagagcagagacgccgagctggcccagaagctgctgcagtggttcctggaggagggcaagagagagtgcttcgccgcctgcctgttcacctgctacgacctgctgagacccgacatggtgctggagctggcctggagacacaacctggtggacctggccatgccctacttcatccaggtgatgagagagtacctgagcaaggtggacaagctggacgccctggagagcctgagaaagcaggaggagcacgtgaccgagcccgcccccctggtgttcgacttcgacggccacgagtag

SEQ ID NO: 77029 - DNA, 4752 bp, synthetic construct
  misc_feature 1..4752: note = Description of Artificial Sequence: Synthetic coding sequence
  source 1..4752: mol_type = other DNA
atggcccagatcctgcccgtgagattccaggagcacttccagctgcagaacctgggcatcaaccccgccaacatcggcttcagcaccctgaccatggagagcgacaagttcatctgcatcagagagaaggtgggcgagcaggcccaggtgaccatcatcgacatgagcgaccccatggcccccatcagaagacccatcagcgccgagagcgccatcatgaaccccgccagcaaggtgatcgccctgaaggccggcaagaccctgcagatcttcaacatcgagatgaagagcaagatgaaggcccacaccatggccgaggaggtgatcttctggaagtgggtgagcgtgaacaccgtggccctggtgaccgagaccgccgtgtaccactggagcatggagggcgacagccagcccatgaagatgttcgacagacacaccagcctggtgggctgccaggtgatccactacagaaccgacgagtaccagaagtggctgctgctggtgggcatcagcgcccagcagaacagagtggtgggcgccatgcagctgtacagcgtggacagaaaggtgagccagcccatcgagggccacgccgccgccttcgccgagttcaagatggagggcaacgccaagcccgccaccctgttctgcttcgccgtgagaaaccccaccggcggcaagctgcacatcatcgaggtgggccagcccgccgccggcaaccagcccttcgtgaagaaggccgtggacgtgttcttcccccccgaggcccagaacgacttccccgtggccatgcagatcggcgccaagcacggcgtgatctacctgatcaccaagtacggctacctgcacctgtacgacctggagagcggcgtgtgcatctgcatgaacagaatcagcgccgacaccatcttcgtgaccgccccccacaagcccaccagcggcatcatcggcgtgaacaagaagggccaggtgctgagcgtgtgcgtggaggaggacaacatcgtgaactacgccaccaacgtgctgcagaaccccgacctgggcctgagactggccgtgagaagcaacctggccggcgccgagaagctgttcgtgagaaagttcaacaccctgttcgcccagggcagctacgccgaggccgccaaggtggccgccagcgcccccaagggcatcctgagaaccagagagaccgtgcagaagttccagagcatccccgcccagagcggccaggccagccccctgctgcagtacttcggcatcctgctggaccagggccagctgaacaagctggagagcctggagctgtgccacctggtgctgcagcagggcagaaagcagctgctggagaagtggctgaaggaggacaagctggagtgcagcgaggagctgggcgacctggtgaagaccaccgaccccatgctggccctgagcgtgtacctgagagccaacgtgcccagcaaggtgatccagtgcttcgccgagaccggccagttccagaagatcgtgctgtacgccaagaaggtgggctacacccccgactggatcttcctgctgagaggcgtgatgaagatcagccccgagcagggcctgcagttcagcagaatgctggtgcaggacgaggagcccctggccaacatcagccagatcgtggacatcttcatggagaacagcctgatccagcagtgcaccagcttcctgctggacgccctgaagaacaacagacccgccgagggcctgctgcagacctggctgctggagatgaacctggtgcacgccccccaggtggccgacgccatcctgggcaacaagatgttcacccactacgacagagcccacatcgcccagctgtgcgagaaggccggcctgctgcagcaggccctggagcactacaccgacctgtacgacatcaagagagccgtggtgcacacccacctgctgaaccccgagtggctggtgaacttcttcggcagcctgagcgtggaggacagcgtggagtgcctgcacgccatgctgagcgccaacatcagacagaacctgcagctgtgcgtgcaggtggccagcaagtaccacgagcagctgggcacccaggccctggtggagctgttcgagagcttcaagagctacaagggcctgttctacttcctgggcagcatcgtgaacttcagccaggaccccgacgtgcacctgaagtacatccaggccgcctgcaagaccggccagatcaaggaggtggagagaatctgcagagagagcagctgctacaaccccgagagagtgaagaacttcctgaaggaggccaagctgaccgaccagctgcccctgatcatcgtgtgcgacagattcggcttcgtgcacgacctggtgctgtacctgtacagaaacaacctgcagagatacatcgagatctacgtgcagaaggtgaaccccagcagaacccccgccgtgatcggcggcctgctggacgtggactgcagcgaggaggtgatcaagcacctgatcatggccgtgagaggccagttcagcaccgacgagctggtggccgaggtggagaagagaaacagactgaagctgctgctgccctggctggagagccagatccaggagggctgcgaggagcccgccacccacaacgccctggccaagatctacatcgacagcaacaacagccccgagtgcttcctgagagagaacgcctactacgacagcagcgtggtgggcagatactgcgagaagagagacccccacctggcctgcgtggcctacgagagaggccagtgcgacctggagctgatcaaggtgtgcaacgagaacagcctgttcaagagcgaggccagatacctggtgtgcagaaaggaccccgagctgtgggcccacgtgctggaggagaccaaccccagcagaagacagctgatcgaccaggtggtgcagaccgccctgagcgagaccagagaccccgaggagatcagcgtgaccgtgaaggccttcatgaccgccgacctgcccaacgagctgatcgagctgctggagaagatcgtgctggacaacagcgtgttcagcgagcacagaaacctgcagaacctgctgatcctgaccgccatcaaggccgacagaaccagagtgatggagtacatcagcagactggacaactacgacgccctggacatcgccagcatcgccgtgagcagcgccctgtacgaggaggccttcaccgtgttccacaagttcgacatgaacgccagcgccatccaggtgctgatcgagcacatcggcaacctggacagagcctacgagttcgccgagagatgcaacgagcccgccgtgtggagccagctggcccaggcccagctgcagaaggacctggtgaaggaggccatcaacagctacatcagaggcgacgaccccagcagctacctggaggtggtgcagagcgccagcagaagcaacaactgggaggacctggtgaagttcctgcagatggccagaaagaagggcagagagagctacatcgagaccgagctgatcttcgccctggccaagaccagcagagtgagcgagctggaggacttcatcaacggccccaacaacgcccacatccagcaggtgggcgacagatgctacgaggagggcatgtacgaggccgccaagctgctgtacagcaacgtgagcaacttcgccagactggccagcaccctggtgcacctgggcgagtaccaggccgccgtggacaacagcagaaaggccagcagcaccagaacctggaaggaggtgtgcttcgcctgcatggacggccaggagttcagattcgcccagctgtgcggcctgcacatcgtgatccacgccgacgagctggaggagctgatgtgctactaccaggacagaggctacttcgaggagctgatcctgctgctggaggccgccctgggcctggagagagcccacatgggcatgttcaccgagctggccatcctgtacagcaagttcaagccccagaagatgctggagcacctggagctgttctggagcagagtgaacatccccaaggtgctgagagccgccgagcaggcccacctgtgggccgagctggtgttcctgtacgacaagtacgaggagtacgacaacgccgtgctgaccatgatgagccaccccaccgaggcctggaaggagggccagttcaaggacatcatcaccaaggtggccaacgtggagctgtgctacagagccctgcagttctacctggactacaagcccctgctgatcaacgacctgctgctggtgctgagccccagactggaccacacctggaccgtgagcttcttcagcaaggccggccagctgcccctggtgaagccctacctgagaagcgtgcagagccacaacaacaagagcgtgaacgaggccctgaaccacctgctgaccgaggaggaggactaccaggacgccatgcagcacgccgccgagagcagagacgccgagctggcccagaagctgctgcagtggttcctggaggagggcaagagagagtgcttcgccgcctgcctgttcacctgctacgacctgctgagacccgacatggtgctggagctggcctggagacacaacctggtggacctggccatgccctacttcatccaggtgatgagagagtacctgagcaaggtggacaagctggacgccctggagagcctgagaaagcaggaggagcacgtgaccgagcccgcccccctggtgttcgacttcgacggccacgagtag

SEQ ID NO: 77030 - DNA, 4923 bp, synthetic construct; identical to SEQ ID NO: 77028
  misc_feature 1..4923: note = Description of Artificial Sequence: Synthetic coding sequence
  source 1..4923: mol_type = other DNA

SEQ ID NO: 77031 - DNA, 747 bp, synthetic construct
  misc_feature 1..747: note = Description of Artificial Sequence: Synthetic coding sequence
  source 1..747: mol_type = other DNA
atggccgagctggaccccttcggcgcccccgccggcgcccccggcggccccgccctgggcaacggcgtggccggcgccggcgaggaggaccccgccgccgccttcctggcccagcaggagagcgagatcgccggcatcgagaacgacgaggccttcgccatcctggacggcggcgcccccggcccccagccccacggcgagccccccggcggccccgacgccgtggacggcgtgatgaacggcgagtactaccaggagagcaacggccccaccgacagctacgccgccatcagccaggtggacagactgcagagcgagcccgagagcatcagaaagtggagagaggagcagatggagagactggaggccctggacgccaacagcagaaagcaggaggccgagtggaaggagaaggccatcaaggagctggaggagtggtacgccagacaggacgagcagctgcagaagaccaaggccaacaacagagtggccgacgaggccttctacaagcagcccttcgccgacgtgatcggctacgtgaccaacatcaaccacccctgctacagcctggagcaggccgccgaggaggccttcgtgaacgacatcgacgagagcagccccggcaccgagtgggagagagtggccagactgtgcgacttcaaccccaagagcagcaagcaggccaaggacgtgagcagaatgagaagcgtgctgatcagcctgaagcaggcccccctggtgcactag

SEQ ID NO: 77032 - DNA, 657 bp, synthetic construct
  misc_feature 1..657: note = Description of Artificial Sequence: Synthetic coding sequence
  source 1..657: mol_type = other DNA
atggccgagctggaccccttcggcgcccccgccggcgcccccggcggccccgccctgggcaacggcgtggccggcgccggcgaggaggaccccgccgccgccttcctggcccagcaggagagcgagatcgccggcatcgagaacgacgaggccttcgccatcctggacggcggcgcccccggcccccagccccacggcgagccccccggcggccccgacgccgtggacggcgtgatgaacggcgagtactaccaggagagcaacggccccaccgacagctacgccgccatcagccaggtggacagactgcagagcgagcccgagagcatcagaaagtggagagaggagcagatggagagactggaggccctggacgccaacagcagaaagcaggaggccgagtggaaggagaaggccatcaaggagctggaggagtggtacgccagacaggacgagcagctgcagaagaccaaggccaacaacagagccgccgaggaggccttcgtgaacgacatcgacgagagcagccccggcaccgagtgggagagagtggccagactgtgcgacttcaaccccaagagcagcaagcaggccaaggacgtgagcagaatgagaagcgtgctgatcagcctgaagcaggcccccctggtgcactag

SEQ ID NO: 77033 - DNA, 711 bp, synthetic construct
  misc_feature 1..711: note = Description of Artificial Sequence: Synthetic coding sequence
  source 1..711: mol_type = other DNA
atggccgagctggaccccttcggcgcccccgccggcgcccccggcggccccgccctgggcaacggcgtggccggcgccggcgaggaggaccccgccgccgccttcctggcccagcaggagagcgagatcgccggcatcgagaacgacgaggccttcgccatcctggacggcggcgcccccggcccccagccccacggcgagccccccggcggccccgacgccgtggacggcgtgatgaacggcgagtactaccaggagagcaacggccccaccgacagctacgccgccatcagccaggtggacagactgcagagcgagcccgagagcatcagaaagtggagagaggagcagatggagagactggaggccctggacgccaacagcagaaagcaggaggccgagtggaaggagaaggccatcaaggagctggaggagtggtacgccagacaggacgagcagctgcagaagaccaaggccaacaacagagtggccgacgaggccttctacaagcagcccttcgccgacgtgatcggctacgtggccgccgaggaggccttcgtgaacgacatcgacgagagcagccccggcaccgagtgggagagagtggccagactgtgcgacttcaaccccaagagcagcaagcaggccaaggacgtgagcagaatgagaagcgtgctgatcagcctgaagcaggcccccctggtgcactag

SEQ ID NO: 77034 - DNA, 747 bp, synthetic construct; identical to SEQ ID NO: 77031
  misc_feature 1..747: note = Description of Artificial Sequence: Synthetic coding sequence
  source 1..747: mol_type = other DNA

SEQ ID NO: 77035 - DNA, 693 bp, synthetic construct
  misc_feature 1..693: note = Description of Artificial Sequence: Synthetic coding sequence
  source 1..693: mol_type = other DNA
atggccgagctggaccccttcggcgcccccgccggcgcccccggcggccccgccctgggcaacggcgtggccggcgccggcgaggaggaccccgccgccgccttcctggcccagcaggagagcgagatcgccggcatcgagaacgacgaggccttcgccatcctggacggcggcgcccccggcccccagccccacggcgagccccccggcggccccgacgccgtggacggcgtgatgaacggcgagtactaccaggagagcaacggccccaccgacagctacgccgccatcagccaggtggacagactgcagagcgagcccgagagcatcagaaagtggagagaggagcagatggagagactggaggccctggacgccaacagcagaaagcaggaggccgagtggaaggagaaggccatcaaggagctggaggagtggtacgccagacaggacgagcagctgcagaagaccaaggccaacaacagcaccaacatcaaccacccctgctacagcctggagcaggccgccgaggaggccttcgtgaacgacatcgacgagagcagccccggcaccgagtgggagagagtggccagactgtgcgacttcaaccccaagagcagcaagcaggccaaggacgtgagcagaatgagaagcgtgctgatcagcctgaagcaggcccccctggtgcactag

SEQ ID NO: 77036 - DNA, 693 bp, synthetic construct; identical to SEQ ID NO: 77035
  misc_feature 1..693: note = Description of Artificial Sequence: Synthetic coding sequence
  source 1..693: mol_type = other DNA

SEQ ID NO: 77037 - DNA, 501 bp, synthetic construct
  misc_feature 1..501: note = Description of Artificial Sequence: Synthetic coding sequence
  source 1..501: mol_type = other DNA
atggccgagctggaccccttcggcgcccccgccggcgcccccggcggccccgccctgggcaacggcgtggccggcgccggcgaggaggaccccgccgccgccttcctggcccagcaggagagcgagatcgccggcatcgagaacgacgaggccttcgccatcctggacggcggcgcccccggcccccagccccacggcgagccccccggcggccccgacgccaacagcagaaagcaggaggccgagtggaaggagaaggccatcaaggagctggaggagtggtacgccagacaggacgagcagctgcagaagaccaaggccaacaacagagccgccgaggaggccttcgtgaacgacatcgacgagagcagccccggcaccgagtgggagagagtggccagactgtgcgacttcaaccccaagagcagcaagcaggccaaggacgtgagcagaatgagaagcgtgctgatcagcctgaagcaggcccccctggtgcactag

SEQ ID NO: 77038 - DNA, 690 bp, synthetic construct
  misc_feature 1..690: note = Description of Artificial Sequence: Synthetic coding sequence
  source 1..690: mol_type = other DNA
atggccgacgacttcggcttcttcagcagcagcgagagcggcgcccccgaggccgccgaggaggaccccgccgccgccttcctggcccagcaggagagcgagatcgccggcatcgagaacgacgagggcttcggcgcccccgccggcagccacgccgcccccgcccagcccggccccaccagcggcgccggcagcgaggacatgggcaccaccgtgaacggcgacgtgttccaggaggccaacggccccgccgacggctacgccgccatcgcccaggccgacagactgacccaggagcccgagagcatcagaaagtggagagaggagcagagaaagagactgcaggagctggacgccgccagcaaggtgaccgagcaggagtggagagagaaggccaagaaggacctggaggagtggaaccagagacagagcgagcaggtggagaagaacaagatcaacaacagaatcgccgacaaggccttctaccagcagcccgacgccgacatcatcggctacgtggccagcgaggaggccttcgtgaaggagagcaaggaggagacccccggcaccgagtgggagaaggtggcccagctgtgcgacttcaaccccaagagcagcaagcagtgcaaggacgtgagcagactgagaagcgtgctgatgagcctgaagcagacccccctgagcagatag

SEQ ID NO: 77039 - DNA, 636 bp, synthetic construct
  misc_feature 1..636: note = Description of Artificial Sequence: Synthetic coding sequence
  source 1..636: mol_type = other DNA
atggccgacgacttcggcttcttcagcagcagcgagagcggcgcccccgaggccgccgaggaggaccccgccgccgccttcctggcccagcaggagagcgagatcgccggcatcgagaacgacgagggcttcggcgcccccgccggcagccacgccgcccccgcccagcccggccccaccagcggcgccggcagcgaggacatgggcaccaccgtgaacggcgacgtgttccaggaggccaacggccccgccgacggctacgccgccatcgcccaggccgacagactgacccaggagcccgagagcatcagaaagtggagagaggagcagagaaagagactgcaggagctggacgccgccagcaaggtgaccgagcaggagtggagagagaaggccaagaaggacctggaggagtggaaccagagacagagcgagcaggtggagaagaacaagatcaacaacagagccagcgaggaggccttcgtgaaggagagcaaggaggagacccccggcaccgagtgggagaaggtggcccagctgtgcgacttcaaccccaagagcagcaagcagtgcaaggacgtgagcagactgagaagcgtgctgatgagcctgaagcagacccccctgagcagatag

SEQ ID NO: 77040 - DNA, 405 bp, synthetic construct
  misc_feature 1..405: note = Description of Artificial Sequence: Synthetic coding sequence
  source 1..405: mol_type = other DNA
atggccgacgacttcggcttcttcagcagcagcgagagcggcgcccccgaggccgccgaggaggaccccgccgccgccttcctggcccagcaggagagcgagatcgccggcatcgagaacgacgagggcttcggcgcccccgccggcagccacgccgcccccgcccagcccggccccaccagcggcgccggcagcgaggacatgggcaccaccgtgaacggcgacgtgttccagcccgtgcaccaccagagagtgcagctgcagacccagctgcccatccagcccaaggacgagcccgcccacaactacagcagcagcatctggcacagccagggccagggccagaagggccccgccggcctgagactgcccaccagcgcccagatcctgagccccttcccctag

SEQ ID NO: 77041 - DNA, 636 bp, synthetic construct
  misc_feature 1..636: note = Description of Artificial Sequence: Synthetic coding sequence
  source 1..636: mol_type = other DNA
atggccaacgccggcctgcagctgctgggcttcatcctggccttcctgggctggatcggcgccatcgtgagcaccgccctgccccagtggagaatctacagctacgccggcgacaacatcgtgaccgcccaggccatgtacgagggcctgtggatgagctgcgtgagccagagcaccggccagatccagtgcaaggtgttcgacagcctgctgaacctgagcagcaccctgcaggccaccagagccctgatggtggtgggcatcctgctgggcgtgatcgccatcttcgtggccaccgtgggcatgaagtgcatgaagtgcctggaggacgacgaggtgcagaagatgagaatggccgtgatcggcggcgccatcttcctgctggccggcctggccatcctggtggccaccgcctggtacggcaacagaatcgtgcaggagttctacgaccccatgacccccgtgaacgccagatacgagttcggccaggccctgttcaccggctgggccgccgccagcctgtgcctgctgggcggcgccctgctgtgctgcagctgccccagaaagaccaccagctaccccacccccagaccctaccccaagcccgcccccagcagcggcaaggactacgtgtag

SEQ ID NO: 77042 - DNA, 501 bp, synthetic construct
  misc_feature 1..501: note = Description of Artificial Sequence: Synthetic coding sequence
  source 1..501: mol_type = other DNA
atgtacgagggcctgtggatgagctgcgtgagccagagcaccggccagatccagtgcaaggtgttcgacagcctgctgaacctgagcagcaccctgcaggccaccagagccctgatggtggtgggcatcctgctgggcgtgatcgccatcttcgtggccaccgtgggcatgaagtgcatgaagtgcctggaggacgacgaggtgcagaagatgagaatggccgtgatcggcggcgccatcttcctgctggccggcctggccatcctggtggccaccgcctggtacggcaacagaatcgtgcaggagttctacgaccccatgacccccgtgaacgccagatacgagttcggccaggccctgttcaccggctgggccgccgccagcctgtgcctgctgggcggcgccctgctgtgctgcagctgccccagaaagaccaccagctaccccacccccagaccctaccccaagcccgcccccagcagcggcaaggactacgtgtag

SEQ ID NO: 77043 - DNA, 624 bp, synthetic construct
  misc_feature 1..624: note = Description of Artificial Sequence: Synthetic coding sequence
  source 1..624: mol_type = other DNA
atggtggccacctgcctgcaggtggtgggcttcgtgaccagcttcgtgggctggatcggcgtgatcgtgaccaccagcaccaacgactgggtggtgacctgcggctacaccatccccacctgcagaaagctggacgagctgggcagcaagggcctgtgggccgactgcgtgatggccaccggcctgtaccactgcaagcccctggtggacatcctgatcctgcccggctacgtgcaggcctgcagagccctgatgatcgccgccagcgtgctgggcctgcccgccatcctgctgctgctgaccgtgctgccctgcatcagaatgggccaggagcccggcgtggccaagtacagaagagcccagctggccggcgtgctgctgatcctgctggccctgtgcgccctggtggccaccatctggttccccgtgtgcgcccacagagagaccaccatcgtgagcttcggctacagcctgtacgccggctggatcggcgccgtgctgtgcctggtgggcggctgcgtgatcctgtgctgcgccggcgacgcccaggccttcggcgagaacagattctactacaccgccggcagcagcagccccacccacgccaagagcgcccacgtgtag

SEQ ID NO: 77044 - DNA, 498 bp, synthetic construct
  misc_feature 1..498: note = Description of Artificial Sequence: Synthetic coding sequence
  source 1..498: mol_type = other DNA
atggtggccacctgcctgcaggtggtgggcttcgtgaccagcttcgtgggctggatcggcgtgatcgtgaccaccagcaccaacgactgggtggtgacctgcggctacaccatccccacctgcagaaagctggacgagctgggcagcaagggcctgtgggccgactgcgtgatggccaccggcctgtaccactgcaagcccctggtggacatcctgatcctgcccggctacgtgcaggcctgcagagccctgatgatcgccgccagcgtgctgggcctgcccgccatcctgctgctgctgaccgtgctgccctgcatcagaatgggccaggagcccggcgtggccaagtacagaagagcccagctggccggcgtgctgctgatcctgctgggctgccagctgctgtgggccaagaccgagagcagcctgcacagccagcacctggtgcagttcaagcagaagtacctggaggacttcagctacctgcagggcgactag

SEQ ID NO: 77045 - DNA, 498 bp, synthetic construct; identical to SEQ ID NO: 77044
  misc_feature 1..498: note = Description of Artificial Sequence: Synthetic coding sequence
  source 1..498: mol_type = other DNA

SEQ ID NO: 77046 - DNA, 720 bp, synthetic construct
  misc_feature 1..720: note = Description of Artificial Sequence: Synthetic coding sequence
  source 1..720: mol_type = other DNA
atggccagcaccgccgtgcagctgctgggcttcctgctgagcttcctgggcatggtgggcaccctgatcaccaccatcctgccccactggagaagaaccgcccacgtgggcaccaacatcctgaccgccgtgagctacctgaagggcctgtggatggagtgcgtgtggcacagcaccggcatctaccagtgccagatctacagaagcctgctggccctgccccaggacctgcaggccgccagagccctgatggtgatcagctgcctgctgagcggcatcgcctgcgcctgcgccgtgatcggcatgaagtgcaccagatgcgccaagggcacccccgccaagaccaccttcgccatcctgggcggcaccctgttcatcctggccggcctgctgtgcatggtggccgtgagctggaccaccaacgacgtggtgcagaacttctacaaccccctgctgcccagcggcatgaagttcgagatcggccaggccctgtacctgggcttcatcagcagcagcctgagcctgatcggcggcaccctgctgtgcctgagctgccaggacgaggccccctacagaccctaccaggccccccccagagccaccaccaccaccgccaacaccgcccccgcctaccagccccccgccgcctacaaggacaacagagcccccagcgtgaccagcgccacccacagcggctacagactgaacgactacgtgtag

SEQ ID NO: 77047 - DNA, 720 bp, synthetic construct; identical to SEQ ID NO: 77046
  misc_feature 1..720: note = Description of Artificial Sequence: Synthetic coding sequence
  source 1..720: mol_type = other DNA

SEQ ID NO: 77048 - DNA, 720 bp, synthetic construct; identical to SEQ ID NO: 77046
  misc_feature 1..720: note = Description of Artificial Sequence: Synthetic coding sequence
  source 1..720: mol_type = other DNA

SEQ ID NO: 77049 - DNA, 720 bp, synthetic construct; identical to SEQ ID NO: 77046
  misc_feature 1..720: note = Description of Artificial Sequence: Synthetic coding sequence
  source 1..720: mol_type = other DNA

SEQ ID NO: 77050 - DNA, 720 bp, synthetic construct; identical to SEQ ID NO: 77046
  misc_feature 1..720: note = Description of Artificial Sequence: Synthetic coding sequence
  source 1..720: mol_type = other DNA

SEQ ID NO: 77051 - DNA, 918 bp, synthetic construct
  misc_feature 1..918: note = Description of Artificial Sequence: Synthetic coding sequence
  source 1..918: mol_type = other DNA
atgaccagcagaacccccctgctggtgaccgcctgcctgtactacagctactgcaacagcagacacctgcagcagggcgtgagaaagagcaagagacccgtgttcagccactgccaggtgcccgagacccagaagaccgacaccagacacctgagcggcgccagagccggcgtgtgcccctgctgccaccccgacggcctgctggccaccatgagagacctgctgcagtacatcgcctgcttcttcgccttcttcagcgccggcttcctgatcgtggccacctggaccgactgctggatggtgaacgccgacgacagcctggaggtgagcaccaagtgcagaggcctgtggtgggagtgcgtgaccaacgccttcgacggcatcagaacctgcgacgagtacgacagcatcctggccgagcaccccctgaagctggtggtgaccagagccctgatgatcaccgccgacatcctggccggcttcggcttcctgaccctgctgctgggcctggactgcgtgaagttcctgcccgacgagccctacatcaaggtgagaatctgcttcgtggccggcgccaccctgctgatcgccggcacccccggcatcatcggcagcgtgtggtacgccgtggacgtgtacgtggagagaagcaccctggtgctgcacaacatcttcctgggcatccagtacaagttcggctggagctgctggctgggcatggccggcagcctgggctgcttcctggccggcgccgtgctgacctgctgcctgtacctgttcaaggacgtgggccccgagagaaactacccctacagcctgagaaaggcctacagcgccgccggcgtgagcatggccaagagctacagcgcccccagaaccgagaccgccaagatgtacgccgtggacaccagagtgtag

SEQ ID NO: 77052 - DNA, 360 bp, synthetic construct
  misc_feature 1..360: note = Description of Artificial Sequence: Synthetic coding sequence
  source 1..360: mol_type = other DNA
atgaccagcagaacccccctgctggtgaccgcctgcctgtactacagctactgcaacagcagacacctgcagcagggcgtgagaaagagcaagagacccgtgttcagccactgccaggtgcccgagacccagaagaccgacaccagacacctgagcggcgccagagccggcgtgtgcccctgctgccaccccgacggcctgctggccaccatgagagacctgctgcagtacatcgcctgcttcttcgccttcttcagcgccggcttcctgatcgtggccacctggaccgactgctggatggtgaacgccgacgacagcctggagatgctggacctgagagagaccatcctgatcccctag

SEQ ID NO: 77053 - DNA, 675 bp, synthetic construct
  misc_feature 1..675: note = Description of Artificial Sequence: Synthetic coding sequence
  source 1..675: mol_type = other DNA
atggccaacagcggcctgcagctgctgggctacttcctggccctgggcggctgggtgggcatcatcgccagcaccgccctgccccagtggaagcagagcagctacgccggcgacgccatcatcaccgccgtgggcctgtacgagggcctgtggatgagctgcgccagccagagcaccggccaggtgcagtgcaagctgtacgacagcctgctggccctggacggccacatccagagcgccagagccctgatggtggtggccgtgctgctgggcttcgtggccatggtgctgagcgtggtgggcatgaagtgcaccagagtgggcgacagcaaccccatcgccaagggcagagtggccatcgccggcggcgccctgttcatcctggccggcctgtgcaccctgaccgccgtgagctggtacgccaccctggtgacccaggagttcttcaaccccagcacccccgtgaacgccagatacgagttcggccccgccctgttcgtgggctgggccagcgccggcctggccgtgctgggcggcagcttcctgtgctgcacctgccccgagcccgagagacccaacagcagcccccagccctacagacccggccccagcgccgccgccagagagcccgtggtgaagctgcccgccagcgccaagggccccctgggcgtgtag

SEQ ID NO: 77054 - DNA, 636 bp, synthetic construct
  misc_feature 1..636: note = Description of Artificial Sequence: Synthetic coding sequence
  source 1..636: mol_type = other DNA
atggccaacagcggcctgcagctgctgggctacttcctggccctgggcggctgggtgggcatcatcgccagcaccgccctgccccagtggaagcagagcagctacgccggcgacgccatcatcaccgccgtgggcctgtacgagggcctgtggatgagctgcgccagccagagcaccggccaggtgcagtgcaagctgtacgacagcctgctggccctggacggccacatccagagcgccagagccctgatggtggtggccgtgctgctgggcttcgtggccatggtgctgagcgtggtgggcatgaagtgcaccagagtgggcgacagcaaccccatcgccaagggcagagtggccatcgccggcggcgccctgttcatcctggccggcctgtgcaccctgaccgccgtgagctggtacgccaccctggtgacccaggagttcttcaaccccagcacccccgtgaacgccagatacgagttcggccccgccctgttcgtgggctgggccagcgccggcctggccgtgctgggcggcagcttcctgtgctgcacctgccccgagcccgagagacccaacagcagcccccagccctacagacccggccccagcgccgccgccagagagtacgtgtag

SEQ ID NO: 77055 - DNA, 657 bp, synthetic construct
  misc_feature 1..657: note = Description of Artificial Sequence: Synthetic coding sequence
  source 1..657: mol_type = other DNA
atggccaacagcggcctgcagctgctgggctacttcctggccctgggcggctgggtgggcatcatcgccagcaccgccctgccccagtggaagcagagcagctacgccggcgacgccatcatcaccgccgtgggcctgtacgagggcctgtggatgagctgcgccagccagagcaccggccaggtgcagtgcaagctgtacgacagcctgctggccctggacggccacatccagagcgccagagccctgatggtggtggccgtgctgctgggcttcgtggccatggtgctgagcgtggtgggcatgaagtgcaccagagtgggcgacagcaaccccatcgccaagggcagagtggccatcgccggcggcgccctgttcatcctggccggcatgaacctggcccagccctgcagctgggccggcccccagctggcctggccctgctgggccgcccccagcagcgccgcccacgccagaagccagagagaccccaccgccgcccacagccccatcggcctggaccccctgctgctgcccgagagcaccagcgagctgagactgccctggcccgccccccaccccgtggcccccctgcccagcatccagcccgccagccagcaccccggccagggccactggggcatcggctgggcctag

SEQ ID NO: 77056 - DNA, 663 bp, synthetic construct
  misc_feature 1..663: note = Description of Artificial Sequence: Synthetic coding sequence
  source 1..663: mol_type = other DNA
atgagcatgggcctggagatcaccggcaccgccctggccgtgctgggctggctgggcaccatcgtgtgctgcgccctgcccatgtggagagtgagcgccttcatcggcagcaacatcatcaccagccagaacatctgggagggcctgtggatgaactgcgtggtgcagagcaccggccagatgcagtgcaaggtgtacgacagcctgctggccctgccccaggacctgcaggccgccagagccctgatcgtggtggccatcctgctggccgccttcggcctgctggtggccctggtgggcgcccagtgcaccaactgcgtgcaggacgacaccgccaaggccaagatcaccatcgtggccggcgtgctgttcctgctggccgccctgctgaccctggtgcccgtgagctggagcgccaacaccatcatcagagacttctacaaccccgtggtgcccgaggcccagaagagagagatgggcgccggcctgtacgtgggctgggccgccgccgccctgcagctgctgggcggcgccctgctgtgctgcagctgcccccccagagagaagaagtacaccgccaccaaggtggtgtacagcgcccccagaagcaccggccccggcgccagcctgggcaccggctacgacagaaaggactacgtgtag

SEQ ID NO: 77057 - DNA, 630 bp, synthetic construct
  misc_feature 1..630: note = Description of Artificial Sequence: Synthetic coding sequence
  source 1..630: mol_type = other DNA
atggccagcatgggcctgcaggtgatgggcatcgccctggccgtgctgggctggctggccgtgatgctgtgctgcgccctgcccatgtggagagtgaccgccttcatcggcagcaacatcgtgaccagccagaccatctgggagggcctgtggatgaactgcgtggtgcagagcaccggccagatgcagtgcaaggtgtacgacagcctgctggccctgccccaggacctgcaggccgccagagccctggtgatcatcagcatcatcgtggccgccctgggcgtgctgctgagcgtggtgggcggcaagtgcaccaactgcctggaggacgagagcgccaaggccaagaccatgatcgtggccggcgtggtgttcctgctggccggcctgatggtgatcgtgcccgtgagctggaccgcccacaacatcatccaggacttctacaaccccctggtggccagcggccagaagagagagatgggcgccagcctgtacgtgggctgggccgccagcggcctgctgctgctgggcggcggcctgctgtgctgcaactgcccccccagaaccgacaagccctacagcgccaagtacagcgccgccagaagcgccgccgccagcaactacgtgtag

SEQ ID NO: 77058 - DNA, 630 bp, synthetic construct; identical to SEQ ID NO: 77057
  misc_feature 1..630: note = Description of Artificial Sequence: Synthetic coding sequence
  source 1..630: mol_type = other DNA

SEQ ID NO: 77059 - DNA, 630 bp, synthetic construct; identical to SEQ ID NO: 77057
  misc_feature 1..630: note = Description of Artificial Sequence: Synthetic coding sequence
  source 1..630: mol_type = other DNA

SEQ ID NO: 77060 - DNA, 591 bp, synthetic construct
  misc_feature 1..591: note = Description of Artificial Sequence: Synthetic coding sequence
  source 1..591: mol_type = other DNA
atggccagcatgggcctgcaggtgatgggcatcgccctggccgtgctgggctggctggccgtgatgctgtgctgcgccctgcccatgtggagagtgaccgccttcatcggcagcaacatcgtgaccagccagagcaccggccagatgcagtgcaaggtgtacgacagcctgctggccctgccccaggacctgcaggccgccagagccctggtgatcatcagcatcatcgtggccgccctgggcgtgctgctgagcgtggtgggcggcaagtgcaccaactgcctggaggacgagagcgccaaggccaagaccatgatcgtggccggcgtggtgttcctgctggccggcctgatggtgatcgtgcccgtgagctggaccgcccacaacatcatccaggacttctacaaccccctggtggccagcggccagaagagagagatgggcgccagcctgtacgtgggctgggccgccagcggcctgctgctgctgggcggcggcctgctgtgctgcaactgcccccccagaaccgacaagccctacagcgccaagtacagcgccgccagaagcgccgccgccagcaactacgtgtag

SEQ ID NO: 77061 - DNA, 912 bp, synthetic construct
  misc_feature 1..912: note = Description of Artificial Sequence: Synthetic coding sequence
  source 1..912: mol_type = other DNA
atgaccagagccagaatcggctgcttcggccccggcggcagagccagaggcaccgagagcgcccccgagcccagcaagagagtgccccccggcagaagctggcagacccaggaggtgagacagaccagaggcgccaacggcctgggccccagagccggcagcgccggcgccaaggcccccggccccgcccagggcgccgcccagcacggcctgggcggcagcgccggcctgagagtgagagtgagccccctggccatgggcagcgccgccctggagatcctgggcctggtgctgtgcctggtgggctggggcggcctgatcctggcctgcggcctgcccatgtggcaggtgaccgccttcctggaccacaacatcgtgaccgcccagaccacctggaagggcctgtggatgagctgcgtggtgcagagcaccggccacatgcagtgcaaggtgtacgacagcgtgctggccctgagcaccgaggtgcaggccgccagagccctgaccgtgagcgccgtgctgctggccttcgtggccctgttcgtgaccctggccggcgcccagtgcaccacctgcgtggcccccggccccgccaaggccagagtggccctgaccggcggcgtgctgtacctgttctgcggcctgctggccctggtgcccctgtgctggttcgccaacatcgtggtgagagagttctacgaccccagcgtgcccgtgagccagaagtacgagctgggcgccgccctgtacatcggctgggccgccaccgccctgctgatggtgggcggctgcctgctgtgctgcggcgcctgggtgtgcaccggcagacccgacctgagcttccccgtgaagtacagcgcccccagaagacccaccgccaccggcgactacgacaagaagaactacgtgtag

SEQ ID NO: 77062 - DNA, 912 bp, synthetic construct; identical to SEQ ID NO: 77061
  misc_feature 1..912: note = Description of Artificial Sequence: Synthetic coding sequence
  source 1..912: mol_type = other DNA

SEQ ID NO: 77063 - DNA, 912 bp, synthetic construct; identical to SEQ ID NO: 77061
  misc_feature 1..912: note = Description of Artificial Sequence: Synthetic coding sequence
  source 1..912: mol_type = other DNA

SEQ ID NO: 77064 - DNA, 1086 bp, synthetic construct
  misc_feature 1..1086: note = Description of Artificial Sequence: Synthetic coding sequence
  source 1..1086: mol_type = other DNA
atgggcgaggaggccaacgacgacaagaagcccaccaccaagttcgagctggagagagagaccgagctgagattcgaggtggaggccagccagagcgtgcagctggagctgctgaccggcatggccgagatcttcggcaccgagctgaccagaaacaagaagttcaccttcgacgccggcgccaaggtggccgtgttcacctggcacggctgcagcgtgcagctgagcggcagaaccgaggtggcctacgtgagcaaggacacccccatgctgctgtacctgaacacccacaccgccctggagcagatgagaagacaggccgagaaggaggaggagagaggccccagagtgatggtggtgggccccaccgacgtgggcaagagcaccgtgtgcagactgctgctgaactacgccatcaccagcagactggccgacgtgttcaaccagagatgcgaggtgaacagaagagccagcgtgagcggctgcgtgatcaacacctgcggctgggtgaagggcagcggctaccaggccctggtgcacgccgccagcgccttcgaggtggacgtggtggtggtgctggaccaggagagactgtacaacgagctgaagagagacctgccccacttcgtgagaaccgtgctgctgcccaagagcggcggcgtggtggagagaagcaaggacttcagaagagagtgcagagacgagagaatcagagagtacttctacggcttcagaggctgcttctacccccacgccttcaacgtgaagttcagcgacgtgaagatctacaaggtgggcgcccccaccatccccgacagctgcctgcccctgggcatgagccaggaggacaaccagctgaagctggtgcccgtgacccccggcagagacatggtgcaccacctgctgagcgtgagcaccgccgagggcaccgaggagaacctgagcgagaccagcgtggccggcttcatcgtggtgaccagcgtggacctggagcaccaggtgttcaccgtgctgagccccgcccccagacccctgcccaagaacttcctgctgatcatggacatcagattcatggacctgaagtag

SEQ ID NO: 77065 - DNA, 810 bp, synthetic construct
  misc_feature 1..810: note = Description of Artificial Sequence: Synthetic coding sequence
  source 1..810: mol_type = other DNA
atgcaggagatcatcgccagcgtggaccacatcaagttcgacctggagatcgccgtggagcagcagctgggcgcccagcccctgcccttccccggcatggacaagagcggcgccgccgtgtgcgagttcttcctgaaggccgcctgcggcaagggcggcatgtgccccttcagacacatcagcggcgagaagaccgtggtgtgcaagcactggctgagaggcctgtgcaagaagggcgaccagtgcgagttcctgcacgagtacgacatgaccaagatgcccgagtgctacttctacagcaagttcggcgagtgcagcaacaaggagtgccccttcctgcacatcgaccccgagagcaagatcaaggactgcccctggtacgacagaggcttctgcaagcacggccccctgtgcagacacagacacaccagaagagtgatctgcgtgaactacctggtgggcttctgccccgagggccccagctgcaagttcatgcaccccagattcgagctgcccatgggcaccaccgagcagccccccctgccccagcagacccagccccccgccaagcagagcaacaacccccccctgcagagaagcagcagcctgatccagctgaccagccagaacagcagccccaaccagcagagaaccccccaggtgatcggcgtgatgcagagccagaacagcagcgccggcaacagaggccccagacccctggagcaggtgacctgctacaagtgcggcgagaagggccactacgccaacagatgcaccaagggccacctggccttcctgagcggccagtag

SEQ ID NO: 77066 - DNA, 735 bp, synthetic construct
  misc_feature 1..735: note = Description of Artificial Sequence: Synthetic coding sequence
  source 1..735: mol_type = other DNA
atgcaggagatcatcgccagcgtggaccacatcaagttcgacctggagatcgccgtggagcagcagctgggcgcccagcccctgcccttccccggcatggacaagagcggcgccgccgtgtgcgagttcttcctgaaggccgcctgcggcaagggcggcatgtgccccttcagacacatcagcggcgagaagaccgtggtgtgcaagcactggctgagaggcctgtgcaagaagggcgaccagtgcgagttcctgcacgagtacgacatgaccaagatgcccgagtgctacttctacagcaagttcggcgagtgcagcaacaaggagtgccccttcctgcacatcgaccccgagagcaagatcaaggactgcccctggtacgacagaggcttctgcaagcacggccccctgtgcagacacagacacaccagaagagtgatctgcgtgaactacctggtgggcttctgccccgagggccccagctgcaagttcatgcaccccagattcgagctgcccatgggcaccaccgagcagccccccctgccccagcagacccagccccccgccaagcagagaaccccccaggtgatcggcgtgatgcagagccagaacagcagcgccggcaacagaggccccagacccctggagcaggtgacctgctacaagtgcggcgagaagggccactacgccaacagatgcaccaagggccacctggccttcctgagcggccagtag

SEQ ID NO: 77067 - DNA, 636 bp, synthetic construct
  misc_feature 1..636: note = Description of Artificial Sequence: Synthetic coding sequence
  source 1..636: mol_type = other DNA
atgcaggagatcatcgccagcgtggaccacatcaagttcgacctggagatcgccgtggagcagcagctgggcgcccagcccctgcccttccccggcatggacaagagcggcgccgccgtgtgcgagttcttcctgaaggccgcctgcggcaagggcggcatgtgccccttcagacacatcagcggcgagaagaccgtggtgtgcaagcactggctgagaggcctgtgcaagaagggcgaccagtgcgagttcctgcacgagtacgacatgaccaagatgcccgagtgctacttctacagcaagttcggccccctgtgcagacacagacacaccagaagagtgatctgcgtgaactacctggtgggcttctgccccgagggccccagctgcaagttcatgcaccccagattcgagctgcccatgggcaccaccgagcagccccccctgccccagcagacccagccccccgccaagagaaccccccaggtgatcggcgtgatgcagagccagaacagcagcgccggcaacagaggccccagacccctggagcaggtgacctgctacaagtgcggcgagaagggccactacgccaacagatgcaccaagggccacctggccttcctgagcggccagtag

SEQ ID NO: 77068 - DNA, 1767 bp, synthetic construct
  misc_feature 1..1767: note = Description of Artificial Sequence: Synthetic coding sequence
  source 1..1767: mol_type = other DNA
atggccgacggcgtggaccacatcgacatctacgccgacgtgggcgaggagttcaaccaggaggccgagtacggcggccacgaccagatcgacctgtacgacgacgtgatcagccccagcgccaacaacggcgacgcccccgaggacagagactacatggacaccctgccccccaccgtgggcgacgacgtgggcaagggcgccgcccccaacgtggtgtacacctacaccggcaagagaatcgccctgtacatcggcaacctgacctggtggaccaccgacgaggacctgaccgaggccgtgcacagcctgggcgtgaacgacatcctggagatcaagttcttcgagaacagagccaacggccagagcaagggcttcgccctggtgggcgtgggcagcgaggccagcagcaagaagctgatggacctgctgcccaagagagagctgcacggccagaaccccgtggtgaccccctgcaacaagcagttcctgagccagttcgagatgcagagcagaaagaccacccagagcggccagatgagcggcgagggcaaggccggcccccccggcggcagcagcagagccgccttcccccagggcggcagaggcagaggcagattccccggcgccgtgcccggcggcgacagattccccggccccgccggccccggcggcccccccccccccttccccggcaacctgatcaagcacctggtgaagggcaccagacccctgttcctggagaccagaatcccctggcacatgggccacagcatcgaggagatccccatcttcggcctgaaggccggccagaccccccccagaccccccctgggcccccccggcccccccggcccccccggcccccccccccccggccaggtgctgcccccccccctggccggcccccccaacagaggcgacagaccccccccccccgtgctgttccccggccagcccttcggccagccccccctgggccccctgccccccggcccccccccccccgtgcccggctacggccccccccccggccccccccccccccagcagggccccccccccccccccggccccttcccccccagaccccccggccccctgggcccccccctgaccctggccccccccccccacctgcccggccccccccccggcgcccccccccccgccccccacgtgaaccccgccttcttccccccccccaccaacagcggcatgcccaccagcgacagcagaggccccccccccaccgacccctacggcagaccccccccctacgacagaggcgactacggcccccccggcagagagatggacaccgccagaacccccctgagcgaggccgagttcgaggagatcatgaacagaaacagagccatcagcagcagcgccatcagcagagccgtgagcgacgccagcgccggcgactacggcagcgccatcgagaccctggtgaccgccatcagcctgatcaagcagagcaaggtgagcgccgacgacagatgcaaggtgctgatcagcagcctgcaggactgcctgcacggcatcgagagcaagagctacggcagcggcagcagaagagagagaagcagagagagagaccacagcagaagcagagagaagagcagaagacacaagagcagaagcagagacagacacgacgactactacagagagagaagcagagagagagagagacacagagacagagacagagacagagacagagagagagacagagagagagagtacagacacagatag

SEQ ID NO: 77069 - DNA, 1656 bp, synthetic construct
  misc_feature 1..1656: note = Description of Artificial Sequence: Synthetic coding sequence
  source 1..1656: mol_type = other DNA
atggccgacggcgtggaccacatcgacatctacgccgacgtgggcgaggagttcaaccaggaggccgagtacggcggccacgaccagatcgacctgtacgacgacgtgatcagccccagcgccaacaacggcgacgcccccgaggacagagactacatggacaccctgccccccaccgtgggcgacgacgtgggcaagggcgccgcccccaacgtggtgtacacctacaccggcaagagaatcgccctgtacatcggcaacctgacctggtggaccaccgacgaggacctgaccgaggccgtgcacagcctgggcgtgaacgacatcctggagatcaagttcttcgagaacagagccaacggccagagcaagggcttcgccctggtgggcgtgggcagcgaggccagcagcaagaagctgatggacctgctgcccaagagagagctgcacggccagaaccccgtggtgaccccctgcaacaagcagttcctgagccagttcgagatgcagagcagaaagaccacccagagcggccagatgagcggcgagggcaaggccggcccccccggcggcagcagcagagccgccttcccccagggcggcagaggcagaggcagattccccggcgccgtgcccggcggcgacagattccccggccccgccggccccggcggcccccccccccccttccccgccggccagaccccccccagaccccccctgggcccccccggcccccccggcccccccggcccccccccccccggccaggtgctgcccccccccctggccggcccccccaacagaggcgacagaccccccccccccgtgctgttccccggccagcccttcggccagccccccctgggccccctgccccccggcccccccccccccgtgcccggctacggccccccccccggccccccccccccccagcagggccccccccccccccccggccccttcccccccagaccccccggccccctgggcccccccctgaccctggccccccccccccacctgcccggccccccccccggcgcccccccccccgccccccacgtgaaccccgccttcttccccccccccaccaacagcggcatgcccaccagcgacagcagaggccccccccccaccgacccctacggcagaccccccccctacgacagaggcgactacggcccccccggcagagagatggacaccgccagaacccccctgagcgaggccgagttcgaggagatcatgaacagaaacagagccatcagcagcagcgccatcagcagagccgtgagcgacgccagcgccggcgactacggcagcgccatcgagaccctggtgaccgccatcagcctgatcaagcagagcaaggtgagcgccgacgacagatgcaaggtgctgatcagcagcctgcaggactgcctgcacggcatcgagagcaagagctacggcagcggcagcagaagagagagaagcagagagagagaccacagcagaagcagagagaagagcagaagacacaagagcagaagcagagacagacacgacgactactacagagagagaagcagagagagagagagacacagagacagagacagagacagagacagagagagagacagagagagagagtacagacacagatag

SEQ ID NO: 77070 - DNA, 1437 bp, synthetic construct
  misc_feature 1..1437: note = Description of Artificial Sequence: Synthetic coding sequence
  source 1..1437: mol_type = other DNA
atggccgacggcgtggaccacatcgacatctacgccgacgtgggcgaggagttcaaccaggaggccgagtacggcggccacgaccagatcgacctgtacgacgacgtgatcagccccagcgccaacaacggcgacgcccccgaggacagagactacatggacaccctgccccccaccgtgggcgacgacgtgggcaagggcgccgcccccaacgtggtgtacacctacaccggcaagagaatcgccctgtacatcggcaacctgacctggtggaccaccgacgaggacctgaccgaggccgtgcacagcctgggcgtgaacgacatcctggagatcaagttcttcgagaacagagccaacggccagagcaagggcttcgccctggtgggcgtgggcagcgaggccagcagcaagaagctgatggacctgctgcccaagagagagctgcacggccagaaccccgtggtgaccccctgcaacaagcagttcctgagccagttcgagatgcagagcagaaagaccacccagagcggccagatgagcggcgagggcaaggccggcccccccggcgccggcccccccaacagaggcgacagaccccccccccccgtgctgttccccggccagcccttcggccagccccccctgggccccctgccccccggcccccccccccccgtgcccggctacggccccccccccggccccccccccccccagcagggccccccccccccccccggccccttcccccccagaccccccggccccctgggcccccccctgaccctggccccccccccccacctgcccggccccccccccggcgcccccccccccgccccccacgtgaaccccgccttcttccccccccccaccaacagcggcatgcccaccagcgacagcagaggccccccccccaccgacccctacggcagaccccccccctacgacagaggcgactacggcccccccggcagagagatggacaccgccagaacccccctgagcgaggccgagttcgaggagatcatgaacagaaacagagccatcagcagcagcgccatcagcagagccgtgagcgacgccagcgccggcgactacggcagcgccatcgagaccctggtgaccgccatcagcctgatcaagcagagcaaggtgagcgccgacgacagatgcaaggtgctgatcagcagcctgcaggactgcctgcacggcatcgagagcaagagctacggcagcggcagcagaagagagagaagcagagagagagaccacagcagaagcagagagaagagcagaagacacaagagcagaagcagagacagacacgacgactactacagagagagaagcagagagagagagagacacagagacagagacagagacagagacagagagagagacagagagagagagtacagacacagatag

SEQ ID NO: 77071 - DNA, 1851 bp, synthetic construct
  misc_feature 1..1851: note = Description of Artificial Sequence: Synthetic coding sequence
  source 1..1851: mol_type = other DNA
atgagcagcctggccgtgagagaccccgccatggacagaagcctgagaagcgtgttcgtgggcaacatcccctacgaggccaccgaggagcagctgaaggacatcttcagcgaggtgggcagcgtggtgagcttcagactggtgtacgacagagagaccggcaagcccaagggctacggcttctgcgagtaccaggaccaggagaccgccctgagcgccatgagaaacctgaacggcagagagttcagcggcagagccctgagagtggacaacgccgccagcgagaagaacaaggaggagctgaagagcctgggccccgccgcccccatcatcgacagcccctacggcgaccccatcgaccccgaggacgcccccgagagcatcaccagagccgtggccagcctgccccccgagcagatgttcgagctgatgaagcagatgaagctgtgcgtgcagaacagccaccaggaggccagaaacatgctgctgcagaacccccagctggcctacgccctgctgcaggcccaggtggtgatgagaatcatggaccccgagatcgccctgaagatcctgcacagaaagatccacgtgacccccctgatccccggcaagagccagagcgtgagcgtgagcggccccggccccggccccggccccggcctgtgccccggccccaacgtgctgctgaaccagcagaacccccccgccccccagccccagcacctggccagaagacccgtgaaggacatcccccccctgatgcagacccccatccagggcggcatccccgcccccggccccatccccgccgccgtgcccggcgccggccccggcagcctgacccccggcggcgccatgcagccccagctgggcatgcccggcgtgggccccgtgcccctggagagaggccaggtgcagatgagcgaccccagagcccccatccccagaggccccgtgacccccggcggcctgccccccagaggcctgctgggcgacgcccccaacgaccccagaggcggcaccctgctgagcgtgaccggcgaggtggagcccagaggctacctgggccccccccaccagggcccccccatgcaccacgccagcggccacgacaccagaggccccagcagccacgagatgagaggcggccccctgggcgaccccagactgctgatcggcgagcccagaggccccatgatcgaccagagaggcctgcccatggacggcagaggcggcagagacagcagagccatggagaccagagccatggagaccgaggtgctggagaccagagtgatggagagaagaggcatggagacctgcgccatggagaccagaggcatggaggccagaggcatggacgccagaggcctggagatgagaggccccgtgcccagcagcagaggccccatgaccggcggcatccagggccccggccccatcaacatcggcgccggcggccccccccagggccccagacaggtgcccggcatcagcggcgtgggcaaccccggcgccggcatgcagggcaccggcatccagggcaccggcatgcagggcgccggcatccagggcggcggcatgcagggcgccggcatccagggcgtgagcatccagggcggcggcatccagggcggcggcatccagggcgccagcaagcagggcggcagccagcccagcagcttcagccccggccagagccaggtgaccccccaggaccaggagaaggccgccctgatcatgcaggtgctgcagctgaccgccgaccagatcgccatgctgccccccgagcagagacagagcatcctgatcctgaaggagcagatccagaagagcaccggcgccagctag

SEQ ID NO: 77072 - DNA, 2541 bp, synthetic construct
  misc_feature 1..2541: note = Description of Artificial Sequence: Synthetic coding sequence
  source 1..2541: mol_type = other DNA
atgctgttcaccgtgagctgcagcaagatgagcagcatcgtggacagagacgacagcagcatcttcgacggcctggtggaggaggacgacaaggacaaggccaagagagtgagcagaaacaagagcgagaagaagagaagagaccagttcaacgtgctgatcaaggagctgggcagcatgctgcccggcaacgccagaaagatggacaagagcaccgtgctgcagaagagcatcgacttcctgagaaagcacaaggagatcaccgcccagagcgacgccagcgagatcagacaggactggaagcccaccttcctgagcaacgaggagttcacccagctgatgctggaggccctggacggcttcttcctggccatcatgaccgacggcagcatcatctacgtgagcgagagcgtgaccagcctgctggagcacctgcccagcgacctggtggaccagagcatcttcaacttcatccccgagggcgagcacagcgaggtgtacaagatcctgagcacccacctgctggagagcgacagcctgacccccgagtacctgaagagcaagaaccagctggagttctgctgccacatgctgagaggcaccatcgaccccaaggagcccagcacctacgagtacgtgaagttcatcggcaacttcaagagcctgaacagcgtgagcagcagcgcccacaacggcttcgagggcaccatccagagaacccacagacccagctacgaggacagagtgtgcttcgtggccaccgtgagactggccaccccccagttcatcaaggagatgtgcaccgtggaggagcccaacgaggagttcaccagcagacacagcctggagtggaagttcctgttcctggaccacagagccccccccatcatcggctacctgcccttcgaggtgctgggcaccagcggctacgactactaccacgtggacgacctggagaacctggccaagtgccacgagcacctgatgcagtacggcaagggcaagagctgctactacagattcctgaccaagggccagcagtggatctggctgcagacccactactacatcacctaccaccagtggaacagcagacccgagttcatcgtgtgcacccacaccgtggtgagctacgccgaggtgagagccgagagaagaagagagctgggcatcgaggagagcctgcccgagaccgccgccgacaagagccaggacagcggcagcgacaacagaatcaacaccgtgagcctgaaggaggccctggagagattcgaccacagccccacccccagcgccagcagcagaagcagcagaaagagcagccacaccgccgtgagcgaccccagcagcacccccaccaagatccccaccgacaccagcaccccccccagacagcacctgcccgcccacgagaagatggtgcagagaagaagcagcttcagcagccagagcatcaacagccagagcgtgggcagcagcctgacccagcccgtgatgagccaggccaccaacctgcccatcccccagggcatgagccagttccagttcagcgcccagctgggcgccatgcagcacctgaaggaccagctggagcagagaaccagaatgatcgaggccaacatccacagacagcaggaggagctgagaaagatccaggagcagctgcagatggtgcacggccagggcctgcagatgttcctgcagcagagcaaccccggcctgaacttcggcagcgtgcagctgagcagcggcaacagcagcaacatccagcagctggcccccatcaacatgcagggccaggtggtgcccaccaaccagatccagagcggcatgaacaccggccacatcggcaccacccagcacatgatccagcagcagaccctgcagagcaccagcacccagagccagcagaacgtgctgagcggccacagccagcagaccagcctgcccagccagacccagagcaccctgaccgcccccctgtacaacaccatggtgatcagccagcccgccgccggcagcatggtgcagatccccagcagcatgccccagaacagcacccagagcgccgccgtgaccaccttcacccaggacagacagatcagattcagccagggccagcagctggtgaccaagctggtgaccgcccccgtggcctgcggcgccgtgatggtgcccagcaccatgctgatgggccaggtggtgaccgcctaccccaccttcgccacccagcagcagcagagccagaccctgagcgtgacccagcagcagcagcagcagagcagccaggagcagcagctgaccagcgtgcagcagcccagccaggcccagctgacccagcccccccagcagttcctgcagaccagcagactgctgcacggcaaccccagcacccagctgatcctgagcgccgccttccccctgcagcagagcaccttcccccagagccaccaccagcagcaccagagccagcagcagcagcagctgagcagacacagaaccgacagcctgcccgaccccagcaaggtgcagccccagtag

SEQ ID NO: 77073 - DNA, 1278 bp, synthetic construct
  misc_feature 1..1278: note = Description of Artificial Sequence: Synthetic coding sequence
  source 1..1278: mol_type = other DNA
atgggcgaggaggccaacgacgacaagaagcccaccaccaagttcgagctggagagagagaccgagctgagattcgaggtggaggccagccagagcgtgcagctggagctgctgaccggcatggccgagatcttcggcaccgagctgaccagaaacaagaagttcaccttcgacgccggcgccaaggtggccgtgttcacctggcacggctgcagcgtgcagctgagcggcagaaccgaggtggcctacgtgagcaaggacacccccatgctgctgtacctgaacacccacaccgccctggagcagatgagaagacaggccgagaaggaggaggagagaggccccagagtgatggtggtgggccccaccgacgtgggcaagagcaccgtgtgcagactgctgctgaactacgccgtgagactgggcagaagacccacctacgtggagctggacgtgggccagggcagcgtgagcatccccggcaccatgggcgccctgtacatcgagagacccgccgacgtggaggagggcttcagcatccaggcccccctggtgtaccacttcggcagcaccacccccggcaccaacatcaagctgtacaacaagatcaccagcagactggccgacgtgttcaaccagagatgcgaggtgaacagaagagccagcgtgagcggctgcgtgatcaacacctgcggctgggtgaagggcagcggctaccaggccctggtgcacgccgccagcgccttcgaggtggacgtggtggtggtgctggaccaggagagactgtacaacgagctgaagagagacctgccccacttcgtgagaaccgtgctgctgcccaagagcggcggcgtggtggagagaagcaaggacttcagaagagagtgcagagacgagagaatcagagagtacttctacggcttcagaggctgcttctacccccacgccttcaacgtgaagttcagcgacgtgaagatctacaaggtgggcgcccccaccatccccgacagctgcctgcccctgggcatgagccaggaggacaaccagctgaagctggtgcccgtgacccccggcagagacatggtgcaccacctgctgagcgtgagcaccgccgagggcaccgaggagaacctgagcgagaccagcgtggccggcttcatcgtggtgaccagcgtggacctggagcaccaggtgttcaccgtgctgagccccgcccccagacccctgcccaagaacttcctgctgatcatggacatcagattcatggacctgaagtag

SEQ ID NO: 77074 - DNA, 1311 bp, synthetic construct
  misc_feature 1..1311: note = Description of Artificial Sequence: Synthetic coding sequence
  source 1..1311: mol_type = other DNA
atgaccgacctgcacagcagctacaccgaggagatgggcgaggaggccaacgacgacaagaagcccaccaccaagttcgagctggagagagagaccgagctgagattcgaggtggaggccagccagagcgtgcagctggagctgctgaccggcatggccgagatcttcggcaccgagctgaccagaaacaagaagttcaccttcgacgccggcgccaaggtggccgtgttcacctggcacggctgcagcgtgcagctgagcggcagaaccgaggtggcctacgtgagcaaggacacccccatgctgctgtacctgaacacccacaccgccctggagcagatgagaagacaggccgagaaggaggaggagagaggccccagagtgatggtggtgggccccaccgacgtgggcaagagcaccgtgtgcagactgctgctgaactacgccgtgagactgggcagaagacccacctacgtggagctggacgtgggccagggcagcgtgagcatccccggcaccatgggcgccctgtacatcgagagacccgccgacgtggaggagggcttcagcatccaggcccccctggtgtaccacttcggcagcaccacccccggcaccaacatcaagctgtacaacaagatcaccagcagactggccgacgtgttcaaccagagatgcgaggtgaacagaagagccagcgtgagcggctgcgtgatcaacacctgcggctgggtgaagggcagcggctaccaggccctggtgcacgccgccagcgccttcgaggtggacgtggtggtggtgctggaccaggagagactgtacaacgagctgaagagagacctgccccacttcgtgagaaccgtgctgctgcccaagagcggcggcgtggtggagagaagcaaggacttcagaagagagtgcagagacgagagaatcagagagtacttctacggcttcagaggctgcttctacccccacgccttcaacgtgaagttcagcgacgtgaagatctacaaggtgggcgcccccaccatccccgacagctgcctgcccctgggcatgagccaggaggacaaccagctgaagctggtgcccgtgacccccggcagagacatggtgcaccacctgctgagcgtgagcaccgccgagggcaccgaggagaacctgagcgagaccagcgtggccggcttcatcgtggtgaccagcgtggacctggagcaccaggtgttcaccgtgctgagccccgcccccagacccctgcccaagaacttcctgctgatcatggacatcagattcatggacctgaagtag

SEQ ID NO: 77075 - DNA, 279 bp, synthetic construct
  misc_feature 1..279: note = Description of Artificial Sequence: Synthetic coding sequence
  source 1..279: mol_type = other DNA
atgggcgaggaggccaacgacgacaagaagcccaccaccaagttcgagctggagagagagaccgagctgagattcgaggtggaggccagccagagcgtgcagctggagctgctgaccggcatggccgagatcttcggcaccgagctgaccagaaacaagaagttcaccttcgacgccggcgccaaggtggccgtgttcacctggcacggctgcagcgtgcagctgagcggcagaaccgaggtggcctacgtgagcaaggacacccccatgctgctgtag

SEQ ID NO: 77076 - DNA, 1278 bp, synthetic construct; identical to SEQ ID NO: 77073
  misc_feature 1..1278: note = Description of Artificial Sequence: Synthetic coding sequence
  source 1..1278: mol_type = other DNA

SEQ ID NO: 77077 - DNA, 399 bp, synthetic construct
  misc_feature 1..399: note = Description of Artificial Sequence: Synthetic coding sequence
  source 1..399: mol_type = other DNA
atgggcgaggaggccaacgacgacaagaagcccaccaccaagttcgagctggagagagagaccgagctgagattcgaggtggaggccagccagagcgtgcagctggagctgctgaccggcatggccgagatcttcggcaccgagctgaccagaaacaagaagttcaccttcgacgccggcgccaaggtggccgtgttcacctggcacggctgcagcgtgcagctgagcggcagaaccgaggtggcctacgtgagcaaggacacccccatgctgctgtacctgaacacccacaccgccctggagcagatgagaagacaggccgagaaggaggaggagagaggccccagagtgatggtggtgggccccaccgacgtgggcaagagcaccgtgtgcagatag

SEQ ID NO: 77078 - DNA, 834 bp, synthetic construct
  misc_feature 1..834: note = Description of Artificial Sequence: Synthetic coding sequence
  source 1..834: mol_type = other DNA
atgtggcccggcatcctggtgggcggcgccagagtggccagctgcagataccccgccctgggccccagactggccgcccacttccccgcccagagacccccccagagaaccctgcagaacggcctggccctgcagagatgcctgcacgccaccgccaccagagccctgcccctgatccccatcgtggtggagcagaccggcagaggcgagagagcctacgacatctacagcagactgctgagagagagaatcgtgtgcgtgatgggccccatcgacgacagcgtggccagcctggtgatcgcccagctgctgttcctgcagagcgagagcaacaagaagcccatccacatgtacatcaacagccccggcggcgtggtgaccgccggcctggccatctacgacaccatgcagtacatcctgaaccccatctgcacctggtgcgtgggccaggccgccagcatgggcagcctgctgctggccgccggcacccccggcatgagacacagcctgcccaacagcagaatcatgatccaccagcccagcggcggcgccagaggccaggccaccgacatcgccatccaggccgaggagatcatgaagctgaagaagcagctgtacaacatctacgccaagcacaccaagcagagcctgcaggtgatcgagagcgccatggagagagacagatacatgagccccatggaggcccaggagttcggcatcctggacaaggtgctggtgcaccccccccaggacggcgaggacgagcccaccctggtgcagaaggagcccgtggaggccgcccccgccgccgagcccgtgcccgccagcacctag

SEQ ID NO: 77079 - DNA, 1617 bp, synthetic construct
  misc_feature 1..1617: note = Description of Artificial Sequence: Synthetic coding sequence
  source 1..1617: mol_type = other DNA
atgtggagcggcagaagcagcttcaccagcctggtggtgggcgtgttcgtggtgtacgtggtgcacacctgctgggtgatgtacggcatcgtgtacaccagaccctgcagcggcgacgccaactgcatccagccctacctggccagaagacccaagctgcagctgagcgtgtacaccaccaccagaagccacctgggcgccgagaacaacatcgacctggtgctgaacgtggaggacttcgacgtggagagcaagttcgagagaaccgtgaacgtgagcgtgcccaagaagaccagaaacaacggcaccctgtacgcctacatcttcctgcaccacgccggcgtgctgccctggcacgacggcaagcaggtgcacctggtgagccccctgaccacctacatggtgcccaagcccgaggagatcaacctgctgaccggcgagagcgacacccagcagatcgaggccgagaagaagcccaccagcgccctggacgagcccgtgagccactggagacccagactggccctgaacgtgatggccgacaacttcgtgttcgacggcagcagcctgcccgccgacgtgcacagatacatgaagatgatccagctgggcaagaccgtgcactacctgcccatcctgttcatcgaccagctgagcaacagagtgaaggacctgatggtgatcaacagaagcaccaccgagctgcccctgaccgtgagctacgacaaggtgagcctgggcagactgagattctggatccacatgcaggacgccgtgtacagcctgcagcagttcggcttcagcgagaaggacgccgacgaggtgaagggcatcttcgtggacaccaacctgtacttcctggccctgaccttcttcgtggccgccttccacctgctgttcgacttcctggccttcaagaacgacatcagcttctggaagaagaagaagagcatgatcggcatgagcaccaaggccgtgctgtggagatgcttcagcaccgtggtgatcttcctgttcctgctggacgagcagaccagcctgctggtgctggtgcccgccggcgtgggcgccgccatcgagctgtggaaggtgaagaaggccctgaagatgaccatcttctggagaggcctgatgcccgagttccagttcggcacctacagcgagagcgagagaaagaccgaggagtacgacacccaggccatgaagtacctgagctacctgctgtaccccctgtgcgtgggcggcgccgtgtacagcctgctgaacatcaagtacaagagctggtacagctggctgatcaacagcttcgtgaacggcgtgtacgccttcggcttcctgttcatgctgccccagctgttcgtgaactacaagctgaagagcgtggcccacctgccctggaaggccttcacctacaaggccttcaacaccttcatcgacgacgtgttcgccttcatcatcaccatgcccaccagccacagactggcctgcttcagagacgacgtggtgttcctggtgtacctgtaccagagatggctgtaccccgtggacaagagaagagtgaacgagttcggcgagagctacgaggagaaggccaccagagccccccacaccgactag

SEQ ID NO: 77080 - DNA, 1509 bp, synthetic construct
  misc_feature 1..1509: note = Description of Artificial Sequence: Synthetic coding sequence
  source 1..1509: mol_type = other DNA
atgtggagcggcagaagcagcttcaccagcctggtggtgggcgtgttcgtggtgtacgtggtgcacacctgctgggtgatgtacggcatcgtgtacaccagaccctgcagcggcgacgccaactgcatccagccctacctggccagaagacccaagctgcagctgagcgtgtacaccaccaccagaagccacctgggcgccgagaacaacatcgacctggtgctgaacgtggaggacttcgacgtggagagcaagttcgagagaaccgtgaacgtgagcgtgcccaagaagaccagaaacaacggcaccctgtacgcctacatcttcctgcaccacgccggcgtgctgccctggcacgacggcaagcaggtgcacctggtgagccccctgaccacctacatggtgcccaagcccgaggagatcaacctgctgaccggcgagagcgacacccagcagatcgaggccgagaagaagcccaccagcgccctggacgagcccgtgagccactggagacccagactggccctgaacgtgatggccgacaacttcgtgttcgacggcagcagcctgcccgccgacgtgcacagatacatgaagatgatccagctgggcaagaccgtgcactacctgcccatcctgttcatcgaccagctgagcaacagagtgaaggacctgatggtgatcaacagaagcaccaccgagctgcccctgaccgtgagctacgacaaggtgagcctgggcagactgagattctggatccacatgcaggacgccgtgtacagcctgcagcagttcggcttcagcgagaaggacgccgacgaggtgaagggcatcttcgtggacaccaacctgtacttcctggccctgaccttcttcgtggccgccttccacctgctgttcgacttcctggccttcaagaacgacatcagcttctggaagaagaagaagagcatgatcggcatgagcaccaagctgtggaaggtgaagaaggccctgaagatgaccatcttctggagaggcctgatgcccgagttccagttcggcacctacagcgagagcgagagaaagaccgaggagtacgacacccaggccatgaagtacctgagctacctgctgtaccccctgtgcgtgggcggcgccgtgtacagcctgctgaacatcaagtacaagagctggtacagctggctgatcaacagcttcgtgaacggcgtgtacgccttcggcttcctgttcatgctgccccagctgttcgtgaactacaagctgaagagcgtggcccacctgccctggaaggccttcacctacaaggccttcaacaccttcatcgacgacgtgttcgccttcatcatcaccatgcccaccagccacagactggcctgcttcagagacgacgtggtgttcctggtgtacctgtaccagagatggctgtaccccgtggacaagagaagagtgaacgagttcggcgagagctacgaggagaaggccaccagagccccccacaccgactag

SEQ ID NO: 77081 - DNA, 1350 bp, synthetic construct
  misc_feature 1..1350: note = Description of Artificial Sequence: Synthetic coding sequence
  source 1..1350: mol_type = other DNA
atgatgaagaccctgctgctgttcgtgggcctgctgctgacctgggagagcggccaggtgctgggcgaccagaccgtgagcgacaacgagctgcaggagatgagcaaccagggcagcaagtacgtgaacaaggagatccagaacgccgtgaacggcgtgaagcagatcaagaccctgatcgagaagaccaacgaggagagaaagaccctgctgagcaacctggaggaggccaagaagaagaaggaggacgccctgaacgagaccagagagagcgagaccaagctgaaggagctgcccggcgtgtgcaacgagaccatgatggccctgtgggaggagtgcaagccctgcctgaagcagacctgcatgaagttctacgccagagtgtgcagaagcggcagcggcctggtgggcagacagctggaggagttcctgaaccagagcagccccttctacttctggatgaacggcgacagaatcgacagcctgctggagaacgacagacagcagacccacatgctggacgtgatgcaggaccacttcagcagagccagcagcatcatcgacgagctgttccaggacagattcttcaccagagagccccaggacacctaccactacctgcccttcagcctgccccacagaagaccccacttcttcttccccaagagcagaatcgtgagaagcctgatgcccttcagcccctacgagcccctgaacttccacgccatgttccagcccttcctggagatgatccacgaggcccagcaggccatggacatccacttccacagccccgccttccagcacccccccaccgagttcatcagagagggcgacgacgacagaaccgtgtgcagagagatcagacacaacagcaccggctgcctgagaatgaaggaccagtgcgacaagtgcagagagatcctgagcgtggactgcagcaccaacaaccccagccaggccaagctgagaagagagctggacgagagcctgcaggtggccgagagactgaccagaaagtacaacgagctgctgaagagctaccagtggaagatgctgaacaccagcagcctgctggagcagctgaacgagcagttcaactgggtgagcagactggccaacctgacccagggcgaggaccagtactacctgagagtgaccaccgtggccagccacaccagcgacagcgacgtgcccagcggcgtgaccgaggtggtggtgaagctgttcgacagcgaccccatcaccgtgaccgtgcccgtggaggtgagcagaaagaaccccaagttcatggagaccgtggccgagaaggccctgcaggagtacagaaagaagcacagagaggagtag

SEQ ID NO: 77082 - DNA, 825 bp, synthetic construct
  misc_feature 1..825: note = Description of Artificial Sequence: Synthetic coding sequence
  source 1..825: mol_type = other DNA
atgcaggaccacttcagcagagccagcagcatcatcgacgagctgttccaggacagattcttcaccagagagccccaggacacctaccactacctgcccttcagcctgccccacagaagaccccacttcttcttccccaagagcagaatcgtgagaagcctgatgcccttcagcccctacgagcccctgaacttccacgccatgttccagcccttcctggagatgatccacgaggcccagcaggccatggacatccacttccacagccccgccttccagcacccccccaccgagttcatcagagagggcgacgacgacagaaccgtgtgcagagagatcagacacaacagcaccggctgcctgagaatgaaggaccagtgcgacaagtgcagagagatcctgagcgtggactgcagcaccaacaaccccagccaggccaagctgagaagagagctggacgagagcctgcaggtggccgagagactgaccagaaagtacaacgagctgctgaagagctaccagtggaagatgctgaacaccagcagcctgctggagcagctgaacgagcagttcaactgggtgagcagactggccaacctgacccagggcgaggaccagtactacctgagagtgaccaccgtggccagccacaccagcgacagcgacgtgcccagcggcgtgaccgaggtggtggtgaagctgttcgacagcgaccccatcaccgtgaccgtgcccgtggaggtgagcagaaagaaccccaagttcatggagaccgtggccgagaaggccctgcaggagtacagaaagaagcacagagaggagtag

SEQ ID NO: 77083 - DNA, 1350 bp, synthetic construct; identical to SEQ ID NO: 77081
  misc_feature 1..1350: note = Description of Artificial Sequence: Synthetic coding sequence
  source 1..1350: mol_type = other DNA

SEQ ID NO: 77084 - DNA, 615 bp, synthetic construct
  misc_feature 1..615: note = Description of Artificial Sequence: Synthetic coding sequence
  source 1..615: mol_type = other DNA
atgatgaagaccctgctgctgttcgtgggcctgctgctgacctgggagagcggccaggtgctgggcgaccagaccgtgagcgacaacgagctgcaggagatgagcaaccagggcagcaagtacgtgaacaaggagatccagaacgccgtgaacggcgtgaagcagatcaagaccctgatcgagaagaccaacgaggagagaaagaccctgctgagcaacctggaggaggccaagaagaagaaggaggacgccctgaacgagaccagagagagcgagaccaagctgaaggagctgcccggcgtgtgcaacgagaccatgatggccctgtgggaggagtgcaagccctgcctgaagcagacctgcatgaagttctacgccagagtgtgcagaagcggcagcggcctggtgggcagacagctggaggagttcctgaaccagagcagccccttctacttctggatgaacggcgacagaatcgacagcctgctggagaacgacagacagcagacccacatgctggacgtgatgcaggaccacttcagcagagccagcagcatcatcgacgagctgttccaggacagattcttcaccagagagccccaggacacctactag

SEQ ID NO: 77085 - DNA, 1350 bp, synthetic construct; identical to SEQ ID NO: 77081
  misc_feature 1..1350: note = Description of Artificial Sequence: Synthetic coding sequence
  source 1..1350: mol_type = other DNA

SEQ ID NO: 77086 - DNA, 816 bp, synthetic construct
  misc_feature 1..816: note = Description of Artificial Sequence: Synthetic coding sequence
  source 1..816: mol_type = other DNA
atgatgaagaccctgctgctgttcgtgggcctgctgctgacctgggagagcggccaggtgctgggcgaccagaccgtgagcgacaacgagctgcaggagatgagcaaccagggcagcaagtacgtgaacaaggagatccagaacgccgtgaacggcgtgaagcagatcaagaccctgatcgagaagaccaacgaggagagaaagaccctgctgagcaacctggaggaggccaagaagaagaaggaggacgccctgaacgagaccagagagagcgagaccaagctgaaggagctgcccggcgtgtgcaacgagaccatgatggccctgtgggaggagtgcaagccctgcctgaagcagacctgcatgaagttctacgccagagtgtgcagaagcggcagcggcctggtgggcagacagctggaggagttcctgaaccagagcagccccttctacttctggatgaacggcgacagaatcgacagcctgctggagaacgacagacagcagacccacatgctggacgtgatgcaggaccacttcagcagagccagcagcatcatcgacgagctgttccaggacagcctgatgcccttcagcccctacgagcccctgaacttccacgccatgttccagcccttcctggagatgatccacgaggcccagcaggccatggacatccacttccacagccccgccttccagcacccccccaccgagttcatcagagagggcgacgacgacagaaccgtgtgcagagagatcagacacaacagcaccggctgcctgagaatgaaggaccagtgcgacaagtgctag

SEQ ID NO: 77087 - DNA, 1383 bp, synthetic construct
  misc_feature 1..1383: note = Description of Artificial Sequence: Synthetic coding sequence
  source 1..1383: mol_type = other DNA
atggaggcctgcaaggacagcagaatcggcggcatgatgaagaccctgctgctgttcgtgggcctgctgctgacctgggagagcggccaggtgctgggcgaccagaccgtgagcgacaacgagctgcaggagatgagcaaccagggcagcaagtacgtgaacaaggagatccagaacgccgtgaacggcgtgaagcagatcaagaccctgatcgagaagaccaacgaggagagaaagaccctgctgagcaacctggaggaggccaagaagaagaaggaggacgccctgaacgagaccagagagagcgagaccaagctgaaggagctgcccggcgtgtgcaacgagaccatgatggccctgtgggaggagtgcaagccctgcctgaagcagacctgcatgaagttctacgccagagtgtgcagaagcggcagcggcctggtgggcagacagctggaggagttcctgaaccagagcagccccttctacttctggatgaacggcgacagaatcgacagcctgctggagaacgacagacagcagacccacatgctggacgtgatgcaggaccacttcagcagagccagcagcatcatcgacgagctgttccaggacagattcttcaccagagagccccaggacacctaccactacctgcccttcagcctgccccacagaagaccccacttcttcttccccaagagcagaatcgtgagaagcctgatgcccttcagcccctacgagcccctgaacttccacgccatgttccagcccttcctggagatgatccacgaggcccagcaggccatggacatccacttccacagccccgccttccagcacccccccaccgagttcatcagagagggcgacgacgacagaaccgtgtgcagagagatcagacacaacagcaccggctgcctgagaatgaaggaccagtgcgacaagtgcagagagatcctgagcgtggactgcagcaccaacaaccccagccaggccaagctgagaagagagctggacgagagcctgcaggtggccgagagactgaccagaaagtacaacgagctgctgaagagctaccagtggaagatgctgaacaccagcagcctgctggagcagctgaacgagcagttcaactgggtgagcagactggccaacctgacccagggcgaggaccagtactacctgagagtgaccaccgtggccagccacaccagcgacagcgacgtgcccagcggcgtgaccgaggtggtggtgaagctgttcgacagcgaccccatcaccgtgaccgtgcccgtggaggtgagcagaaagaaccccaagttcatggagaccgtggccgagaaggccctgcaggagtacagaaagaagcacagagaggagtag

SEQ ID NO: 77088 - DNA, 1506 bp, synthetic construct
  misc_feature 1..1506: note = Description of Artificial Sequence: Synthetic coding sequence
  source 1..1506: mol_type = other DNA
atgcaggtgtgcagccagccccagagaggctgcgtgagagagcagagcgccatcaacaccgccccccccagcgcccacaacgccgccagccccggcggcgccagaggccacagagtgcccctgaccgaggcctgcaaggacagcagaatcggcggcatgatgaagaccctgctgctgttcgtgggcctgctgctgacctgggagagcggccaggtgctgggcgaccagaccgtgagcgacaacgagctgcaggagatgagcaaccagggcagcaagtacgtgaacaaggagatccagaacgccgtgaacggcgtgaagcagatcaagaccctgatcgagaagaccaacgaggagagaaagaccctgctgagcaacctggaggaggccaagaagaagaaggaggacgccctgaacgagaccagagagagcgagaccaagctgaaggagctgcccggcgtgtgcaacgagaccatgatggccctgtgggaggagtgcaagccctgcctgaagcagacctgcatgaagttctacgccagagtgtgcagaagcggcagcggcctggtgggcagacagctggaggagttcctgaaccagagcagccccttctacttctggatgaacggcgacagaatcgacagcctgctggagaacgacagacagcagacccacatgctggacgtgatgcaggaccacttcagcagagccagcagcatcatcgacgagctgttccaggacagattcttcaccagagagccccaggacacctaccactacctgcccttcagcctgccccacagaagaccccacttcttcttccccaagagcagaatcgtgagaagcctgatgcccttcagcccctacgagcccctgaacttccacgccatgttccagcccttcctggagatgatccacgaggcccagcaggccatggacatccacttccacagccccgccttccagcacccccccaccgagttcatcagagagggcgacgacgacagaaccgtgtgcagagagatcagacacaacagcaccggctgcctgagaatgaaggaccagtgcgacaagtgcagagagatcctgagcgtggactgcagcaccaacaaccccagccaggccaagctgagaagagagctggacgagagcctgcaggtggccgagagactgaccagaaagtacaacgagctgctgaagagctaccagtggaagatgctgaacaccagcagcctgctggagcagctgaacgagcagttcaactgggtgagcagactggccaacctgacccagggcgaggaccagtactacctgagagtgaccaccgtggccagccacaccagcgacagcgacgtgcccagcggcgtgaccgaggtggtggtgaagctgttcgacagcgaccccatcaccgtgaccgtgcccgtggaggtgagcagaaagaaccccaagttcatggagaccgtggccgagaaggccctgcaggagtacagaaagaagcacagagaggagtag

SEQ ID NO: 77089 - DNA, 894 bp, synthetic construct
  misc_feature 1..894: note = Description of Artificial Sequence: Synthetic coding sequence
  source 1..894: mol_type = other DNA
atggaggcctgcaaggacagcagaatcggcggcatgatgaagaccctgctgctgttcgtgggcctgctgctgacctgggagagcggccaggtgctgggcgaccagaccgtgagcgacaacgagctgcaggagatgagcaaccagggcagcaagtacgtgaacaaggagatccagaacgccgtgaacggcgtgaagcagatcaagaccctgatcgagaagaccaacgaggagagaaagaccctgctgagcaacctggaggaggccaagaagaagaaggaggacgccctgaacgagaccagagagagcgagaccaagctgaaggagctgcccggcgtgtgcaacgagaccatgatggccctgtgggaggagtgcaagccctgcctgaagcagacctgcatgaagttctacgccagagtgtgcagaagcggcagcggcctggtgggcagacagctggaggagttcctgaaccagagcagccccttctacttctggatgaacggcgacagaatcgacagcctgctggagaacgacagacagcagacccacatgctggacgtgatgcaggaccacttcagcagagccagcagcatcatcgacgagctgttccaggacagattcttcaccagagagccccaggacacctaccactacctgcccttcagcctgccccacagaagaccccacttcttcttccccaagagcagaatcgtgagaagcctgatgcccttcagcccctacgagcccctgaacttccacgccatgttccagcccttcctggagatgatccacgaggcccagcaggccatggacatccacttccacagccccgccttccagcacccccccaccgagttcatcagagagggcgacgacgacagaaccgtgtgcagatag

SEQ ID NO: 77090 - DNA, 2040 bp, synthetic construct
  misc_feature 1..2040: note = Description of Artificial Sequence: Synthetic coding sequence
  source 1..2040: mol_type = other DNA
ctgggccagttcgagcagcccaccggctacatggagaacagcgtgagctacagcgccatcgaggacgtgcagctgctgagctgggagaacgcccccaagtactgcctgcagctgaccatccccggcggcaccgtgctgctgcaggccgccaacagctacctgagagaccagtggttccacagcctgcagtggaagaagaagatctacaagtacaagaaggtgctgagcaaccccagcagatgggaggtggtgctgaaggagatcagaaccctggtggacatggccctgaccagccccctgcaggacgacagcatcaaccaggcccccctggagatcgtgagcaagctgctgagcgagaacaccaacctgaccacccaggagcacgagaacatcatcgtggccatcgcccccctgctggagaacaaccaccccccccccgacctgtgcgagttcttctgcaagcactgcagagagagacccagaagcatggtggtgatcgaggtgttcacccccgtggtgcagagaatcctgaagcacaacatggacttcggcaagtgccccagactgagactgttcacccaggagtacatcctggccctgaacgagctgaacgccggcatggaggtggtgaagaagttcatccagagcatgcacggccccaccggccactgcccccaccccagagtgctgcccaacctggtggccgtgtgcctggccgccatctacagctgctacgaggagttcatcaacagcagagacaacagccccagcctgaaggagatcagaaacggctgccagcagccctgcgacagaaagcccaccctgcccctgagactgctgcaccccagccccgacctggtgagccaggaggccaccctgagcgaggccagactgaagagcgtggtggtggccagcagcgagatccacgtggaggtggagagaaccagcaccgccaagcccgccctgaccgccagcgccggcaacgacagcgagcccaacctgatcgactgcctgatggtgagccccgcctgcagcaccatgagcatcgagctgggcccccaggccgacagaaccctgggctgctacgtggagatcctgaagctgctgagcgactacgacgactggagacccagcctggccagcctgctgcagcccatccccttccccaaggaggccctggcccacgagaagttcaccaaggagctgaagtacgtgatccagagattcgccgaggaccccagacaggaggtgcacagctgcctgctgagcgtgagagccggcaaggacggctggttccagctgtacagccccggcggcgtggcctgcgacgacgacggcgagctgttcgccagcatggtgcacatcctgatgggcagctgctacaagaccaagaagttcctgctgagcctggccgagaacaagctgggcccctgcatgctgctggccctgagaggcaaccagaccatggtggagatcctgtgcctgatgctggagtacaacatcatcgacaacaacgacacccagctgcagatcatcagcaccctggagagcaccgacgtgggcaagagaatgtacgagcagctgtgcgacagacagagagagctgaaggagctgcagagaaagggcggccccaccagactgaccctgcccagcaagagcaccgacgccgacctggccagactgctgagcagcggcagcttcggcaacctggagaacctgagcctggccttcaccaacgtgaccagcgcctgcgccgagcacctgatcaagctgcccagcctgaagcagctgaacctgtggagcacccagttcggcgacgccggcctgagactgctgagcgagcacctgaccatgctgcaggtgctgaacctgtgcgagacccccgtgaccgacgccggcctgctggccctgagcagcatgaagagcctgtgcagcctgaacatgaacagcaccaagctgagcgccgacacctacgaggacctgaaggccaagctgcccaacctgaaggaggtggacgtgagatacaccgaggcctggtag

SEQ ID NO: 77091 - DNA, 2322 bp, synthetic construct
  misc_feature 1..2322: note = Description of Artificial Sequence: Synthetic coding sequence
  source 1..2322: mol_type = other DNA
atggacgtgaccagcagcagcggcggcggcggcgaccccagacagatcgaggagaccaagcccctgctgggcggcgacgtgagcgcccccgagggcaccaagatgggcgccgtgccctgcagaagagccctgctgctgtgcaacggcatgagatacaagctgctgcaggagggcgacatccaggtgtgcgtgatcagacaccccagaaccttcctgagcaagatcctgaccagcaagttcctgagaagatgggagccccaccacctgaccctggccgacaacagcctggccagcgccacccccaccggctacatggagaacagcgtgagctacagcgccatcgaggacgtgcagctgctgagctgggagaacgcccccaagtactgcctgcagctgaccatccccggcggcaccgtgctgctgcaggccgccaacagctacctgagagaccagtggttccacagcctgcagtggaagaagaagatctacaagtacaagaaggtgctgagcaaccccagcagatgggaggtggtgctgaaggagatcagaaccctggtggacatggccctgaccagccccctgcaggacgacagcatcaaccaggcccccctggagatcgtgagcaagctgctgagcgagaacaccaacctgaccacccaggagcacgagaacatcatcgtggccatcgcccccctgctggagaacaaccaccccccccccgacctgtgcgagttcttctgcaagcactgcagagagagacccagaagcatggtggtgatcgaggtgttcacccccgtggtgcagagaatcctgaagcacaacatggacttcggcaagtgccccagactgagactgttcacccaggagtacatcctggccctgaacgagctgaacgccggcatggaggtggtgaagaagttcatccagagcatgcacggccccaccggccactgcccccaccccagagtgctgcccaacctggtggccgtgtgcctggccgccatctacagctgctacgaggagttcatcaacagcagagacaacagccccagcctgaaggagatcagaaacggctgccagcagccctgcgacagaaagcccaccctgcccctgagactgctgcaccccagccccgacctggtgagccaggaggccaccctgagcgaggccagactgaagagcgtggtggtggccagcagcgagatccacgtggaggtggagagaaccagcaccgccaagcccgccctgaccgccagcgccggcaacgacagcgagcccaacctgatcgactgcctgatggtgagccccgcctgcagcaccatgagcatcgagctgggcccccaggccgacagaaccctgggctgctacgtggagatcctgaagctgctgagcgactacgacgactggagacccagcctggccagcctgctgcagcccatccccttccccaaggaggccctggcccacgagaagttcaccaaggagctgaagtacgtgatccagagattcgccgaggaccccagacaggaggtgcacagctgcctgctgagcgtgagagccggcaaggacggctggttccagctgtacagccccggcggcgtggcctgcgacgacgacggcgagctgttcgccagcatggtgcacatcctgatgggcagctgctacaagaccaagaagttcctgctgagcctggccgagaacaagctgggcccctgcatgctgctggccctgagaggcaaccagaccatggtggagatcctgtgcctgatgctggagtacaacatcatcgacaacaacgacacccagctgcagatcatcagcaccctggagagcaccgacgtgggcaagagaatgtacgagcagctgtgcgacagacagagagagctgaaggagctgcagagaaagggcggccccaccagactgaccctgcccagcaagagcaccgacgccgacctggccagactgctgagcagcggcagcttcggcaacctggagaacctgagcctggccttcaccaacgtgaccagcgcctgcgccgagcacctgatcaagctgcccagcctgaagcagctgaacctgtggagcacccagttcggcgacgccggcctgagactgctgagcgagcacctgaccatgctgcaggtgctgaacctgtgcgagacccccgtgaccgacgccggcctgctggccctgagcagcatgaagagcctgtgcagcctgaacatgaacagcaccaagctgagcgccgacacctacgaggacctgaaggccaagctgcccaacctgaaggaggtggacgtgagatacaccgaggcctggtag

SEQ ID NO: 77092 - DNA, 2040 bp, synthetic construct
  misc_feature 1..2040: note = Description of Artificial Sequence: Synthetic coding sequence
  source 1..2040: mol_type = other DNA
atgggccaggccgccgagcccaccggctacatggagaacagcgtgagctacagcgccatcgaggacgtgcagctgctgagctgggagaacgcccccaagtactgcctgcagctgaccatccccggcggcaccgtgctgctgcaggccgccaacagctacctgagagaccagtggttccacagcctgcagtggaagaagaagatctacaagtacaagaaggtgctgagcaaccccagcagatgggaggtggtgctgaaggagatcagaaccctggtggacatggccctgaccagccccctgcaggacgacagcatcaaccaggcccccctggagatcgtgagcaagctgctgagcgagaacaccaacctgaccacccaggagcacgagaacatcatcgtggccatcgcccccctgctggagaacaaccaccccccccccgacctgtgcgagttcttctgcaagcactgcagagagagacccagaagcatggtggtgatcgaggtgttcacccccgtggtgcagagaatcctgaagcacaacatggacttcggcaagtgccccagactgagactgttcacccaggagtacatcctggccctgaacgagctgaacgccggcatggaggtggtgaagaagttcatccagagcatgcacggccccaccggccactgcccccaccccagagtgctgcccaacctggtggccgtgtgcctggccgccatctacagctgctacgaggagttcatcaacagcagagacaacagccccagcctgaaggagatcagaaacggctgccagcagccctgcgacagaaagcccaccctgcccctgagactgctgcaccccagccccgacctggtgagccaggaggccaccctgagcgaggccagactgaagagcgtggtggtggccagcagcgagatccacgtggaggtggagagaaccagcaccgccaagcccgccctgaccgccagcgccggcaacgacagcgagcccaacctgatcgactgcctgatggtgagccccgcctgcagcaccatgagcatcgagctgggcccccaggccgacagaaccctgggctgctacgtggagatcctgaagctgctgagcgactacgacgactggagacccagcctggccagcctgctgcagcccatccccttccccaaggaggccctggcccacgagaagttcaccaaggagctgaagtacgtgatccagagattcgccgaggaccccagacaggaggtgcacagctgcctgctgagcgtgagagccggcaaggacggctggttccagctgtacagccccggcggcgtggcctgcgacgacgacggcgagctgttcgccagcatggtgcacatcctgatgggcagctgctacaagaccaagaagttcctgctgagcctggccgagaacaagctgggcccctgcatgctgctggccctgagaggcaaccagaccatggtggagatcctgtgcctgatgctggagtacaacatcatcgacaacaacgacacccagctgcagatcatcagcaccctggagagcaccgacgtgggcaagagaatgtacgagcagctgtgcgacagacagagagagctgaaggagctgcagagaaagggcggccccaccagactgaccctgcccagcaagagcaccgacgccgacctggccagactgctgagcagcggcagcttcggcaacctggagaacctgagcctggccttcaccaacgtgaccagcgcctgcgccgagcacctgatcaagctgcccagcctgaagcagctgaacctgtggagcacccagttcggcgacgccggcctgagactgctgagcgagcacctgaccatgctgcaggtgctgaacctgtgcgagacccccgtgaccgacgccggcctgctggccctgagcagcatgaagagcctgtgcagcctgaacatgaacagcaccaagctgagcgccgacacctacgaggacctgaaggccaagctgcccaacctgaaggaggtggacgtgagatacaccgaggcctggtag

SEQ ID NO: 77093 - DNA, 1761 bp, synthetic construct
  misc_feature 1..1761: note = Description of Artificial Sequence: Synthetic coding sequence
  source 1..1761: mol_type = other DNA
atggccctgaccagccccctgcaggacgacagcatcaaccaggcccccctggagatcgtgagcaagctgctgagcgagaacaccaacctgaccacccaggagcacgagaacatcatcgtggccatcgcccccctgctggagaacaaccaccccccccccgacctgtgcgagttcttctgcaagcactgcagagagagacccagaagcatggtggtgatcgaggtgttcacccccgtggtgcagagaatcctgaagcacaacatggacttcggcaagtgccccagactgagactgttcacccaggagtacatcctggccctgaacgagctgaacgccggcatggaggtggtgaagaagttcatccagagcatgcacggccccaccggccactgcccccaccccagagtgctgcccaacctggtggccgtgtgcctggccgccatctacagctgctacgaggagttcatcaacagcagagacaacagccccagcctgaaggagatcagaaacggctgccagcagccctgcgacagaaagcccaccctgcccctgagactgctgcaccccagccccgacctggtgagccaggaggccaccctgagcgaggccagactgaagagcgtggtggtggccagcagcgagatccacgtggaggtggagagaaccagcaccgccaagcccgccctgaccgccagcgccggcaacgacagcgagcccaacctgatcgactgcctgatggtgagccccgcctgcagcaccatgagcatcgagctgggcccccaggccgacagaaccctgggctgctacgtggagatcctgaagctgctgagcgactacgacgactggagacccagcctggccagcctgctgcagcccatccccttccccaaggaggccctggcccacgagaagttcaccaaggagctgaagtacgtgatccagagattcgccgaggaccccagacaggaggtgcacagctgcctgctgagcgtgagagccggcaaggacggctggttccagctgtacagccccggcggcgtggcctgcgacgacgacggcgagctgttcgccagcatggtgcacatcctgatgggcagctgctacaagaccaagaagttcctgctgagcctggccgagaacaagctgggcccctgcatgctgctggccctgagaggcaaccagaccatggtggagatcctgtgcctgatgctggagtacaacatcatcgacaacaacgacacccagctgcagatcatcagcaccctggagagcaccgacgtgggcaagagaatgtacgagcagctgtgcgacagacagagagagctgaaggagctgcagagaaagggcggccccaccagactgaccctgcccagcaagagcaccgacgccgacctggccagactgctgagcagcggcagcttcggcaacctggagaacctgagcctggccttcaccaacgtgaccagcgcctgcgccgagcacctgatcaagctgcccagcctgaagcagctgaacctgtggagcacccagttcggcgacgccggcctgagactgctgagcgagcacctgaccatgctgcaggtgctgaacctgtgcgagacccccgtgaccgacgccggcctgctggccctgagcagcatgaagagcctgtgcagcctgaacatgaacagcaccaagctgagcgccgacacctacgaggacctgaaggccaagctgcccaacctgaaggaggtggacgtgagatacaccgaggcctggtag

SEQ ID NO: 77094 - DNA, 312 bp, synthetic construct
  misc_feature 1..312: note = Description of Artificial Sequence: Synthetic coding sequence
  source 1..312: mol_type = other DNA
atggcccactacaaggccgccgacagcaagagagagcagttcagaagatacctggagaagagcggcgtgctggacaccctgaccaaggtgctggtggccctgtacgaggagcccgagaagcccaacagcgccctggacttcctgaagcaccacctgggcgccgccacccccgagaaccccgagatcgagctgctgagactggagctggccgagatgaaggagaagtacgaggccatcgtggaggagaacaagaagctgaaggccaagctggcccagtacgagcccccccaggaggagaagagagccgagtag

SEQ ID NO: 77095 - DNA, 1695 bp, synthetic construct
  misc_feature 1..1695: note = Description of Artificial Sequence: Synthetic coding sequence
  source 1..1695: mol_type = other DNA
atggccgtgttcagaagcggcctgctggtgctgaccacccccctggccagcctggcccccagactggccagcatcctgaccagcgccgccagactggtgaaccacaccctgtacgtgcacctgcagcccggcatgagcctggagggccccgcccagccccagagcagccccgtgcaggccaccttcgaggtgctggacttcatcacccacctgtacgccggcgccgacgtgcacagacacctggacgtgagaatcctgctgaccaacatcagaaccaagagcaccttcctgccccccctgcccaccagcgtgcagaacctggcccacccccccgaggtggtgctgaccgacttccagaccctggacggcagccagtacaaccccgtgaagcagcagctggtgagatacgccaccagctgctacagctgctgccccagactggccagcgtgctgctgtacagcgactacggcatcggcgaggtgcccgtggagcccctggacgtgcccctgcccagcaccatcagacccgccagccccgtggccggcagccccaagcagcccgtgagaggctactacagaggcgccgtgggcggcaccttcgacagactgcacaacgcccacaaggtgctgctgagcgtggcctgcatcctggcccaggagcagctggtggtgggcgtggccgacaaggacctgctgaagagcaagctgctgcccgagctgctgcagccctacaccgagagagtggagcacctgagcgagttcctggtggacatcaagcccagcctgaccttcgacgtgatccccctgctggacccctacggccccgccggcagcgaccccagcctggagttcctggtggtgagcgaggagacctacagaggcggcatggccatcaacagattcagactggagaacgacctggaggagctggccctgtaccagatccagctgctgaaggacctgagacacaccgagaacgaggaggacaaggtgagcagcagcagcttcagacagagaatgctgggcaacctgctgagacccccctacgagagacccgagctgcccacctgcctgtacgtgatcggcctgaccggcatcagcggcagcggcaagagcagcatcgcccagagactgaagggcctgggcgccttcgtgatcgacagcgaccacctgggccacagagcctacgcccccggcggccccgcctaccagcccgtggtggaggccttcggcaccgacatcctgcacaaggacggcatcatcaacagaaaggtgctgggcagcagagtgttcggcaacaagaagcagctgaagatcctgaccgacatcatgtggcccatcatcgccaagctggccagagaggagatggacagagccgtggccgagggcaagagagtgtgcgtgatcgacgccgccgtgctgctggaggccggctggcagaacctggtgcacgaggtgtggaccgccgtgatccccgagaccgaggccgtgagaagaatcgtggagagagacggcctgagcgaggccgccgcccagagcagactgcagagccagatgagcggccagcagctggtggagcagagccacgtggtgctgagcaccctgtgggagccccacatcacccagagacaggtggagaaggcctgggccctgctgcagaagagaatccccaagacccaccaggccctggactag

SEQ ID NO: 77096 - DNA, 1695 bp, synthetic construct; identical to SEQ ID NO: 77095
  misc_feature 1..1695: note = Description of Artificial Sequence: Synthetic coding sequence
  source 1..1695: mol_type = other DNA

SEQ ID NO: 77097 - DNA, 1782 bp, synthetic construct
  misc_feature 1..1782: note = Description of Artificial Sequence: Synthetic coding sequence
  source 1..1782: mol_type = other DNA
atgagaacccccagactgagagcccagcccagaggcgccgtgtaccaggcccccagccccccccccgcccccgtgggcctgggcagcatggccgtgttcagaagcggcctgctggtgctgaccacccccctggccagcctggcccccagactggccagcatcctgaccagcgccgccagactggtgaaccacaccctgtacgtgcacctgcagcccggcatgagcctggagggccccgcccagccccagagcagccccgtgcaggccaccttcgaggtgctggacttcatcacccacctgtacgccggcgccgacgtgcacagacacctggacgtgagaatcctgctgaccaacatcagaaccaagagcaccttcctgccccccctgcccaccagcgtgcagaacctggcccacccccccgaggtggtgctgaccgacttccagaccctggacggcagccagtacaaccccgtgaagcagcagctggtgagatacgccaccagctgctacagctgctgccccagactggccagcgtgctgctgtacagcgactacggcatcggcgaggtgcccgtggagcccctggacgtgcccctgcccagcaccatcagacccgccagccccgtggccggcagccccaagcagcccgtgagaggctactacagaggcgccgtgggcggcaccttcgacagactgcacaacgcccacaaggtgctgctgagcgtggcctgcatcctggcccaggagcagctggtggtgggcgtggccgacaaggacctgctgaagagcaagctgctgcccgagctgctgcagccctacaccgagagagtggagcacctgagcgagttcctggtggacatcaagcccagcctgaccttcgacgtgatccccctgctggacccctacggccccgccggcagcgaccccagcctggagttcctggtggtgagcgaggagacctacagaggcggcatggccatcaacagattcagactggagaacgacctggaggagctggccctgtaccagatccagctgctgaaggacctgagacacaccgagaacgaggaggacaaggtgagcagcagcagcttcagacagagaatgctgggcaacctgctgagacccccctacgagagacccgagctgcccacctgcctgtacgtgatcggcctgaccggcatcagcggcagcggcaagagcagcatcgcccagagactgaagggcctgggcgccttcgtgatcgacagcgaccacctgggccacagagcctacgcccccggcggccccgcctaccagcccgtggtggaggccttcggcaccgacatcctgcacaaggacggcatcatcaacagaaaggtgctgggcagcagagtgttcggcaacaagaagcagctgaagatcctgaccgacatcatgtggcccatcatcgccaagctggccagagaggagatggacagagccgtggccgagggcaagagagtgtgcgtgatcgacgccgccgtgctgctggaggccggctggcagaacctggtgcacgaggtgtggaccgccgtgatccccgagaccgaggccgtgagaagaatcgtggagagagacggcctgagcgaggccgccgcccagagcagactgcagagccagatgagcggccagcagctggtggagcagagccacgtggtgctgagcaccctgtgggagccccacatcacccagagacaggtggagaaggcctgggccctgctgcagaagagaatccccaagacccaccaggccctggactag

SEQ ID NO: 77098 - DNA, 528 bp, synthetic construct
  misc_feature 1..528: note = Description of Artificial Sequence: Synthetic coding sequence
  source 1..528: mol_type = other DNA
atggccgtgttcagaagcggcctgctggtgctgaccacccccctggccagcctggcccccagactggccagcatcctgaccagcgccgccagactggtgaaccacaccctgtacgtgcacctgcagcccggcatgagcctggagggccccgcccagccccagagcagccccgtgcaggccaccttcgaggtgctggacttcatcacccacctgagccccagccccgcccacctgagccccgagagcagaccccccgccagaagcagagtggacagattccccgaccccggctggaagcccgtgcagcccggccagaccgccgccagcgccctgagacaccagctgctgcagctgctgagcgccaccggcctgggcgccgccatcctgagactgtgggacagaagaagcgccagaggcgcccccggctgccccctgaccctgcacgaccaggccagcttccccagaggcagagtgagcaaggccgccggcgcctggctgctgccctggagatgcagatggcacgtgtag

SEQ ID NO: 77099 - DNA, 810 bp, synthetic construct
  misc_feature 1..810: note = Description of Artificial Sequence: Synthetic coding sequence
  source 1..810: mol_type = other DNA
atggccatcaacagattcagactggagaacgacctggaggagctggccctgtaccagatccagctgctgaaggacctgagacacaccgagaacgaggaggacaaggtgagcagcagcagcttcagacagagaatgctgggcaacctgctgagacccccctacgagagacccgagctgcccacctgcctgtacgtgatcggcctgaccggcatcagcggcagcggcaagagcagcatcgcccagagactgaagggcctgggcgccttcgtgatcgacagcgaccacctgggccacagagcctacgcccccggcggccccgcctaccagcccgtggtggaggccttcggcaccgacatcctgcacaaggacggcatcatcaacagaaaggtgctgggcagcagagtgttcggcaacaagaagcagctgaagatcctgaccgacatcatgtggcccatcatcgccaagctggccagagaggagatggacagagccgtggccgagggcaagagagtgtgcgtgatcgacgccgccgtgctgctggaggccggctggcagaacctggtgcacgaggtgtggaccgccgtgatccccgagaccgaggccgtgagaagaatcgtggagagagacggcctgagcgaggccgccgcccagagcagactgcagagccagatgagcggccagcagctggtggagcagagccacgtggtgctgagcaccctgtgggagccccacatcacccagagacaggtggagaaggcctgggccctgctgcagaagagaatccccaagacccaccaggccctggactag

SEQ ID NO: 77100 - DNA, 1782 bp, synthetic construct; identical to SEQ ID NO: 77097
  misc_feature 1..1782: note = Description of Artificial Sequence: Synthetic coding sequence
  source 1..1782: mol_type = other DNA

SEQ ID NO: 77101 - DNA, 429 bp, synthetic construct
  misc_feature 1..429: note = Description of Artificial Sequence: Synthetic coding sequence
  source 1..429: mol_type = other DNA
atggccaccaagatcgacaaggaggcctgcagagccgcctacaacctggtgagagacgacggcagcgccgtgatctgggtgaccttcaagtacgacggcagcaccatcgtgcccggcgagcagggcgccgagtaccagcacttcatccagcagtgcaccgacgacgtgagactgttcgccttcgtgagattcaccaccggcgacgccatgagcaagagaagcaagttcgccctgatcacctggatcggcgagaacgtgagcggcctgcagagagccaagaccggcaccgacaagaccctggtgaaggaggtggtgcagaacttcgccaaggagttcgtgatcagcgacagaaaggagctggaggaggacttcatcaagagcgagctgaagaaggccggcggcgccaactacgacgcccagaccgagtag

SEQ ID NO: 77102 - DNA, 1731 bp, synthetic construct
  misc_feature 1..1731: note = Description of Artificial Sequence: Synthetic coding sequence
  source 1..1731: mol_type = other DNA
atgagaggccccaacagcggcaccgagaagggcagactggtgatccccgagaagcagggcttcgacttcctgtgcatgcccgtgttccaccccagattcaagagagagttcatccaggagcccgccaagaacagacccggcccccagaccagaagcgacctgctgctgagcggcagagccttcctgctgcccctgaaccaggaggacaacaccaacctggccagagtgctgaccaaccacatccacaccggccaccacagcagcatgttctggatgagagtgcccctggtggcccccgaggacctgagagacgacatcatcgagaacgcccccaccacccacaccgaggagtacagcggcgaggagaagacctggatgtggtggcacaacttcagaaccctgtgcgactacagcaagagaatcgccgtggccctggagatcggcgccgacctgcccagcaaccacgtgatcgacagatggctgggcgagcccatcaaggccgccatcctgcccaccagcatcttcctgaccaacaagaagggcttccccgtgctgagcaagatgcaccagagactgatcttcagactgctgaagctggaggtgcagttcatcatcaccggcaccaaccaccacagcgagaaggagttctgcagctacctgcagtacctggagtacctgagccagaacagacccccccccaacgcctacgagctgttcgccaagggctacgaggactacctgcagagccccctgcagcccctgatggacaacctggagagccagacctacgaggtgttcgagaaggaccccatcaagtacagccagtaccagcaggccatctacaagtgcctgctggacagagtgcccgaggaggagaaggacaccaacgtgcaggtgctgatggtgctgggcgccggcagaggccccctggtgaacgccagcctgagagccgccaagcaggccgacagaagaatcaagctgtacgccgtggagaagaaccccaacgccgtggtgaccctggagaactggcagttcgaggagtggggcagccaggtgaccgtggtgagcagcgacatgagagagtgggtggcccccgagaaggccgacatcatcgtgagcgagctgctgggcagcttcgccgacaacgagctgagccccgagtgcctggacggcgcccagcacttcctgaaggacgacggcgtgagcatccccggcgagtacaccagcttcctggcccccatcagcagcagcaagctgtacaacgaggtgagagcctgcagagagaaggacagagaccccgaggcccagttcgagatgccctacgtggtgagactgcacaacttccaccagctgagcgccccccagccctgcttcaccttcagccaccccaacagagaccccatgatcgacaacaacagatactgcaccctggagttccccgtggaggtgaacaccgtgctgcacggcttcgccggctacttcgagaccgtgctgtaccaggacatcaccctgagcatcagacccgagacccacagccccggcatgttcagctggttccccatcctgttccccatcaagcagcccatcaccgtgagagagggccagaccatctgcgtgagattctggagatgcagcaacagcaagaaggtgtggtacgagtgggccgtgaccgcccccgtgtgcagcgccatccacaaccccaccggcagaagctacaccatcggcctgtag

SEQ ID NO: 77103 - DNA, 1206 bp, synthetic construct
  misc_feature 1..1206: note = Description of Artificial Sequence: Synthetic coding sequence
  source 1..1206: mol_type = other DNA
atgctgggcatcggcaccgagggcccccacgtgggcctggtgcaggccagcgagcaccccaagatcgagttctacctgaagaacttcaccagcgccaaggacgtgctgttcgccatcaaggaggtgggcttcagaggcggcaacagcaacaccgacatcaccctggagaagtacctgttcgtgatgctgaagagaagcgagaaccagcagacctacctgatgaacgccgacgtggccgagagaatgagcagcaccaccgtggacagcgaggagagactgctgagaggcaaggccctgaagcacaccgcccagaagttcttcaccgtggacgccggcgtgagaaagggcatccccaaggtggtggtggtgttcatcgacggctggcccagcgacgacatcgaggaggccggcatcgtggccagagagttcggcgtgaacgtgttcatcgtgagcgtggccaagcccatccccgaggagctgggcatggtgcaggacgtgaccttcgtggacaaggccgtgtgcagaaacaacggcttcttcagctaccacatgcccaactggttcggcaccaccaagtacgtgaagcccctggtgcagaagctgtgcacccacgagcagatgatgtgcagcaagacctgctacaacagcgtgaacatcgccttcctgatcgacggcagcagcagcgtgggcgacagcaacttcagactgatgctggagttcgtgagcaacatcgccaagaccttcgagatcagcgacatcggcgccaagatcgccgccgtgcagttcacctacgaccagagaaccgagttcagcttcaccgactacagcaccaaggagaacgtgctggccgtgatcagaaacatcagatacatgagcggcggcaccgccaccggcgacgccatcagcttcaccgtgagaaacgtgttcggccccatcagagagagccccaacaagaacttcctggtgatcgtgaccgacggccagagctacgacgacgtgcagggccccgccgccgccgcccacgacgccggcatcaccatcttcagcgtgggcgtggcctgggcccccctggacgacctgaaggacatggccagcaagcccaaggagagccacgccttcttcaccagagagttcaccggcctggagcccatcgtgagcgacgtgatcagaggcatctgcagagacttcctggagagccagcagtag

SEQ ID NO: 77104 - DNA, 1653 bp, synthetic construct; identical to SEQ ID NO: 71960
  misc_feature 1..1653: note = Description of Artificial Sequence: Synthetic coding sequence
  source 1..1653: mol_type = other DNA

SEQ ID NO: 77105 - DNA, 732 bp, synthetic construct
  misc_feature 1..732: note = Description of Artificial Sequence: Synthetic coding sequence
  source 1..732: mol_type = other DNA
atgctgagcagatggagcgccagcttcaccgtgaccaagggcaagagcagcacccaggaggccaccggccaggccgtgagcaccgcccacccccccaccggcaagagactgaagaagacccccgagaagaagaccggcaacaaggactgcaaggccgacatcgccttcctgatcgacggcagcttcaacatcggccagagaagattcaacctgcagaagaacttcgtgggcaaggtggccctgatgctgggcatcggcaccgagggcccccacgtgggcctggtgcaggccagcgagcaccccaagatcgagttctacctgaagaacttcaccagcgccaaggacgtgctgttcgccatcaaggaggtgggcttcagaggcggcaacagcaacaccggcaaggccctgaagcacaccgcccagaagttcttcaccgtggacgccggcgtgagaaagggcatccccaaggtggtggtggtgttcatcgacggctggcccagcgacgacatcgaggaggccggcatcgtggccagagagttcggcgtgaacgtgttcatcgtgagcgtggccaagcccatccccgaggagctgggcatggtgcaggacgtgaccttcgtggacaaggccgtgtgcagaaacaacggcttcttcagctaccacatgcccaactggttcggcaccaccaagtacgtgagcctgtggtacagaagctgcgccctgatgaacaagtag

SEQ ID NO: 77106 - DNA, 1278 bp, synthetic construct
  misc_feature 1..1278: note = Description of Artificial Sequence: Synthetic coding sequence
  source 1..1278: mol_type = other DNA
atgggccccagaagactgctgctggtggccgcctgcttcagcctgtgcggccccctgctgagcgccagaaccagagccagaagacccgagagcaaggccaccaacgccaccctggaccccagaagcttcctgctgagaaaccccaacgacaagtacgagcccttctgggaggacgaggagaagaacgagagcggcctgaccgagtacagactggtgagcatcaacaagagcagccccctgcagaagcagctgcccgccttcatcagcgaggacgccagcggctacctgaccagcagctggctgaccctgttcgtgcccagcgtgtacaccggcgtgttcgtggtgagcctgcccctgaacatcatggccatcgtggtgttcatcctgaagatgaaggtgaagaagcccgccgtggtgtacatgctgcacctggccaccgccgacgtgctgttcgtgagcgtgctgcccttcaagatcagctactacttcagcggcagcgactggcagttcggcagcgagctgtgcagattcgtgaccgccgccttctactgcaacatgtacgccagcatcctgctgatgaccgtgatcagcatcgacagattcctggccgtggtgtaccccatgcagagcctgagctggagaaccctgggcagagccagcttcacctgcctggccatctgggccctggccatcgccggcgtggtgcccctgctgctgaaggagcagaccatccaggtgcccggcctgaacatcaccacctgccacgacgtgctgaacgagaccctgctggagggctactacgcctactacttcagcgccttcagcgccgtgttcttcttcgtgcccctgatcatcagcaccgtgtgctacgtgagcatcatcagatgcctgagcagcagcgccgtggccaacagaagcaagaagagcagagccctgttcctgagcgccgccgtgttctgcatcttcatcatctgcttcggccccaccaacgtgctgctgatcgcccactacagcttcctgagccacaccagcaccaccgaggccgcctacttcgcctacctgctgtgcgtgtgcgtgagcagcatcagctgctgcatcgaccccctgatctactactacgccagcagcgagtgccagagatacgtgtacagcatcctgtgctgcaaggagagcagcgaccccagcagctacaacagcagcggccagctgatggccagcaagatggacacctgcagcagcaacctgaacaacagcatctacaagaagctgctgacctag

SEQ ID NO: 77107 - DNA, 1194 bp, synthetic construct
  misc_feature 1..1194: note = Description of Artificial Sequence: Synthetic coding sequence
  source 1..1194: mol_type = other DNA
atgagaagccccagcgccgcctggctgctgggcgccgccatcctgctggccgccagcctgagctgcagcggcaccatccagggcaccagcagaagcagcaagggcagaagcctgatcggcaaggtggacggcaccagccacgtgaccggcaagggcgtgaccgtggagaccgtgttcagcgtggacgagttcagcgccagcgtgctgaccggcaagctgaccaccgtgttcctgcccatcgtgtacaccatcgtgttcgtggtgggcctgcccagcaacggcatggccctgtgggtgttcctgttcagaaccaagaagaagcaccccgccgtgatctacatggccaacctggccctggccgacctgctgagcgtgatctggttccccctgaagatcgcctaccacatccacggcaacaactggatctacggcgaggccctgtgcaacgtgctgatcggcttcttctacggcaacatgtactgcagcatcctgttcatgacctgcctgagcgtgcagagatactgggtgatcgtgaaccccatgggccacagcagaaagaaggccaacatcgccatcggcatcagcctggccatctggctgctgatcctgctggtgaccatccccctgtacgtggtgaagcagaccatcttcatccccgccctgaacatcaccacctgccacgacgtgctgcccgagcagctgctggtgggcgacatgttcaactacttcctgagcctggccatcggcgtgttcctgttccccgccttcctgaccgccagcgcctacgtgctgatgatcagaatgctgagaagcagcgccatggacgagaacagcgagaagaagagaaagagagccatcaagctgatcgtgaccgtgctggccatgtacctgatctgcttcacccccagcaacctgctgctggtggtgcactacttcctgatcaagagccagggccagagccacgtgtacgccctgtacatcgtggccctgtgcctgagcaccctgaacagctgcatcgaccccttcgtgtactacttcgtgagccacgacttcagagaccacgccaagaacgccctgctgtgcagaagcgtgagaaccgtgaagcagatgcaggtgagcctgaccagcaagaagcacagcagaaagagcagcagctacagcagcagcagcaccaccgtgaagaccagctactag

SEQ ID NO: 77108 - DNA, 1125 bp, synthetic construct
  misc_feature 1..1125: note = Description of Artificial Sequence: Synthetic coding sequence
  source 1..1125: mol_type = other DNA
atgaaggccctgatcttcgccgccgccggcctgctgctgctgctgcccaccttctgccagagcggcatggagaacgacaccaacaacctggccaagcccaccctgcccatcaagaccttcagaggcgccccccccaacagcttcgaggagttccccttcagcgccctggagggctggaccggcgccaccatcaccgtgaagatcaagtgccccgaggagagcgccagccacctgcacgtgaagaacgccaccatgggctacctgaccagcagcctgagcaccaagctgatccccgccatctacctgctggtgttcgtggtgggcgtgcccgccaacgccgtgaccctgtggatgctgttcttcagaaccagaagcatctgcaccaccgtgttctacaccaacctggccatcgccgacttcctgttctgcgtgaccctgcccttcaagatcgcctaccacctgaacggcaacaactgggtgttcggcgaggtgctgtgcagagccaccaccgtgatcttctacggcaacatgtactgcagcatcctgctgctggcctgcatcagcatcaacagatacctggccatcgtgcaccccttcacctacagaggcctgcccaagcacacctacgccctggtgacctgcggcctggtgtgggccaccgtgttcctgtacatgctgcccttcttcatcctgaagcaggagtactacctggtgcagcccgacatcaccacctgccacgacgtgcacaacacctgcgagagcagcagccccttccagctgtactacttcatcagcctggccttcttcggcttcctgatccccttcgtgctgatcatctactgctacgccgccatcatcagaaccctgaacgcctacgaccacagatggctgtggtacgtgaaggccagcctgctgatcctggtgatcttcaccatctgcttcgcccccagcaacatcatcctgatcatccaccacgccaactactactacaacaacaccgacggcctgtacttcatctacctgatcgccctgtgcctgggcagcctgaacagctgcctggaccccttcctgtacttcctgatgagcaagaccagaaaccacagcaccgcctacctgaccaagtag

SEQ ID NO: 77109 - DNA, 1059 bp, synthetic construct
  misc_feature 1..1059: note = Description of Artificial Sequence: Synthetic coding sequence
  source 1..1059: mol_type = other DNA
atggagaacgacaccaacaacctggccaagcccaccctgcccatcaagaccttcagaggcgccccccccaacagcttcgaggagttccccttcagcgccctggagggctggaccggcgccaccatcaccgtgaagatcaagtgccccgaggagagcgccagccacctgcacgtgaagaacgccaccatgggctacctgaccagcagcctgagcaccaagctgatccccgccatctacctgctggtgttcgtggtgggcgtgcccgccaacgccgtgaccctgtggatgctgttcttcagaaccagaagcatctgcaccaccgtgttctacaccaacctggccatcgccgacttcctgttctgcgtgaccctgcccttcaagatcgcctaccacctgaacggcaacaactgggtgttcggcgaggtgctgtgcagagccaccaccgtgatcttctacggcaacatgtactgcagcatcctgctgctggcctgcatcagcatcaacagatacctggccatcgtgcaccccttcacctacagaggcctgcccaagcacacctacgccctggtgacctgcggcctggtgtgggccaccgtgttcctgtacatgctgcccttcttcatcctgaagcaggagtactacctggtgcagcccgacatcaccacctgccacgacgtgcacaacacctgcgagagcagcagccccttccagctgtactacttcatcagcctggccttcttcggcttcctgatccccttcgtgctgatcatctactgctacgccgccatcatcagaaccctgaacgcctacgaccacagatggctgtggtacgtgaaggccagcctgctgatcctggtgatcttcaccatctgcttcgcccccagcaacatcatcctgatcatccaccacgccaactactactacaacaacaccgacggcctgtacttcatctacctgatcgccctgtgcctgggcagcctgaacagctgcctggaccccttcctgtacttcctgatgagcaagaccagaaaccacagcaccgcctacctgaccaagtag

SEQ ID NO: 77110 - DNA, 1158 bp, synthetic construct
  misc_feature 1..1158: note = Description of Artificial Sequence: Synthetic coding sequence
  source 1..1158: mol_type = other DNA
atgtggggcagactgctgctgtggcccctggtgctgggcttcagcctgagcggcggcacccagacccccagcgtgtacgacgagagcggcagcaccggcggcggcgacgacagcacccccagcatcctgcccgcccccagaggctaccccggccaggtgtgcgccaacgacagcgacaccctggagctgcccgacagcagcagagccctgctgctgggctgggtgcccaccagactggtgcccgccctgtacggcctggtgctggtggtgggcctgcccgccaacggcctggccctgtgggtgctggccacccaggcccccagactgcccagcaccatgctgctgatgaacctggccgccgccgacctgctgctggccctggccctgccccccagaatcgcctaccacctgagaggccagagatggcccttcggcgaggccgcctgcagactggccaccgccgccctgtacggccacatgtacggcagcgtgctgctgctggccgccgtgagcctggacagatacctggccctggtgcaccccctgagagccagagccctgagaggcagaagactggccctgggcctgtgcatggccgcctggctgatggccgccgccctggccctgcccctgaccctgcagagacagaccttcagactggccagaagcgacagagtgctgtgccacgacgccctgcccctggacgcccaggccagccactggcagcccgccttcacctgcctggccctgctgggctgcttcctgcccctgctggccatgctgctgtgctacggcgccaccctgcacaccctggccgccagcggcagaagatacggccacgccctgagactgaccgccgtggtgctggccagcgccgtggccttcttcgtgcccagcaacctgctgctgctgctgcactacagcgaccccagccccagcgcctggggcaacctgtacggcgcctacgtgcccagcctggccctgagcaccctgaacagctgcgtggaccccttcatctactactacgtgagcgccgagttcagagacaaggtgagagccggcctgttccagagaagccccggcgacaccgtggccagcaaggccagcgccgagggcggcagcagaggcatgggcacccacagcagcctgctgcagtag

SEQ ID NO: 77111 - DNA, 1848 bp, synthetic construct
  misc_feature 1..1848: note = Description of Artificial Sequence: Synthetic coding sequence
  source 1..1848: mol_type = other DNA
atgagagccctgctgctgctgggcttcctgctggtgagcctggagagcaccctgagcatccccccctgggaggcccccaaggagcacaagtacaaggccgaggagcacaccgtggtgctgaccgtgaccggcgagccctgccacttccccttccagtaccacagacagctgtaccacaagtgcacccacaagggcagacccggcccccagccctggtgcgccaccacccccaacttcgaccaggaccagagatggggctactgcctggagcccaagaaggtgaaggaccactgcagcaagcacagcccctgccagaagggcggcacctgcgtgaacatgcccagcggcccccactgcctgtgcccccagcacctgaccggcaaccactgccagaaggagaagtgcttcgagccccagctgctgagattcttccacaagaacgagatctggtacagaaccgagcaggccgccgtggccagatgccagtgcaagggccccgacgcccactgccagagactggccagccaggcctgcagaaccaacccctgcctgcacggcggcagatgcctggaggtggagggccacagactgtgccactgccccgtgggctacaccggcgccttctgcgacgtggacaccaaggccagctgctacgacggcagaggcctgagctacagaggcctggccagaaccaccctgagcggcgccccctgccagccctgggccagcgaggccacctacagaaacgtgaccgccgagcaggccagaaactggggcctgggcggccacgccttctgcagaaaccccgacaacgacatcagaccctggtgcttcgtgctgaacagagacagactgagctgggagtactgcgacctggcccagtgccagacccccacccaggccgccccccccacccccgtgagccccagactgcacgtgcccctgatgcccgcccagcccgccccccccaagccccagcccaccaccagaacccccccccagagccagacccccggcgccctgcccgccaagagagagcagccccccagcctgaccagaaacggccccctgagctgcggccagagactgagaaagagcctgagcagcatgaccagagtggtgggcggcctggtggccctgagaggcgcccacccctacatcgccgccctgtactggggccacagcttctgcgccggcagcctgatcgccccctgctgggtgctgaccgccgcccactgcctgcaggacagacccgcccccgaggacctgaccgtggtgctgggccaggagagaagaaaccacagctgcgagccctgccagaccctggccgtgagaagctacagactgcacgaggccttcagccccgtgagctaccagcacgacctggccctgctgagactgcaggaggacgccgacggcagctgcgccctgctgagcccctacgtgcagcccgtgtgcctgcccagcggcgccgccagacccagcgagaccaccctgtgccaggtggccggctggggccaccagttcgagggcgccgaggagtacgccagcttcctgcaggaggcccaggtgcccttcctgagcctggagagatgcagcgcccccgacgtgcacggcagcagcatcctgcccggcatgctgtgcgccggcttcctggagggcggcaccgacgcctgccagggcgacagcggcggccccctggtgtgcgaggaccaggccgccgagagaagactgaccctgcagggcatcatcagctggggcagcggctgcggcgacagaaacaagcccggcgtgtacaccgacgtggcctactacctggcctggatcagagagcacaccgtgagctag

SEQ ID NO: 77112 - DNA, 1986 bp, synthetic construct
  misc_feature 1..1986: note = Description of Artificial Sequence: Synthetic coding sequence
  source 1..1986: mol_type = other DNA
atgagactgaagaacctgaccttcatcatcatcctgatcatcagcggcgagctgtacgccgaggagaagccctgcggcttcccccacgtggagaacggcagaatcgcccagtactactacaccttcaagagcttctacttccccatgagcatcgacaagaagctgagcttcttctgcctggccggctacaccaccgagagcggcagacaggaggagcagaccacctgcaccaccgagggctggagccccgagcccagatgcttcaagaagtgcaccaagcccgacctgagcaacggctacatcagcgacgtgaagctgctgtacaagatccaggagaacatgagatacggctgcgccagcggctacaagaccaccggcggcaaggacgaggaggtggtgcagtgcctgagcgacggctggagcagccagcccacctgcagaaaggagcacgagacctgcctggcccccgagctgtacaacggcaactacagcaccacccagaagaccttcaaggtgaaggacaaggtgcagtacgagtgcgccaccggctactacaccgccggcggcaagaagaccgaggaggtggagtgcctgacctacggctggagcctgacccccaagtgcaccaagctgaagtgcagcagcctgagactgatcgagaacggctacttccaccccgtgaagcagacctacgaggagggcgacgtggtgcagttcttctgccacgagaactactacctgagcggcagcgacctgatccagtgctacaacttcggctggtaccccgagagccccgtgtgcgagggcagaagaaacagatgcccccccccccccctgcccatcaacagcaagatccagacccacagcaccacctacagacacggcgagatcgtgcacatcgagtgcgagctgaacttcgagatccacggcagcgccgagatcagatgcgaggacggcaagtggaccgagccccccaagtgcatcgagggccaggagaaggtggcctgcgaggagccccccttcatcgagaacggcgccgccaacctgcacagcaagatctactacaacggcgacaaggtgacctacgcctgcaagagcggctacctgctgcacggcagcaacgagatcacctgcaacagaggcaagtggaccctgccccccgagtgcgtggagaacaacgagaactgcaagcacccccccgtggtgatgaacggcgccgtggccgacggcatcctggccagctacgccaccggcagcagcgtggagtacagatgcaacgagtactacctgctgagaggcagcaagatcagcagatgcgagcagggcaagtggagcagcccccccgtgtgcctggagccctgcaccgtgaacgtggactacatgaacagaaacaacatcgagatgaagtggaagtacgagggcaaggtgctgcacggcgacctgatcgacttcgtgtgcaagcagggctacgacctgagccccctgacccccctgagcgagctgagcgtgcagtgcaacagaggcgaggtgaagtaccccctgtgcaccagaaaggagagcaagggcatgtgcaccagcccccccctgatcaagcacggcgtgatcatcagcagcaccgtggacacctacgagaacggcagcagcgtggagtacagatgcttcgaccaccacttcctggagggcagcagagaggcctactgcctggacggcatgtggaccaccccccccctgtgcctggagccctgcaccctgagcttcaccgagatggagaagaacaacctgctgctgaagtgggacttcgacaacagaccccacatcctgcacggcgagtacatcgagttcatctgcagaggcgacacctaccccgccgagctgtacatcaccggcagcatcctgagaatgcagtgcgacagaggccagctgaagtaccccagatgcatccccagacagagcaccctgagctaccaggagcccctgagaacctag

SEQ ID NO: 77113 - DNA, 3675 bp, synthetic construct
  misc_feature 1..3675: note = Description of Artificial Sequence: Synthetic coding sequence
  source 1..3675: mol_type = other DNA
atgctgaccaagttcgagaccaagagcgccagagtgaagggcctgagcttccaccccaagagaccctggatcctgaccagcctgcacaacggcgtgatccagctgtgggactacagaatgtgcaccctgatcgacaagttcgacgagcacgacggccccgtgagaggcatcgacttccacaagcagcagcccctgttcgtgagcggcggcgacgactacaagatcaaggtgtggaactacaagctgagaagatgcctgttcaccctgctgggccacctggactacatcagaaccaccttcttccaccacgagtacccctggatcctgagcgccagcgacgaccagaccatcagagtgtggaactggcagagcagaacctgcgtgtgcgtgctgaccggccacaaccactacgtgatgtgcgcccagttccaccccaccgaggacctggtggtgagcgccagcctggaccagaccgtgagagtgtgggacatcagcggcctgagaaagaagaacctgagccccggcgccgtggagagcgacgtgagaggcatcaccggcgtggacctgttcggcaccaccgacgccgtggtgaagcacgtgctggagggccacgacagaggcgtgaactgggccgccttccaccccaccatgcccctgatcgtgagcggcgccgacgacagacaggtgaagatctggagaatgaacgagagcaaggcctgggaggtggacacctgcagaggccactacaacaacgtgagctgcgccgtgttccaccccagacaggagctgatcctgagcaacagcgaggacaagagcatcagagtgtgggacatgagcaagagaaccggcgtgcagaccttcagaagagaccacgacagattctgggtgctggccgcccaccccaacctgaacctgttcgccgccggccacgacggcggcatgatcgtgttcaagctggagagagagagacccgcctacgccgtgcacggcaacatgctgcactacgtgaaggacagattcctgagacagctggacttcaacagcagcaaggacgtggccgtgatgcagctgagaagcggcagcaagttccccgtgttcaacatgagctacaaccccgccgagaacgccgtgctgctgtgcaccagagccagcaacctggagaacagcacctacgacctgtacaccatccccaaggacgccgacagccagaaccccgacgcccccgagggcaagagaagcagcggcctgaccgccgtgtgggtggccagaaacagattcgccgtgctggacagaatgcacagcctgctgatcaagaacctgaagaacgagatcaccaagaaggtgcaggtgcccaactgcgacgagatcttctacgccggcaccggcaacctgctgctgagagacgccgacagcatcaccctgttcgacgtgcagcagaagagaaccctggccagcgtgaagatcagcaaggtgaagtacgtgatctggagcgccgacatgagccacgtggccctgctggccaagcacgccatcgtgatctgcaacagaaagctggacgccctgtgcaacatccacgagaacatcagagtgaagagcggcgcctgggacgagagcggcgtgttcatctacaccaccagcaaccacatcaagtacgccgtgaccaccggcgaccacggcatcatcagaaccctggacctgcccatctacgtgaccagagtgaagggcaacaacgtgtactgcctggacagagagtgcagacccagagtgctgaccatcgaccccaccgagttcaagttcaagctggccctgatcaacagaaagtacgacgaggtgctgcacatggtgagaaacgccaagctggtgggccagagcatcatcgcctacctgcagaagaagggctaccccgaggtggccctgcacttcgtgaaggacgagaagaccagattcagcctggccctggagtgcggcaacatcgagatcgccctggaggccgccaaggccctggacgacaagaactgctgggagaagctgggcgaggtggccctgctgcagggcaaccaccagatcgtggagatgtgctaccagagaaccaagaacttcgacaagctgagcttcctgtacctgatcaccggcaacctggagaagctgagaaagatgatgaagatcgccgagatcagaaaggacatgagcggccactaccagaacgccctgtacctgggcgacgtgagcgagagagtgagaatcctgaagaactgcggccagaagagcctggcctacctgaccgccgccacccacggcctggacgaggaggccgagagcctgaaggagaccttcgaccccgagaaggagaccatccccgacatcgaccccaacgccaagctgctgcagccccccgcccccatcatgcccctggacaccaactggcccctgctgaccgtgagcaagggcttcttcgagggcaccatcgccagcaagggcaagggcggcgccctggccgccgacatcgacatcgacaccgtgggcaccgagggctggggcgaggacgccgagctgcagctggacgaggacggcttcgtggaggccaccgagggcctgggcgacgacgccctgggcaagggccaggaggagggcggcggctgggacgtggaggaggacctggagctgccccccgagctggacatcagccccggcgccgccggcggcgccgaggacggcttcttcgtgccccccaccaagggcaccagccccacccagatctggtgcaacaacagccagctgcccgtggaccacatcctggccggcagcttcgagaccgccatgagactgctgcacgaccaggtgggcgtgatccagttcggcccctacaagcagctgttcctgcagacctacgccagaggcagaaccacctaccaggccctgccctgcctgcccagcatgtacggctaccccaacagaaactggaaggacgccggcctgaagaacggcgtgcccgccgtgggcctgaagctgaacgacctgatccagagactgcagctgtgctaccagctgaccaccgtgggcaagttcgaggaggccgtggagaagttcagaagcatcctgctgagcgtgcccctgctggtggtggacaacaagcaggagatcgccgaggcccagcagctgatcaccatctgcagagagtacatcgtgggcctgagcgtggagaccgagagaaagaagctgcccaaggagaccctggagcagcagaagagaatctgcgagatggccgcctacttcacccacagcaacctgcagcccgtgcacatgatcctggtgctgagaaccgccctgaacctgttcttcaagctgaagaacttcaagaccgccgccaccttcgccagaagactgctggagctgggccccaagcccgaggtggcccagcagaccagaaagatcctgagcgcctgcgagaagaaccccaccgacgcctaccagctgaactacgacatgcacaaccccttcgacatctgcgccgccagctacagacccatctacagaggcaagcccgtggagaagtgccccctgagcggcgcctgctacagccccgagttcaagggccagatctgcagagtgaccaccgtgaccgagatcggcaaggacgtgatcggcctgagaatcagccccctgcagttcagatag

SEQ ID NO: 77114 - DNA, 3702 bp, synthetic construct
  misc_feature 1..3702: note = Description of Artificial Sequence: Synthetic coding sequence
  source 1..3702: mol_type = other DNA
atgctgaccaagttcgagaccaagagcgccagagtgaagggcctgagcttccaccccaagagaccctggatcctgaccagcctgcacaacggcgtgatccagctgtgggactacagaatgtgcaccctgatcgacaagttcgacgagcacgacggccccgtgagaggcatcgacttccacaagcagcagcccctgttcgtgagcggcggcgacgactacaagatcaaggtgtggaactacaagctgagaagatgcctgttcaccctgctgggccacctggactacatcagaaccaccttcttccaccacgagtacccctggatcctgagcgccagcgacgaccagaccatcagagtgtggaactggcagagcagaacctgcgtgtgcgtgctgaccggccacaaccactacgtgatgtgcgcccagttccaccccaccgaggacctggtggtgagcgccagcctggaccagaccgtgagagtgtgggacatcagcggcctgagaaagaagaacctgagccccggcgccgtggagagcgacgtgagaggcatcaccggcgtggacctgttcggcaccaccgacgccgtggtgaagcacgtgctggagggccacgacagaggcgtgaactgggccgccttccaccccaccatgcccctgatcgtgagcggcgccgacgacagacaggtgaagatctggagaatgaacgagagcaaggcctgggaggtggacacctgcagaggccactacaacaacgtgagctgcgccgtgttccaccccagacaggagctgatcctgagcaacagcgaggacaagagcatcagagtgtgggacatgagcaagagaaccggcgtgcagaccttcagaagagaccacgacagattctgggtgctggccgcccaccccaacctgaacctgttcgccgccggccacgacggcggcatgatcgtgttcaagctggagagagagagacccgcctacgccgtgcacggcaacatgctgcactacgtgaaggacagattcctgagacagctggacttcaacagcagcaaggacgtggccgtgatgcagctgagaagcggcagcaagttccccgtgttcaacatgagctacaaccccgccgagaacgccgtgctgctgtgcaccagagccagcaacctggagaacagcacctacgacctgtacaccatccccaaggacgccgacagccagaaccccgacgcccccgagggcaagagaagcagcggcctgaccgccgtgtgggtggccagaaacagattcgccgtgctggacagaatgcacagcctgctgatcaagaacctgaagaacgagatcaccaagaaggtgcaggtgcccaactgcgacgagatcttctacgccggcaccggcaacctgctgctgagagacgccgacagcatcaccctgttcgacgtgcagcagaagagaaccctggccagcgtgaagatcagcaaggtgaagtacgtgatctggagcgccgacatgagccacgtggccctgctggccaagcacgagcacagctgccccctgcccctgaccgccatcgtgatctgcaacagaaagctggacgccctgtgcaacatccacgagaacatcagagtgaagagcggcgcctgggacgagagcggcgtgttcatctacaccaccagcaaccacatcaagtacgccgtgaccaccggcgaccacggcatcatcagaaccctggacctgcccatctacgtgaccagagtgaagggcaacaacgtgtactgcctggacagagagtgcagacccagagtgctgaccatcgaccccaccgagttcaagttcaagctggccctgatcaacagaaagtacgacgaggtgctgcacatggtgagaaacgccaagctggtgggccagagcatcatcgcctacctgcagaagaagggctaccccgaggtggccctgcacttcgtgaaggacgagaagaccagattcagcctggccctggagtgcggcaacatcgagatcgccctggaggccgccaaggccctggacgacaagaactgctgggagaagctgggcgaggtggccctgctgcagggcaaccaccagatcgtggagatgtgctaccagagaaccaagaacttcgacaagctgagcttcctgtacctgatcaccggcaacctggagaagctgagaaagatgatgaagatcgccgagatcagaaaggacatgagcggccactaccagaacgccctgtacctgggcgacgtgagcgagagagtgagaatcctgaagaactgcggccagaagagcctggcctacctgaccgccgccacccacggcctggacgaggaggccgagagcctgaaggagaccttcgaccccgagaaggagaccatccccgacatcgaccccaacgccaagctgctgcagccccccgcccccatcatgcccctggacaccaactggcccctgctgaccgtgagcaagggcttcttcgagggcaccatcgccagcaagggcaagggcggcgccctggccgccgacatcgacatcgacaccgtgggcaccgagggctggggcgaggacgccgagctgcagctggacgaggacggcttcgtggaggccaccgagggcctgggcgacgacgccctgggcaagggccaggaggagggcggcggctgggacgtggaggaggacctggagctgccccccgagctggacatcagccccggcgccgccggcggcgccgaggacggcttcttcgtgccccccaccaagggcaccagccccacccagatctggtgcaacaacagccagctgcccgtggaccacatcctggccggcagcttcgagaccgccatgagactgctgcacgaccaggtgggcgtgatccagttcggcccctacaagcagctgttcctgcagacctacgccagaggcagaaccacctaccaggccctgccctgcctgcccagcatgtacggctaccccaacagaaactggaaggacgccggcctgaagaacggcgtgcccgccgtgggcctgaagctgaacgacctgatccagagactgcagctgtgctaccagctgaccaccgtgggcaagttcgaggaggccgtggagaagttcagaagcatcctgctgagcgtgcccctgctggtggtggacaacaagcaggagatcgccgaggcccagcagctgatcaccatctgcagagagtacatcgtgggcctgagcgtggagaccgagagaaagaagctgcccaaggagaccctggagcagcagaagagaatctgcgagatggccgcctacttcacccacagcaacctgcagcccgtgcacatgatcctggtgctgagaaccgccctgaacctgttcttcaagctgaagaacttcaagaccgccgccaccttcgccagaagactgctggagctgggccccaagcccgaggtggcccagcagaccagaaagatcctgagcgcctgcgagaagaaccccaccgacgcctaccagctgaactacgacatgcacaaccccttcgacatctgcgccgccagctacagacccatctacagaggcaagcccgtggagaagtgccccctgagcggcgcctgctacagccccgagttcaagggccagatctgcagagtgaccaccgtgaccgagatcggcaaggacgtgatcggcctgagaatcagccccctgcagttcagatag

SEQ ID NO: 77115 - DNA, 2862 bp, synthetic construct
  misc_feature 1..2862: note = Description of Artificial Sequence: Synthetic coding sequence
  source 1..2862: mol_type = other DNA
atgaccgccgccgagaacgtgtgctacaccctgatcaacgtgcccatggacagcgagccccccagcgagatcagcctgaagaacgacctggagaagggcgacgtgaagagcaagaccgaggccctgaagaaggtgatcatcatgatcctgaacggcgagaagctgcccggcctgctgatgaccatcatcagattcgtgctgcccctgcaggaccacaccatcaagaagctgctgctggtgttctgggagatcgtgcccaagaccacccccgacggcagactgctgcacgagatgatcctggtgtgcgacgcctacagaaaggacctgcagcaccccaacgagttcatcagaggcagcaccctgagattcctgtgcaagctgaaggaggccgagctgctggagcccctgatgcccgccatcagagcctgcctggagcacagacacagctacgtgagaagaaacgccgtgctggccatctacaccatctacagaaacttcgagcacctgatccccgacgcccccgagctgatccacgacttcctggtgaacgagaaggacgccagctgcaagagaaacgccttcatgatgctgatccacgccgaccaggacagagccctggactacctgagcacctgcatcgaccaggtgcagaccttcggcgacatcctgcagctggtgatcgtggagctgatctacaaggtgtgccacgccaaccccagcgagagagccagattcatcagatgcatctacaacctgctgcagagcagcagccccgccgtgaagtacgaggccgccggcaccctggtgaccctgagcagcgcccccaccgccatcaaggccgccgcccagtgctacatcgacctgatcatcaaggagagcgacaacaacgtgaagctgatcgtgctggacagactgatcgagctgaaggagcaccccgcccacgagagagtgctgcaggacctggtgatggacatcctgagagtgctgagcacccccgacctggaggtgagaaagaagaccctgcagctggccctggacctggtgagcagcagaaacgtggaggagctggtgatcgtgctgaagaaggaggtgatcaagaccaacaacgtgagcgagcacgaggacaccgacaagtacagacagctgctggtgagaaccctgcacagctgcagcgtgagattccccgacatggccgccaacgtgatccccgtgctgatggagttcctgagcgacaacaacgaggccgccgccgccgacgtgctggagttcgtgagagaggccatccagagattcgacaacctgagaatgctgatcgtggagaagatgctggaggtgttccacgccatcaagagcgtgaagatctacagaggcgccctgtggatcctgggcgagtactgcagcaccaaggaggacatccagagcgtgatgaccgagatcagaagaagcctgggcgagatccccatcgtggagagcgagatcaagaaggaggccggcgagctgaagcccgaggaggagatcaccgtgggccccgtgcagaagctggtgaccgagatgggcacctacgccacccagagcgccctgagcagcagcagacccaccaagaaggaggaggacagaccccccctgagaggcttcctgctggacggcgacttcttcgtggccgccagcctggccaccaccctgaccaagatcgccctgagatacgtggccctggtgcaggagaagaagaagcagaacagcttcgtggccgaggccatgctgctgatggccaccatcctgcacctgggcaagagcagcctgcccaagaagcccatcaccgacgacgacgtggacagaatcagcctgtgcctgaaggtgctgagcgagtgcagccccctgatgaacgacatcttcaacaaggagtgcagacagagcctgagccacatgctgagcgccaagctggaggaggagaagctgagccagaagaaggagagcgagaagagaaacgtgaccgtgcagcccgacgaccccatcagcttcatgcagctgaccgccaagaacgagatgaactgcaaggaggaccagttccagctgagcctgctggccgccatgggcaacacccagagaaaggaggccgccgaccccctggccagcaagctgaacaaggtgacccagctgaccggcttcagcgaccccgtgtacgccgaggcctacgtgcacgtgaaccagtacgacatcgtgctggacgtgctggtggtgaaccagaccagcgacaccctgcagaactgcaccctggagctggccaccctgggcgacctgaagctggtggagaagcccagccccctgaccctggccccccacgacttcgccaacatcaaggccaacgtgaaggtggccagcaccgagaacggcatcatcttcggcaacatcgtgtacgacgtgagcggcgccgccagcgacagaaactgcgtggtgctgagcgacatccacatcgacatcatggactacatccagcccgccacctgcaccgacgccgagttcagacagatgtgggccgagttcgagtgggagaacaaggtgaccgtgaacaccaacatggtggacctgaacgactacctgcagcacatcctgaagagcaccaacatgaagtgcctgacccccgagaaggccctgagcggctactgcggcttcatggccgccaacctgtacgccagaagcatcttcggcgaggacgccctggccaacgtgagcatcgagaagcccatccaccagggccccgacgccgccgtgaccggccacatcagaatcagagccaagagccagggcatggccctgagcctgggcgacaagatcaacctgagccagaagaagaccagcatctag

SEQ ID NO: 77116 - DNA, 2862 bp, synthetic construct; identical to SEQ ID NO: 77115
  misc_feature 1..2862: note = Description of Artificial Sequence: Synthetic coding sequence
  source 1..2862: mol_type = other DNA

SEQ ID NO: 77117 - DNA, 2721 bp, synthetic construct
  misc_feature 1..2721: note = Description of Artificial Sequence: Synthetic coding sequence
  source 1..2721: mol_type = other DNA
atgcccctgagactggacatcaagagaaagctgaccgccagaagcgacagagtgaagagcgtggacctgcaccccaccgagccctggatgctggccagcctgtacaacggcagcgtgtgcgtgtggaaccacgagacccagaccctggtgaagaccttcgaggtgtgcgacctgcccgtgagagccgccaagttcgtggccagaaagaactgggtggtgaccggcgccgacgacatgcagatcagagtgttcaactacaacaccctggagagagtgcacatgttcgaggcccacagcgactacatcagatgcatcgccgtgcaccccacccagcccttcatcctgaccagcagcgacgacatgctgatcaagctgtgggactgggacaagaagtggagctgcagccaggtgttcgagggccacacccactacgtgatgcagatcgtgatcaaccccaaggacaacaaccagttcgccagcgccagcctggacagaaccatcaaggtgtggcagctgggcagcagcagccccaacttcaccctggagggccacgagaagggcgtgaactgcatcgactactacagcggcggcgacaagccctacctgatcagcggcgccgacgacagactggtgaagatctgggactaccagaacaagacctgcgtgcagaccctggagggccacgcccagaacgtgagctgcgccagcttccaccccgagctgcccatcatcatcaccggcagcgaggacggcaccgtgagaatctggcacagcagcacctacagactggagagcaccctgaactacggcatggagagagtgtggtgcgtggccagcctgagaggcagcaacaacgtggccctgggctacgacgagggcagcatcatcgtgaagctgggcagagaggagcccgccatgagcatggacgccaacggcaagatcatctgggccaagcacagcgaggtgcagcaggccaacctgaaggccatgggcgacgccgagatcaaggacggcgagagactgcccctggccgtgaaggacatgggcagctgcgagatctacccccagaccatccagcacaaccccaacggcagattcgtggtggtgtgcggcgacggcgagtacatcatctacaccgccatggccctgagaaacaagagcttcggcagcgcccaggagttcgcctgggcccacgacagcagcgagtacgccatcagagagagcaacagcatcgtgaagatcttcaagaacttcaaggagaagaagagcttcaagcccgacttcggcgccgagagcatctacggcggcttcctgctgggcgtgagaagcgtgaacggcctggccttctacgactgggacaacaccgagctgatcagaagaatcgagatccagcccaagcacatcttctggagcgacagcggcgagctggtgtgcatcgccaccgaggagagcttcttcatcctgaagtacctgagcgagaaggtgctggccgcccaggagacccacgagggcgtgaccgaggacggcatcgaggacgccttcgaggtgctgggcgagatccaggagatcgtgaagaccggcctgtgggtgggcgactgcttcatctacaccagcagcgtgaacagactgaactactacgtgggcggcgagatcgtgaccatcgcccacctggacagaaccatgtacctgctgggctacatccccaaggacaacagactgtacctgggcgacaaggagctgaacatcatcagctacagcctgctggtgagcgtgctggagtaccagaccgccgtgatgagaagagacttcagcatggccgacaaggtgctgcccaccatccccaaggagcagagaaccagagtggcccacttcctggagaagcagggcttcaagcagcaggccctgaccgtgagcaccgaccccgagcacagattcgagctggccctgcagctgggcgagctgaagatcgcctaccagctggccgtggaggccgagagcgagcagaagtggaagcagctggccgagctggccatcagcaagtgccagttcggcctggcccaggagtgcctgcaccacgcccaggactacggcggcctgctgctgctggccaccgccagcggcaacgccaacatggtgaacaagctggccgagggcgccgagagagacggcaagaacaacgtggccttcatgagctacttcctgcagggcaaggtggacgcctgcctggagctgctgatcagaaccggcagactgcccgaggccgccttcctggccagaacctacctgcccagccaggtgagcagagtggtgaagctgtggagagagaacctgagcaaggtgaaccagaaggccgccgagagcctggccgaccccaccgagtacgagaacctgttccccggcctgaaggaggccttcgtggtggaggagtgggtgaaggagacccacgccgacctgtggcccgccaagcagtaccccctggtgacccccaacgaggagagaaacgtgatggaggagggcaaggacttccagcccagcagaagcaccgcccagcaggagctggacggcaagcccgccagccccacccccgtgatcgtggccagccacaccgccaacaaggaggagaagagcctgctggagctggaggtggacctggacaacctggagctggaggacatcgacaccaccgacatcaacctggacgaggacatcctggacgactag

SEQ ID NO: 77118 - DNA, 2634 bp, synthetic construct
  misc_feature 1..2634: note = Description of Artificial Sequence: Synthetic coding sequence
  source 1..2634: mol_type = other DNA
atgctggccagcctgtacaacggcagcgtgtgcgtgtggaaccacgagacccagaccctggtgaagaccttcgaggtgtgcgacctgcccgtgagagccgccaagttcgtggccagaaagaactgggtggtgaccggcgccgacgacatgcagatcagagtgttcaactacaacaccctggagagagtgcacatgttcgaggcccacagcgactacatcagatgcatcgccgtgcaccccacccagcccttcatcctgaccagcagcgacgacatgctgatcaagctgtgggactgggacaagaagtggagctgcagccaggtgttcgagggccacacccactacgtgatgcagatcgtgatcaaccccaaggacaacaaccagttcgccagcgccagcctggacagaaccatcaaggtgtggcagctgggcagcagcagccccaacttcaccctggagggccacgagaagggcgtgaactgcatcgactactacagcggcggcgacaagccctacctgatcagcggcgccgacgacagactggtgaagatctgggactaccagaacaagacctgcgtgcagaccctggagggccacgcccagaacgtgagctgcgccagcttccaccccgagctgcccatcatcatcaccggcagcgaggacggcaccgtgagaatctggcacagcagcacctacagactggagagcaccctgaactacggcatggagagagtgtggtgcgtggccagcctgagaggcagcaacaacgtggccctgggctacgacgagggcagcatcatcgtgaagctgggcagagaggagcccgccatgagcatggacgccaacggcaagatcatctgggccaagcacagcgaggtgcagcaggccaacctgaaggccatgggcgacgccgagatcaaggacggcgagagactgcccctggccgtgaaggacatgggcagctgcgagatctacccccagaccatccagcacaaccccaacggcagattcgtggtggtgtgcggcgacggcgagtacatcatctacaccgccatggccctgagaaacaagagcttcggcagcgcccaggagttcgcctgggcccacgacagcagcgagtacgccatcagagagagcaacagcatcgtgaagatcttcaagaacttcaaggagaagaagagcttcaagcccgacttcggcgccgagagcatctacggcggcttcctgctgggcgtgagaagcgtgaacggcctggccttctacgactgggacaacaccgagctgatcagaagaatcgagatccagcccaagcacatcttctggagcgacagcggcgagctggtgtgcatcgccaccgaggagagcttcttcatcctgaagtacctgagcgagaaggtgctggccgcccaggagacccacgagggcgtgaccgaggacggcatcgaggacgccttcgaggtgctgggcgagatccaggagatcgtgaagaccggcctgtgggtgggcgactgcttcatctacaccagcagcgtgaacagactgaactactacgtgggcggcgagatcgtgaccatcgcccacctggacagaaccatgtacctgctgggctacatccccaaggacaacagactgtacctgggcgacaaggagctgaacatcatcagctacagcctgctggtgagcgtgctggagtaccagaccgccgtgatgagaagagacttcagcatggccgacaaggtgctgcccaccatccccaaggagcagagaaccagagtggcccacttcctggagaagcagggcttcaagcagcaggccctgaccgtgagcaccgaccccgagcacagattcgagctggccctgcagctgggcgagctgaagatcgcctaccagctggccgtggaggccgagagcgagcagaagtggaagcagctggccgagctggccatcagcaagtgccagttcggcctggcccaggagtgcctgcaccacgcccaggactacggcggcctgctgctgctggccaccgccagcggcaacgccaacatggtgaacaagctggccgagggcgccgagagagacggcaagaacaacgtggccttcatgagctacttcctgcagggcaaggtggacgcctgcctggagctgctgatcagaaccggcagactgcccgaggccgccttcctggccagaacctacctgcccagccaggtgagcagagtggtgaagctgtggagagagaacctgagcaaggtgaaccagaaggccgccgagagcctggccgaccccaccgagtacgagaacctgttccccggcctgaaggaggccttcgtggtggaggagtgggtgaaggagacccacgccgacctgtggcccgccaagcagtaccccctggtgacccccaacgaggagagaaacgtgatggaggagggcaaggacttccagcccagcagaagcaccgcccagcaggagctggacggcaagcccgccagccccacccccgtgatcgtggccagccacaccgccaacaaggaggagaagagcctgctggagctggaggtggacctggacaacctggagctggaggacatcgacaccaccgacatcaacctggacgaggacatcctggacgactag

SEQ ID NO: 77119 - DNA, 927 bp, synthetic construct
  misc_feature 1..927: note = Description of Artificial Sequence: Synthetic coding sequence
  source 1..927: mol_type = other DNA
atggccccccccgcccccggccccgccagcggcggcagcggcgaggtggacgagctgttcgacgtgaagaacgccttctacatcggcagctaccagcagtgcatcaacgaggcccagagagtgaagctgagcagccccgagagagacgtggagagagacgtgttcctgtacagagcctacctggcccagagaaagttcggcgtggtgctggacgagatcaagcccagcagcgcccccgagctgcaggccgtgagaatgttcgccgactacctggcccacgagagcagaagagacagcatcgtggccgagctggacagagagatgagcagaagcgtggacgtgaccaacaccaccttcctgctgatggccgccagcatctacctgcacgaccagaaccccgacgccgccctgagagccctgcaccagggcgacagcctggagtgcaccgccatgaccgtgcagatcctgctgaagctggacagactggacctggccagaaaggagctgaagagaatgcaggacctggacgaggacgccaccctgacccagctggccaccgcctgggtgagcctggccaccggcggcgagaagctgcaggacgcctactacatcttccaggagatggccgacaagtgcagccccaccctgctgctgctgaacggccaggccgcctgccacatggcccagggcagatgggaggccgccgagggcctgctgcaggaggccctggacaaggacagcggctaccccgagaccctggtgaacctgatcgtgctgagccagcacctgggcaagccccccgaggtgaccaacagatacctgagccagctgaaggacgcccacagaagccaccccttcatcaaggagtaccaggccaaggagaacgacttcgacagactggtgctgcagtacgcccccagcgcctag

SEQ ID NO: 77120 - DNA, 771 bp, synthetic construct
  misc_feature 1..771: note = Description of Artificial Sequence: Synthetic coding sequence
  source 1..771: mol_type = other DNA
atggccccccccgcccccggccccgccagcggcggcagcggcgaggtggacgagctgttcgacgtgaagaacgccttctacatcggcagctaccagcagtgcatcaacgaggcccagagagtgaagctgagcagccccgagagagacgtggagagagacgtgttcctgtacagagcctacctggcccagagaaagttcggcgtggtgctggacgagatcaagcccagcagcgcccccgagctgcaggccgtgagaatgttcgccgactacctggcccacgagagcagaagagacagcatcgtggccgagctggacagagagatgagcagaagcgtggacgtgaccaacaccaccttcctgctgatggccgccagcatctacctgcacgaccagaaccccgacgccgccctgagagccctgcaccagggcgacagcctggagtgcaccgccatgaccgtgcagatcctgctgaagctggacagactggacctggccagaaaggagctgaagagaatgcaggacctggacgaggacgccaccctgacccagctggccaccgcctgggtgagcctggccaccgacagcggctaccccgagaccctggtgaacctgatcgtgctgagccagcacctgggcaagccccccgaggtgaccaacagatacctgagccagctgaaggacgcccacagaagccaccccttcatcaaggagtaccaggccaaggagaacgacttcgacagactggtgctgcagtacgcccccagcgcctag

SEQ ID NO: 77121 - DNA, 774 bp, synthetic construct
  misc_feature 1..774: note = Description of Artificial Sequence: Synthetic coding sequence
  source 1..774: mol_type = other DNA
atggccccccccgcccccggccccgccagcggcggcagcggcgaggtggacgagctgttcgacgtgaagaacgccttctacatcggcagctaccagcagtgcatcaacgaggcccagagagtgaagctgagcagccccgagagagacgtggagagagacgtgttcctgtacagagcctacctggcccagagaaagttcggcgtggtgctggacgagatcaagcccagcagcgcccccgagctgcaggccgtgagaatgttcgccgactacctggcccacgagagcagaagcaccgccatgaccgtgcagatcctgctgaagctggacagactggacctggccagaaaggagctgaagagaatgcaggacctggacgaggacgccaccctgacccagctggccaccgcctgggtgagcctggccaccggcggcgagaagctgcaggacgcctactacatcttccaggagatggccgacaagtgcagccccaccctgctgctgctgaacggccaggccgcctgccacatggcccagggcagatgggaggccgccgagggcctgctgcaggaggccctggacaaggacagcggctaccccgagaccctggtgaacctgatcgtgctgagccagcacctgggcaagccccccgaggtgaccaacagatacctgagccagctgaaggacgcccacagaagccaccccttcatcaaggagtaccaggccaaggagaacgacttcgacagactggtgctgcagtacgcccccagcgcctag

SEQ ID NO: 77122 - DNA, 924 bp, synthetic construct
  misc_feature 1..924: note = Description of Artificial Sequence: Synthetic coding sequence
  source 1..924: mol_type = other DNA
atggccccccccgcccccgccggcctgagaggcagcggcgaggtggacgagctgttcgacgtgaagaacgccttctacatcggcagctaccagcagtgcatcaacgaggcccagagagtgaagctgagcagccccgagagagacgtggagagagacgtgttcctgtacagagcctacctggcccagagaaagttcggcgtggtgctggacgagatcaagcccagcagcgcccccgagctgcaggccgtgagaatgttcgccgactacctggcccacgagagcagaagagacagcatcgtggccgagctggacagagagatgagcagaagcgtggacgtgaccaacaccaccttcctgctgatggccgccagcatctacctgcacgaccagaaccccgacgccgccctgagagccctgcaccagggcgacagcctggagtgcaccgccatgaccgtgcagatcctgctgaagctggacagactggacctggccagaaaggagctgaagagaatgcaggacctggacgaggacgccaccctgacccagctggccaccgcctgggtgagcctggccaccggcggcgagaagctgcaggacgcctactacatcttccaggagatggccgacaagtgcagccccaccctgctgctgctgaacggccaggccgcctgccacatggcccagggcagatgggaggccgccgagggcctgctgcaggaggccctggacaaggacagcggctaccccgagaccctggtgaacctgatcgtgctgagccagcacctgggcaagccccccgaggtgaccaacagatacctgagccagctgaaggacgcccacagaagccaccccttcatcaaggagtaccaggccaaggagaacgacttcgacagactggtgctgcagtacgcccccagcgcctag

SEQ ID NO: 77123 - DNA, 741 bp, synthetic construct
  misc_feature 1..741: note = Description of Artificial Sequence: Synthetic coding sequence
  source 1..741: mol_type = other DNA
atgatcaagaagttcgacaagaaggacgaggagagcggcagcggcagcaaccccttccagcacctggagaagagcgccgtgctgcaggaggccagaatcttcaacgagacccccatcaaccccagaagatgcctgcacatcctgaccaagatcctgtacctgctgaaccagggcgagcacttcggcaccaccgaggccaccgaggccttcttcgccatgaccagactgttccagagcaacgaccagaccctgagaagaatgtgctacctgaccatcaaggagatggccaccatcagcgaggacgtgatcatcgtgaccagcagcctgaccaaggacatgaccggcaaggaggacgtgtacagaggccccgccatcagagccctgtgcagaatcaccgacggcaccatgctgcaggccatcgagagatacatgaagcaggccatcgtggacaaggtgagcagcgtgagcagcagcgccctggtgagcagcctgcacatgatgaagatcagctacgacgtggtgaagagatggatcaacgaggcccaggaggccgccagcagcgacaacatcatggtgcagtaccacgccctgggcgtgctgtaccacctgagaaagaacgacagactggccgtgagcaagatgctgaacaagttcaccaagagcggcctgaagagccagttcgcctactgcatgctgatcagaatcgccagcagactgctgaaggagaccgaggacggctag

SEQ ID NO: 77124 - DNA, 468 bp, synthetic construct
  misc_feature 1..468: note = Description of Artificial Sequence: Synthetic coding sequence
  source 1..468: mol_type = other DNA
tgagccggcagcttcagctgcaccatgaagttcaccgtgagagactgcgaccccaacaccggcgtgcccgacgaggacggctacgacgacgagtacgtgctggaggacctggaggtgaccgtgagcgaccacatccagaaggtgctgaagcccaacttcgccgccgcctgggaggaggtgggcgacaccttcgagaaggaggagaccttcgccctgagcagcaccaagaccctggaggaggccgtgaacaacatcatcaccttcctgggcatgcagccctgcgagagaagcgacaaggtgcccgagaacaagaacagccacagcctgtacctggccggcatcttcagaggcggctacgacctgctggtgagaagcagactggccctggccgacggcgtgaccatgcaggtgaccgtgagaagcaaggagagaacccccgtggacgtgatcctggccagcgtgggctag

SEQ ID NO: 77125 - DNA, 741 bp, synthetic construct; identical to SEQ ID NO: 77123
  misc_feature 1..741: note = Description of Artificial Sequence: Synthetic coding sequence
  source 1..741: mol_type = other DNA

SEQ ID NO: 77126 - DNA, 1080 bp, synthetic construct
  misc_feature 1..1080: note = Description of Artificial Sequence: Synthetic coding sequence
  source 1..1080: mol_type = other DNA
atgtacttcaagagagccgccagagccttccccgtgctgctgaccggcgccggcaagaccaccctgctgaactacatcctgaccgagcagcacagcaagagagtggccgtgatcctgaacgagttcggcgagggcagcgccctggagaagagcctggccgtgagccagggcggcgagctgtacgaggagtggctggagctgagaaacggctgcctgtgctgcagcgtgaaggacagcggcctgagagccatcgagaacctgatgcagaagaagggcaagttcgactacatcctgctggagaccaccggcctggccgaccccggcgccgtggccagcatgttctgggtggacgccgagctgggcagcgacatctacctggacggcatcatcaccatcgtggacagcaagtacggcctgaagcacctgaccgaggagaagcccgacggcctgatcaacgaggccaccagacaggtggccctggccgacgccatcctgatcaacaagaccgacctggtgcccgaggaggacgtgaagaagctgagaaccaccatcagaagcatcaacggcctgggccagatcctggagacccagagaagcagagtggacctgagcaacgtgctggacctgcacgccttcgacagcctgagcggcatcagcctgcagaagaagctgcagcacgtgcccggcacccagccccacctggaccagagcatcgtgaccatcaccttcgaggtgcccggcaacgccaaggaggagcacctgaacatgttcatccagaacctgctgtgggagaagaacgtgagaaacaaggacaaccactgcatggaggtgatcagactgaagggcctggtgagcatcaaggacaagagccagcaggtgatcgtgcagggcgtgcacgagctgtacgacctggaggagacccccgtgagctggaaggacgacaccgagagaaccaacagactggtgctgctgggcagaaacctggacaaggacatcctgaagcagctgttcatcgccaccgtgaccgagaccgagaagcagtggaccaccagattccaggaggaccaggtgtgcacctag

SEQ ID NO: 77127 - DNA, 1188 bp, synthetic construct
  misc_feature 1..1188: note = Description of Artificial Sequence: Synthetic coding sequence
  source 1..1188: mol_type = other DNA
atgctgcccgccgtgggcagcgccgacgaggaggaggaccccgccgaggaggactgccccgagctggtgcccatcgagaccacccagagcgaggaggaggagaagagcggcctgggcgccaagatccccgtgaccatcatcaccggctacctgggcgccggcaagaccaccctgctgaactacatcctgaccgagcagcacagcaagagagtggccgtgatcctgaacgagttcggcgagggcagcgccctggagaagagcctggccgtgagccagggcggcgagctgtacgaggagtggctggagctgagaaacggctgcctgtgctgcagcgtgaaggacagcggcctgagagccatcgagaacctgatgcagaagaagggcaagttcgactacatcctgctggagaccaccggcctggccgaccccggcgccgtggccagcatgttctgggtggacgccgagctgggcagcgacatctacctggacggcatcatcaccatcgtggacagcaagtacggcctgaagcacctgaccgaggagaagcccgacggcctgatcaacgaggccaccagacaggtggccctggccgacgccatcctgatcaacaagaccgacctggtgcccgaggaggacgtgaagaagctgagaaccaccatcagaagcatcaacggcctgggccagatcctggagacccagagaagcagagtggacctgagcaacgtgctggacctgcacgccttcgacagcctgagcggcatcagcctgcagaagaagctgcagcacgtgcccggcacccagccccacctggaccagagcatcgtgaccatcaccttcgaggtgcccggcaacgccaaggaggagcacctgaacatgttcatccagaacctgctgtgggagaagaacgtgagaaacaaggacaaccactgcatggaggtgatcagactgaagggcctggtgagcatcaaggacaagagccagcaggtgatcgtgcagggcgtgcacgagctgtacgacctggaggagacccccgtgagctggaaggacgacaccgagagaaccaacagactggtgctgctgggcagaaacctggacaaggacatcctgaagcagctgttcatcgccaccgtgaccgagaccgagaagcagtggaccaccagattccaggaggaccaggtgtgcacctag

SEQ ID NO: 77128 - DNA, 543 bp, synthetic construct
  misc_feature 1..543: note = Description of Artificial Sequence: Synthetic coding sequence
  source 1..543: mol_type = other DNA
atgctgcccgccgtgggcagcgccgacgaggaggaggaccccgccgaggaggactgccccgagctggtgcccatcgagaccacccagagcgaggaggaggagaagagcggcctgggcgccaagatccccgtgaccatcatcaccggctacctgggcgccggcaagaccaccctgctgaactacatcctgaccgagcagcacagcaagagagtggccgtgatcctgaacgagttcggcgagggcagcgccctggagaagagcctggccgtgagccagggcggcgagctgtacgaggagtggctggagctgagaaacggctgcctgtgctgcagcgtgaaggacagcggcctgagagccatcgagaacctgatgcagaagaagggcaagttcgactacatcctgctggagaccaccggcctggccgaccccggcgccgtggccagcatgttctgggtggacgccgagctgggcagcgacatctacctggacggcatcatcaccatcgtggacagcaagtacggcctgaaggtgaagtaccactag

SEQ ID NO: 77129 - DNA, 1044 bp, synthetic construct
  misc_feature 1..1044: note = Description of Artificial Sequence: Synthetic coding sequence
  source 1..1044: mol_type = other DNA
atgctgcccgccgtgggcagcgccgacgaggaggaggaccccgccgaggaggactgccccgagctggtgcccatcgagaccacccagagcgaggaggaggagaagagcggcctgggcgccaagatccccgtgaccatcatcaccggctacctgggcgccggcaagaccaccctgctgaactacatcctgaccgagcagcacagcaagagagtggccgtgatcctgaacgagttcggcgagggcagcgccctggagaagagcctggccgtgagccagggcggcgagctgtacgaggagtggctggagctgagaaacggctgcctgtgctgcagcgtgaaggacagcggcctgagagccatcgagaacctgatgcagaagaagggcaagttcgactacatcctgctggagaccaccggcctggccgaccccggcgccgtggccagcatgttctgggtggacgccgagctgggcagcgacatctacctggacggcatcatcaccatcgtggacagcaagtacggcctgaagcacctgaccgaggagaagcccgacggcctgatcaacgaggccaccagaagcatcaacggcctgggccagatcctggagacccagagaagcagcctgcagaagaagctgcagcacgtgcccggcacccagccccacctggaccagagcatcgtgaccatcaccttcgaggtgcccggcaacgccaaggaggagcacctgaacatgttcatccagaacctgctgtgggagaagaacgtgagaaacaaggacaaccactgcatggaggtgatcagactgaagggcctggtgagcatcaaggacaagagccagcaggtgatcgtgcagggcgtgcacgagctgtacgacctggaggagacccccgtgagctggaaggacgacaccgagagaaccaacagactggtgctgctgggcagaaacctggacaaggacatcctgaagcagctgttcatcgccaccgtgaccgagaccgagaagcagtggaccaccagattccaggaggaccaggtgtgcacctag

SEQ ID NO: 77130 - DNA, 753 bp, synthetic construct
  misc_feature 1..753: note = Description of Artificial Sequence: Synthetic coding sequence
  source 1..753: mol_type = other DNA
atgctgcccgccgtgggcagcgccgacgaggaggaggaccccgccgaggaggactgccccgagctggtgcccatcgagaccacccagagcgaggaggaggagaagagcggcctgggcgccaagatccccgtgaccatcatcaccggctacctgggcgccggcaagaccaccctgctgaactacatcctgaccgagcagcacagcaagagagtggccgtgatcctgaacgagttcggcgagggcagcgccctggagaagagcctggccgtgagccagggcggcgagctgtacgaggagtggctggagctgagaaacggctgcctgtgctgcagcgtgaaggacagcggcctgagagccatcgagaacctgatgcagaagaagggcaagttcgactacatcctgctggagaccaccggcctggccgaccccggcgccgtggccagcatgttctgggtggacgccgagctgggcagcgacatctacctggacggcatcatcaccatcgtggacagcaagtacggcctgaagcacctgaccgaggagaagcccgacggcctgatcaacgaggccaccagacaggtggccctggccgacgccatcctgatcaacaagaccgacctggtgcccgaggaggacgtgaagaagctgagaaccaccatcagatacgagatgatcagcgtgctgagcgcctacagaagcatgctgtacacccagaacatcttctacagcgactgctgccccgtggagacctag

SEQ ID NO: 77131 - DNA, 234 bp, synthetic construct
  misc_feature 1..234: note = Description of Artificial Sequence: Synthetic coding sequence
  source 1..234: mol_type = other DNA
atgtacttcaagagagccgccagagccttccccgtgctgctgaccggcgccggcaagaccaccctgctgaactacatcctgaccgagcagcacagcaagagagtggccgtgatcctgaacgagttcggcgagggcagcgccctggagaagagcctggccgtgagccagggcggcgagctgtacgaggagtggctggagctgagaaacggctgcctgtgctgcagcgtgaagtag

SEQ ID NO: 77132 - DNA, 342 bp, synthetic construct
  misc_feature 1..342: note = Description of Artificial Sequence: Synthetic coding sequence
  source 1..342: mol_type = other DNA
atgctgcccgccgtgggcagcgccgacgaggaggaggaccccgccgaggaggactgccccgagctggtgcccatcgagaccacccagagcgaggaggaggagaagagcggcctgggcgccaagatccccgtgaccatcatcaccggctacctgggcgccggcaagaccaccctgctgaactacatcctgaccgagcagcacagcaagagagtggccgtgatcctgaacgagttcggcgagggcagcgccctggagaagagcctggccgtgagccagggcggcgagctgtacgaggagtggctggagctgagaaacggctgcctgtgctgcagcgtgaagtag

SEQ ID NO: 77133 - DNA, 1131 bp, synthetic construct
  misc_feature 1..1131: note = Description of Artificial Sequence: Synthetic coding sequence
  source 1..1131: mol_type = other DNA
atgctgcccgccgtgggcagcgccgacgaggaggaggaccccgccgaggaggactgccccgagctggtgcccatcgagaccacccagagcgaggaggaggagaagagcggcctgggcgccaagatccccgtgaccatcatcaccggctacctgggcgccggcaagaccaccctgctgaactacatcctgaccgagcagcacagcaagagagtggccgtgatcctgaacgagttcggcgagggcagcgccctggagaagagcctggccgtgagccagggcggcgagctgtacgaggagtggctggagctgagaaacggctgcctgtgctgcagcgtgaaggacagcggcctgagagccatcgagaacctgatgcagaagaagggcaagttcgactacatcctgctggagaccaccggcctggccgaccccggcgccgtggccagcatgttctgggtggacgccgagctgggcagcgacatctacctggacggcatcatcaccatcgtggacagcaagtacggcctgaagcacctgaccgaggagaagcccgacggcctgatcaacgaggccaccagacaggtggccctggccgacgccatcctgatcaacaagaccgacctggtgcccgaggaggacgtgaagaagctgagaaccaccatcagaagcatcaacggcctgggccagatcctggagacccagagaagcagcctgcagaagaagctgcagcacgtgcccggcacccagccccacctggaccagagcatcgtgaccatcaccttcgaggtgcccggcaacgccaaggaggagcacctgaacatgttcatccagaacctgctgtgggagaagaacgtgagaaacaaggacaaccactgcatggaggtgatcagactgaagggcctggtgagcatcaaggacaagagccagcaggtgatcgtgcagggcgtgcacgagctgtacgacctggaggagacccccgtgagctggaaggacgacaccgagagaaccaacagactggtgctgctgggcagaaacctggacaaggacatcctgaagcagctgttcatcgccaccgtgaccgagaccgagaagcagtggaccaccagattccaggaggaccaggtgtgcacctag

SEQ ID NO: 77134 - DNA, 483 bp, synthetic construct
  misc_feature 1..483: note = Description of Artificial Sequence: Synthetic coding sequence
  source 1..483: mol_type = other DNA
atgctgcccgccgtgggcagcgccgacgaggaggaggaccccgccgaggaggactgccccgagctggtgcccatcgagaccacccagagcgaggaggaggagaagagcggcctgggcgccaagatccccgtgaccatcatcaccggctacctgggcgccggcaagaccaccctgctgaactacatcctgaccgagcagcacagcaagagagtggccgtgatcctgaacgagttcggcgagggcagcgccctggagaagagcctggccgtgagccagggcggcgagctgtacgaggagtggctggagctgagaaacggctgcctgtgctgcagcgtgaaggacagcggcctgagagccatcgagaacctgatgcagaagaagggcaagttcgactacatcctgctggagaccaccggcctggccgaccccggcatcatcaccatcgtggacagcaagtacggcctgaaggtgaagtaccactag

SEQ ID NO: 77135 - DNA, 441 bp, synthetic construct
  misc_feature 1..441: note = Description of Artificial Sequence: Synthetic coding sequence
  source 1..441: mol_type = other DNA
atgtacttcaagagagccgccagagccttccccgtgctgctgaccggcgccggcaagaccaccctgctgaactacatcctgaccgagcagcacagcaagagagtggccgtgatcctgaacgagttcggcgagggcagcgccctggagaagagcctggccgtgagccagggcggcgagctgtacgaggagtggctggagctgagaaacggctgcctgtgctgcagcgtgaaggacagcggcctgagagccatcgagaacctgatgcagaagaagggcaagttcgactacatcctgctggagaccaccggcctggccgaccccggcgccgtggccagcatgttctgggtggacgccgagctgggcagcgacatctacctggacggcatcatcaccatcgtggacagcaagtacggcctgaaggccaagaactggaccacctag

SEQ ID NO: 77136 - DNA, 1188 bp, synthetic construct
  misc_feature 1..1188: note = Description of Artificial Sequence: Synthetic coding sequence
  source 1..1188: mol_type = other DNA
atgctgcccgccgtgggcagcgccgacgaggaggaggaccccgccgaggaggactgccccgagctggtgcccatggagaccacccagagcgaggaggaggagaagagcggcctgggcgccaagatccccgtgaccatcatcaccggctacctgggcgccggcaagaccaccctgctgaactacatcctgaccgagcagcacagcaagagagtggccgtgatcctgaacgagttcggcgagggcagcgccctggagaagagcctggccgtgagccagggcggcgagctgtacgaggagtggctggagctgagaaacggctgcctgtgctgcagcgtgaaggacaacggcctgagagccatcgagaacctgatgcagaagaagggcaagttcgactacatcctgctggagaccaccggcctggccgaccccggcgccgtggccagcatgttctgggtggacgccgagctgggcagcgacatctacctggacggcatcatcaccatcgtggacagcaagtacggcctgaagcacctggccgaggagaagcccgacggcctgatcaacgaggccaccagacaggtggccctggccgacgccatcctgatcaacaagaccgacctggtgcccgaggaggacgtgaagaagctgagagccaccatcagaagcatcaacggcctgggccagatcctggagacccagagaagcagagtggacctgagcaacgtgctggacctgcacgccttcgacagcctgagcggcatcagcctgcagaagaagctgcagcacgtgcccggcacccagccccacctggaccagagcatcgtgaccatcaccttcgaggtgcccggcaacgccaaggaggagcacctgaacatgttcatccagaacctgctgtgggagaagaacgtgagaaacaaggacaaccactgcatggaggtgatcagactgaagggcctggtgagcatcaaggacaagagccagcaggtgatcgtgcagggcgtgcacgagctgtacgacctggaggagacccccgtgagctggaaggacgacaccgagagaaccaacagactggtgctgctgggcagaaacctggacaaggacatcctgaagcagctgttcatcgccaccgtgaccgagaccgagaagcagtggaccacccacttcaaggaggaccaggtgtgcacctag

SEQ ID NO: 77137 - DNA, 543 bp, synthetic construct
  misc_feature 1..543: note = Description of Artificial Sequence: Synthetic coding sequence
  source 1..543: mol_type = other DNA
atgctgcccgccgtgggcagcgccgacgaggaggaggaccccgccgaggaggactgccccgagctggtgcccatggagaccacccagagcgaggaggaggagaagagcggcctgggcgccaagatccccgtgaccatcatcaccggctacctgggcgccggcaagaccaccctgctgaactacatcctgaccgagcagcacagcaagagagtggccgtgatcctgaacgagttcggcgagggcagcgccctggagaagagcctggccgtgagccagggcggcgagctgtacgaggagtggctggagctgagaaacggctgcctgtgctgcagcgtgaaggacaacggcctgagagccatcgagaacctgatgcagaagaagggcaagttcgactacatcctgctggagaccaccggcctggccgaccccggcgccgtggccagcatgttctgggtggacgccgagctgggcagcgacatctacctggacggcatcatcaccatcgtggacagcaagtacggcctgaaggtgaagtaccactag

SEQ ID NO: 77138 - DNA, 1131 bp, synthetic construct
  misc_feature 1..1131: note = Description of Artificial Sequence: Synthetic coding sequence
  source 1..1131: mol_type = other DNA
atgctgcccgccgtgggcagcgccgacgaggaggaggaccccgccgaggaggactgccccgagctggtgcccatggagaccacccagagcgaggaggaggagaagagcggcctgggcgccaagatccccgtgaccatcatcaccggctacctgggcgccggcaagaccaccctgctgaactacatcctgaccgagcagcacagcaagagagtggccgtgatcctgaacgagttcggcgagggcagcgccctggagaagagcctggccgtgagccagggcggcgagctgtacgaggagtggctggagctgagaaacggctgcctgtgctgcagcgtgaaggacaacggcctgagagccatcgagaacctgatgcagaagaagggcaagttcgactacatcctgctggagaccaccggcctggccgaccccggcgccgtggccagcatgttctgggtggacgccgagctgggcagcgacatctacctggacggcatcatcaccatcgtggacagcaagtacggcctgaagcacctggccgaggagaagcccgacggcctgatcaacgaggccaccagacaggtggccctggccgacgccatcctgatcaacaagaccgacctggtgcccgaggaggacgtgaagaagctgagagccaccatcagaagcatcaacggcctgggccagatcctggagacccagagaagcagcctgcagaagaagctgcagcacgtgcccggcacccagccccacctggaccagagcatcgtgaccatcaccttcgaggtgcccggcaacgccaaggaggagcacctgaacatgttcatccagaacctgctgtgggagaagaacgtgagaaacaaggacaaccactgcatggaggtgatcagactgaagggcctggtgagcatcaaggacaagagccagcaggtgatcgtgcagggcgtgcacgagctgtacgacctggaggagacccccgtgagctggaaggacgacaccgagagaaccaacagactggtgctgctgggcagaaacctggacaaggacatcctgaagcagctgttcatcgccaccgtgaccgagaccgagaagcagtggaccacccacttcaaggaggaccaggtgtgcacctag

SEQ ID NO: 77139 - DNA, 1080 bp, synthetic construct
  misc_feature 1..1080: note = Description of Artificial Sequence: Synthetic coding sequence
  source 1..1080: mol_type = other DNA
atgtacttcaagagagccgccagagccttccccgtgctgctgaccggcgccggcaagaccaccctgctgaactacatcctgaccgagcagcacagcaagagagtggccgtgatcctgaacgagttcggcgagggcagcgccctggagaagagcctggccgtgagccagggcggcgagctgtacgaggagtggctggagctgagaaacggctgcctgtgctgcagcgtgaaggacaacggcctgagagccatcgagaacctgatgcagaagaagggcaagttcgactacatcctgctggagaccaccggcctggccgaccccggcgccgtggccagcatgttctgggtggacgccgagctgggcagcgacatctacctggacggcatcatcaccatcgtggacagcaagtacggcctgaagcacctggccgaggagaagcccgacggcctgatcaacgaggccaccagacaggtggccctggccgacgccatcctgatcaacaagaccgacctggtgcccgaggaggacgtgaagaagctgagagccaccatcagaagcatcaacggcctgggccagatcctggagacccagagaagcagagtggacctgagcaacgtgctggacctgcacgccttcgacagcctgagcggcatcagcctgcagaagaagctgcagcacgtgcccggcacccagccccacctggaccagagcatcgtgaccatcaccttcgaggtgcccggcaacgccaaggaggagcacctgaacatgttcatccagaacctgctgtgggagaagaacgtgagaaacaaggacaaccactgcatggaggtgatcagactgaagggcctggtgagcatcaaggacaagagccagcaggtgatcgtgcagggcgtgcacgagctgtacgacctggaggagacccccgtgagctggaaggacgacaccgagagaaccaacagactggtgctgctgggcagaaacctggacaaggacatcctgaagcagctgttcatcgccaccgtgaccgagaccgagaagcagtggaccacccacttcaaggaggaccaggtgtgcacctag

SEQ ID NO: 77140 - DNA, 483 bp, synthetic construct
  misc_feature 1..483: note = Description of Artificial Sequence: Synthetic coding sequence
  source 1..483: mol_type = other DNA
atgctgcccgccgtgggcagcgccgacgaggaggaggaccccgccgaggaggactgccccgagctggtgcccatggagaccacccagagcgaggaggaggagaagagcggcctgggcgccaagatccccgtgaccatcatcaccggctacctgggcgccggcaagaccaccctgctgaactacatcctgaccgagcagcacagcaagagagtggccgtgatcctgaacgagttcggcgagggcagcgccctggagaagagcctggccgtgagccagggcggcgagctgtacgaggagtggctggagctgagaaacggctgcctgtgctgcagcgtgaaggacaacggcctgagagccatcgagaacctgatgcagaagaagggcaagttcgactacatcctgctggagaccaccggcctggccgaccccggcatcatcaccatcgtggacagcaagtacggcctgaaggtgaagtaccactag

SEQ ID NO: 77141 - DNA, 1188 bp, synthetic construct
  misc_feature 1..1188: note = Description of Artificial Sequence: Synthetic coding sequence
  source 1..1188: mol_type = other DNA
atgctgcccgccgtgggcagcgtggacgaggaggaggaccccgccgaggaggactgccccgagctggtgcccatcgagaccacccagagcgaggaggaggagaagagcggcctgggcgccaagatccccgtgaccatcatcaccggctacctgggcgccggcaagaccaccctgctgaactacatcctgaccgagcagcacagcaagagagtggccgtgatcctgaacgagagcggcgagggcagcgccctggagaagagcctggccgtgagccagggcggcgagctgtacgaggagtggctggagctgagaaacggctgcctgtgctgcagcgtgaaggacaacggcctgagagccatcgagaacctgatgcagaagaagggcaagttcgacgacatcctgctggagaccaccggcctggccgaccccggcgccgtggccagcatgttctgggtggacgccgagctgggcagcgacatctacctggacggcatcatcaccatcgtggacagcaagtacggcctgaagcacctgaccgaggagaagcccgacggcctgatcaacgaggccaccagacaggtggccctggccgacatcatcctgatcaacaagaccgacctggtgcccgaggaggacgtgaagaagctgagaaccaccatcagaagcatcaacggcctgggccagatcctggagacccagagaagcagagtggacctgagcaacgtgctggacctgcacgccttcgacagcctgagcggcatcagcctgcagaagaagctgcagcacgtgcccggcacccagccccacctggaccagagcatcgtgaccatcaccttcgaggtgcccggcaacgccaaggaggagcacctgaacatgttcatccagaacctgctgtgggagaagaacgtgagaaacaaggacaaccactgcatggaggtgatcagactgaagggcctggtgagcatcaaggacaagagccagcaggtgatcgtgcagggcgtgcacgagctgtacgacctggaggagacccccgtgagctggaaggacgacaccgagagaaccaacagactggtgctgatcggcagaaacctggacaaggacatcctgaagcagctgttcatcgccaccgtgaccgagaccgagaagcagtggaccacccacttcaaggaggaccaggtgtgcacctag

SEQ ID NO: 77142 - DNA, 258 bp, synthetic construct
  misc_feature 1..258: note = Description of Artificial Sequence: Synthetic coding sequence
  source 1..258: mol_type = other DNA
atggaggtgatcagactgaagggcctggtgagcatcaaggacaagagccagcaggtgatcgtgcagggcgtgcacgagctgtacgacctggaggagacccccgtgagctggaaggacgacaccgagagaaccaacagactggtgctgatcggcagaaacctggacaaggacatcctgaagcagctgttcatcgccaccgtgaccgagaccgagaagcagtggaccacccacttcaaggaggaccaggtgtgcacctag

SEQ ID NO: 77143 - DNA, 258 bp, synthetic construct; identical to SEQ ID NO: 77142
  misc_feature 1..258: note = Description of Artificial Sequence: Synthetic coding sequence
  source 1..258: mol_type = other DNA

SEQ ID NO: 77144 - DNA, 132 bp, synthetic construct
  misc_feature 1..132: note = Description of Artificial Sequence: Synthetic coding sequence
  source 1..132: mol_type = other DNA
atgttcatccagaacctgctgtgggagaagaacgtgagaaacaaggacaaccactgcatggaggtgatcagactgaaggtgcagttcaccgtggccgacttctggaccaagagcttcagctggctgctgtag

SEQ ID NO: 77145 - DNA, 1128 bp, synthetic construct
  misc_feature 1..1128: note = Description of Artificial Sequence: Synthetic coding sequence
  source 1..1128: mol_type = other DNA
atgctgcccgccgtgggcagcgtggacgaggaggaggaccccgccgaggaggactgccccgagctggtgcccatcgagaccacccagagcgaggaggaggagaagagcggcctgggcgccaagatccccgtgaccatcatcaccggctacctgggcgccggcaagaccaccctgctgaactacatcctgaccgagcagcacagcaagagagtggccgtgatcctgaacgagagcggcgagggcagcgccctggagaagagcctggccgtgagccagggcggcgagctgtacgaggagtggctggagctgagaaacggctgcctgtgctgcagcgtgaaggacaacggcctgagagccatcgagaacctgatgcagaagaagggcaagttcgacgacatcctgctggagaccaccggcctggccgaccccggcatcatcaccatcgtggacagcaagtacggcctgaagcacctgaccgaggagaagcccgacggcctgatcaacgaggccaccagacaggtggccctggccgacatcatcctgatcaacaagaccgacctggtgcccgaggaggacgtgaagaagctgagaaccaccatcagaagcatcaacggcctgggccagatcctggagacccagagaagcagagtggacctgagcaacgtgctggacctgcacgccttcgacagcctgagcggcatcagcctgcagaagaagctgcagcacgtgcccggcacccagccccacctggaccagagcatcgtgaccatcaccttcgaggtgcccggcaacgccaaggaggagcacctgaacatgttcatccagaacctgctgtgggagaagaacgtgagaaacaaggacaaccactgcatggaggtgatcagactgaagggcctggtgagcatcaaggacaagagccagcaggtgatcgtgcagggcgtgcacgagctgtacgacctggaggagacccccgtgagctggaaggacgacaccgagagaaccaacagactggtgctgatcggcagaaacctggacaaggacatcctgaagcagctgttcatcgccaccgtgaccgagaccgagaagcagtggaccacccacttcaaggaggaccaggtgtgcacctag

SEQ ID NO: 77146 - DNA, 1080 bp, synthetic construct
  misc_feature 1..1080: note = Description of Artificial Sequence: Synthetic coding sequence
  source 1..1080: mol_type = other DNA
atgtacttcaagagagcccccagagccttccccgtgctgctgaccggcgccggcaagaccaccctgctgaactacatcctgaccgagcagcacagcaagagagtggccgtgatcctgaacgagagcggcgagggcagcgccctggagaagagcctggccgtgagccagggcggcgagctgtacgaggagtggctggagctgagaaacggctgcctgtgctgcagcgtgaaggacaacggcctgagagccatcgagaacctgatgcagaagaagggcaagttcgacgacatcctgctggagaccaccggcctggccgaccccggcgccgtggccagcatgttctgggtggacgccgagctgggcagcgacatctacctggacggcatcatcaccatcgtggacagcaagtacggcctgaagcacctgaccgaggagaagcccgacggcctgatcaacgaggccaccagacaggtggccctggccgacatcatcctgatcaacaagaccgacctggtgcccgaggaggacgtgaagaagctgagaaccaccatcagaagcatcaacggcctgggccagatcctggagacccagagaagcagagtggacctgagcaacgtgctggacctgcacgccttcgacagcctgagcggcatcagcctgcagaagaagctgcagcacgtgcccggcacccagccccacctggaccagagcatcgtgaccatcaccttcgaggtgcccggcaacgccaaggaggagcacctgaacatgttcatccagaacctgctgtgggagaagaacgtgagaaacaaggacaaccactgcatggaggtgatcagactgaagggcctggtgagcatcaaggacaagagccagcaggtgatcgtgcagggcgtgcacgagctgtacgacctggaggagacccccgtgagctggaaggacgacaccgagagaaccaacagactggtgctgatcggcagaaacctggacaaggacatcctgaagcagctgttcatcgccaccgtgaccgagaccgagaagcagtggaccacccacttcaaggaggaccaggtgtgcacctag

SEQ ID NO: 77147 - DNA, 234 bp, synthetic construct
  misc_feature 1..234: note = Description of Artificial Sequence: Synthetic coding sequence
  source 1..234: mol_type = other DNA
atgtacttcaagagagcccccagagccttccccgtgctgctgaccggcgccggcaagaccaccctgctgaactacatcctgaccgagcagcacagcaagagagtggccgtgatcctgaacgagagcggcgagggcagcgccctggagaagagcctggccgtgagccagggcggcgagctgtacgaggagtggctggagctgagaaacggctgcctgtgctgcagcgtgaagtag

SEQ ID NO: 77148 - DNA, 1131 bp, synthetic construct
  misc_feature 1..1131: note = Description of Artificial Sequence: Synthetic coding sequence
  source 1..1131: mol_type = other DNA
atgctgcccgccgtgggcagcgtggacgaggaggaggaccccgccgaggaggactgccccgagctggtgcccatcgagaccacccagagcgaggaggaggagaagagcggcctgggcgccaagatccccgtgaccatcatcaccggctacctgggcgccggcaagaccaccctgctgaactacatcctgaccgagcagcacagcaagagagtggccgtgatcctgaacgagagcggcgagggcagcgccctggagaagagcctggccgtgagccagggcggcgagctgtacgaggagtggctggagctgagaaacggctgcctgtgctgcagcgtgaaggacaacggcctgagagccatcgagaacctgatgcagaagaagggcaagttcgacgacatcctgctggagaccaccggcctggccgaccccggcgccgtggccagcatgttctgggtggacgccgagctgggcagcgacatctacctggacggcatcatcaccatcgtggacagcaagtacggcctgaagcacctgaccgaggagaagcccgacggcctgatcaacgaggccaccagacaggtggccctggccgacatcatcctgatcaacaagaccgacctggtgcccgaggaggacgtgaagaagctgagaaccaccatcagaagcatcaacggcctgggccagatcctggagacccagagaagcagcctgcagaagaagctgcagcacgtgcccggcacccagccccacctggaccagagcatcgtgaccatcaccttcgaggtgcccggcaacgccaaggaggagcacctgaacatgttcatccagaacctgctgtgggagaagaacgtgagaaacaaggacaaccactgcatggaggtgatcagactgaagggcctggtgagcatcaaggacaagagccagcaggtgatcgtgcagggcgtgcacgagctgtacgacctggaggagacccccgtgagctggaaggacgacaccgagagaaccaacagactggtgctgatcggcagaaacctggacaaggacatcctgaagcagctgttcatcgccaccgtgaccgagaccgagaagcagtggaccacccacttcaaggaggaccaggtgtgcacctag

SEQ ID NO: 77149 - DNA, 225 bp, synthetic construct
  misc_feature 1..225: note = Description of Artificial Sequence: Synthetic coding sequence
  source 1..225: mol_type = other DNA
atgtacttcaagagagcccccagagccttccccgtgctgctgaccggcgccggcaagaccaccctgctgaactacatcctgaccgagcagcacagcaagagagtggccgtgatcctgaacgagagcggcgagggcagcgccctggagaagagcctggccgtgagccagggcggcgagctgtacgaggagtggctggagctgagaaacggctgcctgtgctgctag

SEQ ID NO: 77150 - DNA, 543 bp, synthetic construct
  misc_feature 1..543: note = Description of Artificial Sequence: Synthetic coding sequence
  source 1..543: mol_type = other DNA
atgctgcccgccgtgggcagcgtggacgaggaggaggaccccgccgaggaggactgccccgagctggtgcccatcgagaccacccagagcgaggaggaggagaagagcggcctgggcgccaagatccccgtgaccatcatcaccggctacctgggcgccggcaagaccaccctgctgaactacatcctgaccgagcagcacagcaagagagtggccgtgatcctgaacgagagcggcgagggcagcgccctggagaagagcctggccgtgagccagggcggcgagctgtacgaggagtggctggagctgagaaacggctgcctgtgctgcagcgtgaaggacaacggcctgagagccatcgagaacctgatgcagaagaagggcaagttcgacgacatcctgctggagaccaccggcctggccgaccccggcgccgtggccagcatgttctgggtggacgccgagctgggcagcgacatctacctggacggcatcatcaccatcgtggacagcaagtacggcctgaaggtgaagtaccactag

SEQ ID NO: 77151 - DNA, 1044 bp, synthetic construct
  misc_feature 1..1044: note = Description of Artificial Sequence: Synthetic coding sequence
  source 1..1044: mol_type = other DNA
atgctgcccgccgtgggcagcgtggacgaggaggaggaccccgccgaggaggactgccccgagctggtgcccatcgagaccacccagagcgaggaggaggagaagagcggcctgggcgccaagatccccgtgaccatcatcaccggctacctgggcgccggcaagaccaccctgctgaactacatcctgaccgagcagcacagcaagagagtggccgtgatcctgaacgagagcggcgagggcagcgccctggagaagagcctggccgtgagccagggcggcgagctgtacgaggagtggctggagctgagaaacggctgcctgtgctgcagcgtgaaggacaacggcctgagagccatcgagaacctgatgcagaagaagggcaagttcgacgacatcctgctggagaccaccggcctggccgaccccggcgccgtggccagcatgttctgggtggacgccgagctgggcagcgacatctacctggacggcatcatcaccatcgtggacagcaagtacggcctgaagcacctgaccgaggagaagcccgacggcctgatcaacgaggccaccagaagcatcaacggcctgggccagatcctggagacccagagaagcagcctgcagaagaagctgcagcacgtgcccggcacccagccccacctggaccagagcatcgtgaccatcaccttcgaggtgcccggcaacgccaaggaggagcacctgaacatgttcatccagaacctgctgtgggagaagaacgtgagaaacaaggacaaccactgcatggaggtgatcagactgaagggcctggtgagcatcaaggacaagagccagcaggtgatcgtgcagggcgtgcacgagctgtacgacctggaggagacccccgtgagctggaaggacgacaccgagagaaccaacagactggtgctgatcggcagaaacctggacaaggacatcctgaagcagctgttcatcgccaccgtgaccgagaccgagaagcagtggaccacccacttcaaggaggaccaggtgtgcacctag

SEQ ID NO: 77152 - DNA, 987 bp, synthetic construct
  misc_feature 1..987: note = Description of Artificial Sequence: Synthetic coding sequence
  source 1..987: mol_type = other DNA
atgctgggcagcagagccgccggcttcgccagaggcctgagagccgtggccctggcctggctgcccggctggagaggcagaagcttcgccctggccagagccgccggcgccccccacggcggcgacctgcagccccccgcctgccccgagcccagaggcagacagctgagcctgagcgccgccgccgtggtggacagcgcccccagacccctgcagccctacctgagactgatgagactggacaagcccatcggcacctggctgctgtacctgccctgcacctggagcatcggcctggccgccgagcccggctgcttccccgactggtacatgctgagcctgttcggcaccggcgccatcctgatgagaggcgccggctgcaccatcaacgacatgtgggaccaggactacgacaagaaggtgaccagaaccgccaacagacccatcgccgccggcgacatcagcaccttccagagcttcgtgttcctgggcggccagctgaccctggccctgggcgtgctgctgtgcctgaactactacagcatcgccctgggcgccggcagcctgctgctggtgatcacctaccccctgatgaagagaatcagctactggccccagctggccctgggcctgaccttcaactggggcgccctgctgggctggagcgccatcaagggcagctgcgaccccagcgtgtgcctgcccctgtacttcagcggcgtgatgtggaccctgatctacgacaccatctacgcccaccaggacaagagagacgacgtgctgatcggcctgaagagcaccgccctgagattcggcgagaacaccaagccctggctgagcggcttcagcgtggccatgctgggcgccctgagcctggtgggcgtgaacagcggccagaccgccccctactacgccgccctgggcgccgtgggcgcccacctgacccaccagaagtggggcctggagatcctgcccagactggtgtag

SEQ ID NO: 77153 - DNA, 1266 bp, synthetic construct
  misc_feature 1..1266: note = Description of Artificial Sequence: Synthetic coding sequence
  source 1..1266: mol_type = other DNA
atgacccccatcagccaggtgagaatgagaaagggcagcgcccacaccgccgcccagcccggcagactgggcctgcaccccgccggcgccaccgcccacgcctgcagaggcatgaccagcatcagagccagacccggcctgaccagcgccatgctgggcagcagagccgccggcttcgccagaggcctgagagccgtggccctggcctggctgcccggctggagaggcagaagcttcgccctggccagagccgccggcgccccccacggcggcgacctgcagccccccgcctgccccgagcccagaggcagacagctgagcctgagcgccgccgccgtggtggacagcgcccccagacccctgcagccctacctgagactgatgagactggacaagcccatcggcacctggctgctgtacctgccctgcacctggagcatcggcctggccgccgagcccggctgcttccccgactggtacatgctgagcctgttcggcaccggcgccatcctgatgagaggcgccggctgcaccatcaacgacatgtgggaccaggactacgacaagaaggtgaccagaaccgccaacagacccatcgccgccggcgacatcagcaccttccagagcttcgtgttcctgggcggccagctgaccctggccctgggcgtgctgctgtgcctgaactactacagcatcgccctgggcgccggcagcctgctgctggtgatcacctaccccctgatgaagagaatcagctactggccccagctggccctgggcctgaccttcaactggggcgccctgctgggctggagcgccatcaagggcagctgcgaccccagcgtgtgcctgcccctgtacttcagcggcgtgatgtggaccctgatctacgacaccatctacgcccaccaggacaagagagacgacgtgctgatcggcctgaagagcaccgccctgagattcggcgagaacaccaagccctggctgagcggcttcagcgtggccatgctgggcgccctgagcctggtgggcgtgaacagcggccagaccgccccctactacgccgccctgggcgccgtgggcgcccacctgacccaccagatctacaccctggacatccacagacccgaggactgctggaacaagttcatcagcaacagaaccctgggcctgatcgtgttcctgggcatcgtgctgggcaacctgtggaaggagaagaagaccgacaagaccaagaagggcatcgagaacaagatcgagaactag

SEQ ID NO: 77154 - DNA, 1155 bp, synthetic construct
  misc_feature 1..1155: note = Description of Artificial Sequence: Synthetic coding sequence
  source 1..1155: mol_type = other DNA
atgaccagcatcagagccagacccggcctgaccagcgccatgctgggcagcagagccgccggcttcgccagaggcctgagagccgtggccctggcctggctgcccggctggagaggcagaagcttcgccctggccagagccgccggcgccccccacggcggcgacctgcagccccccgcctgccccgagcccagaggcagacagctgagcctgagcgccgccgccgtggtggacagcgcccccagacccctgcagccctacctgagactgatgagactggacaagcccatcggcacctggctgctgtacctgccctgcacctggagcatcggcctggccgccgagcccggctgcttccccgactggtacatgctgagcctgttcggcaccggcgccatcctgatgagaggcgccggctgcaccatcaacgacatgtgggaccaggactacgacaagaaggtgaccagaaccgccaacagacccatcgccgccggcgacatcagcaccttccagagcttcgtgttcctgggcggccagctgaccctggccctgggcgtgctgctgtgcctgaactactacagcatcgccctgggcgccggcagcctgctgctggtgatcacctaccccctgatgaagagaatcagctactggccccagctggccctgggcctgaccttcaactggggcgccctgctgggctggagcgccatcaagggcagctgcgaccccagcgtgtgcctgcccctgtacttcagcggcgtgatgtggaccctgatctacgacaccatctacgcccaccaggacaagagagacgacgtgctgatcggcctgaagagcaccgccctgagattcggcgagaacaccaagccctggctgagcggcttcagcgtggccatgctgggcgccctgagcctggtgggcgtgaacagcggccagaccgccccctactacgccgccctgggcgccgtgggcgcccacctgacccaccagatctacaccctggacatccacagacccgaggactgctggaacaagttcatcagcaacagaaccctgggcctgatcgtgttcctgggcatcgtgctgggcaacctgtggaaggagaagaagaccgacaagaccaagaagggcatcgagaacaagatcgagaactag

SEQ ID NO: 77155 - DNA, 798 bp, synthetic construct
  misc_feature 1..798: note = Description of Artificial Sequence: Synthetic coding sequence
  source 1..798: mol_type = other DNA
atggccaccctgctgagacccgtgctgagaagactgtgcggcctgcccggcctgcagagacccgccgccgagatgcccctgagagccagaagcgacggcgccggccccctgtacagccaccacctgcccaccagccccctgcagaagggcctgctggccgccggcagcgccgccatggccctgtacaacccctacagacacgacatggtggccgtgctgggcgagaccaccggccacagaaccctgaaggtgctgagagaccagatgagaagagaccccgagggcgcccagatcctgcaggagagacccagaatcagcaccagcaccctggacctgggcaagctgcagagcctgcccgagggcagcctgggcagagagtacctgagattcctggacgtgaacagagtgagccccgacaccagagcccccaccagattcgtggacgacgaggagctggcctacgtgatccagagatacagagaggtgcacgacatgctgcacaccctgctgggcatgcccaccaacatcctgggcgagatcgtggtgaagtggttcgaggccgtgcagaccggcctgcccatgtgcatcctgggcgccttcttcggccccatcagactgggcgcccagagcctgcaggtgctggtgagcgagctgatcccctgggccgtgcagaacggcagaagagccccctgcgtgctgaacctgtactacgagagaagatgggagcagagcctgagagccctgagagaggagctgggcatcaccgccccccccatgcacgtgcagggcctggcctag

SEQ ID NO: 77156 - DNA, 456 bp, synthetic construct
  misc_feature 1..456: note = Description of Artificial Sequence: Synthetic coding sequence
  source 1..456: mol_type = other DNA
atggccaccctgctgagacccgtgctgagaagactgtgcggcctgcccggcctgcagagacccgccgccgagatgcccctgagagccagaagcgacggcgccggccccctgtacagccaccacctgcccaccagccccctgcagaagggcctgctggccgccggcagcgccgccatggccctgtacaacccctacagacacgacatggtggccgtgctgggcgagaccaccggccacagaaccctgaaggtgctgagagaccagatgagaagagaccccgagggcgcccagatcctgcaggagagacccagaatcagcaccagcaccctggacctgggcaagctgcagagcctgcccgagggcagcctgggcagagagtacctgagattcctggacgtgaacgtgagcttccagctgctgtgcatctggcagagccccgacagaaccgaggagtag

SEQ ID NO: 77157 - DNA, 654 bp, synthetic construct
  misc_feature 1..654: note = Description of Artificial Sequence: Synthetic coding sequence
  source 1..654: mol_type = other DNA
atgagctgcgccggcgccgccgccgcccccagactgtggagactgagacccggcgccagaagaagcctgagcgcctacggcagaagaaccagcgtgagattcagaagcagcggcatgaccctggacaacatcagcagagccgccgtggacagaatcatcagagtggaccacgccggcgagtacggcgccaacagaatctacgccggccagatggccgtgctgggcagaaccagcgtgggccccgtgatccagaagatgtgggaccaggagaaggaccacctgaagaagttcaacgagctgatggtgaccttcagagtgagacccaccgtgctgatgcccctgtggaacgtgctgggcttcgccctgggcgccggcaccgccctgctgggcaaggagggcgccatggcctgcaccgtggccgtggaggagagcatcgcccaccactacaacaaccagatcagaaccctgatggaggaggaccccgagaagtacgaggagctgctgcagctgatcaagaagttcagagacgaggagctggagcaccacgacatcggcctggaccacgacgccgagctggcccccgcctacgccgtgctgaagagcatcatccaggccggctgcagagtggccatctacctgagcgagagactgtag

SEQ ID NO: 77158 - DNA, 540 bp, synthetic construct
  misc_feature 1..540: note = Description of Artificial Sequence: Synthetic coding sequence
  source 1..540: mol_type = other DNA
atgaccctggacaacatcagcagagccgccgtggacagaatcatcagagtggaccacgccggcgagtacggcgccaacagaatctacgccggccagatggccgtgctgggcagaaccagcgtgggccccgtgatccagaagatgtgggaccaggagaaggaccacctgaagaagttcaacgagctgatggtgaccttcagagtgagacccaccgtgctgatgcccctgtggaacgtgctgggcttcgccctgggcgccggcaccgccctgctgggcaaggagggcgccatggcctgcaccgtggccgtggaggagagcatcgcccaccactacaacaaccagatcagaaccctgatggaggaggaccccgagaagtacgaggagctgctgcagctgatcaagaagttcagagacgaggagctggagcaccacgacatcggcctggaccacgacgccgagctggcccccgcctacgccgtgctgaagagcatcatccaggccggctgcagagtggccatctacctgagcgagagactgtag

SEQ ID NO: 77159 - DNA, 957 bp, synthetic construct
  misc_feature 1..957: note = Description of Artificial Sequence: Synthetic coding sequence
  source 1..957: mol_type = other DNA
atggccgccgccgccgtgagcggcgccctgggcagagccggctggagactgctgcagctgagatgcctgcccgtggccagatgcagacaggccctggtgcccagagccttccacgccagcgccgtgggcctgagaagcagcgacgagcagaagcagcagccccccaacagcttcagccagcagcacagcgagacccagggcgccgagaagcccgaccccgagagcagccacagcccccccagatacaccgaccagggcggcgaggaggaggaggactacgagagcgaggagcagctgcagcacagaatcctgaccgccgccctggagttcgtgcccgcccacggctggaccgccgaggccatcgccgagggcgcccagagcctgggcctgagcagcgccgccgccagcatgttcggcaaggacggcagcgagctgatcctgcacttcgtgacccagtgcaacaccagactgaccagagtgctggaggaggagcagaagctggtgcagctgggccaggccgagaagagaaagaccgaccagttcctgagagacgccgtggagaccagactgagaatgctgatcccctacatcgagcactggcccagagccctgagcatcctgatgctgccccacaacatccccagcagcctgagcctgctgaccagcatggtggacgacatgtggcactacgccggcgaccagagcaccgacttcaactggtacaccagaagagccatgctggccgccatctacaacaccaccgagctggtgatgatgcaggacagcagccccgacttcgaggacacctggagattcctggagaacagagtgaacgacgccatgaacatgggccacaccgccaagcaggtgaagagcaccggcgaggccctggtgcagggcctgatgggcgccgccgtgaccctgaagaacctgaccggcctgaaccagagaagatag

SEQ ID NO: 77160 - DNA, 1743 bp, synthetic construct
  misc_feature 1..1743: note = Description of Artificial Sequence: Synthetic coding sequence
  source 1..1743: mol_type = other DNA
atgttcgccggcctgcaggacctgggcgtggccaacggcgaggacctgaaggagaccctgaccaactgcaccgagcccctgaaggccatcgagcagttccagaccgagaacggcgtgctgctgcccagcctgcagagcgccctgcccttcctggacctgcacggcacccccagactggagttccaccagagcgtgttcgacgagctgagagacaagctgctggagagagtgagcgccatcgccagcgagggcaaggccgaggagagatacaagaagctggaggacctgctggagaagagcttcagcctggtgaagatgcccagcctgcagcccgtggtgatgtgcgtgatgaagcacctgcccaaggtgcccgagaagaagctgaagctggtgatggccgacaaggagctgtacagagcctgcgccgtggaggtgaagagacagatctggcaggacaaccaggccctgttcggcgacgaggtgagccccctgctgaagcagtacatcctggagaaggagagcgccctgttcagcaccgagctgagcgtgctgcacaacttcttcagccccagccccaagaccagaagacagggcgaggtggtgcagagactgaccagaatggtgggcaagaacgtgaagctgtacgacatggtgctgcagttcctgagaaccctgttcctgagaaccagaaacgtgcactactgcaccctgagagccgagctgctgatgagcctgcacgacctggacgtgggcgagatctgcaccgtggacccctgccacaagttcacctggtgcctggacgcctgcatcagagagagattcgtggacagcaagagagccagagagctgcagggcttcctggacggcgtgaagaagggccaggagcaggtgctgggcgacctgagcatgatcctgtgcgaccccttcgccatcaacaccctggccctgagcaccgtgagacacctgcaggagctggtgggccaggagaccctgcccagagacagccccgacctgctgctgctgctgagactgctggccctgggccagggcgcctgggacatgatcgacagccaggtgttcaaggagcccaagatggaggtggagctgatcaccagattcctgcccatgctgatgagcttcctggtggacgactacaccttcaacgtggaccagaagctgcccgccgaggagaaggcccccgtgagctaccccaacaccctgcccgagagcttcaccaagttcctgcaggagcagagaatggcctgcgaggtgggcctgtactacgtgctgcacatcaccaagcagagaaacaagaacgccctgctgagactgctgcccggcctggtggagaccttcggcgacctggccttcggcgacatcttcctgcacctgctgaccggcaacctggccctgctggccgacgagttcgccctggaggacttctgcagcagcctgttcgacggcttcttcctgaccgccagccccagaaaggagaacgtgcacagacacgccctgagactgctgatccacctgcaccccagagtggcccccagcaagctggaggccctgcagaaggccctggagcccaccggccagagcggcgaggccgtgaaggagctgtacagccagctgggcgagaagctggagcagctggaccacagaaagcccagccccgcccaggccgccgagacccccgccctggagctgcccctgcccagcgtgcccgcccccgcccccctgtag

SEQ ID NO: 77161 - DNA, 501 bp, synthetic construct
  misc_feature 1..501: note = Description of Artificial Sequence: Synthetic coding sequence
  source 1..501: mol_type = other DNA
atggccagcggcgtgaccgtgaacgacgaggtgatcaaggtgttcaacgacatgaaggtgagaaagagcagcacccaggaggagatcaagaagagaaagaaggccgtgctgttctgcctgagcgacgacaagagacagatcatcgtggaggaggccaagcagatcctggtgggcgacatcggcgacaccgtggaggacccctacaccagcttcgtgaagctgctgcccctgaacgactgcagatacgccctgtacgacgccacctacgagaccaaggagagcaagaaggaggacctggtgttcatcttctgggcccccgagagcgcccccctgaagagcaagatgatctacgccagcagcaaggacgccatcaagaagaagttcaccggcatcaagcacgagtggcaggtgaacggcctggacgacatcaaggacagaagcaccctgggcgagaagctgggcggcaacgtggtggtgagcctggagggcaagcccctgtag

SEQ ID NO: 77162 - DNA, 501 bp, synthetic construct; identical to SEQ ID NO: 77161
  misc_feature 1..501: note = Description of Artificial Sequence: Synthetic coding sequence
  source 1..501: mol_type = other DNA

SEQ ID NO: 77163 - DNA, 1722 bp, synthetic construct
  misc_feature 1..1722: note = Description of Artificial Sequence: Synthetic coding sequence
  source 1..1722: mol_type = other DNA
atgagaagatacgacagaggcctgaagaccctggagaacctgctggccagcatcagaaagggcaacgccatcgacgaggccgacatccccccccccgtggccatcggcaagggccccgccagcacccccacctacagccccgcccccacccagcccgcccccagaatcgccagcgcccccgagcccagagtgaccctggagggccccagcgccaccgcccccgccagcagccccggcctggccaagccccagatgccccccggcccctgcagccccggccccctggcccagctgcagagcagacagagagactacaagctggccgccctgcacgccaagcagcagcagctggccttcctggagggcagaaagaagcagctgctgcaggccgccctgagagccaagcagaagaacgacgtggagggcgccaagatgcacctgagacaggccaagggcctggagcccatgctggaggccagcagaaacggcctgcccgtggacatcaccaaggtgccccccgcccccgtgaacaaggacgacttcgccctggtgcagagacccggccccggcctgagccaggaggccgccagaagatacggcgagctgaccaagctgatcagacagcagcacgagatgtgcctgaaccacagcaaccagttcacccagctgggcaacatcaccgagaccaccaagttcgagaagctggccgaggactgcaagagaagcatggacatcctgaagcaggccttcgtgagaggcctgcccacccccaccgccagattcgagcagagaaccttcagcgtgatcaagatcttccccgacctgagcagcaacgacatgctgctgttcatcgtgaagggcatcaacctgcccaccccccccggcctgagccccggcgacctggacgtgttcgtgagattcgacttcccctaccccaacgtggaggaggcccagaaggacaagaccagcgtgatcaagaacaccgacagccccgagttcaaggagcagttcaagctgtgcatcaacagaagccacagaggcttcagaagagccatccagaccaagggcatcaagttcgaggtggtgcacaagggcggcctgttcaagaccgacagagtgctgggcaccgcccagctgaagctggacgccctggagatcgcctgcgaggtgagagagatcctggaggtgctggacggcagaagacccaccggcggcagactggaggtgatggtgagaatcagagagcccctgaccgcccagcagctggagaccaccaccgagagatggctggtgatcgaccccgtgcccgccgccgtgcccaccgtggccggccccaagggcaaggccccccccgtgcccgcccccgccagagagagcggcaacagaagcgccagacccctgcacagcctgagcgtgctggccttcgaccaggagagactggagagaaagatcctggccctgagacaggccagaagacccgtgccccccgaggtggcccagcagtaccaggacatcatgcagagaagccagtggcagagagcccagctggagcagggcggcgtgggcatcagaagagagtacgccgcccagctggagagacagctgcagttctacaccgaggccgccagaagactgggcaacgacggcagcagagacgccgccaaggaggccctgtacagaagaaacctggtggagagcgagctgcagagactgagaagatag

SEQ ID NO: 77164 - DNA, 2856 bp, synthetic construct
  misc_feature 1..2856: note = Description of Artificial Sequence: Synthetic coding sequence
  source 1..2856: mol_type = other DNA
atgcacaagagaaagggcccccccggcccccccggcagaggcgccgccgccgccagacagctgggcctgctggtggacctgagccccgacggcctgatgatccccgaggacggcgccaacgacgaggagctggaggccgagttcctggccctggtgggcggccagccccccgccctggagaagctgaagggcaagggccccctgcccatggaggccatcgagaagatggccagcctgtgcatgagagaccccgacgaggacgaggaggagggcaccgacgaggacgacctggaggccgacgacgacctgctggccgagctgaacgaggtgctgggcgaggagcagaaggccagcgagacccccccccccgtggcccagcccaagcccgaggccccccaccccggcctggagaccaccctgcaggagagactggccctgtaccagaccgccatcgagagcgccagacaggccggcgacagcgccaagatgagaagatacgacagaggcctgaagaccctggagaacctgctggccagcatcagaaagggcaacgccatcgacgaggccgacatccccccccccgtggccatcggcaagggccccgccagcacccccacctacagccccgcccccacccagcccgcccccagaatcgccagcgcccccgagcccagagtgaccctggagggccccagcgccaccgcccccgccagcagccccggcctggccaagccccagatgccccccggcccctgcagccccggccccctggcccagctgcagagcagacagagagactacaagctggccgccctgcacgccaagcagcagggcgacaccaccgccgccgccagacacttcagagtggccaagagcttcgacgccgtgctggaggccctgagcagaggcgagcccgtggacctgagctgcctgccccccccccccgaccagctgccccccgacccccccagcccccccagccagccccccacccccgccaccgcccccagcaccaccgaggtgccccccccccccagaaccctgctggaggccctggagcagagaatggagagataccaggtggccgccgcccaggccaagagcaagggcgaccagagaaaggccagaatgcacgagagaatcgtgaagcagtaccaggacgccatcagagcccacaaggccggcagagccgtggacgtggccgagctgcccgtgccccccggcttcccccccatccagggcctggaggccaccaagcccacccagcagagcctggtgggcgtgctggagaccgccatgaagctggccaaccaggacgagggccccgaggacgaggaggacgaggtgcccaagaagcagaacagccccgtggcccccaccgcccagcccaaggccccccccagcagaaccccccagagcggcagcgcccccaccgccaaggccccccccaaggccaccagcaccagagcccagcagcagctggccttcctggagggcagaaagaagcagctgctgcaggccgccctgagagccaagcagaagaacgacgtggagggcgccaagatgcacctgagacaggccaagggcctggagcccatgctggaggccagcagaaacggcctgcccgtggacatcaccaaggtgccccccgcccccgtgaacaaggacgacttcgccctggtgcagagacccggccccggcctgagccaggaggccgccagaagatacggcgagctgaccaagctgatcagacagcagcacgagatgtgcctgaaccacagcaaccagttcacccagctgggcaacatcaccgagaccaccaagttcgagaagctggccgaggactgcaagagaagcatggacatcctgaagcaggccttcgtgagaggcctgcccacccccaccgccagattcgagcagagaaccttcagcgtgatcaagatcttccccgacctgagcagcaacgacatgctgctgttcatcgtgaagggcatcaacctgcccaccccccccggcctgagccccggcgacctggacgtgttcgtgagattcgacttcccctaccccaacgtggaggaggcccagaaggacaagaccagcgtgatcaagaacaccgacagccccgagttcaaggagcagttcaagctgtgcatcaacagaagccacagaggcttcagaagagccatccagaccaagggcatcaagttcgaggtggtgcacaagggcggcctgttcaagaccgacagagtgctgggcaccgcccagctgaagctggacgccctggagatcgcctgcgaggtgagagagatcctggaggtgctggacggcagaagacccaccggcggcagactggaggtgatggtgagaatcagagagcccctgaccgcccagcagctggagaccaccaccgagagatggctggtgatcgaccccgtgcccgccgccgtgcccacccaggtggccggccccaagggcaaggccccccccgtgcccgcccccgccagagagagcggcaacagaagcgccagacccctgcacagcctgagcgtgctggccttcgaccaggagagactggagagaaagatcctggccctgagacaggccagaagacccgtgccccccgaggtggcccagcagtaccaggacatcatgcagagaagccagtggcagagagcccagctggagcagggcggcgtgggcatcagaagagagtacgccgcccagctggagagacagctgcagttctacaccgaggccgccagaagactgggcaacgacggcagcagagacgccgccaaggaggccctgtacagaagaaacctggtggagagcgagctgcagagactgagaagatag

SEQ ID NO: 77165 - DNA, 711 bp, synthetic construct
  misc_feature 1..711: note = Description of Artificial Sequence: Synthetic coding sequence
  source 1..711: mol_type = other DNA
tggcacagccccgacggcctgatgatccccgaggacggcgccaacgacgaggagctggaggccgagttcctggccctggtgggcggccagccccccgccctggagaagctgaagggcaagggccccctgcccatggaggccatcgagaagatggccagcctgtgcatgagagaccccgacgaggacgaggaggagggcaccgacgaggacgacctggaggccgacgacgacctgctggccgagctgaacgaggtgctgggcgaggagcagaaggccagcgagacccccccccccgtggcccagcccaagcccgaggccccccaccccggcctggagaccaccctgcaggagagactggccctgtaccagaccgccatcgagagcgccagacaggccggcgacagcgccaagatgagaagatacgacagaggcctgaagaccctggagaacctgctggccagcatcagaaagggcaacgccatcgacgaggccgacatccccccccccgtggccatcggcaagggccccgccagcacccccacctacagccccgcccccacccagcccgcccccagaatcgccagcgcccccgagcccagagtgaccctggagggccccagcgccaccgcccccgccagcagccccggcctggccaagccccagatgccccccggcccctgcagccccggccccctggcccagctgcagtag

SEQ ID NO: 77166 - DNA, 1116 bp, synthetic construct
  misc_feature 1..1116: note = Description of Artificial Sequence: Synthetic coding sequence
  source 1..1116: mol_type = other DNA
atgccccccggcccctgcagccccggccccctggcccagctgcagagcagacagagagactacaagctggccgccctgcacgccaagcagcagggcgacaccaccgccgccgccagacacttcagagtggccaagagcttcgacgccgtgctggaggccctgagcagaggcgagcccgtggacctgagctgcctgccccccccccccgaccagctgccccccgacccccccagcccccccagccagccccccacccccgccaccgcccccagcaccaccgaggtgccccccccccccagaaccctgctggaggccctggagcagagaatggagagataccaggtggccgccgcccaggccaagagcaagggcgaccagagaaaggccagaatgcacgagagaatcgtgaagcagtaccaggacgccatcagagcccacaaggccggcagagccgtggacgtggccgagctgcccgtgccccccggcttcccccccatccagggcctggaggccaccaagcccacccagcagagcctggtgggcgtgctggagaccgccatgaagctggccaaccaggacgagggccccgaggacgaggaggacgaggtgcccaagaagcagaacagccccgtggcccccaccgcccagcccaaggccccccccagcagaaccccccagagcggcagcgcccccaccgccaaggccccccccaaggccaccagcaccagagcccagcagcagctggccttcctggagggcagaaagaagcagctgctgcaggccgccctgagagccaagcagaagaacgacgtggagggcgccaagatgcacctgagacaggccaagggcctggagcccatgctggaggccagcagaaacggcctgcccgtggacatcaccaaggtgccccccgcccccgtgaacaaggacgacttcgccctggtgcagagacccggccccggcctgagccaggaggccgccagaagatacggcgagctgaccaagctgatcagacagcagcacgagatgtgcctgaaccacagcaaccagttcacccagctgggcaacatcaccgagaccaccaaggccaacatggtgaagccctgcttctactag

SEQ ID NO: 77167 - DNA, 4539 bp, synthetic construct
  misc_feature 1..4539: note = Description of Artificial Sequence: Synthetic coding sequence
  source 1..4539: mol_type = other DNA
atggtgagcgagaagagccacctgggcaacccccaggagcccgtgcaggaggagcccaagaccagactgctgagcatgaccgtgagaagaggccccagaagcctgccccccatccccagcaccagcagaaccggcttcgccgagttcagcatgagaggcagaatgagagagaagctgcaggccgccagaagcaaggccgagagcgccctgctgcaggagatccccacccccagacccagaagactgagaagccccagcaagaaggagctggagaccgagttcggcaccgagcccggcaaggaggtggagagaacccagcaggaggtggacagccagagctacagcagagtgaagttccacgacagcgccagaaagatcaagcccaagccccaggtgccccccggcttccccagcgccgaggaggcctacaacttcttcaccttcaacttcgaccccgagcccgagggcagcgaggagaagcccaaggccagacacagagccggcaccaaccaggaggaggaggagggcgaggaggaggagccccccgcccagggcggcggcaaggagatggacgaggaggagctgctgaacggcgacgacgccgaggacttcctgctgggcctggaccacgtggccgacgacttcgtggccgtgagacccgccgactacgagagcatccacgacagactgcagatggagagagagatgctgttcatccccagcagacagaccgtgcccacctacaagaagctgcccgagaacgtgcagcccagattcctggaggacgagggcctgtacaccggcgtgagacccgaggtggccagaaccaaccagaacatcatggagaacagactgctgatgcaggaccccgagagaagatggttcggcgacgacggcagaatcctggccctgcccaaccccatcaagcccttccccagcagaccccccgtgctgacccaggagcagagcatcaaggccgagctggagaccctgtacaagaaggccgtgaagtacgtgcacagcagccagcacgtgatcagaagcggcgacccccccggcaacttccagctggacatcgacatcagcggcctgatcttcacccaccacccctgcttcagcagagagcacgtgctggccgccaagctggcccagctgtacgaccagtacctggccagacaccagagaaacaaggccaagttcctgaccgacaagctgcaggccctgagaaacgccgtgcagaccggcctggaccccgagaagccccaccagagcctggacaccatccagaagaccatcaacgagtacaagagcgagatcagacagaccagaaagttcagagacgccgagcaggagaaggacagaaccctgctgaagaccatcatcaaggtgtggaaggagatgaagagcctgagagagttccagagattcaccaacacccccctgaagctggtgctgagaaaggagaaggccgaccagaaggccgacgaggaggcctacgaggccgagatccaggccgagatcagcgagctgctggaggagcacaccgaggagtacgcccagaagatggaggagtacagaaccagcctgcagcagtggaaggcctggagaaaggtgcagagagccaagaagaagaagagaaagcaggccgccgaggagcaccccggcgacgagatcgccgagccctaccccgaggaggacctggtgaagcccagcccccccgagcccaccgacagagccgtgatcgagcaggaggtgagagagagagccgcccagagcagaagaagaccctgggagcccaccctggtgcccgagctgagcctggccggcagcgtgacccccaacgaccagtgccccagagccgaggtgagcagaagagaggacgtgaagaagagaagcgtgtacctgaaggtgctgttcaacaacaaggaggtgagcagaaccgtgagcagacccctgggcgccgacttcagagtgcacttcggccagatcttcaacctgcagatcgtgaactggcccgagagcctgaccctgcaggtgtacgagaccgtgggccacagcagccccaccctgctggccgaggtgttcctgcccatccccgagaccaccgtggtgaccggcagagcccccaccgaggaggtggagttcagcagcaaccagcacgtgaccctggaccacgagggcgtgggcagcggcgtgcccttcagcttcgaggccgacggcagcaaccagctgaccctgatgaccagcggcaaggtgagccacagcgtggcctgggccatcggcgagaacggcatccccctgatcccccccctgagccagcagaacatcggcttcagaagcgccctgaagaaggccgacgccatcagcagcatcggcaccagcggcctgaccgacatgaagaagctggccaagtgggccgccgagagcaagctggaccccaacgaccccaacaacgcccccctgatgcagctgatcagcgtggccaccagcggcgagagctacgtgcccgacttcttcagactggagcagctgcagcaggagttcaacttcgtgagcgaccaggagctgaacagaagcaagagattcagactgctgcacctgagaagccaggaggtgcccgagttcagaaactacaagcaggtgcccgtgtacgacagagagatcatggagaaggtgttccaggactacgagaagagactgagagacagaaacgtgatcgagaccaaggagcacatcgacacccacagagccatcgtggccaagtacctgcagcaggtgagagagagcgtgatcaacagattcctgatcgccaagcagtacttcctgctggccgacatgatcgtggaggaggaggtgcccaacatcagcatcctgggcctgagcctgttcaagctggccgagcagaagagacccctgagacccagaagaaagggcagaaagaaggtgaccgcccagaacctgagcgacggcgacatcaagctgctggtgaacatcgtgagagcctacgacatccccgtgagaaagcccgccgtgagcaagttccagcagcccagcagaagcagcagaatgttcagcgagaagcacgccgccagccccagcacctacagccccacccacaacgccgactaccccctgggccaggtgctggtgagacccttcgtggaggtgagcttccagagaaccgtgtgccacaccaccaccgccgagggccccaaccccagctggaacgaggagctggagctgcccttcagagcccccaacggcgactacagcaccgccagcctgcagagcgtgaaggacgtggtgttcatcaacatcttcgacgaggtgctgcacgacgtgctggaggacgacagagagagaggcagcggcatccacaccagaatcgagagacactggctgggctgcgtgaagatgcccttcagcaccatctacttccaggccagattcgagagccaggaggacgagaagctgctgcaggccaccgagaagttccaggccgagtgcgccctgaagttccccaacagacagtgcctgaccaccgtgatcgacatcagcggcaagaccgtgttcatcaccagatacctgaagcccctgaaccccccccaggagctgctgaacgtgtaccccaacaacctgcaggccaccgccgagctggtggccagatacgtgagcctgatccccttcctgcccgacaccgtgagcttcggcggcatctgcgacctgtggagcaccagcgaccagttcctggacctgctggccggcgacgaggaggagcacgccgtgctgctgtgcaactacttcctgagcctgggcaagaaggcctggctgctgatgggcaacgccatccccgagggccccaccgcctacgtgctgacctgggagcagggcagatacctgatctggaacccctgcagcggccacttctacggccagttcgacaccttctgccccctgaagaacgtgggctgcctgatcggccccgacaacatctggttcaacatccagagatacgagagccccctgagaatcaacttcgacgtgaccagacccaagctgtggaagagcttcttcagcagaagcctgccctaccccggcctgagcagcgtgcagcccgaggagctgatctaccagagaagcgacaaggccgccgccgccgagctgcaggacagaatcgagaagatcctgaaggagaagatcatggactggagacccagacacctgaccagatggaacagatactgcaccagcaccctgagacacttcctgcccctgctggagaagagccagggcgaggacgtggaggacgaccacagagccgagctgctgaagcagctgggcgactacagattcagcggcttccccctgcacatgccctacagcgaggtgaagcccctgatcgacgccgtgtacagcaccggcgtgcacaacatcgacgtgcccaacgtggagttcgccctggccgtgtacatccacccctaccccaagaacgtgctgagcgtgtggatctacgtggccagcctgatcagaaacagatag

SEQ ID NO: 77168 - DNA, 4863 bp, synthetic construct
  misc_feature 1..4863: note = Description of Artificial Sequence: Synthetic coding sequence
  source 1..4863: mol_type = other DNA
atgaaccccagagaggagaaggtgaagatcatcaccgaggagttcatcgagaacgacgaggacgccgacatgggcagacagaacaagaacagcaaggtgagaagacagcccagaaagaagcagccccccaccgccgtgcccaaggagatggtgagcgagaagagccacctgggcaacccccaggagcccgtgcaggaggagcccaagaccagactgctgagcatgaccgtgagaagaggccccagaagcctgccccccatccccagcaccagcagaaccggcttcgccgagttcagcatgagaggcagaatgagagagaagctgcaggccgccagaagcaaggccgagagcgccctgctgcaggagatccccacccccagacccagaagactgagaagccccagcaagaaggagctggagaccgagttcggcaccgagcccggcaaggaggtggagagaacccagcaggaggtggacagccagagctacagcagagtgaagttccacgacagcgccagaaagatcaagcccaagccccaggtgccccccggcttccccagcgccgaggaggcctacaacttcttcaccttcaacttcgaccccgagcccgagggcagcgaggagaagcccaaggccagacacagagccggcaccaaccaggaggaggaggagggcgaggaggaggagccccccgcccagggcggcggcaaggagatggacgaggaggagctgctgaacggcgacgacgccgaggacttcctgctgggcctggaccacgtggccgacgacttcgtggccgtgagacccgccgactacgagagcatccacgacagactgcagatggagagagagatgctgttcatccccagcagacagaccgtgcccacctacaagaagctgcccgagaacgtgcagcccagattcctggaggacgagggcctgtacaccggcgtgagacccgaggtggccagaaccaaccagaacatcatggagaacagactgctgatgcaggaccccgagagaagatggttcggcgacgacggcagaatcctggccctgcccaaccccatcaagcccttccccagcagaccccccgtgctgacccaggagcagagcatcaaggccgagctggagaccctgtacaagaaggccgtgaagtacgtgcacagcagccagcacgtgatcagaagcggcgacccccccggcaacttccagctggacatcgacatcagcggcctgatcttcacccaccacccctgcttcagcagagagcacgtgctggccgccaagctggcccagctgtacgaccagtacctggccagacaccagagaaacaaggccaagttcctgaccgacaagctgcaggccctgagaaacgccgtgcagaccggcctggaccccgagaagccccaccagagcctggacaccatccagaagaccatcaacgagtacaagagcgagatcagacagaccagaaagttcagagacgccgagcaggagaaggacagaaccctgctgaagaccatcatcaaggtgtggaaggagatgaagagcctgagagagttccagagattcaccaacacccccctgaagctggtgctgagaaaggagaaggccgaccagaaggccgacgaggaggcctacgaggccgagatccaggccgagatcagcgagctgctggaggagcacaccgaggagtacgcccagaagatggaggagtacagaaccagcctgcagcagtggaaggcctggagaaaggtgcagagagccaagaagaagaagagaaagcaggccgccgaggagcaccccggcgacgagatcgccgagccctaccccgaggaggacctggtgaagcccagcccccccgagcccaccgacagagccgtgatcgagcaggaggtgagagagagagccgcccagagcagaagaagaccctgggagcccaccctggtgcccgagctgagcctggccggcagcgtgacccccaacgaccagtgccccagagccgaggtgagcagaagagaggacgtgaagaagagaagcgtgtacctgaaggtgctgttcaacaacaaggaggtgagcagaaccgtgagcagacccctgggcgccgacttcagagtgcacttcggccagatcttcaacctgcagatcgtgaactggcccgagagcctgaccctgcaggtgtacgagaccgtgggccacagcagccccaccctgctggccgaggtgttcctgcccatccccgagaccaccgtggtgaccggcagagcccccaccgaggaggtggagttcagcagcaaccagcacgtgaccctggaccacgagggcgtgggcagcggcgtgcccttcagcttcgaggccgacggcagcaaccagctgaccctgatgaccagcggcaaggtgagccacagcgtggcctgggccatcggcgagaacggcatccccctgatcccccccctgagccagcagaacatcggcttcagaagcgccctgaagaaggccgacgccatcagcagcatcggcaccagcggcctgaccgacatgaagaagctggccaagtgggccgccgagagcaagctggaccccaacgaccccaacaacgcccccctgatgcagctgatcagcgtggccaccagcggcgagagctacgtgcccgacttcttcagactggagcagctgcagcaggagttcaacttcgtgagcgaccaggagctgaacagaagcaagagattcagactgctgcacctgagaagccaggaggtgcccgagttcagaaactacaagcaggtgcccgtgtacgacagagagatcatggagaaggtgttccaggactacgagaagagactgagagacagaaacgtgatcgagaccaaggagcacatcgacacccacagagccatcgtggccaagtacctgcagcaggtgagagagagcgtgatcaacagattcctgatcgccaagcagtacttcctgctggccgacatgatcgtggaggaggaggtgcccaacatcagcatcctgggcctgagcctgttcaagctggccgagcagaagagacccctgagacccagaagaaagggcagaaagaaggtgaccgcccagaacctgagcgacggcgacatcaagctgctggtgaacatcgtgagagcctacgacatccccgtgagaaagcccgccgtgagcaagttccagcagcccagcagaagcagcagaatgttcagcgagaagcacgccgccagccccagcacctacagccccacccacaacgccgactaccccctgggccaggtgctggtgagacccttcgtggaggtgagcttccagagaaccgtgtgccacaccaccaccgccgagggccccaaccccagctggaacgaggagctggagctgcccttcagagcccccaacggcgactacagcaccgccagcctgcagagcgtgaaggacgtggtgttcatcaacatcttcgacgaggtgctgcacgacgtgctggaggacgacagagagagaggcagcggcatccacaccagaatcgagagacactggctgggctgcgtgaagatgcccttcagcaccatctacttccaggccagaatcgacggcaccttcaagatcgacatcccccccgtgctgctgggctacagcaaggagagaaacatgatcctggagagaggcttcgacagcgtgagaagcctgagcgagggcagctacatcaccctgttcatcaccatcgagccccagctggtgcccggcgagagcatcagagagaagttcgagagccaggaggacgagaagctgctgcaggccaccgagaagttccaggccgagtgcgccctgaagttccccaacagacagtgcctgaccaccgtgatcgacatcagcggcaagaccgtgttcatcaccagatacctgaagcccctgaaccccccccaggagctgctgaacgtgtaccccaacaacctgcaggccaccgccgagctggtggccagatacgtgagcctgatccccttcctgcccgacaccgtgagcttcggcggcatctgcgacctgtggagcaccagcgaccagttcctggacctgctggccggcgacgaggaggagcacgccgtgctgctgtgcaactacttcctgagcctgggcaagaaggcctggctgctgatgggcaacgccatccccgagggccccaccgcctacgtgctgacctgggagcagggcagatacctgatctggaacccctgcagcggccacttctacggccagttcgacaccttctgccccctgaagaacgtgggctgcctgatcggccccgacaacatctggttcaacatccagagatacgagagccccctgagaatcaacttcgacgtgaccagacccaagctgtggaagagcttcttcagcagaagcctgccctaccccggcctgagcagcgtgcagcccgaggagctgatctaccagagaagcgacaaggccgccgccgccgagctgcaggacagaatcgagaagatcctgaaggagaagatcatggactggagacccagacacctgaccagatggaacagatactgcaccagcaccctgagacacttcctgcccctgctggagaagagccagggcgaggacgtggaggacgaccacagagccgagctgctgaagcagctgggcgactacagattcagcggcttccccctgcacatgccctacagcgaggtgaagcccctgatcgacgccgtgtacagcaccggcgtgcacaacatcgacgtgcccaacgtggagttcgccctggccgtgtacatccacccctaccccaagaacgtgctgagcgtgtggatctacgtggccagcctgatcagaaacagatag

SEQ ID NO: 77169 - DNA, 4863 bp, synthetic construct; identical to SEQ ID NO: 77168
  misc_feature 1..4863: note = Description of Artificial Sequence: Synthetic coding sequence
  source 1..4863: mol_type = other DNA

SEQ ID NO: 77170 - DNA, 4539 bp, synthetic construct; identical to SEQ ID NO: 77167
  misc_feature 1..4539: note = Description of Artificial Sequence: Synthetic coding sequence
  source 1..4539: mol_type = other DNA

SEQ ID NO: 77171 - DNA, 369 bp, synthetic construct
  misc_feature 1..369: note = Description of Artificial Sequence: Synthetic coding sequence
  source 1..369: mol_type = other DNA
atgaaccccagagaggagaaggtgaagatcatcaccgaggagttcatcgagaacgacgaggacgccgacatgggcagacagaacaagaacagcaaggtgagaagacagcccagaaagaagcagaagcccacccccttcagcagagcctgctggcagatcctgccccacctgagcgccggcgtgcccctgctgggctgggagcaccccgtgcagggcaagagcttccaggccaccaactgctgcccccagggcaacggcgtgagaaagatccccccctggcagccccccggcgcctgcgccggcggcgcccaggaccccccccccgagtacgacagccccgagagacccaccgagagagccggctgctag

SEQ ID NO: 77172 - DNA, 4863 bp, synthetic construct; identical to SEQ ID NO: 77168
  misc_feature 1..4863: note = Description of Artificial Sequence: Synthetic coding sequence
  source 1..4863: mol_type = other DNA

SEQ ID NO: 77173 - DNA, 369 bp, synthetic construct; identical to SEQ ID NO: 77171
  misc_feature 1..369: note = Description of Artificial Sequence: Synthetic coding sequence
  source 1..369: mol_type = other DNA

SEQ ID NO: 77174 - DNA, 4539 bp, synthetic construct; identical to SEQ ID NO: 77167
  misc_feature 1..4539: note = Description of Artificial Sequence: Synthetic coding sequence
  source 1..4539: mol_type = other DNA

SEQ ID NO: 77175 - DNA, 369 bp, synthetic construct; identical to SEQ ID NO: 77171
  misc_feature 1..369: note = Description of Artificial Sequence: Synthetic coding sequence
  source 1..369: mol_type = other DNA

SEQ ID NO: 77176 - DNA, 1767 bp, synthetic construct
  misc_feature 1..1767: note = Description of Artificial Sequence: Synthetic coding sequence
  source 1..1767: mol_type = other DNA
atgaaccccagagaggagaaggtgaagatcatcaccgaggagttcatcgagaacgacgaggacgccgacatgggcagacagaacaagaacagcaaggtgagaagacagcccagaaagaagcagccccccaccgccgtgcccaaggagatggtgagcgagaagagccacctgggcaacccccaggagcccgtgcaggaggagcccaagaccagactgctgagcatgaccgtgagaagaggccccagaagcctgccccccatccccagcaccagcagaaccggcttcgccgagttcagcatgagaggcagaatgagagagaagctgcaggccgccagaagcaaggccgagagcgccctgctgcaggagatccccacccccagacccagaagactgagaagccccagcaagaaggagctggagaccgagttcggcaccgagcccggcaaggaggtggagagaacccagcaggaggtggacagccagagctacagcagagtgaagttccacgacagcgccagaaagatcaagcccaagccccaggtgccccccggcttccccagcgccgaggaggcctacaacttcttcaccttcaacttcgaccccgagcccgagggcagcgaggagaagcccaaggccagacacagagccggcaccaaccaggaggaggaggagggcgaggaggaggagccccccgcccagggcggcggcaaggagatggacgaggaggagctgctgaacggcgacgacgccgaggacttcctgctgggcctggaccacgtggccgacgacttcgtggccgtgagacccgccgactacgagagcatccacgacagactgcagatggagagagagatgctgttcatccccagcagacagaccgtgcccacctacaagaagctgcccgagaacgtgcagcccagattcctggaggacgagggcctgtacaccggcgtgagacccgaggtggccagaaccaaccagaacatcatggagaacagactgctgatgcaggaccccgagagaagatggttcggcgacgacggcagaatcctggccctgcccaaccccatcaagcccttccccagcagaccccccgtgctgacccaggagcagagcatcaaggccgagctggagaccctgtacaagaaggccgtgaagtacgtgcacagcagccagcacgtgatcagaagcggcgacccccccggcaacttccagctggacatcgacatcagcggcctgatcttcacccaccacccctgcttcagcagagagcacgtgctggccgccaagctggcccagctgtacgaccagtacctggccagacaccagagaaacaaggccaagttcctgaccgacaagctgcaggccctgagaaacgccgtgcagaccggcctggaccccgagaagccccaccagagcctggacaccatccagaagaccatcaacgagtacaagagcgagatcagacagaccagaaagttcagagacgccgagcaggagaaggacagaaccctgctgaagaccatcatcaaggtgtggaaggagatgaagagcctgagagagttccagagattcaccaacacccccctgaagctggtgctgagaaaggagaaggccgaccagaaggccgacgaggaggcctacgaggccgagatccaggccgagatcagcgagctgctggaggagcacaccgaggagtacgcccagaagatggaggagtacagaaccagcctgcagcagtggaaggcctggagaaaggtgcagtag

SEQ ID NO: 77177 - DNA, 336 bp, synthetic construct
  misc_feature 1..336: note = Description of Artificial Sequence: Synthetic coding sequence
  source 1..336: mol_type = other DNA
atgaaccccagagaggagaaggtgaagatcatcaccgaggagttcatcgagaacgacgaggacgccgacatgggcagacagaacaagaacagcaaggtgagaagacagcccagaaagaagcagccccccaccgccgtgcccaaggagatggtgagcgagaagagccacctgggcaacccccaggagcccgtgcaggaggagcccaagaccagactgctgagcatgaccgtgagaagaggccccagaagagagctggtggtgaagaagagcctgggcagacccggcaccgtgacccacgtgtgcaaccccagcaccctggagggcagaggcggctag

SEQ ID NO: 77178 - DNA, 882 bp, synthetic construct
  misc_feature 1..882: note = Description of Artificial Sequence: Synthetic coding sequence
  source 1..882: mol_type = other DNA
atggccctggtgagcgccgacagcagaatcgccgagctgctgaccgagctgcaccagctgatcaagcagacccaggaggagagaagcagaagcgagcacaacctggtgaacatccagaagacccacgagagaatgcagaccgagaacaagatcagcccctactacagaaccaagctgagaggcctgtacaccaccgccaaggccgacgccgaggccgagtgcaacatcctgagaaaggccctggacaagatcgccgagatcaagagcctgctggaggagagaagaatcgccgccaagatcgccggcctgtacaacgacagcgagccccccagaaagaccatgagaagaggcgtgctgatgaccctgctgcagcagagcgccatgaccctgcccctgtggatcggcaagcccggcgacaagcccccccccctgtgcggcgccatccccgccagcggcgactacgtggccagacccggcgacaaggtggccgccagagtgaaggccgtggacggcgacgagcagtggatcctggccgaggtggtgagctacagccacgccaccaacaagtacgaggtggacgacatcgacgaggagggcaaggagagacacaccctgagcagaagaagagtgatccccctgccccagtggaaggccaaccccgagaccgaccccgaggccctgttccagaaggagcagctggtgctggccctgtacccccagaccacctgcttctacagagccctgatccacgcccccccccagagaccccaggacgactacagcgtgctgttcgaggacaccagctacgccgacggctacagcccccccctgaacgtggcccagagatacgtggtggcctgcaaggagcccaagaagaagtag

SEQ ID NO: 77179 - DNA, 843 bp, synthetic construct
  misc_feature 1..843: note = Description of Artificial Sequence: Synthetic coding sequence
  source 1..843: mol_type = other DNA
atgaacgacagaagcagcagaagaagaaccatgaaggacgacgagaccttcgagatcagcatccccttcgacgaggccccccacctggacccccagatcttctacagcctgagccccagcagaagaaacttcgaggagccccccgaggccgccagcagcgccctggccctgatgaacagcgtgaagacccagctgcacatggccctggagagaaacagctggctgcagaagagaatcgaggacctggaggaggagagagacttcctgagatgccagctggacaagttcatcagcagcgccagaatggaggccgaggaccactgcagaatgaagcccggccccagaagaatggagggcgacagcagaggcggcgccggcggcgaggccagcgaccccgagagcgccgccagcagcctgagcggcgccagcgaggagggcagcgccagcgagagaagaagacagaagcagaagggcggcgccagcagaagaagattcggcaagcccaaggccagagagagacagagagtgaaggacgccgacggcgtgctgtgcagatacaagaagatcctgggcaccttccagaagctgaagagcatgagcagagccttcgagcaccacagagtggacagaaacaccgtggccctgaccacccccatcgccgagctgctgatcgtggcccccgagaagctggccgaggtgggcgagttcgaccccagcaaggagagactgctggagtacagcagaagatgcttcctggccctggacgacgagaccctgaagaaggtgcaggccctgaagaagagcaagctgctgctgcccatcacctacagattcaagagatag

SEQ ID NO: 77180 - DNA, 495 bp, synthetic construct
  misc_feature 1..495: note = Description of Artificial Sequence: Synthetic coding sequence
  source 1..495: mol_type = other DNA
atgatgctgacccaggcccccagcagcgtggtgagaagcagaaacagcagaaaccacaccgtgaacagcggcggcagctgcctgagcgccagcaccgtggccatccccgccatcaacgacagcagcgccgccatgagcgcctgcagcaccatcagcgcccagcccgccagcagcatggacacccagatgcacagccccaagaagcaggagagagtgaacaagagagtgatctggggcatcgaggtggccgaggagctgcactggaagggctgggagctgggcaaggagaccaccagaaacctggtgctgaagaacagaagcctgaagctgcagaagatgaagtacagataccagtacaagggcagcagaacccagtgccacagcctggagcccagaaagcaggccctgttcaagaccaagcagaacaagcagaagaagcccctgacctgccacatcaaggccagcgagtgcctgaagtacgtgcagtacgagtag

SEQ ID NO: 77181 - DNA, 495 bp, synthetic construct; identical to SEQ ID NO: 77180
  misc_feature 1..495: note = Description of Artificial Sequence: Synthetic coding sequence
  source 1..495: mol_type = other DNA

SEQ ID NO: 77182 - DNA, 5778 bp, synthetic construct
  misc_feature 1..5778: note = Description of Artificial Sequence: Synthetic coding sequence
  source 1..5778: mol_type = other DNA
atgttcaccctgaccggctgcagactggtggagaagacccagaaggtggagaaccccagcgtgagcttcgccagcagcttccccctgatccccctgctgctgagaggcaagagcgtgcagaagaagcaggccgagagcaagagccagatcaagctgcacacccagagcgcccccttcggcctgtgccccaaggacatgatgctgacccaggcccccagcagcgtggtgagaagcagaaacagcagaaaccacaccgtgaacagcggcggcagctgcctgagcgccagcaccgtggccatccccgccatcaacgacagcagcgccgccatgagcgcctgcagcaccatcagcgcccagcccgccagcagcatggacacccagatgcacagccccaagaagcaggagagagtgaacaagagagtgatctggggcatcgaggtggccgaggagctgcactggaagggctgggagctgggcaaggagaccaccagaaacctggtgctgaagaacagaagcctgaagctgcagaagatgaagtacagaccccccaagaccaagttcttcttcaccgtgatcccccagcccatcttcctgagccccggcatcaccctgaccctgcccatcgtgttcagacccctggaggccaaggagtacatggaccagctgtggttcgagaaggccgagggcatgttctgcgtgggcctgagagccaccctgccctgccacagactgatctgcagaccccccagcctgcagctgcccatgtgcgccgtgggcgacaccaccgaggccttcttctgcctggacaacgtgggcgacctgcccaccttcttcacctgggagttcagcagccccttccagatgctgcccgccaccggcctgctggagcccggccaggccagccagatcaaggtgaccttccagcccctgaccgccgtgatctacgaggtgcaggccacctgctggtacggcgccggcagcagacagagaagcagcatccagctgcaggccgtggccaagtgcgcccagctgctggtgagcatcaagcacaagtgccccgaggaccaggacgccgagggcttccagaagctgctgtacttcggcagcgtggccgtgggctgcaccagcgagagacagatcagactgcacaaccccagcgccgtgaacgcccccttcagaatcgagatcagccccgacgagctggccgaggaccaggccttcagctgccccaccgcccacggcatcgtgctgcccggcgagaagaagtgcgtgagcgtgttcttccaccccaagaccctggacaccagaaccgtggactactgcagcatcatgcccagcggctgcgccagcaagaccctgctgaaggtggtgggcttctgcagaggccccgccgtgagcctgcagcactactgcgtgaacttcagctgggtgaacctgggcgagagaagcgagcagcccctgtggatcgagaaccagagcgactgcaccgcccacttccagttcgccatcgactgcctggagagcgtgttcaccatcagacccgccttcggcaccctggtgggcaaggccagaatgaccctgcactgcgccttccagcccacccaccccatcatctgcttcagaagagtggcctgcctgatccaccaccaggaccccctgttcctggacctgatgggcacctgccacagcgacagcaccaagcccgccatcctgaagccccagcacctgacctggtacagaacccacctggccagaggcctgaccctgtacccccccgacatcctggacgccatgctgaaggagaagaagctggcccaggaccagaacggcgccctgatgatccccatccaggacctggaggacatgcccgccccccagtacccctacatcccccccatgaccgagttcttcttcgacggcaccagcgacatcaccatcttccccccccccatcagcgtggagcccgtggaggtggacttcggcgcctgccccggccccgaggcccccaaccccgtgcccctgtgcctgatgaaccacaccaagggcaagatcatggtggtgtggaccagaagaagcgactgccccttctgggtgacccccgagagctgcgacgtgccccccctgaagagcatggccatgagactgcacttccagcccccccaccccaactgcctgtacaccgtggagctggaggccttcgccatctacaaggtgctgcagagctacagcaacatcgaggaggactgcaccatgtgccccagctggtgcctgaccgtgagagccagaggccacagctacttcgccggcttcgagcaccacatcccccagtacagcctggacgtgcccaagctgttccccgccgtgagcagcggcgagcccacctacagaagcctgctgctggtgaacaaggactgcaagctgctgaccttcagcctggccccccagagaggcagcgacgtgatcctgagacccaccagcggcctggtggcccccggcgcccaccagatcatcctgatctgcacctaccccgagggcagcagctggaagcagcacaccttctacctgcagtgcaacgccagcccccagtacctgaaggaggtgagcatgtacagcagagaggagcccctgcagctgaagctggacacccacaagagcctgtacttcaagcccacctgggtgggctgcagcagcaccagccccttcaccttcagaaaccccagcagactgcccctgcagttcgagtggagagtgagcgagcagcacagaaagctgctggccgtgcagcccagcagaggcctgatccagcccaacgagagactgaccctgacctggaccttcagccccctggaggagaccaagtacctgttccaggtgggcatgtgggtgtgggaggccggcctgagccccaacgccaaccccgccgccaccacccactacatgctgagactggtgggcgtgggcctgaccagcagcctgagcgccaaggagaaggagctggccttcggcaacgtgctggtgaacagcaagcagagcagattcctggtgctgctgaacgacggcaactgcaccctgtactacagactgtacctggagcagggcagccccgaggccgtggacaaccaccccctggccctgcagctggacagaaccgagggcagcatgccccccagaagccaggacaccatctgcctgaccgcctgccccaagcagagaagccagtacagctggaccatcacctacagcctgctgagccacagagacaacaaggccggcgagaagcaggagctgtgctgcgtgagcctggtggccgtgtaccccctgctgagcatcctggacgtgagcagcatgggcagcgccgagggcatcaccagaaagcacctgtggagactgttcagcctggacctgctgaacagctacctggagagagaccccaccccctgcgagctgacctacaaggtgcccaccagacacagcatgagccagatcccccccgtgctgacccccctgagactggacttcaacttcggcgccgcccccttcaaggccccccccagcgtggtgttcctggccctgaagaacagcggcgtggtgagcctggactgggccttcctgctgcccagcgaccagagaatcgacgtggagctgtgggccgagcaggccgagctgaacagcaccgagctgcaccagatgagagtgcaggacaactgcctgttcagcatcagccccaaggccggcagcctgagccccggccaggagcagatggtggagctgaagtacagccacctgttcatcggcaccgaccacctgcccgtgctgttcaaggtgagccacggcagagagatcctgctgaacttcatcggcgtgaccgtgaagcccgagcagaagtacgtgcacttcaccagcaccacccaccagttcatccccatccccatcggcgacaccctgccccccagacagatctacgagctgtacaacggcggcagcgtgcccgtgacctacgaggtgcagaccgacgtgctgagccaggtgcaggagaagaacttcgaccaccccatcttctgctgcctgaaccccaagggcgagatccagcccggcagcaccgccagagtgctgtggatcttcagccccatcgaggccaagacctacaccgtggacgtgcccatccacatcctgggctggaacagcgccctgatccacttccagggcgtgggctacaacccccacatgatgggcgacaccgcccccttccacaacatcagcagctgggacaacagcagcatccacagcagactggtggtgcccggccagaacgtgttcctgagccagagccacatcagcctgggcaacatccccgtgcagagcaagtgcagcagactgctgttcctgaacaacatcagcaagaacgaggagatcgccttcagctggcagcccagccccctggacttcggcgaggtgagcgtgagccccatgatcggcgtggtggcccccgaggagaccgtgcccttcgtggtgaccctgagagccagcgtgcacgccagcttctacagcgccgacctggtgtgcaagctgtacagccagcagctgatgagacagtaccacaaggagctgcaggagtggaaggacgagaaggtgagacaggaggtggagttcaccatcaccgacatgaaggtgaagaagagaacctgctgcaccgcctgcgagcccgccagaaagtacaagaccctgccccccatcaagaaccagcagagcgtgagcagacccgccagctggaagctgcagacccccaaggaggaggtgagctggccctgcccccagccccccagccccggcatgctgtgcctgggcctgaccgccagagcccacgccaccgactacttcctggccaacttcttcagcgagttcccctgccacttcctgcacagagagctgcccaagagaaaggcccccagagaggagagcgagaccagcgaggagaagagccccaacaagtggggccccgtgagcaagcagaagaagcagctgctggtggacatcctgaccaccatcatcagaggcctgctggaggacaagaacttccacgaggccgtggaccagagcctggtggagcaggtgccctacttcagacagttctggaacgagcagagcaccaagttcatggaccagaagaacagcctgtacctgatgcccatcctgcccgtgcccagcagcagctgggaggacggcaagggcaagcagcccaaggaggacagacccgagcactaccccggcctgggcaagaaggaggagggcgaggaggagaagggcgaggaggaggaggaggagctggaggaggaggaggaggaggaggaggagaccgaggaggaggagctgggcaaggaggagatcgaggagaaggaggaggagagagacgagaaggaggagaaggtgagctgggccggcatcggccccaccccccagcccgagagccaggagagcatgcagtggcagtggcagcagcagctgaacgtgatggtgaaggaggagcaggagcaggacgagaaggaggccatcagaagactgcccgccttcgccaacctgcaggaggccctgctggagaacatgatccagaacatcctggtggaggccagcagaggcgaggtggtgctgaccagcagacccagagtgatcgccctgccccccttctgcgtgcccagaagcctgacccccgacaccctgctgcccacccagcaggccgaggtgctgcaccccgtggtgcccctgcccaccgacctgccctag

SEQ ID NO: 77183 - DNA, 2190 bp, synthetic construct
  misc_feature 1..2190: note = Description of Artificial Sequence: Synthetic coding sequence
  source 1..2190: mol_type = other DNA
atgctgacccaggcccccagcagcgtggtgagaagcagaaacagcagaaaccacaccgtgaacagcggcggcagctgcctgagcgccagcaccgtggccatccccgccatcaacgacagcagcgccgccatgagcgcctgcagcaccatcagcgcccagcccgccagcagcatggacacccagatgcacagccccaagaagcaggagagagtgaacaagagagtgatctggggcatcgaggtggccgaggagctgcactggaagggctgggagctgggcaaggagaccaccagaaacctggtgctgaagaacagaagcctgaagctgcagaagatgaagtacagaccccccaagaccaagttcttcttcaccgtgatcccccagcccatcttcctgagccccggcatcaccctgaccctgcccatcgtgttcagacccctggaggccaaggagtacatggaccagctgtggttcgagaaggccgagggcatgttctgcgtgggcctgagagccaccctgccctgccacagactgatctgcagaccccccagcctgcagctgcccatgtgcgccgtgggcgacaccaccgaggccttcttctgcctggacaacgtgggcgacctgcccaccttcttcacctgggagttcagcagccccttccagatgctgcccgccaccggcctgctggagcccggccaggccagccagatcaaggtgaccttccagcccctgaccgccgtgatctacgaggtgcaggccacctgctggtacggcgccggcagcagacagagaagcagcatccagctgcaggccgtggccaagtgcgcccagctgctggtgagcatcaagcacaagtgccccgaggaccaggacgccgagggcttccagaagctgctgtacttcggcagcgtggccgtgggctgcaccagcgagagacagatcagactgcacaaccccagcgccgtgaacgcccccttcagaatcgagatcagccccgacgagctggccgaggaccaggccttcagctgccccaccgcccacggcatcgtgctgcccggcgagaagaagtgcgtgagcgtgttcttccaccccaagaccctggacaccagaaccgtggactactgcagcatcatgcccagcggctgcgccagcaagaccctgctgaaggtggtgggcttctgcagaggccccgccgtgagcctgcagcactactgcgtgaacttcagctgggtgaacctgggcgagagaagcgagcagcccctgtggatcgagaaccagagcgactgcaccgcccacttccagttcgccatcgactgcctggagagcgtgttcaccatcagacccgccttcggcaccctggtgggcaaggccagaatgaccctgcactgcgccttccagcccacccaccccatcatctgcttcagaagagtggcctgcctgatccaccaccaggaccccctgttcctggacctgatgggcacctgccacagcgacagcaccaagcccgccatcctgaagccccagcacctgacctggtacagaacccacctggccagaggcctgaccctgtacccccccgacatcctggacgccatgctgaaggagaagaagctggcccaggaccagaacggcgccctgatgatccccatccaggacctggaggacatgcccgccccccagtacccctacatcccccccatgaccgagttcttcttcgacggcaccagcgacatcaccatcttccccccccccatcagcgtggagcccgtggaggtggacttcggcgcctgccccggccccgaggcccccaaccccgtgcccctgtgcctgatgaaccacaccaagggcaagatcatggtggtgtggaccagaagaagcgactgccccttctgggtgacccccgagagctgcgacgtgccccccctgaagagcatggccatgagactgcacttccagcccccccaccccaactgcctgtacaccgtggagctggaggccttcgccatctacaaggtgtgcgccagaaacgagagagaggagtgcggcgtgagcgccagaagcctgagcggcctggtgggctggcaggaggtgaccgagggcagcttcagactgcaccccctgagagccagactgagcctgggctggaccgtgacccccatgagcctgagcccccccaagctgctggcctag

SEQ ID NO: 77184 - DNA, 5778 bp, synthetic construct; identical to SEQ ID NO: 77182
  misc_feature 1..5778: note = Description of Artificial Sequence: Synthetic coding sequence
  source 1..5778: mol_type = other DNA

SEQ ID NO: 77185 - DNA, 5778 bp, synthetic construct; identical to SEQ ID NO: 77182
  misc_feature 1..5778: note = Description of Artificial Sequence: Synthetic coding sequence
  source 1..5778: mol_type = other DNA

SEQ ID NO: 77186 - DNA, 816 bp, synthetic construct
  misc_feature 1..816: note = Description of Artificial Sequence: Synthetic coding sequence
  source 1..816: mol_type = other DNA
atgaccctgcactgcgccttccagcccacccaccccatcatctgcttcagaagagtggcctgcctgatccaccaccaggaccccctgttcctggacctgatgggcacctgccacagcgacagcaccaagcccgccatcctgaagccccagcacctgacctggtacagaacccacctggccagaggcctgaccctgtacccccccgacatcctggacgccatgctgaaggagaagaagctggcccaggaccagaacggcgccctgatgatccccatccaggacctggaggacatgcccgccccccagtacccctacatcccccccatgaccgagttcttcttcgacggcaccagcgacatcaccatcttccccccccccatcagcgtggagcccgtggaggtggacttcggcgcctgccccggccccgaggcccccaaccccgtgcccctgtgcctgatgaaccacaccaagggcaagatcatggtggtgtggaccagaagaagcgactgccccttctgggtgacccccgagagctgcgacgtgccccccctgaagagcatggccatgagactgcacttccagcccccccaccccaactgcctgtacaccgtggagctggaggccttcgccatctacaaggtgtgcgccagaaacgagagagaggagtgcggcgtgagcgccagaagcctgagcggcctggtgggctggcaggaggtgaccgagggcagcttcagactgcaccccctgagagccagactgagcctgggctggaccgtgacccccatgagcctgagcccccccaagctgctggcctag

SEQ ID NO: 77187 - DNA, 543 bp, synthetic construct
  misc_feature 1..543: note = Description of Artificial Sequence: Synthetic coding sequence
  source 1..543: mol_type = other DNA
atggccgccctggacctgagagccgagctggacagcctggtgctgcagctgctgggcgacctggaggagctggagggcaagagaaccgtgctgaacgccagagtggaggagggctggctgagcctggccaaggccagatacgccatgggcgccaagagcgtgggccccctgcagtacgccagccacatggagccccaggtgtgcctgcacgccagcgaggcccaggagggcctgcagaagttcaaggtggtgagagccggcgtgcacgcccccgaggaggtgggccccagagaggccggcctgagaagaagaaagggccccaccaagacccccgagcccgagagcagcgaggccccccaggaccccctgaactggttcggcatcctggtgccccacagcctgagacaggcccaggccagcttcagagacggcctgcagctggccgccgacatcgccagcctgcagaacagaatcgactggggcagaagccagctgagaggcctgcaggagaagctgaagcagctggagcccggcgccgcctag

SEQ ID NO: 77188 - DNA, 567 bp, synthetic construct
  misc_feature 1..567: note = Description of Artificial Sequence: Synthetic coding sequence
  source 1..567: mol_type = other DNA
atgggcacccccctggacggcggcagcagagtgcccatcggctgccccgccaagctgagaagagtgaccagaaagaaggtggcccccgacctggagggctggctgagcctggccaaggccagatacgccatgggcgccaagagcgtgggccccctgcagtacgccagccacatggagccccaggtgtgcctgcacgccagcgaggcccaggagggcctgcagaagttcaaggtggtgagagccggcgtgcacgcccccgaggaggtgggccccagagaggccggcctgagaagaagaaagggccccaccaagacccccgagcccgagagcagcgaggccccccaggaccccctgaactggttcggcatcctggtgccccacagcctgagacaggcccaggccagcttcagagacggcgtgctggaggccaagaagagaaagtgcttcctggagagagtgatccagtgcgtggtgagccccgccgccgagcaggaggccgaggacgagagctgccccgaggactgggccgccgccgtgcccgccgagaccagcgccaaggccatctag

SEQ ID NO: 77189 - DNA, 855 bp, synthetic construct
  misc_feature 1..855: note = Description of Artificial Sequence: Synthetic coding sequence
  source 1..855: mol_type = other DNA
atgagcgacaacaaggagagaaagagccagggcttccccaaggaggacaaccaggacaccagcagcctggccgacgccgtggagaaggtggccaagcagcagcagagccaggccagcgagatcgagaagaacaagaaggtgctgttcaacctgaagaacgagctgcacgagctggagaaggagatcgccgccatcagcgccgagaccaaggagaccgagagacagatctaccagcaggacagcgccatcgagaacaccaagctgcactgcgacagcctggagacccagatcaagagcctgcacagcgagaacgtgaagctgaagttcgacatcgagaccgcccaggaggacttcgaggagcacatgatcaagtacaacgcctactacgccaagatcaaggcccacaagaacagcctgggcgaggtggagagcaagtggagcttcatgaccgagctgcacgagaagagagacttcgtgaagaagctgaagaccatgaaggaggagctgatgcaggacctgcagaaccccggcggcaacagaatcacccaggtgcaggaggacatcaccaacctgaaggacaagatcatcaccgtgaaggagagcatcatcgagaagacctgcttcctggaggaggagaagaagacccacgagaagctgagaaaggagatcgagagcctggcccccagccccagactggagtgcagcagcgccatcagcgcccactgcaagctgtgcctgcccggcagcagacacagccccgccagcgccagcggcgtggccggcaccaccggcgcctgccaccacacccagctgatcttctgcatcttcagcagagacggcgtgagcccctgctag

SEQ ID NO: 77190 - DNA, 822 bp, synthetic construct
  misc_feature 1..822: note = Description of Artificial Sequence: Synthetic coding sequence
  source 1..822: mol_type = other DNA
atgagcgacaacaaggagagaaagagccagggcttccccaaggaggacaaccaggacaccagcagcctggccgacgccgtggagaaggtggccaagcagcagcagagccaggccagcgagatcgagaagaacaagaaggtgctgttcaacctgaagaacgagctgcacgagctggagaaggagatcgccgccatcagcgccgagaccaaggagaccgagagacagatctaccagcaggacagcgccatcgagaacaccaagctgcactgcgacagcctggagacccagatcaagagcctgcacagcgagaacgtgaagctgaagttcgacatcgagaccgcccaggaggacttcgaggagcacatgatcaagtacaacgcctactacgccaagatcaaggcccacaagaacagcctgggcgaggtggagagcaagtggagcttcatgaccgagctgcacgagaagagagacttcgtgaagaagctgaagaccatgaaggaggagctgatgcaggacctgcagaaccccggcggcaacagaatcacccaggtgcaggaggacatcaccaacctgaaggacaagatcatcaccgtgaaggagagcatcatcgagaagacctgcttcctggaggaggagaagaagacccacgagaagctgagaaaggagatcgaggtgcagcacaagagatacgacgccatcctgaagagactgcactgccaggtgaacaagctgcagagcaacagaagacagtggcagtggaacatccagcagctggagaagaccgccgccgagctgagaaagtgcatcggcatgcaggagtag

SEQ ID NO: 77191 - DNA, 1536 bp, synthetic construct
  misc_feature 1..1536: note = Description of Artificial Sequence: Synthetic coding sequence
  source 1..1536: mol_type = other DNA
atgagcaaggtggccagaagcagcagcgagagcgacgtgcagctgtgggagaccgaggaggacgacatgaccgagggcgacctgggctacggcctgggcagaaagcccggcggcatctacgagatcgagttcagccacagaagcagaaagagaagcgacggcaagaacttcagccccccccccttccccagaaagggcgaggagagaaacgaggccagcttccagtacagcaagcacaagagccagcaggacaccttcccccaggtgagcagaatcagcaactacagaagacagagcagcaccgtggacagcaacagcgagctgagcaacgaggagctgagacagtgcctgaacgagaccctggaggaggtggagatgctgaagaccgagctggaggccagccagagacagctgagaggcaaggaggaggccctgaagatcctgcagagcatggccatcctgggcaaggccaccagccacacccaggccgtgctgcagaagaccatggagcagaacagaagcctggagaaggagatcaacgccctgcagtgggagatcgagttcgaccacaacagattcaagaacatcgaggagagctggatccagaagtacgacagactgaactgcgagaacgccgtgctgaaggagaacctgaaggtgaagaccgaggagatcaagatgctgaagagcgacaacgccgtgctgaaccagagatacctggaggccctggccatgctggacatcaagcagcagaagatggcccaggagaacatgtgctgcgacaagagcggcttcgccgaggccagcggcctggagctggccgtgctgggcgcctgcctgtgccacggccccggcggcaacccctgcagctgcgccagaatggccgccagcaccagaaagctgctgctgcagctgaagcaggagctggagatcctgcagaagagcaaggaggaggcctacgtgatggccgacgccttcagaatcgccttcgagcagcagctgatgagaaagaacgaccaggccctgcagctgacccagatggacaagatgcacaagaaggccaccaagtggatgaactggaagcacctgaaggaggacggcttccccagccccagaagcaagaagaccttcggccagagactgctgggcatgctgcccagcgagaacagcagcaagagaatggaggaccaggacagcccccaggaggtgctgaagatgctgatcgacctgctgaacgacaaggaggaggccctggcccaccagagaaaggtgagctacatgctggccagagccctggaggacaaggacaccgccagcaacgagaacaaggagaagaaccccatcaaggagaacttccccttcaacaacccctggagaaagaccagcgagttcagcgtgctgggcgaccccatccacagcagcgtgtgcatcctgaacagcgtgggctgcatctgcagcatccagcacagccagatcgaccccaactacagaaccctgaagagaagccacagcctgcccagcagcatcatcttctag

SEQ ID NO: 77192 - DNA, 1536 bp, synthetic construct; identical to SEQ ID NO: 77191
  misc_feature 1..1536: note = Description of Artificial Sequence: Synthetic coding sequence
  source 1..1536: mol_type = other DNA

SEQ ID NO: 77193 - DNA, 1161 bp, synthetic construct
  misc_feature 1..1161: note = Description of Artificial Sequence: Synthetic coding sequence
  source 1..1161: mol_type = other DNA
atgctgaagaccgagctggaggccagccagagacagctgagaggcaaggaggaggccctgaagatcctgcagagcatggccatcctgggcaaggccaccagccacacccaggccgtgctgcagaagaccatggagcagaacagaagcctggagaaggagatcaacgccctgcagtgggagatcgagttcgaccacaacagattcaagaacatcgaggagagctggatccagaagtacgacagactgaactgcgagaacgccgtgctgaaggagaacctgaaggtgaagaccgaggagatcaagatgctgaagagcgacaacgccgtgctgaaccagagatacctggaggccctggccatgctggacatcaagcagcagaagatggcccaggagaacatgtgctgcgacaagagcggcttcgccgaggccagcggcctggagctggccgtgctgggcgcctgcctgtgccacggccccggcggcaacccctgcagctgcgccagaatggccgccagcaccagaaagctgctgctgcagctgaagcaggagctggagatcctgcagaagagcaaggaggaggcctacgtgatggccgacgccttcagaatcgccttcgagcagcagctgatgagaaagaacgaccaggccctgcagctgacccagatggacaagatgcacaagaaggccaccaagtggatgaactggaagcacctgaaggaggacggcttccccagccccagaagcaagaagaccttcggccagagactgctgggcatgctgcccagcgagaacagcagcaagagaatggaggaccaggacagcccccaggaggtgctgaagatgctgatcgacctgctgaacgacaaggaggaggccctggcccaccagagaaaggtgagctacatgctggccagagccctggaggacaaggacaccgccagcaacgagaacaaggagaagaaccccatcaaggagaacttccccttcaacaacccctggagaaagaccagcgagttcagcgtgctgggcgaccccatccacagcagcgtgtgcatcctgaacagcgtgggctgcatctgcagcatccagcacagccagatcgaccccaactacagaaccctgaagagaagccacagcctgcccagcagcatcatcttctag

SEQ ID NO: 77194 - DNA, 3465 bp, synthetic construct
  misc_feature 1..3465: note = Description of Artificial Sequence: Synthetic coding sequence
  source 1..3465: mol_type = other DNA
atgcaggccatggagggcgaggtgctgctgcccgccctgtacgaggaggaggaggaggaggaggaggaggaggaggaggtggaggaggaggaggagcaggtgcagaagggcggcagcgtgggcagcctgagcgtgaacaagcacagaggcctgagcctgaccgagaccgagctggaggagctgagagcccaggtgctgcagctggtggccgagctggaggagaccagagagctggccggccagcacgaggacgacagcctggagctgcagggcctgctggaggacgagagactggccagcgcccagcaggccgaggtgttcaccaagcagatccagcagctgcagggcgagctgagaagcctgagagaggagatcagcctgctggagcacgagaaggagagcgagctgaaggagatcgagcaggagctgcacctggcccaggccgagatccagagcctgagacaggccgccgaggacagcgccaccgagcacgagagcgacatcgccagcctgcaggaggacctgtgcagaatgcagaacgagctggaggacatggagagaatcagaggcgactacgagatggagatcgccagcctgagagccgagatggagatgaagagcagcgagcccagcggcagcctgggcctgagcgactacagcggcctgcaggaggagctgcaggagctgagagagagataccacttcctgaacgaggagtacagagccctgcaggagagcaacagcagcctgaccggccagctggccgacctggagagcgagagaacccagagagccaccgagagatggctgcagagccagaccctgagcatgaccagcgccgagagccagaccagcgagatggacttcctggagcccgaccccgagatgcagctgctgagacagcagctgagagacgccgaggagcagatgcacggcatgaagaacaagtgccaggagctgtgctgcgagctggaggagctgcagcaccacagacaggtgagcgaggaggagcagagaagactgcagagagagctgaagtgcgcccagaacgaggtgctgagattccagaccagccacagcgtgacccagaacgaggagctgaagagcagactgtgcaccctgcagaagaagtacgacaccagccaggacgagcagaacgagctgctgaagatgcagctgcagctgcagaccgagctgagacagctgaaggtgatgaagagcaccctggtggagaaccagagcgagaaggagctgctgtgcagactgcagaagctgcacctgcagcaccagaacgtgacctgcgagaaggagaagctgctggagagacagcagcagctgcaggaggagctgcagtgccacgaggccgagctgcagcacctgagagacaccgtggccagcttcaaggagagcaacgagaaggacaccgagacccacgcccagctgcaggagatgaagcagctgtaccaggccagcaaggacgagctggagagacagaagcacatgtacgaccagctggagcaggacctgctgctgtgccagctggagctgaaggagctgaaggccagccaccccatccccgaggacaagggcaagtgcgccaacaagtgcgacaccctgctgagcagactgaccgagctgcaggagaagtacaaggccagccagaaggagatgggccagctgcagatggagcagtgcgagctgctggaggaccagagaagaatgcaggaggagcagggccagctgcaggaggagctgcacagactgaccctgcccctgcccaagagcggcctgctgctgaagagccaggagctgctgaccaagctggaggacctgtgcgagctgcagctgctgtaccagggcatgcaggaggagcagaagaagctgatccagaaccaggactgcgtgctgaaggagcagctggagatccacgaggagctgagaagattcaaggagagccacttccaggaggtgctggagaaccccgacgacagcaagctggccaagagcagcaagtgcaacagaaacaagcagagcaagctgctgatggagcagatgcaggccctgcaggtgatgtacgacgccggccaggccaagcaggagctgctgcagcaggagcagggcagactgctggaggagagaaagagactgcaggccgacctgcagctgtgcctggaggagatgcagctgctgcaggtgcagagccccagcatcaagatgagcctggagagctacggcaagagctacggcagcatggtgcccagcaacgagaactgcagaaagacctacgacaccaccgtggacgacaacgagagctactacaagagctacaccagcacccagaccagcagcaagagcttcctgaagagctacgacagcagcaccagcgccagcgaggcctacggcaagagctactgcaccaccagcaacagcagcatcacctacaagaagagctacggcagcaccagcagcagcgacacctgccagaagagcttcgtgagcagctgcaccgacgaggagcccgccgagcccgaggacatggagagattcgaggagatggtggtgaaggtgctgatcaagctgcaggccgtgcaggccatgtaccagatcagccaggaggagcacagccagctgcaggagcagatggagaagctgctggccaagcagaaggacctgaaggaggagctggacgcctgcgagagagagttcaaggagtgcatggagtgcctggagaagcccatggccccccagaacgacaagaacgagatcaaggagctgcagaccaagctgagagagctgcagctgcagtaccaggccagcatggacgagcagggcagactgctggtggtgcaggagcagctggagggccagctgcagtgctgccaggaggagctgagacagctgagagagaagagacccagcgtggtgaaggaggccagaggcaagaacgccaacaagaacatgaacaagaacgccaacggcgtgaagatgaagaaggtgaccaagccctgcagcgacaccagcgagagcgacctggagaccagaaagagcctggaggtggtgctgtactacaaggccagccagagaaagctggacggcctggccaaggaggaggagaagaaggaggagatggaggaggagaagaagcaggtgaaggaggaggccaaggagcagtgcggcgacgagctggtggccgagcccgccgaccccgaggaggccaagagcaccgaggaccaggaggagaacgaggaggacaaggaggaggaggagaaggaggaggacagcgaggaggaggaggacgacgccgacagcagcctggagagccccgaggagaacaaccccctgagactgagcgagagcaagaagagcagccccacccccaacccccccatcttcagcctgcccctggtgggcctggtggtgatcagcgccctgctgtggtgctggtgggccgagaccagcagctag

SEQ ID NO: 77195 - DNA, 2874 bp, synthetic construct
  misc_feature 1..2874: note = Description of Artificial Sequence: Synthetic coding sequence
  source 1..2874: mol_type = other DNA
ctgagagccctggagggcgaggtgctgctgcccgccctgtacgaggaggaggaggaggaggaggaggaggaggaggaggtggaggaggaggaggagcaggtgcagaagggcggcagcgtgggcagcctgagcgtgaacaagcacagaggcctgagcctgaccgagaccgagctggaggagctgagagcccaggtgctgcagctggtggccgagctggaggagaccagagagctggccggccagcacgaggacgacagcctggagctgcagggcctgctggaggacgagagactggccagcgcccagcaggccgaggtgttcaccaagcagatccagcagctgcagggcgagctgagaagcctgagagaggagatcagcctgctggagcacgagaaggagagcgagctgaaggagatcgagcaggagctgcacctggcccaggccgagatccagagcctgagacaggccgccgaggacagcgccaccgagcacgagagcgacatcgccagcctgcaggaggacctgtgcagaatgcagaacgagctggaggacatggagagaatcagaggcgactacgagatggagatcgccagcctgagagccgagatggagatgaagagcagcgagcccagcggcagcctgggcctgagcgactacagcggcctgcaggaggagctgcaggagctgagagagagataccacttcctgaacgaggagtacagagccctgcaggagagcaacagcagcctgaccggccagctggccgacctggagagcgagagaacccagagagccaccgagagatggctgcagagccagaccctgagcatgaccagcgccgagagccagaccagcgagatggacttcctggagcccgaccccgagatgcagctgctgagacagcagctgagagacgccgaggagcagatgcacggcatgaagaacaagtgccaggagctgtgctgcgagctggaggagctgcagcaccacagacaggtgagcgaggaggagcagagaagactgcagagagagctgaagtgcgcccagaacgaggtgctgagattccagaccagccacagcgtgacccagaacgaggagctgaagagcagactgtgcaccctgcagaagaagtacgacaccagccaggacgagcagaacgagctgctgaagatgcagctgcagctgcagaccgagctgagacagctgaaggtgatgaagagcaccctggtggagaaccagagcgagaaggagctgctgtgcagactgcagaagctgcacctgcagcaccagaacgtgacctgcgagaaggagaagctgctggagagacagcagcagctgcaggaggagctgcagtgccacgaggccgagctgcagcacctgagagacaccgtggccagcttcaaggagagcaacgagaaggacaccgagacccacgcccagctgcaggagatgaagcagctgtaccaggccagcaaggacgagctggagagacagaagcacatgtacgaccagctggagcaggacctgctgctgtgccagctggagctgaaggagctgaaggccagccaccccatccccgaggacaagggcaagtgcgccaacaagtgcgacaccctgctgagcagactgaccgagctgcaggagaagtacaaggccagccagaaggagatgggccagctgcagatggagcagtgcgagctgctggaggaccagagaagaatgcaggaggagcagggccagctgcaggaggagctgcacagactgaccctgcccctgcccaagagcggcctgctgctgaagagccaggagctgctgaccaagctggaggacctgtgcgagctgcagctgctgtaccagggcatgcaggaggagcagaagaagctgatccagaaccaggactgcgtgctgaaggagcagctggagatccacgaggagctgagaagattcaaggagagccacttccaggaggtgctggagaaccccgacgacagcaagctggccaagagcagcaagtgcaacagaaacaagcagagcaagctgctgatggagcagatgcaggccctgcaggtgatgtacgacgccggccaggccaagcaggagctgctgcagcaggagcagggcagactgctggaggagagaaagagactgcaggccgacctgcagctgtgcctggaggagatgcagctgctgcaggtgcagagccccagcatcaagatgagcctggagagctacggcaagagctacggcagcatggtgcccagcaacgagaactgcagaaagacctacgacaccaccgtggacgacaacgagagctactacaagagctacaccagcacccagaccagcagcaagagcttcctgaagagctacgacagcagcaccagcgccagcgaggcctacggcaagagctactgcaccaccagcaacagcagcatcacctacaagaagagctacggcagcaccagcagcagcgacacctgccagaagagcttcgtgagcagctgcaccgacgaggagcccgccgagcccgaggacatggagagattcgaggagatggtggtgaaggtgctgatcaagctgcaggccgtgcaggccatgtaccagatcagccaggaggagcacagccagctgcaggagcagatggagaagctgctggccaagcagaaggacctgaaggaggagctggacgcctgcgagagagagttcaaggagtgcatggagtgcctggagaagcccatggccccccagaacgacaagaacgagaacatgttcggcctgtggaagcccatggtgttcctggccatcgccgccgtggccctgtacgtgctgcccaacatgagacagcaggagagcgagttctgcctgatggagtag

SEQ ID NO: 77196 - DNA, 1305 bp, synthetic construct
  misc_feature 1..1305: note = Description of Artificial Sequence: Synthetic coding sequence
  source 1..1305: mol_type = other DNA
atggaggccggcgccggcgccggcgccggcgccgccggctggagctgccccggccccggccccaccgtgaccaccctgggcagctacgaggccagcgagggctgcgagagaaagaagggccagagatggggcagcctggagagaagaggcatgcaggccatggagggcgaggtgctgctgcccgccctgtacgaggaggaggaggaggaggaggaggaggaggaggaggtggaggaggaggaggagcaggtgcagaagggcggcagcgtgggcagcctgagcgtgaacaagcacagaggcctgagcctgaccgagaccgagctggaggagctgagagcccaggtgctgcagctggtggccgagctggaggagaccagagagctggccggccagcacgaggacgacagcctggagctgcagggcctgctggaggacgagagactggccagcgcccagcaggccgaggtgttcaccaagcagatccagcagctgcagggcgagctgagaagcctgagagaggagatcagcctgctggagcacgagaaggagagcgagctgaaggagatcgagcaggagctgcacctggcccaggccgagatccagagcctgagacaggccgccgaggacagcgccaccgagcacgagagcgacatcgccagcctgcaggaggacctgtgcagaatgcagaacgagctggaggacatggagagaatcagaggcgactacgagatggagatcgccagcctgagagccgagatggagatgaagagcagcgagcccagcgaggagctgcaggagctgagagagagataccacttcctgaacgaggagtacagagccctgcaggagagcaacagcagcctgaccggccagctggccgacctggagagcgagagaacccagagagccaccgagagatggctgcagagccagaccctgagcatgaccagcgccgagagccagaccagcgagatggacttcctggagcccgaccccgagatgcagctgctgagacagcagctgagagacgccgaggagcagatgcacggcatgaagaacaagtgccaggagctgtgctgcgagctggaggagctgcagcaccacagacaggtgagcgaggaggagcagagaagactgcagagagagctgaagtgcgcccagaacgaggtgctgagattccagaccagccacagcgtgacccagagcagccccacccccaacccccccatcttcagcctgcccctggtgggcctggtggtgatcagcgccctgctgtggtgctggtgggccgagaccagcagctag

SEQ ID NO: 77197 - DNA, 3474 bp, synthetic construct
  misc_feature 1..3474: note = Description of Artificial Sequence: Synthetic coding sequence
  source 1..3474: mol_type = other DNA
ctgagagccctggagggcgaggtgctgctgcccgccctgtacgaggaggaggaggaggaggaggaggaggaggaggaggtggaggaggaggaggagcaggtgcagaagggcggcagcgtgggcagcctgagcgtgaacaagcacagaggcctgagcctgaccgagaccgagctggaggagctgagagcccaggtgctgcagctggtggccgagctggaggagaccagagagctggccggccagcacgaggacgacagcctggagctgcagggcctgctggaggacgagagactggccagcgcccagcaggccgaggtgttcaccaagcagatccagcagctgcagggcgagctgagaagcctgagagaggagatcagcctgctggagcacgagaaggagagcgagctgaaggagatcgagcaggagctgcacctggcccaggccgagatccagagcctgagacaggccgccgaggacagcgccaccgagcacgagagcgacatcgccagcctgcaggaggacctgtgcagaatgcagaacgagctggaggacatggagagaatcagaggcgactacgagatggagatcgccagcctgagagccgagatggagatgaagagcagcgagcccagcggcagcctgggcctgagcgactacagcggcctgcaggaggagctgcaggagctgagagagagataccacttcctgaacgaggagtacagagccctgcaggagagcaacagcagcctgaccggccagctggccgacctggagagcgagagaacccagagagccaccgagagatggctgcagagccagaccctgagcatgaccagcgccgagagccagaccagcgagatggacttcctggagcccgaccccgagatgcagctgctgagacagcagctgagagacgccgaggagcagatgcacggcatgaagaacaagtgccaggagctgtgctgcgagctggaggagctgcagcaccacagacaggtgagcgaggaggagcagagaagactgcagagagagctgaagtgcgcccagaacgaggtgctgagattccagaccagccacagcgtgacccagaacgaggagctgaagagcagactgtgcaccctgcagaagaagtacgacaccagccaggacgagcagaacgagctgctgaagatgcagctgcagctgcagaccgagctgagacagctgaaggtgatgaagagcaccctggtggagaaccagagcgagaaggagctgctgtgcagactgcagaagctgcacctgcagcaccagaacgtgacctgcgagaaggagaagctgctggagagacagcagcagctgcaggaggagctgcagtgccacgaggccgagctgcagcacctgagagacaccgtggccagcttcaaggagagcaacgagaaggacaccgagacccacgcccagctgcaggagatgaagcagctgtaccaggccagcaaggacgagctggagagacagaagcacatgtacgaccagctggagcaggacctgctgctgtgccagctggagctgaaggagctgaaggccagccaccccatccccgaggacaagggcaagtgcgccaacaagtgcgacaccctgctgagcagactgaccgagctgcaggagaagtacaaggccagccagaaggagatgggccagctgcagatggagcagtgcgagctgctggaggaccagagaagaatgcaggaggagcagggccagctgcaggaggagctgcacagactgaccctgcccctgcccaagagcggcctgctgctgaagagccaggagctgctgaccaagctggaggacctgtgcgagctgcagctgctgtaccagggcatgcaggaggagcagaagaagctgatccagaaccaggactgcgtgctgaaggagcagctggagatccacgaggagctgagaagattcaaggagagccacttccaggaggtgctggagaaccccgacgacagcaagctggccaagagcagcaagtgcaacagaaacaagcagagcaagctgctgatggagcagatgcaggccctgcaggtgatgtacgacgccggccaggccaagcaggagctgctgcagcaggagcagggcagactgctggaggagagaaagagactgcaggccgacctgcagctgtgcctggaggagatgcagctgctgcaggtgcagagccccagcatcaagatgagcctggagagctacggcaagagctacggcagcatggtgcccagcaacgagaactgcagaaagacctacgacaccaccgtggacgacaacgagagctactacaagagctacaccagcacccagaccagcagcaagagcttcctgaagagctacgacagcagcaccagcgccagcgaggcctacggcaagagctactgcaccaccagcaacagcagcatcacctacaagaagagctacggcagcaccagcagcagcgacacctgccagaagagcttcgtgagcagctgcaccgacgaggagcccgccgagcccgaggacatggagagattcgaggagatggtggtgaaggtgctgatcaagctgcaggccgtgcaggccatgtaccagatcagccaggaggagcacagccagctgcaggagcagatggagaagctgctggccaagcagaaggacctgaaggaggagctggacgcctgcgagagagagttcaaggagtgcatggagtgcctggagaagcccatggccccccagaacgacaagaacgagatcaaggagctgcagaccaagctgagagagctgcagctgcagtaccaggccagcatggacgagcagggcagactgctggtggtgcaggagcagctggagggccagctgcagtgctgccaggaggagctgagacagctgagagagaagagacccagcgtggtgaaggaggccagaggcaagaacgccaacaagaacatgaacaagaacgccaacggcgtgaagatgaagaaggtgaccaagccctgcagcgacaccagcgagagcgacctggagaccagaaagagcctggaggtggtgctgtactacaaggccagccagagaaagctggacggcctggccaaggaggaggagaagaaggaggagatggaggaggagaagaagcaggtgaaggaggaggccaaggagcagtgcggcgacgagctggtggccgagcccgccgaccccgaggaggccaagagcaccgaggaccaggaggagaacgaggaggacaaggaggaggaggagaaggaggaggacagcgaggaggaggaggacgacgccgacagcagcctggagagccccgaggagaacaaccccctgagactgagcgagagcaagaagaacatgttcggcctgtggaagcccatggtgttcctggccatcgccgccgtggccctgtacgtgctgcccaacatgagacagcaggagagcgagttctgcctgatggagtag

SEQ ID NO: 77198 - DNA, 309 bp, synthetic construct
  misc_feature 1..309: note = Description of Artificial Sequence: Synthetic coding sequence
  source 1..309: mol_type = other DNA
atgcaggccatggagggcgaggtgctgctgcccgccctgtacgaggaggaggaggaggaggaggaggaggaggaggaggtggaggaggaggaggagcaggtgcagaagggcggcagcgtgggcagcctgagcgtgaacaagcacagaggcctgagcctgaccgagaccgagctggaggagctgagagcccaggtgctgcagctggtggccgagctggaggagaccagagagctggccggccagcacgaggacgacagcctggagctgcagggcctgctggaggacgagagactggccagcgcccagtag

SEQ ID NO: 77199 - DNA, 1341 bp, synthetic construct
  misc_feature 1..1341: note = Description of Artificial Sequence: Synthetic coding sequence
  source 1..1341: mol_type = other DNA
atggaggccggcgccggcgccggcgccggcgccgccggctggagctgccccggccccggccccaccgtgaccaccctgggcagctacgaggccagcgagggctgcgagagaaagaagggccagagatggggcagcctggagagaagaggcatgcaggccatggagggcgaggtgctgctgcccgccctgtacgaggaggaggaggaggaggaggaggaggaggaggaggtggaggaggaggaggagcaggtgcagaagggcggcagcgtgggcagcctgagcgtgaacaagcacagaggcctgagcctgaccgagaccgagctggaggagctgagagcccaggtgctgcagctggtggccgagctggaggagaccagagagctggccggccagcacgaggacgacagcctggagctgcagggcctgctggaggacgagagactggccagcgcccagcaggccgaggtgttcaccaagcagatccagcagctgcagggcgagctgagaagcctgagagaggagatcagcctgctggagcacgagaaggagagcgagctgaaggagatcgagcaggagctgcacctggcccaggccgagatccagagcctgagacaggccgccgaggacagcgccaccgagcacgagagcgacatcgccagcctgcaggaggacctgtgcagaatgcagaacgagctggaggacatggagagaatcagaggcgactacgagatggagatcgccagcctgagagccgagatggagatgaagagcagcgagcccagcggcagcctgggcctgagcgactacagcggcctgcaggaggagctgcaggagctgagagagagataccacttcctgaacgaggagtacagagccctgcaggagagcaacagcagcctgaccggccagctggccgacctggagagcgagagaacccagagagccaccgagagatggctgcagagccagaccctgagcatgaccagcgccgagagccagaccagcgagatggacttcctggagcccgaccccgagatgcagctgctgagacagcagctgagagacgccgaggagcagatgcacggcatgaagaacaagtgccaggagctgtgctgcgagctggaggagctgcagcaccacagacaggtgagcgaggaggagcagagaagactgcagagagagctgaagtgcgcccagaacgaggtgctgagattccagaccagccacagcgtgacccagagcagccccacccccaacccccccatcttcagcctgcccctggtgggcctggtggtgatcagcgccctgctgtggtgctggtgggccgagaccagcagctag

SEQ ID NO: 77200 - DNA, 21 bp, synthetic construct
  misc_feature 1..21: note = Description of Artificial Sequence: Synthetic coding sequence
  source 1..21: mol_type = other DNA
atgcaggccatggagggctag

SEQ ID NO: 77201 - DNA, 414 bp, synthetic construct
  misc_feature 1..414: note = Description of Artificial Sequence: Synthetic coding sequence
  source 1..414: mol_type = other DNA
atgcaggccatggagggcgaggtgctgctgcccgccctgtacgaggaggaggaggaggaggaggaggaggaggaggaggtggaggaggaggaggagcaggtgcagaagggcggcagcgtgggcagcctgagcgtgaacaagcacagaggcctgagcctgaccgagaccgagctggaggagctgagagcccaggtgctgcagctggtggccgagctggaggagaccagagagctggccggccagcacgaggacgacagcctggagctgcagggcctgctggaggacgagagactggccagcgcccagcaggccgaggtgttcaccaagcagatccagcagctgcagggcgagctgagaagcctgagagaggagatcagcctgctggagcacgagaaggagagcgagctgaagtag

SEQ ID NO: 77202 - DNA, 192 bp, synthetic construct
  misc_feature 1..192: note = Description of Artificial Sequence: Synthetic coding sequence
  source 1..192: mol_type = other DNA
atgcaggccatggagggcgaggtgctgctgcccgccctgtacgaggaggaggaggaggaggaggaggaggaggaggaggtggaggaggaggaggagcaggtgcagaagggcggcagcgtgggcagcctgagcgtgaacaagcacagaggcctgagcctgaccgagaccgagctggaggagctgagagcctag

SEQ ID NO: 77203 - DNA, 870 bp, synthetic construct
  misc_feature 1..870: note = Description of Artificial Sequence: Synthetic coding sequence
  source 1..870: mol_type = other DNA
atggccggcgccggcagaggcgccgccgtgagcagagtgcaggccggccccggcagccccagaagagccagaggcagacagcaggtgcagcccctgggcaagcagagacccgccccctggcccggcctgagaagcaaggagaagaagaaggtgaactgcaagcccaagaaccaggacgagcaggagatccccttcagactgagagagatcatgagaagcagacaggagatgaagaaccccatcagcaacaagaagagaaagaaggccgcccaggtgaccttcagaaagaccctggagaaggaggccaagggcgaggagcccgacatcgccgtgcccaagttcaagcagagaaagggcgagagcgacggcgcctacatccacagaatgcagcaggaggcccagcacgtgctgttcctgagcaagaaccaggccatcagacagcccgaggtgcaggccgcccccaaggagaagagcgagcagaagaaggccaagaaggccttccagaagagaagactggacaaggtgagaagaaagaaggaggagaaggccgccgacagactggagcaggagctgctgagagacaccgtgaagttcggcgaggtggtgctgcagccccccgagctgaccgccagaccccagagaagcgtgagcaaggaccagcccggcagaagaagccagatgctgagaatgctgctgagccccggcggcgtgagccagcccctgaccgccagcctggccagacagagaatcgtggaggaggagagagagagagccgtgcaggcctacagagccctgaagcagagacagcagcagctgcacggcgagagaccccacctgaccagcagaaagaagcccgagccccagctgtag

SEQ ID NO: 77204 - DNA, 1656 bp, synthetic construct
  misc_feature 1..1656: note = Description of Artificial Sequence: Synthetic coding sequence
  source 1..1656: mol_type = other DNA
atgcccctgagcaccgccggcatcctgagcagcagcagcgccgccagcaacagaagcagaaacaaggccagatacagaaccaaggccgtgagcagcgaggtggacgagagcctgttcggcgacatcaagagccccgcccagggccagagcgacagccccatcgtgctgctgagagacaagcacaccctgcagaagaccctgaccgccctgggcctggacagaaagcccgagaccatccagctgatcaccagagacatggtgagagagctgatcgtgcccaccgaggaccccagcggcgagagcctgatcatcagccccgaggagttcgagagaatcaagtgggccagccacgtgctgaccagagaggagctggaggccagagaccaggccttcaagaaggagaaggaggccaccatggacgccgtgatgaccagaaagaagatcatgaagcagaaggagatggtgtggaacaacaacaagaagctgagcgacctggaggaggtggccaaggagagagcccagaacctgctgcagagagccaacaagctgagaatggagcaggaggaggagctgaaggacatgagcaagatcatcctgaacgccaagtgccacgccatcagagacgcccagatcctggagaagcagcagatccagaaggagctggacaccgaggagaagagactggaccagatgatggaggtggagagacagaagagcatccagagacaggaggagctggagagaaagagaagagaggagagaatcagaggcagaagacagatcgtggagcagatggagaagaaccaggaggagagaagcctgctggccgagcagagagagcaggagaaggagcagatgctggagtacatggagcagctgcaggaggaggacctgaaggacatggagagaagacagcagcagaagctgaagatgcaggccgagatcaagagaatcaacgacgagaaccagaagcagaaggccgagctgctggcccaggagaagctggccgaccagatggtgatggagttcaccaagaagaagatggccagagaggccgagttcgaggccgagcaggagagaatcagaagagagaaggagaaggagatcgccagactgagagccatgcaggagaaggcccaggactaccaggccgagcaggacgccctgagagccaagagaaaccaggaggtggccgacagagagtggagaagaaaggagaaggagaacgccagaaagaagatggagaccgaggccgagctgagaaagagcagactggagcaggtggccttcaaggagcacgccctggccgtgcaggtgcagagagacagagacgagttcgagagaatcctgagagcccagagagagcagatcgagaaggagagactggaggaggagaagaaggccaccggcagactgcagcacgccaacgagctgagaagacaggtgagagagaaccagcagaaggaggtgcagaacagaatcgccaccttcgaggagggcagaagactgaaggaggaggcccagaagagaagagagagaatcgacgagatcaagagaaagaagctggaggagctgagagccaccggcctgcccgagaagtactgcatcgaggccgagagaaaggccaacatcctgcccgccaccagcgtgaactag

SEQ ID NO: 77205 - DNA, 1401 bp, synthetic construct
  misc_feature 1..1401: note = Description of Artificial Sequence: Synthetic coding sequence
  source 1..1401: mol_type = other DNA
atggtgagagagctgatcgtgcccaccgaggaccccagcggcgagagcctgatcatcagccccgaggagttcgagagaatcaagtgggccagccacgtgctgaccagagaggagctggaggccagagaccaggccttcaagaaggagaaggaggccaccatggacgccgtgatgaccagaaagaagatcatgaagcagaaggagatggtgtggaacaacaacaagaagctgagcgacctggaggaggtggccaaggagagagcccagaacctgctgcagagagccaacaagctgagaatggagcaggaggaggagctgaaggacatgagcaagatcatcctgaacgccaagtgccacgccatcagagacgcccagatcctggagaagcagcagatccagaaggagctggacaccgaggagaagagactggaccagatgatggaggtggagagacagaagagcatccagagacaggaggagctggagagaaagagaagagaggagagaatcagaggcagaagacagatcgtggagcagatggagaagaaccaggaggagagaagcctgctggccgagcagagagagcaggagaaggagcagatgctggagtacatggagcagctgcaggaggaggacctgaaggacatggagagaagacagcagcagaagctgaagatgcaggccgagatcaagagaatcaacgacgagaaccagaagcagaaggccgagctgctggcccaggagaagctggccgaccagatggtgatggagttcaccaagaagaagatggccagagaggccgagttcgaggccgagcaggagagaatcagaagagagaaggagaaggagatcgccagactgagagccatgcaggagaaggcccaggactaccaggccgagcaggacgccctgagagccaagagaaaccaggaggtggccgacagagagtggagaagaaaggagaaggagaacgccagaaagaagatggagaccgaggccgagctgagaaagagcagactggagcaggtggccttcaaggagcacgccctggccgtgcaggtgcagagagacagagacgagttcgagagaatcctgagagcccagagagagcagatcgagaaggagagactggaggaggagaagaaggccaccggcagactgcagcacgccaacgagctgagaagacaggtgagagagaaccagcagaaggaggtgcagaacagaatcgccaccttcgaggagggcagaagactgaaggaggaggcccagaagagaagagagagaatcgacgagatcaagagaaagaagctggaggagctgagagccaccggcctgcccgagaagtactgcatcgaggccgagagaaaggccaacatcctgcccgccaccagcgtgaactag

SEQ ID NO: 77206 - DNA, 1884 bp, synthetic construct
  misc_feature 1..1884: note = Description of Artificial Sequence: Synthetic coding sequence
  source 1..1884: mol_type = other DNA
atggaggaggccgacagaatcctgatccacagcctgagacaggccggcaccgccgtgccccccgacgtgcagaccctgagagccttcaccaccgagctggtggtggaggccgtggtgagatgcctgagagtgatcaaccccgccgtgggcagcggcctgagccccctgctgcccctggccatgagcgccagattcagactggccatgagcctggcccaggcctgcatggacctgggctaccccctggagctgggctaccagaacttcctgtaccccagcgagcccgacctgagagacctgctgctgttcctggccgagagactgcccaccgacgccagcgaggacgccgaccagcccgccggcgacagcgccatcctgctgagagccatcggcagccagatcagagaccagctggccctgccctgggtgcccccccacctgagaacccccaagctgcagcacctgcagggcagcgccctgcagaagcccttccacgccagcagactggtggtgcccgagctgagcagcagaggcgagcccagagagttccaggccagccccctgctgctgcccgtgcccacccaggtgccccagcccgtgggcagagtggccagcctgctggagcaccacgccctgcagctgtgccagcagaccggcagagacagacccggcgacgaggactgggtgcacagaaccagcagactgcccccccaggaggacaccagagcccagagacagagactgcagaagcagctgaccgagcacctgagacagagctggggcctgctgggcgcccccatccaggccagagacctgggcgagctgctgcaggcctggggcgccggcgccaagaccggcgcccccaagggcagcagattcacccacagcgagaagttcaccttccacctggagccccaggcccaggccacccaggtgagcgacgtgcccgccaccagcagaagacccgagcaggtgacctgggccgcccaggagcaggagctggagagcctgagagagcagctggagggcgtgaacagaagcatcgaggaggtggaggccgacatgaagaccctgggcgtgagcttcgtgcaggccgagagcgagtgcagacacagcaagctgagcaccgccgagagagagcaggccctgagactgaagagcagagccgtggagctgctgcccgacggcaccgccaacctggccaagctgcagctggtggtggagaacagcgcccagagagtgatccacctggccggccagtgggagaagcacagagtgcccctgctggccgagtacagacacctgagaaagctgcaggactgcagagagctggagagcagcagaagactggccgagatccaggagctgcaccagagcgtgagagccgccgccgaggaggccagaagaaaggaggaggtgtacaagcagctgatgagcgagctggagaccctgcccagagacgtgagcagactggcctacacccagagaatcctggagatcgtgggcaacatcagaaagcagaaggaggagatcaccaagatcctgagcgacaccaaggagctgcagaaggagatcaacagcctgagcggcaagctggacagaaccttcgccgtgaccgacgagctggtgttcaaggacgccaagaaggacgacgccgtgagaaaggcctacaagtacctggccgccctgcacgagaactgcagccagctgatccagaccatcgaggacaccggcaccatcatgagagaggtgagagacctggaggagcagatcgagaccgagctgggcaagaagaccctgagcaacctggagaagatcagagaggactacagagccctgagacaggagaacgccggcctgctgggcagagtgagagaggcctag

SEQ ID NO: 77207 - DNA, 1743 bp, synthetic construct
  misc_feature 1..1743: note = Description of Artificial Sequence: Synthetic coding sequence
  source 1..1743: mol_type = other DNA
atggaggaggccgacagaatcctgatccacagcctgagacaggccggcaccgccgtgccccccgacgtgcagaccctgagagccttcaccaccgagctggtggtggaggccgtggtgagatgcctgagagtgatcaaccccgccgtgggcagcggcctgagccccctgctgcccctggccatgagcgccagattcagactggccatgagcctggcccaggcctgcatggacctgggctaccccctggagctgggctaccagaacttcctgtaccccagcgagcccgacctgagagacctgctgctgttcctggccgagagactgcccaccgacgccagcgaggacgccgaccagcccgccggcgacagcgccatcctgctgagagccatcggcagccagatcagagaccagctggccctgccctgggtgcccccccacctgagaacccccaagctgcagcacctgcagggcagcgccctgcagaagcccttccacgccagcagactggtggtgcccgagctgagcagcagaggcgagcccagagagttccaggccagccccctgctgctgcccgtgcccacccaggtgccccagcccgtgggcagagtggccagcctgctggagcaccacgccctgcagctgtgccagcagaccggcagagacagacccggcgacgaggactgggtgcacagaaccagcagactgcccccccaggaggacaccagagcccagagacagagactgcagaagcagctgaccgagcacctgagacagagctggggcctgctgggcgcccccatccaggccagagacctgggcgagctgctgcaggcctggggcgccggcgccaagaccggcgcccccaagggcagcagattcacccacagcgagaagttcaccttccacctggagccccaggcccaggccacccaggtgagcgacgtgcccgccaccagcagaagacccgagcaggtgacctgggccgcccaggagcaggagctggagagcctgagagagcagctggagggcgtgaacagaagcatcgaggaggtggaggccgacatgaagaccctgggcgtgagcttcgtgcaggccgagagcgagtgcagacacagcaagctgagcaccgccgagagagagcaggccctgagactgaagagcagagccgtggagctgctgcccgacggcaccgccaacctggccaagctgcagctggtggtggagaacagcgcccagagagtgatccacctggccggccagtgggagaagcacagagtgcccctgctggccgagtacagacacctgagaaagctgcaggactgcagagagctggagagcagcagaagactggccgagatccaggagctgcaccagagcgtgagagccgccgccgaggaggccagaagaaaggaggaggtgtacaagcagctgatgagcgagctggagaccctgcccagagacgtgagcagactggcctacacccagagaatcctggagatcgtgggcaacatcagaaagcagaaggaggagatcaccaagatcctgagcgacaccaaggagctgcagaaggagatcaacagcctgagcggcaagctggacagaaccttcgccgtgaccgacgagctggtgttcaaggacgccaagaaggacgacgccgtgagaaaggcctacaagtacctggccgccctgcacttcatcggcgacggcaccgtgggctggggcccctggatccccaacaagtag

SEQ ID NO: 77208 - DNA, 603 bp, synthetic construct
  misc_feature 1..603: note = Description of Artificial Sequence: Synthetic coding sequence
  source 1..603: mol_type = other DNA
atggacgacaagaagaagaagagaagccccaagccctgcctggcccagcccgcccaggcccccggcaccctgagaagagtgcccgtgcccaccagccacagcggcagcctggccctgggcctgccccacctgcccagccccaagcagagagccaagttcaagagagtgggcaaggagaagtgcagacccgtgctggccggcggcggcagcggcagcgccggcacccccctgcagcacagcttcctgaccgaggtgaccgacgtgtacgagatggagggcggcctgctgaacctgctgaacgacttccacagcggcagactgcaggccttcggcaaggagtgcagcttcgagcagctggagcacgtgagagagatgcaggagaagctggccagactgcacttcagcctggacgtgtgcggcgaggaggaggacgacgaggaggaggaggacggcgtgaccgagggcctgcccgaggagcagaagaagaccatggccgacagaaacctggaccagctgctgagcaacctggaggacctgagcaacagcatccagaagctgcacctggccgagaacgccgagcccgaggagcagagcgccgcctag

SEQ ID NO: 77209 - DNA, 690 bp, synthetic construct
  misc_feature 1..690: note = Description of Artificial Sequence: Synthetic coding sequence
  source 1..690: mol_type = other DNA
atgtgggccgccggcagatggggccccaccttccccagcagctacgccggcttcagcgccgactgcagacccagaagcagacccagcagcgacagctgcagcgtgcccatgaccggcgccagaggccagggcctggaggtggtgagaagccccagcccccccctgcccctgagctgcagcaacagcaccagaagcctgctgagccccctgggccaccagagcttccagttcgacgaggacgacggcgacggcgaggacgaggaggacgtggacgacgaggaggacgtggacgaggacgcccacgacagcgaggccaaggtggccagcctgagaggcatggagctgcagggctgcgccagcacccaggtggagagcgagaacaaccaggaggagcagaagcaggtgagactgcccgagagcagactgaccccctgggaggtgtggttcatcggcaaggagaaggaggagagagacagactgcagctgaaggccctggaggagctgaaccagcagctggagaagagaaaggagatggaggagagagagaagagaaagatcatcgccgaggagaagcacaaggagtgggtgcagaagaagaacgagcaggtgagaagaggcaagtggatccacaccctgaccagcctgctgcagaacatcagcagctactacaccagcctgcccagattctag

SEQ ID NO: 77210 - DNA, 1122 bp, synthetic construct
  misc_feature 1..1122: note = Description of Artificial Sequence: Synthetic coding sequence
  source 1..1122: mol_type = other DNA
atgtgggccgccggcagatggggccccaccttccccagcagctacgccggcttcagcgccgactgcagacccagaagcagacccagcagcgacagctgcagcgtgcccatgaccggcgccagaggccagggcctggaggtggtgagaagccccagcccccccctgcccctgagctgcagcaacagcaccagaagcctgctgagccccctgggccaccagagcttccagttcgacgaggacgacggcgacggcgaggacgaggaggacgtggacgacgaggaggacgtggacgaggacgcccacgacagcgaggccaaggtggccagcctgagaggcatggagctgcagggctgcgccagcacccaggtggagagcgagaacaaccaggaggagcagaagcaggtgagactgcccgagagcagactgaccccctgggaggtgtggttcatcggcaaggagaaggaggagagagacagactgcagctgaaggccctggaggagctgaaccagcagctggagaagagaaaggagatggaggagagagagaagagaaagatcatcgccgaggagaagcacaaggagtgggtgcagaagaagaacgagcagaagagaaaggagagagagcagaagatcaacaaggagatggaggagaaggccgccaaggagctggagaaggagtacctgcaggagaaggccaaggagaagtaccaggagtggctgaagaagaagaacgccgaggagtgcgagagaaagaagaaggagaaggagaaggagaagcagcagcaggccgagatccaggagaagaaggagatcgccgagaagaagttccaggagtggctggagaacgccaagcacaagcccagacccgccgccaagagctacggctacgccaacggcaagctgaccggcttctacagcggcaacagctaccccgagcccgccttctacaaccccatcccctggaagcccatccacatgcccccccccaaggaggccaaggacctgagcggcagaaagagcaagagacccgtgatcagccagccccacaagagcagcagcctggtgatccacaaggccagaagcaacctgtgcctgggcaccctgtgcagaatccagagatag

SEQ ID NO: 77211 - DNA, 2268 bp, synthetic construct
  misc_feature 1..2268: note = Description of Artificial Sequence: Synthetic coding sequence
  source 1..2268: mol_type = other DNA
atggagtacatcttccccaacaccggcgtgctgtggagctggctgatcaacatcctgtgcaacagaagaatcgtgtggttcaccagcagccagctgcccagaggcccccccgccagcagcggcggccacagcttccacaccctgagagagagaagcgagagcagactgttcgtggagagctacgccgccgcctggcagccccccggcaccagcggcggcgccagctgctgcagcagcctgagcgcccaggtgatgagcagcgagttcctggccgagctgcactgggaggacggcttcgccatccccgtggccaacgaggagaacaagctgctggaggaccagctgagcaagctgaaggacgagagagccagcctgcaggacgagctgagagagtacgaggagagaatcaacagcatgaccagccacttcaagaacgtgaagcaggagctgagcatcacccagagcctgtgcaaggccagagagagagagaccgagagcgaggagcacttcaaggccatcgcccagagagagctgggcagagtgaaggacgagatccagagactggagaacgagatggccagcatcctggagaagaagagcgacaaggagaacggcatcttcaaggccacccagaagctggacggcctgaagtgccagatgaactgggaccagcaggccctggaggcctggctggaggagagcgcccacaaggacagcgacgccctgaccctgcagaagtacgcccagcaggacgacaacaagatcagagccctgaccctgcagctggagagactgaccctggagtgcaaccagaagagaaagatcctggacaacgagctgaccgagaccatcagcgcccagctggagctggacaaggccgcccaggacttcagaaagatccacaacgagagacaggagctgatcaagcagtgggagaacaccatcgagcagatgcagaagagagacggcgacatcgacaactgcgccctggagctggccagaatcaagcaggagaccagagagaaggagaacctggtgaaggagaagatcaagttcctggagagcgagatcggcaacaacaccgagttcgagaagagaatcagcgtggccgacagaaagctgctgaagtgcagaaccgcctaccaggaccacgagaccagcagaatccagctgaagggcgagctggacagcctgaaggccaccgtgaacagaaccagcagcgacctggaggccctgagaaagaacatcagcaagatcaagaaggacatccacgaggagaccgccagactgcagaagaccaagaaccacaacgagatcatccagaccaagctgaaggagatcaccgagaagaccatgagcgtggaggagaaggccaccaacctggaggacatgctgaaggaggaggagaaggacgtgaaggaggtggacgtgcagctgaacctgatcaagggcgtgctgttcaagaaggcccaggagctgcagaccgagaccatgaaggagaaggccgtgctgagcgagatcgagggcaccagaagcagcctgaagcacctgaaccaccagctgcagaagctggacttcgagaccctgaagcagcaggagatcatgtacagccaggacttccacatccagcaggtggagagaagaatgagcagactgaagggcgagatcaacagcgaggagaagcaggccctggaggccaagatcgtggagctgagaaagagcctggaggagaagaagagcacctgcggcctgctggagacccagatcaagaagctgcacaacgacctgtacttcatcaagaaggcccacagcaagaacagcgacgagaagcagagcctgatgaccaagatcaacgagctgaacctgttcatcgacagaagcgagaaggagctggacaaggccaagggcttcaagcaggacctgatgatcgaggacaacctgctgaagctggaggtgaagagaaccagagagatgctgcacagcaaggccgaggaggtgctgagcctggagaagagaaagcagcagctgtacaccgccatggaggagagaaccgaggagatcaaggtgcacaagaccatgctggccagccagatcagatacgtggaccaggagagagagaacatcagcaccgagttcagagagagactgagcaagatcgagaagctgaagaacagatacgagatcctgaccgtggtgatgctgccccccgagggcgaggaggagaagacccaggcctactacgtgatcaaggtgatgagcatgagctag

SEQ ID NO: 77212 - DNA, 2826 bp, synthetic construct
  misc_feature 1..2826: note = Description of Artificial Sequence: Synthetic coding sequence
  source 1..2826: mol_type = other DNA
atgagcagcgagttcctggccgagctgcactgggaggacggcttcgccatccccgtggccaacgaggagaacaagctgctggaggaccagctgagcaagctgaaggacgagagagccagcctgcaggacgagctgagagagtacgaggagagaatcaacagcatgaccagccacttcaagaacgtgaagcaggagctgagcatcacccagagcctgtgcaaggccagagagagagagaccgagagcgaggagcacttcaaggccatcgcccagagagagctgggcagagtgaaggacgagatccagagactggagaacgagatggccagcatcctggagaagaagagcgacaaggagaacggcatcttcaaggccacccagaagctggacggcctgaagtgccagatgaactgggaccagcaggccctggaggcctggctggaggagagcgcccacaaggacagcgacgccctgaccctgcagaagtacgcccagcaggacgacaacaagatcagagccctgaccctgcagctggagagactgaccctggagtgcaaccagaagagaaagatcctggacaacgagctgaccgagaccatcagcgcccagctggagctggacaaggccgcccaggacttcagaaagatccacaacgagagacaggagctgatcaagcagtgggagaacaccatcgagcagatgcagaagagagacggcgacatcgacaactgcgccctggagctggccagaatcaagcaggagaccagagagaaggagaacctggtgaaggagaagatcaagttcctggagagcgagatcggcaacaacaccgagttcgagaagagaatcagcgtggccgacagaaagctgctgaagtgcagaaccgcctaccaggaccacgagaccagcagaatccagctgaagggcgagctggacagcctgaaggccaccgtgaacagaaccagcagcgacctggaggccctgagaaagaacatcagcaagatcaagaaggacatccacgaggagaccgccagactgcagaagaccaagaaccacaacgagatcatccagaccaagctgaaggagatcaccgagaagaccatgagcgtggaggagaaggccaccaacctggaggacatgctgaaggaggaggagaaggacgtgaaggaggtggacgtgcagctgaacctgatcaagggcgtgctgttcaagaaggcccaggagctgcagaccgagaccatgaaggagaaggccgtgctgagcgagatcgagggcaccagaagcagcctgaagcacctgaaccaccagctgcagaagctggacttcgagaccctgaagcagcaggagatcatgtacagccaggacttccacatccagcaggtggagagaagaatgagcagactgaagggcgagatcaacagcgaggagaagcaggccctggaggccaagatcgtggagctgagaaagagcctggaggagaagaagagcacctgcggcctgctggagacccagatcaagaagctgcacaacgacctgtacttcatcaagaaggcccacagcaagaacagcgacgagaagcagagcctgatgaccaagatcaacgagctgaacctgttcatcgacagaagcgagaaggagctggacaaggccaagggcttcaagcaggacctgatgatcgaggacaacctgctgaagctggaggtgaagagaaccagagagatgctgcacagcaaggccgaggaggtgctgagcctggagaagagaaagcagcagctgtacaccgccatggaggagagaaccgaggagatcaaggtgcacaagaccatgctggccagccagatcagatacgtggaccaggagagagagaacatcagcaccgagttcagagagagactgagcaagatcgagaagctgaagaacagatacgagatcctgaccgtggtgatgctgccccccgagggcgaggaggagaagacccaggcctactacgtgatcaaggccgcccaggagaaggaggagctgcagagagagggcgactgcctggacgccaagatcaacaaggccgagaaggagatctacgccctggagaacaccctgcaggtgctgaacagctgcaacaacaactacaagcagagcttcaagaaggtgacccccagcagcgacgagtacgagctgaagatccagctggaggagcagaagagagccgtggacgagaagtacagatacaagcagagacagatcagagagctgcaggaggacatccagagcatggagaacaccctggacgtgatcgagcacctggccaacaacgtgaaggagaagctgagcgagaagcaggcctacagcttccagctgagcaaggagaccgaggagcagaagcccaagctggagagagtgaccaagcagtgcgccaagctgaccaaggagatcagactgctgaaggacaccaaggacgagaccatggaggagcaggacatcaagctgagagagatgaagcagttccacaaggtgatcgacgagatgctggtggacatcatcgaggagaacaccgagatcagaatcatcctgcagacctacttccagcagagcggcctggagctgcccaccgccagcaccaagggcagcagacagagcagcagaagccccagccacaccagcctgagcgccagaagcagcagaagcaccagcaccagcaccagccagagcagcatcaaggtgctggagctgaagttccccgccagcagcagcctggtgggcagccccagcagacccagcagcgccagcagcagcagcagcaacgtgaagagcaagaagagcagcaagtag

SEQ ID NO: 77213 - DNA, 1740 bp, synthetic construct
  misc_feature 1..1740: note = Description of Artificial Sequence: Synthetic coding sequence
  source 1..1740: mol_type = other DNA
atggccgagcccggcggcgccgccggcagaagccaccccgaggacggcagcgccagcgagggcgagaaggagggcaacaacgagagccacatggtgagcccccccgagaaggacgacggccagaagggcgaggaggccgtgggcagcaccgagcaccccgaggaggtgaccacccaggccgaggccgccatcgaggagggcgaggtggagaccgagggcgaggccgccgtggagggcgaggaggaggccgtgagctacggcgacgccgagagcgaggaggagtactactacaccgagaccagcagccccgagggccagatcagcgccgccgacaccacctacccctacttcagccccccccaggagctgcccggcgaggaggcctacgacagcgtgagcggcgaggccggcctgcagggcttccagcaggaggccaccggcccccccgagagcagagagagaagagtgaccagccccgagcccagccacggcgtgctgggccccagcgagcagatgggccaggtgaccagcggccccgccgtgggcagactgaccggcagcaccgaggagccccagggccaggtgctgcccatgggcgtgcagcacagattcagactgagccacggcagcgacatcgagagcagcgacctggaggagttcgtgagccaggagcccgtgatcccccccggcgtgcccgacgcccaccccagagagggcgacctgcccgtgttccaggaccagatccagcagcccagcaccgaggagggcgccatggccgagagagtggagagcgagggcagcgacgaggaggccgaggacgagggcagccagctggtggtgctggaccccgaccaccccctgatggtgagattccaggccgccctgaagaactacctgaacagacagatcgagaagctgaagctggacctgcaggagctggtggtggccaccaagcagagcagagcccagagacaggagctgggcgtgaacctgtacgaggtgcagcagcacctggtgcacctgcagaagctgctggagaagagccacgacagacacgccatggccagcagcgagagaagacagaaggaggaggagctgcaggccgccagagccctgtacaccaagacctgcgccgccgccaacgaggagagaaagaagctggccgccctgcagaccgagatggagaacctggccctgcacctgttctacatgcagaacatcgaccaggacatgagagacgacatcagagtgatgacccaggtggtgaagaaggccgagaccgagagaatcagagccgagatcgagaagaagaagcaggacctgtacgtggaccagctgaccaccagagcccagcagctggaggaggacatcgccctgttcgaggcccagtacctggcccaggccgaggacaccagaatcctgagaaaggccgtgagcgaggcctgcaccgagatcgacgccatcagcgtggagaagagaagaatcatgcagcagtgggccagcagcctggtgggcatgaagcacagagacgaggcccacagagccgtgctggaggccctgagcgtgagcctggagagattccccagccagaacatcaacaccgccagaagcagactgagcaccacctggcacagcgccggcatcctgctgagaggcagcttcctgcccggcgccagcagagccttcgccagcgtgtgctacggcggcgccgccgtggacaacagaatcagagagtgctag

SEQ ID NO: 77214 - DNA, 1437 bp, synthetic construct
  misc_feature 1..1437: note = Description of Artificial Sequence: Synthetic coding sequence
  source 1..1437: mol_type = other DNA
atggccgagcccggcggcgccgccggcagaagccaccccgaggacggcagcgccagcgagggcgagaaggagggcaacaacgagagccacatggtgagcccccccgagaaggacgacggccagaagggcgaggaggccgtgggcagcaccgagcaccccgaggaggtgaccacccaggccgaggccgccatcgaggagggcgaggtggagaccgagggcgaggccgccgtggagggcgaggaggaggccgtgagctacggcgacgccgagagcgaggaggagtactactacaccgagaccagcagccccgagggccagatcagcgccgccgacaccacctacccctacttcagccccccccaggagctgcccggcgaggaggcctacgacagcgtgagcggcgaggccggcctgcagggcttccagcaggaggccaccggcccccccgagagcagagagagaagagtgaccagccccgagcccagccacggcgtgctgggccccagcgagcagatgggccaggtgaccagcggccccgccgtgggcagactgaccggcagcaccgaggagccccagggccaggtgctgcccatgggcgtgcagcacagattcagactgagccacggcagcgacatcgagagcagcgacctggaggagttcgtgagccaggagcccgtgatcccccccggcgtgcccgacgcccaccccagagagggcgacctgcccgtgttccaggaccagatccagcagcccagcaccgaggagggcgccatggccgagagagtggagagcgagggcagcgacgaggaggccgaggacgagggcagccagctggtggtgctggaccccgaccaccccctgatggtgagattccaggccgccctgaagaactacctgaacagacagatcgagaagctgaagctggacctgcaggagctggtggtggccaccaagcagagcagagcccagagacaggagctgggcgtgaacctgtacgaggtgcagcagcacctggtgcacctgcagaagctgctggagaagagccacgacagacacgccatggccagcagcgagagaagacagaaggaggaggagctgcaggccgccagagccctgtacaccaagacctgcgccgccgccaacgaggagagaaagaagctggccgccctgcagaccgagatggagaacctggccctgcacctgttctacatgcagaacatcgaccaggacatgagagacgacatcagagtgatgacccaggtggtgaagaaggccgagaccgagagaatcagagccgagatcgagaagaagaagcagggcgtgggcgacaccggcgccgccttcatccccaagaccacccagggcgaccaggtgagcggcagaggcaagaagaagcccggcaccgtggtggccagagtgagccccgccgagctgtag

SEQ ID NO: 77215 - DNA, 3093 bp, synthetic construct
  misc_feature 1..3093: note = Description of Artificial Sequence: Synthetic coding sequence
  source 1..3093: mol_type = other DNA
atggccgagcccggcggcgccgccggcagaagccaccccgaggacggcagcgccagcgagggcgagaaggagggcaacaacgagagccacatggtgagcccccccgagaaggacgacggccagaagggcgaggaggccgtgggcagcaccgagcaccccgaggaggtgaccacccaggccgaggccgccatcgaggagggcgaggtggagaccgagggcgaggccgccgtggagggcgaggaggaggccgtgagctacggcgacgccgagagcgaggaggagtactactacaccgagaccagcagccccgagggccagatcagcgccgccgacaccacctacccctacttcagccccccccaggagctgcccggcgaggaggcctacgacagcgtgagcggcgaggccggcctgcagggcttccagcaggaggccaccggcccccccgagagcagagagagaagagtgaccagccccgagcccagccacggcgtgctgggccccagcgagcagatgggccaggtgaccagcggccccgccgtgggcagactgaccggcagcaccgaggagccccagggccaggtgctgcccatgggcgtgcagcacagattcagactgagccacggcagcgacatcgagagcagcgacctggaggagttcgtgagccaggagcccgtgatcccccccggcgtgcccgacgcccaccccagagagggcgacctgcccgtgttccaggaccagatccagcagcccagcaccgaggagggcgccatggccgagagagtggagagcgagggcagcgacgaggaggccgaggacgagggcagccagctggtggtgctggaccccgaccaccccctgatggtgagattccaggccgccctgaagaactacctgaacagacagatcgagaagctgaagctggacctgcaggagctggtggtggccaccaagcagagcagagcccagagacaggagctgggcgtgaacctgtacgaggtgcagcagcacctggtgcacctgcagaagctgctggagaagagccacgacagacacgccatggccagcagcgagagaagacagaaggaggaggagctgcaggccgccagagccctgtacaccaagacctgcgccgccgccaacgaggagagaaagaagctggccgccctgcagaccgagatggagaacctggccctgcacctgttctacatgcagaacatcgaccaggacatgagagacgacatcagagtgatgacccaggtggtgaagaaggccgagaccgagagaatcagagccgagatcgagaagaagaagcaggacctgtacgtggaccagctgaccaccagagcccagcagctggaggaggacatcgccctgttcgaggcccagtacctggcccaggccgaggacaccagaatcctgagaaaggccgtgagcgaggcctgcaccgagatcgacgccatcagcgtggagaagagaagaatcatgcagcagtgggccagcagcctggtgggcatgaagcacagagacgaggcccacagagccgtgctggaggccctgagaggctgccagcaccaggccaagagcaccgacggcgagatcgaggcctacaagaagagcatcatgaaggaggaggagaagaacgagaagctggccagcatcctgaacagaaccgagaccgaggccaccctgctgcagaagctgaccacccagtgcctgaccaagcaggtggccctgcagagccagttcaacacctacagactgaccctgcaggacaccgaggacgccctgagccaggaccagctggagcagatgatcctgaccgaggagctgcaggccatcagacaggccatccagggcgagctggagctgagaagaaagaccgacgccgccatcagagagaagctgcaggagcacatgaccagcaacaagaccaccaagtacttcaaccagctgatcctgagactgcagaaggagaagaccaacatgatgacccacctgagcaagatcaacggcgacatcgcccagaccaccctggacatcacccacaccagcagcagactggacgcccaccagaagaccctggtggagctggaccaggacgtgaagaaggtgaacgagctgatcaccaacagccagagcgagatcagcagaagaaccatcctgatcgagagaaagcagggcctgatcaacttcctgaacaagcagctggagagaatggtgagcgagctgggcggcgaggaggtgggccccctggagctggagatcaagagactgagcaagctgatcgacgagcacgacggcaaggccgtgcaggcccaggtgacctggctgagactgcagcaggagatggtgaaggtgacccaggagcaggaggagcagctggccagcctggacgccagcaagaaggagctgcacatcatggagcagaagaagctgagagtggagagcaagatcgagcaggagaagaaggagcagaaggagatcgagcaccacatgaaggacctggacaacgacctgaagaagctgaacatgctgatgaacaagaacagatgcagcagcgaggagctggagcagaacaacagagtgaccgagaacgagttcgtgagaagcctgaaggccagcgagagagagaccatcaagatgcaggacaagctgaaccagctgagcgaggagaaggccaccctgctgaaccagctggtggaggccgagcaccagatcatgctgtgggagaagaagatccagctggccaaggagatgagaagcagcgtggacagcgagatcggccagaccgagatcagagccatgaagggcgagatccacagaatgaagaagtactgcagaaccacccaggacgcccacagacacgtgcacgagcagcacggcacccacgccggcacctgcaccaagaacaccggcagagcccaggccagagccagaaccaccagagacgccagaggccacgtgcacgagcagcacggcaccagagccggcacctgcaccaacaacaccggcagagcccaggccagagccagaaccagagacgccagaagacacgtgcacgagcacagaacccacaccgccagagcctag

SEQ ID NO: 77216 - DNA, 3429 bp, synthetic construct
  misc_feature 1..3429: note = Description of Artificial Sequence: Synthetic coding sequence
  source 1..3429: mol_type = other DNA
atggccgagcccggcggcgccgccggcagaagccaccccgaggacggcagcgccagcgagggcgagaaggagggcaacaacgagagccacatggtgagcccccccgagaaggacgacggccagaagggcgaggaggccgtgggcagcaccgagcaccccgaggaggtgaccacccaggccgaggccgccatcgaggagggcgaggtggagaccgagggcgaggccgccgtggagggcgaggaggaggccgtgagctacggcgacgccgagagcgaggaggagtactactacaccgagaccagcagccccgagggccagatcagcgccgccgacaccacctacccctacttcagccccccccaggagctgcccggcgaggaggcctacgacagcgtgagcggcgaggccggcctgcagggcttccagcaggaggccaccggcccccccgagagcagagagagaagagtgaccagccccgagcccagccacggcgtgctgggccccagcgagcagatgggccaggtgaccagcggccccgccgtgggcagactgaccggcagcaccgaggagccccagggccaggtgctgcccatgggcgtgcagcacagattcagactgagccacggcagcgacatcgagagcagcgacctggaggagttcgtgagccaggagcccgtgatcccccccggcgtgcccgacgcccaccccagagagggcgacctgcccgtgttccaggaccagatccagcagcccagcaccgaggagggcgccatggccgagagagtggagagcgagggcagcgacgaggaggccgaggacgagggcagccagctggtggtgctggaccccgaccaccccctgatggtgagattccaggccgccctgaagaactacctgaacagacagatcgagaagctgaagctggacctgcaggagctggtggtggccaccaagcagagcagagcccagagacaggagctgggcgtgaacctgtacgaggtgcagcagcacctggtgcacctgcagaagctgctggagaagagccacgacagacacgccatggccagcagcgagagaagacagaaggaggaggagctgcaggccgccagagccctgtacaccaagacctgcgccgccgccaacgaggagagaaagaagctggccgccctgcagaccgagatggagaacctggccctgcacctgttctacatgcagaacatcgaccaggacatgagagacgacatcagagtgatgacccaggtggtgaagaaggccgagaccgagagaatcagagccgagatcgagaagaagaagcaggacctgtacgtggaccagctgaccaccagagcccagcagctggaggaggacatcgccctgttcgaggcccagtacctggcccaggccgaggacaccagaatcctgagaaaggccgtgagcgaggcctgcaccgagatcgacgccatcagcgtggagaagagaagaatcatgcagcagtgggccagcagcctggtgggcatgaagcacagagacgaggcccacagagccgtgctggaggccctgagaggctgccagcaccaggccaagagcaccgacggcgagatcgaggcctacaagaagagcatcatgaaggaggaggagaagaacgagaagctggccagcatcctgaacagaaccgagaccgaggccaccctgctgcagaagctgaccacccagtgcctgaccaagcaggtggccctgcagagccagttcaacacctacagactgaccctgcaggacaccgaggacgccctgagccaggaccagctggagcagatgatcctgaccgaggagctgcaggccatcagacaggccatccagggcgagctggagctgagaagaaagaccgacgccgccatcagagagaagctgcaggagcacatgaccagcaacaagaccaccaagtacttcaaccagctgatcctgagactgcagaaggagaagaccaacatgatgacccacctgagcaagatcaacggcgacatcgcccagaccaccctggacatcacccacaccagcagcagactggacgcccaccagaagaccctggtggagctggaccaggacgtgaagaaggtgaacgagctgatcaccaacagccagagcgagatcagcagaagaaccatcctgatcgagagaaagcagggcctgatcaacttcctgaacaagcagctggagagaatggtgagcgagctgggcggcgaggaggtgggccccctggagctggagatcaagagactgagcaagctgatcgacgagcacgacggcaaggccgtgcaggcccaggtgacctggctgagactgcagcaggagatggtgaaggtgacccaggagcaggaggagcagctggccagcctggacgccagcaagaaggagctgcacatcatggagcagaagaagctgagagtggagagcaagatcgagcaggagaagaaggagcagaaggagatcgagcaccacatgaaggacctggacaacgacctgaagaagctgaacatgctgatgaacaagaacagatgcagcagcgaggagctggagcagaacaacagagtgaccgagaacgagttcgtgagaagcctgaaggccagcgagagagagaccatcaagatgcaggacaagctgaaccagctgagcgaggagaaggccaccctgctgaaccagctggtggaggccgagcaccagatcatgctgtgggagaagaagatccagctggccaaggagatgagaagcagcgtggacagcgagatcggccagaccgagatcagagccatgaagggcgagatccacagaatgaaggtgagactgggccagctgctgaagcagcaggagaagatgatcagagccatggagctggccgtggccagaagagagaccgtgaccacccaggccgagggccagagaaagatggacagaaaggccctgaccagaaccgacttccaccacaagcagctggagctgagaagaaagatcagagacgtgagaaaggccaccgacgagtgcaccaagaccgtgctggagctggaggagacccagagaaacgtgagcagcagcctgctggagaagcaggagaagctgagcgtgatccaggccgacttcgacaccctggaggccgacctgaccagactgggcgccctgaagagacagaacctgagcgagatcgtggccctgcagaccagactgaagcacctgcaggccgtgaaggagggcagatacgtgttcctgttcagaagcaagcagagcctggtgctggagagacagagactggacaagagactggccctgatcgccaccatcctggacagagtgagagacgagtacccccagttccaggaggccctgcacaaggtgagccagatgatcgccaacaagctggagagccccggccccagctag

SEQ ID NO: 77217 - DNA, 921 bp, synthetic construct
  misc_feature 1..921: note = Description of Artificial Sequence: Synthetic coding sequence
  source 1..921: mol_type = other DNA
atggccgaggtgagcatcgaccagagcaagctgcccggcgtgaaggaggtgtgcagagacttcgccgtgctggaggaccacaccctggcccacagcctgcaggagcaggagatcgagcaccacctggccagcaacgtgcagagaaacagactggtgcagcacgacctgcaggtggccaagcagctgcaggaggaggacctgaaggcccaggcccagctgcagaagagatacaaggacctggagcagcaggactgcgagatcgcccaggagatccaggagaagctggccatcgaggccgagagaagaagaatccaggagaagaaggacgaggacatcgccagactgctgcaggagaaggagctgcaggaggagaagaagagaaagaagcacttccccgagttccccgccaccagagcctacgccgacagctactactacgaggacggcggcatgaagcccagagtgatgaaggaggccgtgagcacccccagcagaatggcccacagagaccaggagtggtacgacgccgagatcgccagaaagctgcaggaggaggagctgctggccacccaggtggacatgagagccgcccaggtggcccaggacgaggagatcgccagactgctgatggccgaggagaagaaggcctacaagaaggccaaggagagagagaagagcagcctggacaagagaaagcaggaccccgagtggaagcccaagaccgccaaggccgccaacagcaagagcaaggagagcgacgagccccaccacagcaagaacgagagacccgccagaccccccccccccatcatgaccgacggcgaggacgccgactacacccacttcaccaaccagcagagcagcaccagacacttcagcaagagcgagagcagccacaagggcttccactacaagcactag

SEQ ID NO: 77218 - DNA, 1449 bp, synthetic construct
  misc_feature 1..1449: note = Description of Artificial Sequence: Synthetic coding sequence
  source 1..1449: mol_type = other DNA
atggccgaggtgagcatcgaccagagcaagctgcccggcgtgaaggaggtgtgcagagacttcgccgtgctggaggaccacaccctggcccacagcctgcaggagcaggagatcgagcaccacctggccagcaacgtgcagagaaacagactggtgcagcacgacctgcaggtggccaagcagctgcaggaggaggacctgaaggcccaggcccagctgcagaagagatacaaggacctggagcagcaggactgcgagatcgcccaggagatccaggagaagctggccatcgaggccgagagaagaagaatccaggagaagaaggacgaggacatcgccagactgctgcaggagaaggagctgcaggaggagaagaagagaaagaagcacttccccgagttccccgccaccagagcctacgccgacagctactactacgaggacggcgaccagcccggcagcagaagagccagagagctgggcagcggcttcagcagaccctgcagactgcagagagacggcaagaccgtgaagcacaagaaggagaagcccgagcaccccctggagaacctggaggagcccgagcagcactgcagcagcaagagaagcctgagcagcagcagcagcggcaagggcagagacaacccccacatcaacaacgagcagcacgagagaaagagaagcacccaggagagacccagaagacccctgctgcccaccatcagcggcgaggtgttcctgagcaccgagtgcgacgactgggagaccaagatcaaccaccagaccagaaactgggagaagcagagcagacaccaggacagactgagccccaagagcagccagaaggccggcctgcactgcaaggaggtggtgtacggcagagaccacggccagggcgagcacagaaagagaagacacagacccagaaccccccccttcagcgagagcgaggagcagctgcacctgcacgacgccggcatgaagcccagagtgatgaaggaggccgtgagcacccccagcagaatggcccacagagaccaggagtggtacgacgccgagatcgccagaaagctgcaggaggaggagctgctggccacccaggtggacatgagagccgcccaggtggcccaggacgaggagatcgccagactgctgatggccgaggagaagaaggcctacaagaaggccaaggagagagagaagagcagcctggacaagagaaagcaggaccccgagtggaagcccaagaccgccaaggccgccaacagcaagagcaaggagagcgacgagccccaccacagcaagaacgagagacccgccagaccccccccccccatcatgaccgacggcgaggacgccgactacacccacttcaccaaccagcagagcagcaccagacacttcagcaagagcgagagcagccacaagggcttccactacaagcactag

SEQ ID NO: 77219 - DNA, 1425 bp, synthetic construct
  misc_feature 1..1425: note = Description of Artificial Sequence: Synthetic coding sequence
  source 1..1425: mol_type = other DNA
atggccgacagcgccagcgagagcgacaccgacggcgccggcggcaacagcagcagcagcgccgccatgcagagcagctgcagcagcaccagcggcggcggcggcggcggcggcggcggcggcggcggcggcaagagcggcggcatcgtgatcagccccttcagactggaggagctgaccaacagactggccagcctgcagcaggagaacaaggtgctgaagatcgagctggagacctacaagctgaagtgcaaggccctgcaggaggagaacagagacctgagaaaggccagcgtgaccatccaggccagagccgagcaggaggaggagttcatcagcaacaccctgttcaagaagatccaggccctgcagaaggagaaggagaccctggccgtgaactacgagaaggaggaggagttcctgaccaacgagctgagcagaaagctgatgcagctgcagcacgagaaggccgagctggagcagcacctggagcaggagcaggagttccaggtgaacaagctgatgaagaagatcaagaagctggagaacgacaccatcagcaagcagctgaccctggagcagctgagaagagagaagatcgacctggagaacaccctggagcaggagcaggaggccctggtgaacagactgtggaagagaatggacaagctggaggccgagaagagaatcctgcaggagaagctggaccagcccgtgagcgccccccccagccccagagacatcagcatggagatcgacagccccgagaacatgatgagacacatcagattcctgaagaacgaggtggagagactgaagaagcagctgagagccgcccagctgcagcacagcgagaagatggcccagtacctggaggaggagagacacatgagagaggagaacctgagactgcagagaaagctgcagagagagatggagagaagagaggccctgtgcagacagctgagcgagagcgagagcagcctggagatggacgacgagagatacttcaacgagatgagcgcccagggcctgagacccagaaccgtgagcagccccatcccctacacccccagccccagcagcagcagacccatcagccccggcctgagctacgccagccacaccgtgggcttcaccccccccaccagcctgaccagagccggcatgagctactacaacagccccggcctgcacgtgcagcacatgggcaccagccacggcatcaccagacccagccccagaagaagcaacagccccgacaagttcaagagacccacccccccccccagccccaacacccagacccccgtgcagcccccccccccccccccccccccccccatgcagcccaccgtgcccagcgccgccaccagccagcccacccccagccagcacagcgcccaccccagcagccagccctag

SEQ ID NO: 77220 - DNA, 2055 bp, synthetic construct
  misc_feature 1..2055: note = Description of Artificial Sequence: Synthetic coding sequence
  source 1..2055: mol_type = other DNA
atgaacccccccgccgccttcctggccggcagacagaacatcggcagcgaggtggagatcagcaccatcgagaagcagagaaaggagctgcagctgctgatcggcgagctgaaggacagagacaaggagctgaacgacatggtggccgtgcaccagcagcagctgctgagctgggaggaggacagacagaaggtgctgaccctggaggagagatgcagcaagctggagggcgagctgcacaagagaaccgagatcatcagaagcctgaccaagaaggtgaaggccctggagagcaaccagatggagtgccagaccgccctgcagaagacccagctgcagctgcaggagatggcccagaaggccacccacagcagcctgctgagcgaggacctggaggccagaaacgagaccctgagcaacaccctggtggagctgagcgcccaggtgggccagctgcaggccagagagcaggccctgaccaccatgatcaagctgaaggacaaggacatcatcgaggccgtgaaccacatcgccgactgcagcggcaagttcaagatgctggagcacgccctgagagacgccaagatggccgagacctgcatcgtgaaggagaagcaggactacaagcagaagctgaaggccctgaagatcgaggtgaacaagctgaaggaggacctgaacgagaagaccaccgagaacaacgagcagagagaggagatcatcagactgaagcaggagaagagctgcctgcacgacgagctgctgttcaccgtggagagagagaagagaaaggacgagctgctgaacatcgccaagagcaagcaggagagaaccaacagcgagctgcacaacctgagacagatctacgtgaagcagcagagcgacctgcagttcctgaacttcaacgtggagaacagccaggagctgatccagatgtacgacagcaagatggaggagagcaaggccctggacagcagcagagacatgtgcctgagcgacctggagaacaaccaccccaaggtggacatcaagagagagaagaaccagaagagcctgttcaaggaccagaagttcgaggccatgctggtgcagcagaacagaagcgacaagagcagctgcgacgagtgcaaggagaagaagcagcagatcgacaccgtgttcggcgagaagagcgtgatcaccctgagcagcatcttcaccaaggacctggtggagaagcacaacctgccctggagcctgggcggcaagacccagatcgagcccgagaacaagatcaccctgtgcaagatccacaccaagagccccaagtgccacggcaccggcgtgcagaacgagggcaagcagcccagcgagacccccaccctgagcgacgagaagcagtggcacgacgtgagcgtgtacctgggcctgaccaactgccccagcagcaagcaccccgagaagctggacgtggagtgccaggaccagatggagagaagcgagatcagctgctgccagaagaacgaggcctgcctgggcgagagcggcatgtgcgacagcaagtgctgccaccccagcaacttcatcatcgaggcccccggccacatgagcgacgtggagtggatgagcatcttcaagcccagcaagatgcagagaatcgtgagactgaagagcggctgcacctgcagcgagagcatctgcggcacccagcacgacagccccgccagcgagctgatcgccatccaggacagccacagcctgggcagcagcaagagcgccctgagagaggacgagaccgagagcagcagcaacaagaagaacagccccaccagcctgctgatctacaaggacgcccccgccttcaacgagaaggccagcatcgtgctgcccagccaggacgacttcagccccaccagcaagctgcagagactgctggccgagagcagacagatggtgaccgacctggagctgagcaccctgctgcccatcagccacgagaacctgaccggcagcgccaccaacaagagcgaggtgcccgaggagagcgcccagaagaacaccttcgtgagctactag

SEQ ID NO: 77221 - DNA, 1338 bp, synthetic construct
  misc_feature 1..1338: note = Description of Artificial Sequence: Synthetic coding sequence
  source 1..1338: mol_type = other DNA
atgcccaacagcagccccaaggaccccaccaccgccagcggcaacggcagcaaggtggagagagagaagagaaaggacgagctgctgaacatcgccaagagcaagcaggagagaaccaacagcgagctgcacaacctgagacagatctacgtgaagcagcagagcgacctgcagttcctgaacttcaacgtggagaacagccaggagctgatccagatgtacgacagcaagatggaggagagcaaggccctggacagcagcagagacatgtgcctgagcgacctggagaacaaccaccccaaggtggacatcaagagagagaagaaccagaagagcctgttcaaggaccagaagttcgaggccatgctggtgcagcagaacagaagcgacaagagcagctgcgacgagtgcaaggagaagaagcagcagatcgacaccgtgttcggcgagaagagcgtgatcaccctgagcagcatcttcaccaaggacctggtggagaagcacaacctgccctggagcctgggcggcaagacccagatcgagcccgagaacaagatcaccctgtgcaagatccacaccaagagccccaagtgccacggcaccggcgtgcagaacgagggcaagcagcccagcgagacccccaccctgagcgacgagaagcagtggcacgacgtgagcgtgtacctgggcctgaccaactgccccagcagcaagcaccccgagaagctggacgtggagtgccaggaccagatggagagaagcgagatcagctgctgccagaagaacgaggcctgcctgggcgagagcggcatgtgcgacagcaagtgctgccaccccagcaacttcatcatcgaggcccccggccacatgagcgacgtggagtggatgagcatcttcaagcccagcaagatgcagagaatcgtgagactgaagagcggctgcacctgcagcgagagcatctgcggcacccagcacgacagccccgccagcgagctgatcgccatccaggacagccacagcctgggcagcagcaagagcgccctgagagaggacgagaccgagagcagcagcaacaagaagaacagccccaccagcctgctgatctacaaggacgcccccgccttcaacgagaaggccagcatcgtgctgcccagccaggacgacttcagccccaccagcaagctgcagagactgctggccgagagcagacagatggtgaccgacctggagctgagcaccctgctgcccatcagccacgagaacctgaccggcagcgccaccaacaagagcgaggtgcccgaggagagcgcccagaagaacaccttcgtgagctactag

SEQ ID NO: 77222 - DNA, 2049 bp, synthetic construct
  misc_feature 1..2049: note = Description of Artificial Sequence: Synthetic coding sequence
  source 1..2049: mol_type = other DNA
atgaacccccccgccgccttcctggccggcagacagaacatcggcagcgaggtggagatcagcaccatcgagaagcagagaaaggagctgcagctgctgatcggcgagctgaaggacagagacaaggagctgaacgacatggtggccgtgcaccagcagcagctgctgagctgggaggaggacagacagaaggtgctgaccctggaggagagatgcagcaagctggagggcgagctgcacaagagaaccgagatcatcagaagcctgaccaagaaggtgaaggccctggagagcaaccagatggagtgccagaccgccctgcagaagacccagctgcagctgcaggagatggcccagaaggccacccacagcagcctgctgagcgaggacctggaggccagaaacgagaccctgagcaacaccctggtggagctgagcgcccaggtgggccagctgcaggccagagagcaggccctgaccaccatgatcaagctgaaggacaaggacatcatcgaggccgtgaaccacatcgccgactgcagcggcaagttcaagatgctggagcacgccctgagagacgccaagatggccgagacctgcatcgtgaaggagaagcaggactacaagcagaagctgaaggccctgaagatcgaggtgaacaagctgaaggaggacctgaacgagaagaccaccgagaacaacgagcagagagaggagatcatcagactgaagcaggagaagagctgcctgcacgacgagctgctgttcaccgtggagagagagaagagaaaggacgagctgctgaacatcgccaagagcaagcaggagagaaccaacagcgagctgcacaacctgagacagatctacgtgaagcagcagagcgacctgcagttcctgaacttcaacgtggagaacagccaggagctgatccagatgtacgacagcaagatggaggagagcaaggccctggacagcagcagagacatgtgcctgagcgacctggagaacaaccaccccaaggtggacatcaagagagagaagaaccagaagagcctgttcaaggaccagaagttcgaggccatgctggtgcagcagaacagaagcgacaagagcagctgcgacgagtgcaaggagaagaagcagcagatcgacaccgtgttcggcgagaagagcgtgatcaccctgagcagcatcttcaccaaggacctggtggagaagcacaacctgccctggagcctgggcggcaagacccagatcgagcccgagaacaagatcaccctgtgcaagatccacaccaagagccccaagtgccacggcaccggcgtgcagaacgagggcaagcagcccagcgagacccccaccctgagcgacgagaagcagtggcacgacgtgagcgtgtacctgggcctgaccaactgccccagcagcaagcaccccgagaagctggacgtggagtgccaggaccagatggagagaagcgagatcagctgctgccagaagaacgaggcctgcctgggcgagagcggcatgtgcgacagcaagtgctgccaccccagcaacttcatcatcgaggcccccggccacatgagcgacgtggagtggatgagcatcttcaagcccagcaagatgcagagaatcgtgagactgaagagcggctgcacctgcagcgagagcatctgcggcacccagcacgacagccccgccagcgagctgatcgccatccaggacagccacagcctgggcagcagcaagagcgccctgagagaggacgagaccgagagcagcagcaacaagaagaacagccccaccagcctgctgatctacaaggacgcccccgccttcaacgagaaggccagcatcgtgctgcccagccaggacgacttcagccccaccagcaagctgcagagactgctggccgagagcagacagatggtgaccgacctggagctgagcaccctgctgcccatcagccacgagaacctgaccggcagcgccaccaacatcagccacctgtgcggcagacagaaggccgacaccaacaccgagtag

SEQ ID NO: 77223 - DNA, 1494 bp, synthetic construct
  misc_feature 1..1494: note = Description of Artificial Sequence: Synthetic coding sequence
  source 1..1494: mol_type = other DNA
atgcccaagaaggagaagatggccaagacccccctgagcgacgagaagcagctgctgctgttccagcagaagctgctggccgaggaggagatggccaagaagaaggagagactgctgagccagttcctgaaggacaagctggccaaggaggagcacaacagcgccctgaacctgaacaagatcaacacccagtggagaaccgtgctgagagaggtgaagaccagagagctgcacaaggacatcgagatcctgagccagaccttcgagagagtggtggactgcaaggacaacgtgatcaagagcctggccaaggacctgagcgaggccgaggagcagtacgcccacgccctgagaagccacctgcacaacgtggaccagctgctggccctgcagagacacagactgagcctgctggaggagagctacaacatggagctggaggccctgaccaaggagttcgagaccgagagaaagaccatcatcgaccagcacgagaaggagatccactacctgcaggacatcttcatggccatggagcagaactacatcgacagcgagtacgagagcaagctggagttccagagcatgtggaacgacctgaagaacatgaacctggaggagaagcacttcctgagactgcacctggagaacagagtggaggacctgtggagaaagttccaggacgtgctgaagaactacaccgacgccaccgaggacagaaaggccgccttcgagaccctgcaggtgaaggacgagaagagcagcaaggagatcgaggtgcagatgaagaagatccagaagctgcaggacgccatcaccatcagcaagggcaagatcatgatccacagcagagagagcgaggacgagaacagatacatcagaaacgacaaggagctggtgctggtgcagctgagaaagctgaaggcccagagaacccaggccagagccgccagccagaagaacctggtgagactgaccctggagagcaacgccaccctgaaggccctgagaaagatcgtggacaagggcgagaagatcctgaagctggccgagatctgcagaaagttcgagaccgaggaggagaaggtgctgcccttctacagcagcgtgctgacccccaaggagcaggagggcatccagaagaacaacctggaggagctgaccgaggagctgaccaaggtgatggtggactacatcggcatggagaacttctggaagagatacaacaaggtgaagctggagcagctgagcctgcagcacagaagagcccagctgctggacatcaacggcaagctgagagagatgctgaagcagtacctggacggcatcagcgtgagcgacgaggtgctgagccagctgaaccccctgttcatcgtgaactaccagagcaacctgctgcagcccctgagcatcagaatcgcccaccccggcagcaccagccccagcgccccctggagagaccagagaagaagcttcttcctgggcagcagctag

SEQ ID NO: 77224 - DNA, 1455 bp, synthetic construct
  misc_feature 1..1455: note = Description of Artificial Sequence: Synthetic coding sequence
  source 1..1455: mol_type = other DNA
atgcccaagaaggagaagatggccaagacccccctgagcgacgagaagcagctgctgctgttccagcagaagctgctggccgaggaggagatggccaagaagaaggagagactgctgagccagttcctgaaggacaagctggccaaggaggagcacaacagcgccctgaacctgaacaagatcaacacccagtggagaaccgtgctgagagaggtgaagaccagagagctgcacaaggacatcgagatcctgagccagaccttcgagagagtggtggactgcaaggacaacgtgatcaagagcctggccaaggacctgagcgaggccgaggagcagtacgcccacgccctgagaagccacctgcacaacgtggaccagctgctggccctgcagagacacagactgagcctgctggaggagagctacaacatggagctggaggccctgaccaaggagttcgagaccgagagaaagaccatcatcgaccagcacgagaaggagatccactacctgcaggacatcttcatggccatggagcagaactacatcgacagcgagtacgagagcaagctggagttccagagcatgtggaacgacctgaagaacatgaacctggaggagaagcacttcctgagactgcacctggagaacagagtggaggacctgtggagaaagttccaggacgtgctgaagaactacaccgacgccaccgaggacagaaaggccgccttcgagaccctgcaggtgaaggacgagaagagcagcaaggagatcgaggtgcagatgaagaagatccagaagctgcaggacgccatcaccatcagcaagggcaagatcatgatccacagcagagagagcgaggacgagaacagatacatcagaaacgacaaggagctggtgctggtgcagctgagaaagctgaaggcccagagaacccaggccagagccgccagccagaagaacctggtgagactgaccctggagagcaacgccaccctgaaggccctgagaaagatcgtggacaagggcgagaagatcctgaagctggccgagatctgcagaaagttcgagaccgaggaggagaaggtgctgcccttctacagcagcgtgctgacccccaaggagcaggagggcatccagaagaacaacctggaggagctgaccgaggagctgaccaaggtgatggtggactacatcggcatggagaacttctggaagagatacaacaaggtgaagctggagcagctgagcctgcagcacagaagagcccagctgctggacatcaacggcaagctgagagagatgctgaagcagtacctggacggcatcagcgtgagcgacgaggtgctgagccagctgaaccccctgttcatcgtgaactaccagagcaacctgctgcagcccctgagcatcagaatcgcccaccccggcgacaagcagcaccccaccacctag

SEQ ID NO: 77225 - DNA, 3240 bp, synthetic construct
  misc_feature 1..3240: note = Description of Artificial Sequence: Synthetic coding sequence
  source 1..3240: mol_type = other DNA
atggagagcaacttcaacaccgagagcagcagcaccttcaccctgcagagcagcagcgagaccctgttcagcatccagctgctggacttcaagaccagcctgctggaggccctggaggagctgagaatgagaagagaggccgagatccactacgaggagcagatcggcaagatcatcgtggagacccaggagctgaagtggcagaaggagaccctgcagaaccagaaggagaccctggccgagcagcacaaggaggccatggccgtgttcaagaagcagctgcagatgaagatgtgcgccctggaggaggagaagggcaagtaccagctggccaccgagatcaaggagaaggagatcgagggcctgaaggagaccctgaaggccctgcaggtgagcaagtacagcctgcagaagaaggtgagcgagatggagcagaaggtgcagctgcacctgctggccaaggaggactaccacaagcagctgagcgagatcgagaagtactacgccaccatcaccggccagttcggcctggtgaaggagaaccacgagaagctggagcagaacgtgagagaggccatccagagcaacaagagactgagcgccctgaacaagaagcaggaggccgagatctgcagcctgaagaaggagctgaagaaggccgccagcgacctgatcaagagcaaggtgacctgccagtacaagatgggcgaggagaacatcaacctgaccatcaaggagcagaagttccaggagctgcaggagagactgaacatggagctggagctgaacgagaagatcaacgaggagatcacccacatccaggaggagaagcaggacatcatcatcagcttccagcacatgcagcagctgctgagacagcagatccaggccaacaccgagatggaggccgagctgaaggtgctgaaggagaacaaccagaccctggagagagacaacgagctgcagagagagaaggtgaaggagaacgaggagaagttcctgaacctgcagaacgagcacgagaaggccctgggcacctggaagagacacgccgaggagctgaacggcgagatcaacaagatcaagaacgagctgagcagcctgaaggagacccacatcaagctgcaggagcactacaacaagctgtgcaaccagaagaccttcgaggaggacaagaagttccagaacgtgcccgaggtgaacaacgagaacagcgagatgagcaccgagaagagcgagaacaccatcatccagaagtacaacaccgagcaggagatcagagaggagaacatggagaacttctgcagcgacaccgagtacagagagaaggaggagaagaaggagggcagcttcatcgaggagatcatcatcgacgacctgcagctgttcgagaagagcttcaagaacgagatcgacaccgtggtgagccaggacgagaaccagagcgagatcagcctgagcaagaccctgagcctggacaaggaggtgatcagccagggccagaccagcaacgtgaccgacaacagaaagagcgtgaccaccgagatcaaggacaagatctgcctggagaaggacaacggctgcaccgagttcaagagccccaacaaccacttcgtggtgctggacaccgccatcgagaccgagaagatccacctggagagaaccagaggcctggacgtgcaccacaccgacgtgaacctggaggtggagaacaacaagaccagcttcaacagcatcctgaacgagaccgcccacaacacctaccacaacaacaacaaggacgtgagcgagaacgagcccttcaagcagttcagactgctgcccggcaccagagagcacgccctggagaaggagatcaccaacagcgaccagaccaaggccgacctggacagcagcctggacatcaagaagaaccccgtgccctgccagaagtacagcctgagaaacagcagcaacgtgatgctggacgacaagcagtgcaagatcaagcagatccagctgctgaccaagaagagcgagtgcagcatcctgctgagcaagcagaccagcgacttcctgcaggtgtgcaacgacaccctggagaagagcgagctgaccgtgccctgcgacatcgtgatcgaccaccacgtgagctacgccgccttcagcgccaacagcaagctgctgctgaagaacagcgacaagaacgtgcacagcatgagcatgctggtgaagcccaacagcagccccggcggcaagaccatgtgcaagaacatgagcgacatgcagaacagccagttcaacaactgcctgggctacctggagaacaccaacgtgaacatcagccacctgcacctgaacaacgagaacagccacgccagccaggccaaggacgtgaagaccgccgtgcacatgaagacctgcaccgagaccgagttcagcaacaagaagaaccagatcgacgagaaccaggtgaccgaggccaccaagaacgacctgttcctgttcgtgagcatcaacgagagacagcacaccctgctgaacaacaccgagaagaccgagagcctgaacgacatcgtgagcggcaagatgttcagcgagggccagctggaggagagccacagcttccacatcgagcccagcggcgacctggtgaacagaagcggcagaagcaccttcgacctgagcaccagcgacaagaagaccgagaagacccccgtgtacatgaacttcagcgaccccggcccctggagcaaggtgaaccacatcgagagccagaccgccagcagcagcaccccctgcatcagcctgctgctgaaggagagacccctggaccccagcgagaacaagaagatcatcagcatggccctgtgcaagaacatcggcgtggacgacgtgggcaaggacatcggccccgacaccaccagcatcaacagagtggccgacaccctgaacaactggagcatccaccccgaccccaagggcgagcccagcgaggagaagaacgccatggccaagaccttctacgacagcagcttccccaccgagcacgtgaagaccaagcccctgatcagcacccccctgcagagccacctgcaggccatcaagaccaccaagaacaccagcggcgacgacgactggcagagcctgatcaccaaccagctgaacaagagcgagaacctgctgagcctggagaacgacaaccagcccaagaagagaaaggccgaggagaccctggagaagaacaacagactgaagtag

SEQ ID NO: 77226 - DNA, 1617 bp, synthetic construct
  misc_feature 1..1617: note = Description of Artificial Sequence: Synthetic coding sequence
  source 1..1617: mol_type = other DNA
atgctgcagatcggcgaggacgtggactacctgctgatccccagagaggtgagactggccggcggcgtgtggagagtgatcagcaagcccgccaccaaggaggccgagttcagagagagactgacccagttcctggaggaggagggcagaaccctggaggacgtggccagaatcatggagaagagcaccccccaccccccccagccccccaagaagcccaaggagcccagagtgagaagaagagtgcagcagatggtgacccccccccccagactggtggtgggcacctacgacagcagcaacgccagcgacagcgagttcagcgacttcgagaccagcagagacaagagcagacagggccccagaagaggcaagaaggtgagaaagatgcccgtgagctacctgggcagcaagttcctgggcagcgacctggagagcgaggacgacgaggagctggtggaggccttcctgagaagacaggagaagcagcccagcgccccccccgccagaagaagagtgaacctgcccgtgcccatgttcgaggacaacctgggcccccagctgagcaaggccgacagatggagagagtacgtgagccaggtgagctggggcaagctgaagagaagagtgaagggctgggcccccagagccggccccggcgtgggcgaggccagactggccagcaccgccgtggagagcgccggcgtgagcagcgcccccgagggcaccagccccggcgacagactgggcaacgccggcgacgtgtgcgtgccccaggccagccccagaagatggagacccaagatcaactgggccagcttcagaagaagaagaaaggagcagaccgcccccaccggccagggcgccgacatcgaggccgaccagggcggcgaggccgccgacagccagagagaggaggccatcgccgaccagagagagggcgccgccggcaaccagagagccggcgcccccgccgaccagggcgccgaggccgccgacaaccagagagaggaggccgccgacaaccagagagccggcgcccccgccgaggagggcgccgaggccgccgacaaccagagagaggaggccgccgacaaccagagagccgaggcccccgccgaccagagaagccagggcaccgacaaccacagagaggaggccgccgacaaccagagagccgaggcccccgccgaccagggcagcgaggtgaccgacaaccagagagaggaggccgtgcacgaccagagagagagagcccccgccgtgcagggcgccgacaaccagagagcccaggccagagccggccagagagccgaggccgcccacaaccagagagccggcgcccccggcatccaggaggccgaggtgagcgccgcccagggcaccaccggcaccgcccccggcgccagagccagaaagcaggtgaagaccgtgagattccagacccccggcagattcagctggttctgcaagagaagaagagccttctggcacacccccagactgcccaccctgcccaagagagtgcccagagccggcgaggccagaaacctgagagtgctgagagccgaggccagagccgaggccgagcagggcgagcaggaggaccagctgtag

SEQ ID NO: 77227 - DNA, 975 bp, synthetic construct
  misc_feature 1..975: note = Description of Artificial Sequence: Synthetic coding sequence
  source 1..975: mol_type = other DNA
atgctgcagatcggcgaggacgtggactacctgctgatccccagagaggtgagactggccggcggcgtgtggagagtgatcagcaagcccgccaccaaggaggccgagttcagagagagactgacccagttcctggaggaggagggcagaaccctggaggacgtggccagaatcatggagaagagcaccccccaccccccccagccccccaagaagcccaaggagcccagagtgagaagaagagtgcagcagatggtgacccccccccccagactggtggtgggcacctacgacagcagcaacgccagcgacagcgagttcagcgacttcgagaccagcagagacaagagcagacagggccccagaagaggcaagaaggtgagaaagatgcccgtgagctacctgggcagcaagttcctgggcagcgacctggagagcgaggacgacgaggagctggtggaggccttcctgagaagacagggcctgcaggtgatcagaggccagggcccccagctgaccagaggccagagactgcagatcatcagaggcaagagactgcagatcatcagaggccagggcccccagctgagaagaggccagagactgcagatcaccagaggcaagagactgcagatcatcagaggccagagaccccagctgaccagaggccacagagcccagatcaccaccggcaagagactgcagatcatcagaggcagaagaccccagctgaccagaggccagagactgcagatcatcaagggcaagagaccctacatgaccagaggcaagggcccccagctgagcagagtgcagatcatcagaggccacagacccggcctggccagaggccagagactgcacatcatcagaggccagggcccccaggtgagcagaaagctgaagagccagctgcccaagggcccccaggagcagctgcaggagcccggccccggcaacagaagcagacagtag

SEQ ID NO: 77228 - DNA, 5532 bp, synthetic construct
  misc_feature 1..5532: note = Description of Artificial Sequence: Synthetic coding sequence
  source 1..5532: mol_type = other DNA
atggagaacgagatcttcacccccctgctggagcagttcatgaccagccccctggtgacctgggtgaagaccttcggccccctggccgccggcaacggcaccaacctggacgagtacgtggccctggtggacggcgtgttcctgaaccaggtgatgctgcagatcaaccccaagctggagagccagagagtgaacaagaaggtgaacaacgacgccagcctgagaatgcacaacctgagcatcctggtgagacagatcaagttctactaccaggagaccctgcagcagctgatcatgatgagcctgcccaacgtgctgatcatcggcaagaaccccttcagcgagcagggcaccgaggaggtgaagaagctgctgctgctgctgctgggctgcgccgtgcagtgccagaagaaggaggagttcatcgagagaatccagggcctggacttcgacaccaaggccgccgtggccgcccacatccaggaggtgacccacaaccaggagaacgtgttcgacctgcagtggatggaggtgaccgacatgagccaggaggacatcgagcccctgctgaagaacatggccctgcacctgaagagactgatcgacgagagagacgagcacagcgagaccatcatcgagctgagcgaggagagagacggcctgcacttcctgccccacgccagcagcagcgcccagagcccctgcggcagccccggcatgaagagaaccgagagcagacagcacctgagcgtggagctggccgacgccaaggccaagatcagaagactgagacaggagctggaggagaagaccgagcagctgctggactgcaagcaggagctggagcagatggagatcgagctgaagagactgcagcaggagaacatgaacctgctgagcgacgccagaagcgccagaatgtacagagacgagctggacgccctgagagagaaggccgtgagagtggacaagctggagagcgaggtgagcagatacaaggagagactgcacgacatcgagttctacaaggccagagtggaggagctgaaggaggacaaccaggtgctgctggagaccaagaccatgctggaggaccagctggagggcaccagagccagaagcgacaagctgcacgagctggagaaggagaacctgcagctgaaggccaagctgcacgacatggagatggagagagacatggacagaaagaagatcgaggagctgatggaggagaacatgaccctggagatggcccagaagcagagcatggacgagagcctgcacctgggctgggagctggagcagatcagcagaaccagcgagctgagcgaggccccccagaagagcctgggccacgaggtgaacgagctgaccagcagcagactgctgaagctggagatggagaaccagagcctgaccaagaccgtggaggagctgagaaccaccgtggacagcgtggagggcaacgccagcaagatcctgaagatggagaaggagaaccagagactgagcaagaaggtggagatcctggagaacgagatcgtgcaggagaagcagagcctgcagaactgccagaacctgagcaaggacctgatgaaggagaaggcccagctggagaagaccatcgagaccctgagagagaacagcgagagacagatcaagatcctggagcaggagaacgagcacctgaaccagaccgtgagcagcctgagacagagaagccagatcagcgccgaggccagagtgaaggacatcgagaaggagaacaagatcctgcacgagagcatcaaggagaccagcagcaagctgagcaagatcgagttcgagaagagacagatcaagaaggagctggagcactacaaggagaagggcgagagagccgaggagctggagaacgagctgcaccacctggagaaggagaacgagctgctgcagaagaagatcaccaacctgaagatcacctgcgagaagatcgaggccctggagcaggagaacagcgagctggagagagagaacagaaagctgaagaagaccctggacagcttcaagaacctgaccttccagctggagagcctggagaaggagaacagccagctggacgaggagaacctggagctgagaagaaacgtggagagcctgaagtgcgccagcatgaagatggcccagctgcagctggagaacaaggagctggagagcgagaaggagcagctgaagaagggcctggagctgctgaaggccagcttcaagaagaccgagagactggaggtgagctaccagggcctggacatcgagaaccagagactgcagaagaccctggagaacagcaacaagaagatccagcagctggagagcgagctgcaggacctggagatggagaaccagaccctgcagaagaacctggaggagctgaagatcagcagcaagagactggagcagctggagaaggagaacaagagcctggagcaggagaccagccagctggagaaggacaagaagcagctggagaaggagaacaagagactgagacagcaggccgagatcaaggacaccaccctggaggagaacaacgtgaagatcggcaacctggagaaggagaacaagaccctgagcaaggagatcggcatctacaaggagagctgcgtgagactgaaggagctggagaaggagaacaaggagctggtgaagagagccaccatcgacatcaagaccctggtgaccctgagagaggacctggtgagcgagaagctgaagacccagcagatgaacaacgacctggagaagctgacccacgagctggagaagatcggcctgaacaaggagagactgctgcacgacgagcagagcaccgacgacagcagatacaagctgctggagagcaagctggagagcaccctgaagaagagcctggagatcaaggaggagaagatcgccgccctggaggccagactggaggagagcaccaactacaaccagcagctgagacaggagctgaagaccgtgaagaagaactacgaggccctgaagcagagacaggacgaggagagaatggtgcagagcagcccccccatcagcggcgaggacaacaagtgggagagagagagccaggagaccaccagagagctgctgaaggtgaaggacagactgatcgaggtggagagaaacaacgccaccctgcaggccgagaagcaggccctgaagacccagctgaagcagctggagacccagaacaacaacctgcaggcccagatcctggccctgcagagacagaccgtgagcctgcaggagcagaacaccaccctgcagacccagaacgccaagctgcaggtggagaacagcaccctgaacagccagagcaccagcctgatgaaccagaacgcccagctgctgatccagcagagcagcctggagaacgagaacgagagcgtgatcaaggagagagaggacctgaagagcctgtacgacagcctgatcaaggaccacgagaagctggagctgctgcacgagagacaggccagcgagtacgagagcctgatcagcaagcacggcaccctgaagagcgcccacaagaacctggaggtggagcacagagacctggaggacagatacaaccagctgctgaagcagaagggccagctggaggacctggagaagatgctgaaggtggagcaggagaagatgctgctggagaacaagaaccacgagaccgtggccgccgagtacaagaagctgtgcggcgagaacgacagactgaaccacacctacagccagctgctgaaggagaccgaggtgctgcagaccgaccacaagaacctgaagagcctgctgaacaacagcaagctggagcagaccagactggaggccgagttcagcaagctgaaggagcagtaccagcagctggacatcaccagcaccaagctgaacaaccagtgcgagctgctgagccagctgaagggcaacctggaggaggagaacagacacctgctggaccagatccagaccctgatgctgcagaacagaaccctgctggagcagaacatggagagcaaggacctgttccacgtggagcagagacagtacatcgacaagctgaacgagctgagaagacagaaggagaagctggaggagaagatcatggaccagtacaagttctacgaccccagcccccccagaagaagaggcaactggatcaccctgaagatgagaaagctgatcaagagcaagaaggacatcaacagagagagacagaagagcctgaccctgacccccaccagaagcgacagcagcgagggcttcctgcagctgccccaccaggacagccaggacagcagcagcgtgggcagcaacagcctggaggacggccagaccctgggcaccaagaagagcagcaccatgaacgacctggtgcagagcatggtgctggccggccagtggaccggcagcaccgagaacctggaggtgcccgacgacatcagcaccggcaagagaagaaaggagctgggcgccatggccttcagcaccaccgccatcaacttcagcaccgtgaacagcagcgccggcttcagaagcaagcagctggtgaacaacaaggacaccaccagcttcgaggacatcagcccccagggcgtgagcgacgacagcagcaccggcagcagagtgcacgccagcagacccgccagcctggacagcggcagaaccagcaccagcaacagcaacaacaacgccagcctgcacgaggtgaaggccggcgccgtgaacaaccagagcagaccccagagccacagcagcggcgagttcagcctgctgcacgaccacgaggcctggagcagcagcggcagcagccccatccagtacctgaagagacagaccagaagcagccccgtgctgcagcacaagatcagcgagaccctggagagcagacaccacaagatcaagaccggcagccccggcagcgaggtggtgaccctgcagcagttcctggaggagagcaacaagctgaccagcgtgcagatcaagagcagcagccaggagaacctgctggacgaggtgatgaagagcctgagcgtgagcagcgacttcctgggcaaggacaagcccgtgagctgcggcctggccagaagcgtgagcggcaagacccccggcgacttctacgacagaagaaccaccaagcccgagttcctgagacccggccccagaaagaccgaggacacctacttcatcagcagcgccggcaagcccacccccggcacccagggcaagatcaagctggtgaaggagagcagcctgagcagacagagcaaggacagcaacccctacgccaccctgcccagagccagcagcgtgatcagcaccgccgagggcaccaccagaagaaccagcatccacgacttcctgaccaaggacagcagactgcccatcagcgtggacagcccccccgccgccgccgacagcaacaccaccgccgccagcaacgtggacaaggtgcaggagagcagaaacagcaagagcagaagcagagagcagcagagcagctag

SEQ ID NO: 77229 - DNA, 5613 bp, synthetic construct
  misc_feature 1..5613: note = Description of Artificial Sequence: Synthetic coding sequence
  source 1..5613: mol_type = other DNA
atggagaacgagatcttcacccccctgctggagcagttcatgaccagccccctggtgacctgggtgaagaccttcggccccctggccgccggcaacggcaccaacctggacgagtacgtggccctggtggacggcgtgttcctgaaccaggtgatgctgcagatcaaccccaagctggagagccagagagtgaacaagaaggtgaacaacgacgccagcctgagaatgcacaacctgagcatcctggtgagacagatcaagttctactaccaggagaccctgcagcagctgatcatgatgagcctgcccaacgtgctgatcatcggcaagaaccccttcagcgagcagggcaccgaggaggtgaagaagctgctgctgctgctgctgggctgcgccgtgcagtgccagaagaaggaggagttcatcgagagaatccagggcctggacttcgacaccaaggccgccgtggccgcccacatccaggaggtgacccacaaccaggagaacgtgttcgacctgcagtggatggaggtgaccgacatgagccaggaggacatcgagcccctgctgaagaacatggccctgcacctgaagagactgatcgacgagagagacgagcacagcgagaccatcatcgagctgagcgaggagagagacggcctgcacttcctgccccacgccagcagcagcgcccagagcccctgcggcagccccggcatgaagagaaccgagagcagacagcacctgagcgtggagctggccgacgccaaggccaagatcagaagactgagacaggagctggaggagaagaccgagcagctgctggactgcaagcaggagctggagcagatggagatcgagctgaagagactgcagcaggagaacatgaacctgctgagcgacgccagaagcgccagaatgtacagagacgagctggacgccctgagagagaaggccgtgagagtggacaagctggagagcgaggtgagcagatacaaggagagactgcacgacatcgagttctacaaggccagagtggaggagctgaaggaggacaaccaggtgctgctggagaccaagaccatgctggaggaccagctggagggcaccagagccagaagcgacaagctgcacgagctggagaaggagaacctgcagctgaaggccaagctgcacgacatggagatggagagagacatggacagaaagaagatcgaggagctgatggaggagaacatgaccctggagatggcccagaagcagagcatggacgagagcctgcacctgggctgggagctggagcagatcagcagaaccagcgagctgagcgaggccccccagaagagcctgggccacgaggtgaacgagctgaccagcagcagactgctgaagctggagatggagaaccagagcctgaccaagaccgtggaggagctgagaaccaccgtggacagcgtggagggcaacgccagcaagatcctgaagatggagaaggagaaccagagactgagcaagaaggtggagatcctggagaacgagatcgtgcaggagaagcagagcctgcagaactgccagaacctgagcaaggacctgatgaaggagaaggcccagctggagaagaccatcgagaccctgagagagaacagcgagagacagatcaagatcctggagcaggagaacgagcacctgaaccagaccgtgagcagcctgagacagagaagccagatcagcgccgaggccagagtgaaggacatcgagaaggagaacaagatcctgcacgagagcatcaaggagaccagcagcaagctgagcaagatcgagttcgagaagagacagatcaagaaggagctggagcactacaaggagaagggcgagagagccgaggagctggagaacgagctgcaccacctggagaaggagaacgagctgctgcagaagaagatcaccaacctgaagatcacctgcgagaagatcgaggccctggagcaggagaacagcgagctggagagagagaacagaaagctgaagaagaccctggacagcttcaagaacctgaccttccagctggagagcctggagaaggagaacagccagctggacgaggagaacctggagctgagaagaaacgtggagagcctgaagtgcgccagcatgaagatggcccagctgcagctggagaacaaggagctggagagcgagaaggagcagctgaagaagggcctggagctgctgaaggccagcttcaagaagaccgagagactggaggtgagctaccagggcctggacatcgagaaccagagactgcagaagaccctggagaacagcaacaagaagatccagcagctggagagcgagctgcaggacctggagatggagaaccagaccctgcagaagaacctggaggagctgaagatcagcagcaagagactggagcagctggagaaggagaacaagagcctggagcaggagaccagccagctggagaaggacaagaagcagctggagaaggagaacaagagactgagacagcaggccgagatcaaggacaccaccctggaggagaacaacgtgaagatcggcaacctggagaaggagaacaagaccctgagcaaggagatcggcatctacaaggagagctgcgtgagactgaaggagctggagaaggagaacaaggagctggtgaagagagccaccatcgacatcaagaccctggtgaccctgagagaggacctggtgagcgagaagctgaagacccagcagatgaacaacgacctggagaagctgacccacgagctggagaagatcggcctgaacaaggagagactgctgcacgacgagcagagcaccgacgacagatacaagctgctggagagcaagctggagagcaccctgaagaagagcctggagatcaaggaggagaagatcgccgccctggaggccagactggaggagagcaccaactacaaccagcagctgagacaggagctgaagaccgtgaagaagaactacgaggccctgaagcagagacaggacgaggagagaatggtgcagagcagcccccccatcagcggcgaggacaacaagtgggagagagagagccaggagaccaccagagagctgctgaaggtgaaggacagactgatcgaggtggagagaaacaacgccaccctgcaggccgagaagcaggccctgaagacccagctgaagcagctggagacccagaacaacaacctgcaggcccagatcctggccctgcagagacagaccgtgagcctgcaggagcagaacaccaccctgcagacccagaacgccaagctgcaggtggagaacagcaccctgaacagccagagcaccagcctgatgaaccagaacgcccagctgctgatccagcagagcagcctggagaacgagaacgagagcgtgatcaaggagagagaggacctgaagagcctgtacgacagcctgatcaaggaccacgagaagctggagctgctgcacgagagacaggccagcgagtacgagagcctgatcagcaagcacggcaccctgaagagcgcccacaagaacctggaggtggagcacagagacctggaggacagatacaaccagctgctgaagcagaagggccagctggaggacctggagaagatgctgaaggtggagcaggagaagatgctgctggagaacaagaaccacgagaccgtggccgccgagtacaagaagctgtgcggcgagaacgacagactgaaccacacctacagccagctgctgaaggagaccgaggtgctgcagaccgaccacaagaacctgaagagcctgctgaacaacagcaagctggagcagaccagactggaggccgagttcagcaagctgaaggagcagtaccagcagctggacatcaccagcaccaagctgaacaaccagtgcgagctgctgagccagctgaagggcaacctggaggaggagaacagacacctgctggaccagatccagaccctgatgctgcagaacagaaccctgctggagcagaacatggagagcaaggacctgttccacgtggagcagagacagtacatcgacaagctgaacgagctgagaagacagaaggagaagctggaggagaagatcatggaccagtacaagttctacgaccccagcccccccagaagaagaggcaactggatcaccctgaagatgagaaagctgatcaagagcaagaaggacatcaacagagagagacagaagagcctgaccctgacccccaccagaagcgacagcagcgagggcttcctgcagctgccccaccaggacagccaggacagcagcagcgtgggcagcaacagcctggaggacggccagaccctgggcaccaagaagagcagcatggtggccctgaagagactgcccttcctgagaaacagacccaaggacaaggacaagatgaaggcctgctacagaagaagcatgagcatgaacgacctggtgcagagcatggtgctggccggccagtggaccggcagcaccgagaacctggaggtgcccgacgacatcagcaccggcaagagaagaaaggagctgggcgccatggccttcagcaccaccgccatcaacttcagcaccgtgaacagcagcgccggcttcagaagcaagcagctggtgaacaacaaggacaccaccagcttcgaggacatcagcccccagggcgtgagcgacgacagcagcaccggcagcagagtgcacgccagcagacccgccagcctggacagcggcagaaccagcaccagcaacagcaacaacaacgccagcctgcacgaggtgaaggccggcgccgtgaacaaccagagcagaccccagagccacagcagcggcgagttcagcctgctgcacgaccacgaggcctggagcagcagcggcagcagccccatccagtacctgaagagacagaccagaagcagccccgtgctgcagcacaagatcagcgagaccctggagagcagacaccacaagatcaagaccggcagccccggcagcgaggtggtgaccctgcagcagttcctggaggagagcaacaagctgaccagcgtgcagatcaagagcagcagccaggagaacctgctggacgaggtgatgaagagcctgagcgtgagcagcgacttcctgggcaaggacaagcccgtgagctgcggcctggccagaagcgtgagcggcaagacccccggcgacttctacgacagaagaaccaccaagcccgagttcctgagacccggccccagaaagaccgaggacacctacttcatcagcagcgccggcaagcccacccccggcacccagggcaagatcaagctggtgaaggagagcagcctgagcagacagagcaaggacagcaacccctacgccaccctgcccagagccagcagcgtgatcagcaccgccgagggcaccaccagaagaaccagcatccacgacttcctgaccaaggacagcagactgcccatcagcgtggacagcccccccgccgccgccgacagcaacaccaccgccgccagcaacgtggacaaggtgcaggagagcagaaacagcaagagcagaagcagagagcagcagagcagctag

SEQ ID NO: 77230 - DNA, 2667 bp, synthetic construct
  misc_feature 1..2667: note = Description of Artificial Sequence: Synthetic coding sequence
  source 1..2667: mol_type = other DNA
ctgctggagagcaagctggagagcaccctgaagaagagcctggagatcaaggaggagaagatcgccgccctggaggccagactggaggagagcaccaactacaaccagcagctgagacaggagctgaagaccgtgaagaagaactacgaggccctgaagcagagacaggacgaggagagaatggtgcagagcagcccccccatcagcggcgaggacaacaagtgggagagagagagccaggagaccaccagagagctgctgaaggtgaaggacagactgatcgaggtggagagaaacaacgccaccctgcaggccgagaagcaggccctgaagacccagctgaagcagctggagacccagaacaacaacctgcaggcccagatcctggccctgcagagacagaccgtgagcctgcaggagcagaacaccaccctgcagacccagaacgccaagctgcaggtggagaacagcaccctgaacagccagagcaccagcctgatgaaccagaacgcccagctgctgatccagcagagcagcctggagaacgagaacgagagcgtgatcaaggagagagaggacctgaagagcctgtacgacagcctgatcaaggaccacgagaagctggagctgctgcacgagagacaggccagcgagtacgagagcctgatcagcaagcacggcaccctgaagagcgcccacaagaacctggaggtggagcacagagacctggaggacagatacaaccagctgctgaagcagaagggccagctggaggacctggagaagatgctgaaggtggagcaggagaagatgctgctggagaacaagaaccacgagaccgtggccgccgagtacaagaagctgtgcggcgagaacgacagactgaaccacacctacagccagctgctgaaggagaccgaggtgctgcagaccgaccacaagaacctgaagagcctgctgaacaacagcaagctggagcagaccagactggaggccgagttcagcaagctgaaggagcagtaccagcagctggacatcaccagcaccaagctgaacaaccagtgcgagctgctgagccagctgaagggcaacctggaggaggagaacagacacctgctggaccagatccagaccctgatgctgcagaacagaaccctgctggagcagaacatggagagcaaggacctgttccacgtggagcagagacagtacatcgacaagctgaacgagctgagaagacagaaggagaagctggaggagaagatcatggaccagtacaagttctacgaccccagcccccccagaagaagaggcaactggatcaccctgaagatgagaaagctgatcaagagcaagaaggacatcaacagagagagacagaagagcctgaccctgacccccaccagaagcgacagcagcgagggcttcctgcagctgccccaccaggacagccaggacagcagcagcgtgggcagcaacagcctggaggacggccagaccctgggcaccaagaagagcagcaccatgaacgacctggtgcagagcatggtgctggccggccagtggaccggcagcaccgagaacctggaggtgcccgacgacatcagcaccggcaagagaagaaaggagctgggcgccatggccttcagcaccaccgccatcaacttcagcaccgtgaacagcagcgccggcttcagaagcaagcagctggtgaacaacaaggacaccaccagcttcgaggacatcagcccccagggcgtgagcgacgacagcagcaccggcagcagagtgcacgccagcagacccgccagcctggacagcggcagaaccagcaccagcaacagcaacaacaacgccagcctgcacgaggtgaaggccggcgccgtgaacaaccagagcagaccccagagccacagcagcggcgagttcagcctgctgcacgaccacgaggcctggagcagcagcggcagcagccccatccagtacctgaagagacagaccagaagcagccccgtgctgcagcacaagatcagcgagaccctggagagcagacaccacaagatcaagaccggcagccccggcagcgaggtggtgaccctgcagcagttcctggaggagagcaacaagctgaccagcgtgcagatcaagagcagcagccaggagaacctgctggacgaggtgatgaagagcctgagcgtgagcagcgacttcctgggcaaggacaagcccgtgagctgcggcctggccagaagcgtgagcggcaagacccccggcgacttctacgacagaagaaccaccaagcccgagttcctgagacccggccccagaaagaccgaggacacctacttcatcagcagcgccggcaagcccacccccggcacccagggcaagatcaagctggtgaaggagagcagcctgagcagacagagcaaggacagcaacccctacgccaccctgcccagagccagcagcgtgatcagcaccgccgagggcaccaccagaagaaccagcatccacgacttcctgaccaaggacagcagactgcccatcagcgtggacagcccccccgccgccgccgacagcaacaccaccgccgccagcaacgtggacaaggtgcaggagagcagaaacagcaagagcagaagcagagagcagcagagcagctag

SEQ ID NO: 77231 - DNA, 5391 bp, synthetic construct
  misc_feature 1..5391: note = Description of Artificial Sequence: Synthetic coding sequence
  source 1..5391: mol_type = other DNA
atggagaacgagatcttcacccccctgctggagcagttcatgaccagccccctggtgacctgggtgaagaccttcggccccctggccgccggcaacggcaccaacctggacgagtacgtggccctggtggacggcgtgttcctgaaccaggtgatgctgcagatcaaccccaagctggagagccagagagtgaacaagaaggtgaacaacgacgccagcctgagaatgcacaacctgagcatcctggtgagacagatcaagttctactaccaggagaccctgcagcagctgatcatgatgagcctgcccaacgtgctgatcatcggcaagaaccccttcagcgagcagggcaccgaggaggtgaagaagctgctgctgctgctgctgggctgcgccgtgcagtgccagaagaaggaggagttcatcgagagaatccagggcctggacttcgacaccaaggccgccgtggccgcccacatccaggaggtgacccacaaccaggagaacgtgttcgacctgcagtggatggaggtgaccgacatgagccaggaggacatcgagcccctgctgaagaacatggccctgcacctgaagagactgatcgacgagagagacgagcacagcgagaccatcatcgagctgagcgaggagagagacggcctgcacttcctgccccacgccagcagcagcgcccagagcccctgcggcagccccggcatgaagagaaccgagagcagacagcacctgagcgtggagctggccgacgccaaggccaagatcagaagactgagacaggagctggaggagaagaccgagcagctgctggactgcaagcaggagctggagcagatggagatcgagctgaagagactgcagcaggagaacatgaacctgctgagcgacgccagaagcgccagaatgtacagagacgagctggacgccctgagagagaaggccgtgagagtggacaagctggagagcgaggtgagcagatacaaggagagactgcacgacatcgagttctacaaggccagagtggaggagctgaaggaggacaaccaggtgctgctggagaccaagaccatgctggaggaccagctggagggcaccagagccagaagcgacaagctgcacgagctggagaaggagaacctgcagctgaaggccaagctgcacgacatggagatggagagagacatggacagaaagaagatcgaggagctgatggaggagaacatgaccctggagatggcccagaagcagagcatggacgagagcctgcacctgggctgggagctggagcagatcagcagaaccagcgagctgagcgaggccccccagaagagcctgggccacgaggtgaacgagctgaccagcagcagactgctgaagctggagatggagaaccagagcctgaccaagaccgtggaggagctgagaaccaccgtggacagcgtggagggcaacgccagcaagatcctgaagatggagaaggagaaccagagactgagcaagaaggtggagatcctggagaacgagatcgtgcaggagaagcagagcctgcagaactgccagaacctgagcaaggacctgatgaaggagaaggcccagctggagaagaccatcgagaccctgagagagaacagcgagagacagatcaagatcctggagcaggagaacgagcacctgaaccagaccgtgagcagcctgagacagagaagccagatcagcgccgaggccagagtgaaggacatcgagaaggagaacaagatcctgcacgagagcatcaaggagaccagcagcaagctgagcaagatcgagttcgagaagagacagatcaagaaggagctggagcactacaaggagaagggcgagagagccgaggagctggagaacgagctgcaccacctggagaaggagaacgagctgctgcagaagaagatcaccaacctgaagatcacctgcgagaagatcgaggccctggagcaggagaacagcgagctggagagagagaacagaaagctgaagaagaccctggacagcttcaagaacctgaccttccagctggagagcctggagaaggagaacagccagctggacgaggagaacctggagctgagaagaaacgtggagagcctgaagtgcgccagcatgaagatggcccagctgcagctggagaacaaggagctggagagcgagaaggagcagctgaagaagggcctggagctgctgaaggccagcttcaagaagaccgagagactggaggtgagctaccagggcctggacatcgagaaccagagactgcagaagaccctggagaacagcaacaagaagatccagcagctggagagcgagctgcaggacctggagatggagaaccagaccctgcagaagaacctggaggagctgaagatcagcagcaagagactggagcagctggagaaggagaacaagagcctggagcaggagaccagccagctggagaaggacaagaagcagctggagaaggagaacaagagactgagacagcaggccgagatcaaggacaccaccctggaggagaacaacgtgaagatcggcaacctggagaaggagaacaagaccctgagcaaggagatcggcatctacaaggagagctgcgtgagactgaaggagctggagaaggagaacaaggagctggtgaagagagccaccatcgacatcaagaccctggtgaccctgagagaggacctggtgagcgagaagctgaagacccagcagatgaacaacgacctggagaagctgacccacgagctggagaagatcggcctgaacaaggagagactgctgcacgacgagcagagcaccgacgacagatacaagctgctggagagcaagctggagagcaccctgaagaagagcctggagatcaaggaggagaagatcgccgccctggaggccagactggaggagagcaccaactacaaccagcagctgagacaggagctgaagaccgtgaagaagaactacgaggccctgaagcagagacaggacgaggagagaatggtgcagagcagcccccccatcagcggcgaggacaacaagtgggagagagagagccaggagaccaccagagagctgctgaaggtgaaggacagactgatcgaggtggagagaaacaacgccaccctgcaggccgagaagcaggccctgaagacccagctgaagcagctggagacccagaacaacaacctgcaggcccagatcctggccctgcagagacagaccgtgagcctgcaggagcagaacaccaccctgcagacccagaacgccaagctgcaggtggagaacagcaccctgaacagccagagcaccagcctgatgaaccagaacgcccagctgctgatccagcagagcagcctggagaacgagaacgagagcgtgatcaaggagagagaggacctgaagagcctgtacgacagcctgatcaaggaccacgagaagctggagctgctgcacgagagacaggccagcgagtacgagagcctgatcagcaagcacggcaccctgaagagcgcccacaagaacctggaggtggagcacagagacctggaggacagatacaaccagctgctgaagcagaagggccagctggaggacctggagaagatgctgaaggtggagcaggagaagatgctgctggagaacaagaaccacgagaccgtggccgccgagtacaagaagctgtgcggcgagaacgacagactgaaccacacctacagccagctgctgaaggagaccgaggtgctgcagaccgaccacaagaacctgaagagcctgctgaacaacagcaagctggagcagaccagactggaggccgagttcagcaagctgaaggagcagtaccagcagctggacatcaccagcaccaagctgaacaaccagtgcgagctgctgagccagctgaagggcaacctggaggaggagaacagacacctgctggaccagatccagaccctgatgctgcagaacagaaccctgctggagcagaacatggagagcaaggacctgttccacgtggagcagagacagtacatcgacaagctgaacgagctgagaagacagaaggagaagctggaggagaagatcatggaccagtacaagttctacgaccccagcccccccagaagaagaggcaactggatcaccctgaagatgagaaagctgatcaagagcaagaaggacatcaacagagagagacagaagagcctgaccctgacccccaccagaagcgacagcagcgagggcttcctgcagctgccccaccaggacagccaggacagcagcagcgtgggcagcaacagcctggaggacggccagaccctgggcaccaagaagagcagcatggtggccctgaagagactgcccttcctgagaaacagacccaaggacaaggacaagatgaaggcctgctacagaagaagcatgagcatgaacgacctggtgcagagcatggtgctggccggccagtggaccggcagcaccgagaacctggaggtgcccgacgacatcagcaccggcaagagaagaaaggagctgggcgccatggccttcagcaccaccgccatcaacttcagcaccgtgaacagcagcgccggcttcagaagcaagcagctggtgaacaacaaggacaccaccagcttcgaggacatcagcccccagggcgtgagcgacgacagcagcaccggcagcagagtgcacgccagcagacccgccagcctggacagcggcagaaccagcaccagcaacagcaacaacaacgccagcctgcacgaggtgaaggccggcgccgtgaacaaccagagcagaccccagagccacagcagcggcgagttcagcctgctgcacgaccacgaggcctggagcagcagcggcagcagccccatccagtacctgaagagacagaccagaagcagccccgtgctgcagcacaagatcagcgagaccctggagagcagacaccacaagatcaagaccggcagccccggcagcgaggtggtgaccctgcagcagttcctggaggagagcaacaagctgaccagcgtgcagatcaagagcagcagccaggagaacctgctggacgaggtgatgaagagcctgagcgtgagcagcgacttcctgggcaaggacaagcccgtgagctgcggcctggccagcgtgatcagcaccgccgagggcaccaccagaagaaccagcatccacgacttcctgaccaaggacagcagactgcccatcagcgtggacagcccccccgccgccgccgacagcaacaccaccgccgccagcaacgtggacaaggtgcaggagagcagaaacagcaagagcagaagcagagagcagcagagcagctag

SEQ ID NO: 77232 - DNA, 1119 bp, synthetic construct
  misc_feature 1..1119: note = Description of Artificial Sequence: Synthetic coding sequence
  source 1..1119: mol_type = other DNA
atggaccagtacaagttctacgaccccagcccccccagaagaagaggcaactggatcaccctgaagatgagaaagctgatcaagagcaagaaggacatcaacagagagagacagaagagcctgaccctgacccccaccagaagcgacagcagcgagggcttcctgcagctgccccaccaggacagccaggacagcagcagcgtgggcagcaacagcctggaggacggccagaccctgggcaccaagaagagcagcaacaccaccagcttcgaggacatcagcccccagggcgtgagcgacgacagcagcaccggcagcagagtgcacgccggcgccgtgaacaaccagagcagaccccagagccacagcagcggcgagttcagcctgctgcacgaccacgaggcctggagcagcagcggcagcagccccatccagtacctgaagagacagaccagaagcagccccgtgctgcagcacaagatcagcgagaccctggagagcagacaccacaagatcaagaccggcagccccggcagcgaggtggtgaccctgcagcagttcctggaggagagcaacaagctgaccagcgtgcagatcaagagcagcagccaggagaacctgctggacgaggtgatgaagagcctgagcgtgagcagcgacttcctgggcaaggacaagcccgtgagctgcggcctggccagaagcgtgagcggcaagacccccggcgacttctacgacagaagaaccaccaagcccgagttcctgagacccggccccagaaagaccgaggacacctacttcatcagcagcgccggcaagcccacccccggcacccagggcaagatcaagctggtgaaggagagcagcctgagcagacagagcaaggacagcaacccctacgccaccctgcccagagccagcagcgtgatcagcaccgccgagggcaccaccagaagaaccagcatccacgacttcctgaccaaggacagcagactgcccatcagcgtggacagcccccccgccgccgccgacagcaacaccaccgccgccagcaacgtggacaaggtgcaggagagcagaaacagcaagagcagaagcagagagcagcagagcagctag

SEQ ID NO: 77233 - DNA, 5616 bp, synthetic construct
  misc_feature 1..5616: note = Description of Artificial Sequence: Synthetic coding sequence
  source 1..5616: mol_type = other DNA
atggagaacgagatcttcacccccctgctggagcagttcatgaccagccccctggtgacctgggtgaagaccttcggccccctggccgccggcaacggcaccaacctggacgagtacgtggccctggtggacggcgtgttcctgaaccaggtgatgctgcagatcaaccccaagctggagagccagagagtgaacaagaaggtgaacaacgacgccagcctgagaatgcacaacctgagcatcctggtgagacagatcaagttctactaccaggagaccctgcagcagctgatcatgatgagcctgcccaacgtgctgatcatcggcaagaaccccttcagcgagcagggcaccgaggaggtgaagaagctgctgctgctgctgctgggctgcgccgtgcagtgccagaagaaggaggagttcatcgagagaatccagggcctggacttcgacaccaaggccgccgtggccgcccacatccaggaggtgacccacaaccaggagaacgtgttcgacctgcagtggatggaggtgaccgacatgagccaggaggacatcgagcccctgctgaagaacatggccctgcacctgaagagactgatcgacgagagagacgagcacagcgagaccatcatcgagctgagcgaggagagagacggcctgcacttcctgccccacgccagcagcagcgcccagagcccctgcggcagccccggcatgaagagaaccgagagcagacagcacctgagcgtggagctggccgacgccaaggccaagatcagaagactgagacaggagctggaggagaagaccgagcagctgctggactgcaagcaggagctggagcagatggagatcgagctgaagagactgcagcaggagaacatgaacctgctgagcgacgccagaagcgccagaatgtacagagacgagctggacgccctgagagagaaggccgtgagagtggacaagctggagagcgaggtgagcagatacaaggagagactgcacgacatcgagttctacaaggccagagtggaggagctgaaggaggacaaccaggtgctgctggagaccaagaccatgctggaggaccagctggagggcaccagagccagaagcgacaagctgcacgagctggagaaggagaacctgcagctgaaggccaagctgcacgacatggagatggagagagacatggacagaaagaagatcgaggagctgatggaggagaacatgaccctggagatggcccagaagcagagcatggacgagagcctgcacctgggctgggagctggagcagatcagcagaaccagcgagctgagcgaggccccccagaagagcctgggccacgaggtgaacgagctgaccagcagcagactgctgaagctggagatggagaaccagagcctgaccaagaccgtggaggagctgagaaccaccgtggacagcgtggagggcaacgccagcaagatcctgaagatggagaaggagaaccagagactgagcaagaaggtggagatcctggagaacgagatcgtgcaggagaagcagagcctgcagaactgccagaacctgagcaaggacctgatgaaggagaaggcccagctggagaagaccatcgagaccctgagagagaacagcgagagacagatcaagatcctggagcaggagaacgagcacctgaaccagaccgtgagcagcctgagacagagaagccagatcagcgccgaggccagagtgaaggacatcgagaaggagaacaagatcctgcacgagagcatcaaggagaccagcagcaagctgagcaagatcgagttcgagaagagacagatcaagaaggagctggagcactacaaggagaagggcgagagagccgaggagctggagaacgagctgcaccacctggagaaggagaacgagctgctgcagaagaagatcaccaacctgaagatcacctgcgagaagatcgaggccctggagcaggagaacagcgagctggagagagagaacagaaagctgaagaagaccctggacagcttcaagaacctgaccttccagctggagagcctggagaaggagaacagccagctggacgaggagaacctggagctgagaagaaacgtggagagcctgaagtgcgccagcatgaagatggcccagctgcagctggagaacaaggagctggagagcgagaaggagcagctgaagaagggcctggagctgctgaaggccagcttcaagaagaccgagagactggaggtgagctaccagggcctggacatcgagaaccagagactgcagaagaccctggagaacagcaacaagaagatccagcagctggagagcgagctgcaggacctggagatggagaaccagaccctgcagaagaacctggaggagctgaagatcagcagcaagagactggagcagctggagaaggagaacaagagcctggagcaggagaccagccagctggagaaggacaagaagcagctggagaaggagaacaagagactgagacagcaggccgagatcaaggacaccaccctggaggagaacaacgtgaagatcggcaacctggagaaggagaacaagaccctgagcaaggagatcggcatctacaaggagagctgcgtgagactgaaggagctggagaaggagaacaaggagctggtgaagagagccaccatcgacatcaagaccctggtgaccctgagagaggacctggtgagcgagaagctgaagacccagcagatgaacaacgacctggagaagctgacccacgagctggagaagatcggcctgaacaaggagagactgctgcacgacgagcagagcaccgacgacagcagatacaagctgctggagagcaagctggagagcaccctgaagaagagcctggagatcaaggaggagaagatcgccgccctggaggccagactggaggagagcaccaactacaaccagcagctgagacaggagctgaagaccgtgaagaagaactacgaggccctgaagcagagacaggacgaggagagaatggtgcagagcagcccccccatcagcggcgaggacaacaagtgggagagagagagccaggagaccaccagagagctgctgaaggtgaaggacagactgatcgaggtggagagaaacaacgccaccctgcaggccgagaagcaggccctgaagacccagctgaagcagctggagacccagaacaacaacctgcaggcccagatcctggccctgcagagacagaccgtgagcctgcaggagcagaacaccaccctgcagacccagaacgccaagctgcaggtggagaacagcaccctgaacagccagagcaccagcctgatgaaccagaacgcccagctgctgatccagcagagcagcctggagaacgagaacgagagcgtgatcaaggagagagaggacctgaagagcctgtacgacagcctgatcaaggaccacgagaagctggagctgctgcacgagagacaggccagcgagtacgagagcctgatcagcaagcacggcaccctgaagagcgcccacaagaacctggaggtggagcacagagacctggaggacagatacaaccagctgctgaagcagaagggccagctggaggacctggagaagatgctgaaggtggagcaggagaagatgctgctggagaacaagaaccacgagaccgtggccgccgagtacaagaagctgtgcggcgagaacgacagactgaaccacacctacagccagctgctgaaggagaccgaggtgctgcagaccgaccacaagaacctgaagagcctgctgaacaacagcaagctggagcagaccagactggaggccgagttcagcaagctgaaggagcagtaccagcagctggacatcaccagcaccaagctgaacaaccagtgcgagctgctgagccagctgaagggcaacctggaggaggagaacagacacctgctggaccagatccagaccctgatgctgcagaacagaaccctgctggagcagaacatggagagcaaggacctgttccacgtggagcagagacagtacatcgacaagctgaacgagctgagaagacagaaggagaagctggaggagaagatcatggaccagtacaagttctacgaccccagcccccccagaagaagaggcaactggatcaccctgaagatgagaaagctgatcaagagcaagaaggacatcaacagagagagacagaagagcctgaccctgacccccaccagaagcgacagcagcgagggcttcctgcagctgccccaccaggacagccaggacagcagcagcgtgggcagcaacagcctggaggacggccagaccctgggcaccaagaagagcagcatggtggccctgaagagactgcccttcctgagaaacagacccaaggacaaggacaagatgaaggcctgctacagaagaagcatgagcatgaacgacctggtgcagagcatggtgctggccggccagtggaccggcagcaccgagaacctggaggtgcccgacgacatcagcaccggcaagagaagaaaggagctgggcgccatggccttcagcaccaccgccatcaacttcagcaccgtgaacagcagcgccggcttcagaagcaagcagctggtgaacaacaaggacaccaccagcttcgaggacatcagcccccagggcgtgagcgacgacagcagcaccggcagcagagtgcacgccagcagacccgccagcctggacagcggcagaaccagcaccagcaacagcaacaacaacgccagcctgcacgaggtgaaggccggcgccgtgaacaaccagagcagaccccagagccacagcagcggcgagttcagcctgctgcacgaccacgaggcctggagcagcagcggcagcagccccatccagtacctgaagagacagaccagaagcagccccgtgctgcagcacaagatcagcgagaccctggagagcagacaccacaagatcaagaccggcagccccggcagcgaggtggtgaccctgcagcagttcctggaggagagcaacaagctgaccagcgtgcagatcaagagcagcagccaggagaacctgctggacgaggtgatgaagagcctgagcgtgagcagcgacttcctgggcaaggacaagcccgtgagctgcggcctggccagaagcgtgagcggcaagacccccggcgacttctacgacagaagaaccaccaagcccgagttcctgagacccggccccagaaagaccgaggacacctacttcatcagcagcgccggcaagcccacccccggcacccagggcaagatcaagctggtgaaggagagcagcctgagcagacagagcaaggacagcaacccctacgccaccctgcccagagccagcagcgtgatcagcaccgccgagggcaccaccagaagaaccagcatccacgacttcctgaccaaggacagcagactgcccatcagcgtggacagcccccccgccgccgccgacagcaacaccaccgccgccagcaacgtggacaaggtgcaggagagcagaaacagcaagagcagaagcagagagcagcagagcagctag

SEQ ID NO: 77234 - DNA, 420 bp, synthetic construct
  misc_feature 1..420: note = Description of Artificial Sequence: Synthetic coding sequence
  source 1..420: mol_type = other DNA
atgccctgcgccgccagaagcagaagcagctggagaagaagctggaccaacaccgcctgctggagcctgtgcccctgccccggccccagaagccccagccccgcccccatgagaagagcccagagcagcctgtgcctgagagacgagaccctggccggcggccagagaagaaagctgagcagcagattccccgtgggcagaagcagcgagagcttcagccccggcgacacccccagacagagattcagacagagacaccccggccccctgggcgcccccgtgagccacagcaagggccccggcgtgggctgggagaacagcgccgagaccctgcaggagcacgagaccgacgccaacagagagggccccgaggtgcaggagcccgagaagagacccctgacccccagcctgagccagtag

SEQ ID NO: 77235 - DNA, 4431 bp, synthetic construct
  misc_feature 1..4431: note = Description of Artificial Sequence: Synthetic coding sequence
  source 1..4431: mol_type = other DNA
atggagggcggcaagggccccagactgagagacttcctgagcggcagcctggccacctgggccctgggcctggccggcctggtgggcgaggccgaggacagcgagggcgaggaggaggaggaggaggaggagccccccctgtggctggagaagagattcctgagactgagcgacggcgccctgctgctgagagtgctgggcatcatcgcccccagcagcagaggcggccccagaatgctgagaggcctggacggccccgccgcctggagagtgtggaacctgaaccacctgtggggcagactgagagacttctaccaggaggagctgcagctgctgatcctgagccccccccccgacctgcagaccctgggcttcgaccccctgagcgaggaggccgtggagcagctggagggcgtgctgagactgctgctgggcgccagcgtgcagtgcgagcacagagagctgttcatcagacacatccagggcctgagcctggaggtgcagagcgagctggccgccgccatccaggaggtgacccagcccggcgccggcgtggtgctggccctgagcggccccgaccccggcgagctggcccccgccgagctggagatgctgagcagaagcctgatgggcaccctgagcaagctggccagagagagagacctgggcgcccagagactggccgagctgctgctggagagagagcccctgtgcctgagacccgaggcccccagcagagcccccgccgagggccccagccaccacctggccctgcagctggccaacgccaaggcccagctgagaagactgagacaggagctggaggagaaggccgagctgctgctggacagccaggccgaggtgcagggcctggaggccgagatcagaagactgagacaggaggcccaggccctgagcggccaggccaagagagccgagctgtacagagaggaggccgaggccctgagagagagagccggcagactgcccagactgcaggaggagctgagaagatgcagagagagactgcaggccgccgaggcctacaagagccagctggaggaggagagagtgctgagcggcgtgctggaggccagcaaggccctgctggaggagcagctggaggccgccagagagagatgcgccagactgcacgagacccagagagagaacctgctgctgagaaccagactgggcgaggcccacgccgagctggacagcctgagacaccaggtggaccagctggccgaggagaacgtggagctggagctggagctgcagagaagcctggagcccccccccggcagccccggcgaggcccccctggccggcgccgcccccagcctgcaggacgaggtgagagaggccgaggccggcagactgagaaccctggagagagagaacagagagctgagaggcctgctgcaggtgctgcagggccagcccggcggccagcaccccctgctggaggcccccagagaggaccccgtgctgcccgtgctggaggaggccccccagacccccgtggccttcgaccacagcccccagggcctggtgcagaaggccagagacggcggcccccaggccctggacctggccccccccgccctggacagcgtgctggaggccagcgccgagtgcccccaggcccccgacagcgacccccaggaggccgagagccccctgcaggccgccgccatggacccccaggccagcgactggagcccccaggagagcggcagccccgtggagacccaggagagccccgagaaggccggcagaagaagcagcctgcagagccccgccagcgtggcccccccccagggccccggcaccaagatccaggccccccagctgctgggcggcgagaccgagggcagagaggccccccagggcgagctggtgcccgaggcctggggcctgagacaggagggccccgagcacaagcccggccccagcgagcccagcagcgtgcagctggaggagcaggagggccccaaccagggcctggacctggccaccggccaggccgaggccagagagcacgaccagagactggagggcaccgtgagagaccccgcctggcagaagccccagcagaagagcgagggcgccctggaggtgcaggtgtgggagggccccatccccggcgagagcctggccagcggcgtggccgagcaggaggccctgagagaggaggtggcccagctgagaagaaaggccgaggccctgggcgacgagctggaggcccaggccagaaagctggaggcccagaacaccgaggccgccagactgagcaaggagctggcccaggccagaagagccgaggccgaggcccacagagaggccgaggcccaggcctgggagcaggccagactgagagaggccgtggaggccgccggccaggagctggagagcgccagccaggagagagaggccctggtggaggccctggccgccgccggcagagagagaagacagtgggagagagagggcagcagactgagagcccagagcgaggccgccgaggagagaatgcaggtgctggagagcgagggcagacagcacctggaggaggccgagagagagagaagagagaaggaggccctgcaggccgagctggagaaggccgtggtgagaggcaaggagctgggcgacagactggagcacctgcagagagagctggagcaggccgccctggagagacaggagttcctgagagagaaggagagccagcaccagagataccagggcctggagcagagactggaggccgagctgcaggccgccgccaccagcaaggaggaggccctgatggagctgaagaccagagccctgcagctggaggaggagctgttccagctgagacagggccccgccggcctgggccccaagaagagagccgagccccagctggtggagacccagaacgtgagactgatcgaggtggagagaagcaacgccatgctggtggccgagaaggccgccctgcagggccagctgcagcacctggagggccagctgggcagcctgcagggcagagcccaggagctgctgctgcagagccagagagcccaggagcacagcagcagactgcaggccgagaagagcgtgctggagatccagggccaggagctgcacagaaagctggaggtgctggaggaggaggtgagagccgccagacagagccaggaggagaccagaggccagcagcaggccctgctgagagaccacaaggccctggcccagctgcagagaagacaggaggccgagctggagggcctgctggtgagacacagagacctgaaggccaacatgagagccctggagctggcccacagagagctgcagggcagacacgagcagctgcaggcccagagagccagcgtggaggcccaggaggtggccctgctggccgagagagagagactgatgcaggacggccacagacagagaggcctggaggaggagctgagaagactgcagagcgagcacgacagagcccagatgctgctggccgagctgagcagagagagaggcgagctgcagggcgagagaggcgagctgagaggcagactggccagactggagctggagagagcccagctggagatgcagagccagcagctgagagagagcaaccagcagctggacctgagcgcctgcagactgaccacccagtgcgagctgctgacccagctgagaagcgcccaggaggaggagaacagacagctgctggccgaggtgcaggccctgagcagagagaacagagagctgctggagagaagcctggagagcagagaccacctgcacagagagcagagagagtacctggaccagctgaacgccctgagaagagagaagcagaagctggtggagaagatcatggaccagtacagagtgctggagcccgtgcccctgcccagaaccaagaagggcagctggctggccgacaaggtgaagagactgatgagacccagaagagagggcggcccccccggcggcctgagactgggcgccgacggcgccggcagcaccgagagcctgggcggcccccccgagaccgagctgcccgagggcagagaggccgacggcaccggcagccccagccccgcccccatgagaagagcccagagcagcctgtgcctgagagacgagaccctggccggcggccagagaagaaagctgagcagcagattccccgtgggcagaagcagcgagagcttcagccccggcgacacccccagacagagattcagacagagacaccccggccccctgggcgcccccgtgagccacagcaagggccccggcgtgggctgggagaacagcgccgagaccctgcaggagcacgagaccgacgccaacagagagggccccgaggtgcaggagcccgagaagagacccctgacccccagcctgagccagtag

SEQ ID NO: 77236 - DNA, 2139 bp, synthetic construct
  misc_feature 1..2139: note = Description of Artificial Sequence: Synthetic coding sequence
  source 1..2139: mol_type = other DNA
atggccggcgtggccgcccacagagcccacccccccttcaccgcccacatgaagaacagaggcctgagagaggagctggagaaggccgtggtgagaggcaaggagctgggcgacagactggagcacctgcagagagagctggagcaggccgccctggagagacaggagttcctgagagagaaggagagccagcaccagagataccagggcctggagcagagactggaggccgagctgcaggccgccgccaccagcaaggaggaggccctgatggagctgaagaccagagccctgcagctggaggaggagctgttccagctgagacagggccccgccggcctgggccccaagaagagagccgagccccagctggtggagacccagaacgtgagactgatcgaggtggagagaagcaacgccatgctggtggccgagaaggccgccctgcagggccagctgcagcacctggagggccagctgggcagcctgcagggcagagcccaggagctgctgctgcagagccagagagcccaggagcacagcagcagactgcaggccgagaagagcgtgctggagatccagggccaggagctgcacagaaagctggaggtgctggaggaggaggtgagagccgccagacagagccaggaggagaccagaggccagcagcaggccctgctgagagaccacaaggccctggcccagctgcagagaagacaggaggccgagctggagggcctgctggtgagacacagagacctgaaggccaacatgagagccctggagctggcccacagagagctgcagggcagacacgagcagctgcaggcccagagagccagcgtggaggcccaggaggtggccctgctggccgagagagagagactgatgcaggacggccacagacagagaggcctggaggaggagctgagaagactgcagagcgagcacgacagagcccagatgctgctggccgagctgagcagagagagaggcgagctgcagggcgagagaggcgagctgagaggcagactggccagactggagctggagagagcccagctggagatgcagagccagcagctgagagagagcaaccagcagctggacctgagcgcctgcagactgaccacccagtgcgagctgctgacccagctgagaagcgcccaggaggaggagaacagacagctgctggccgaggtgcaggccctgagcagagagaacagagagctgctggagagaagcctggagagcagagaccacctgcacagagagcagagagagtacctggaccagctgaacgccctgagaagagagaagcagaagctggtggagaagatcatggaccagtacagagtgctggagcccgtgcccctgcccagaaccaagaagggcagctggctggccgacaagggccccctgcccagacacccctgcgccggccccagagcccccagcgcctgcggcatgagaccctggcaggccggcagcggcggcaacagcgcccagggcagcagatggggcgaggccctgagccacagcgccctgggcacccccctgggcaacgacagcgacagcgccatccaggccccctggggcagacccagccccaccgccaaggacctggtgtgggacggcagaacccccctgagaccctgcagaaacaccaagcagatgcccaccgagagagccctgagatacagaaacagaagaaacgtgcccagcccccaccccagcgccagcgacaccgtgggcaccgccggcctgggcgtgcagcccagcagacactggagcgtgagcggcggccccagacagcccaagagcagcggcagccagggcccccagggcgagagcctggacaaggaggcctgggccctgagaagcagcaccgtgagcgccggcgccagaagatggagctgggacgagtgcgtggacagaggcgacggctggccccccagagccgcccccggctggagcagcggcagcagcagatggctgcccctgagacagagaagcctgggcgacccccccgccgagggcggctggcaggagctggccagagagccccccgccctgagcagatgggaggccgagagccagtgctggggcaccgtggcctgggccgacctggagccctag

SEQ ID NO: 77237 - DNA, 4077 bp, synthetic construct
  misc_feature 1..4077: note = Description of Artificial Sequence: Synthetic coding sequence
  source 1..4077: mol_type = other DNA
atggagggcggcaagggccccagactgagagacttcctgagcggcagcctggccacctgggccctgggcctggccggcctggtgggcgaggccgaggacagcgagggcgaggaggaggaggaggaggaggagccccccctgtggctggagaagagattcctgagactgagcgacggcgccctgctgctgagagtgctgggcatcatcgcccccagcagcagaggcggccccagaatgctgagaggcctggacggccccgccgcctggagagtgtggaacctgaaccacctgtggggcagactgagagacttctaccaggaggagctgcagctgctgatcctgagccccccccccgacctgcagaccctgggcttcgaccccctgagcgaggaggccgtggagcagctggagggcgtgctgagactgctgctgggcgccagcgtgcagtgcgagcacagagagctgttcatcagacacatccagggcctgagcctggaggtgcagagcgagctggccgccgccatccaggaggtgacccagcccggcgccggcgtggtgctggccctgagcggccccgaccccggcgagctggcccccgccgagctggagatgctgagcagaagcctgatgggcaccctgagcaagctggccagagagagagacctgggcgcccagagactggccgagctgctgctggagagagagcccctgtgcctgagacccgaggcccccagcagagcccccgccgagggccccagccaccacctggccctgcagctggccaacgccaaggcccagctgagaagactgagacaggagctggaggagaaggccgagctgctgctggacagccaggccgaggtgcagggcctggaggccgagatcagaagactgagacaggaggcccaggccctgagcggccaggccaagagagccgagctgtacagagaggaggccgaggccctgagagagagagccggcagactgcccagactgcaggaggagctgagaagatgcagagagagactgcaggccgccgaggcctacaagagccagctggaggaggagagagtgctgagcggcgtgctggaggccagcaaggccctgctggaggagcagctggaggccgccagagagagatgcgccagactgcacgagacccagagagagaacctgctgctgagaaccagactgggcgaggcccacgccgagctggacagcctgagacaccaggtggaccagctggccgaggagaacgtggagctggagctggagctgcagagaagcctggagcccccccccggcagccccggcgaggcccccctggccggcgccgcccccagcctgcaggacgaggtgagagaggccgaggccggcagactgagaaccctggagagagagaacagagagctgagaggcctgctgcaggtgctgcagggccagcccggcggccagcaccccctgctggaggcccccagagaggaccccgtgctgcccgtgctggaggaggccccccagacccccgtggccttcgaccacagcccccagggcctggtgcagaaggccagagacggcggcccccaggccctggacctggccccccccgccctggacagcgtgctggaggccagcgccgagtgcccccaggcccccgacagcgacccccaggaggccgagagccccctgcaggccgccgccatggacccccaggccagcgactggagcccccaggagagcggcagccccgtggagacccaggagagccccgagaaggccggcagaagaagcagcctgcagagccccgccagcgtggcccccccccagggccccggcaccaagatccaggccccccagctgctgggcggcgagaccgagggcagagaggccccccagggcgagctggtgcccgaggcctggggcctgagacaggagggccccgagcacaagcccggccccagcgagcccagcagcgtgcagctggaggagcaggagggccccaaccagggcctggacctggccaccggccaggccgaggccagagagcacgaccagagactggagggcaccgtgagagaccccgcctggcagaagccccagcagaagagcgagggcgccctggaggtgcaggtgtgggagggccccatccccggcgagagcctggccagcggcgtggccgagcaggaggccctgagagaggaggtggcccagctgagaagaaaggccgaggccctgggcgacgagctggaggcccaggccagaaagctggaggcccagaacaccgaggccgccagactgagcaaggagctggcccaggccagaagagccgaggccgaggcccacagagaggccgaggcccaggcctgggagcaggccagactgagagaggccgtggaggccgccggccaggagctggagagcgccagccaggagagagaggccctggtggaggccctggccgccgccggcagagagagaagacagtgggagagagagggcagcagactgagagcccagagcgaggccgccgaggagagaatgcaggtgctggagagcgagggcagacagcacctggaggaggccgagagagagagaagagagaaggaggccctgcaggccgagctggagaaggccgtggtgagaggcaaggagctgggcgacagactggagcacctgcagagagagctggagcaggccgccctggagagacaggagttcctgagagagaaggagagccagcaccagagataccagggcctggagcagagactggaggccgagctgcaggccgccgccaccagcaaggaggaggccctgatggagctgaagaccagagccctgcagctggaggaggagctgttccagctgagacagggccccgccggcctgggccccaagaagagagccgagccccagctggtggagacccagaacgtgagactgatcgaggtggagagaagcaacgccatgctggtggccgagaaggccgccctgcagggccagctgcagcacctggagggccagctgggcagcctgcagggcagagcccaggagctgctgctggccgagagagagagactgatgcaggacggccacagacagagaggcctggaggaggagctgagaagactgcagagcgagcacgacagagcccagatgctgctggccgagctgagcagagagagaggcgagctgcagggcgagagaggcgagctgagaggcagactggccagactggagctggagagagcccagctggagatgcagagccagcagctgagagagagcaaccagcagctggacctgagcgcctgcagactgaccacccagtgcgagctgctgacccagctgagaagcgcccaggaggaggagaacagacagctgctggccgaggtgcaggccctgagcagagagaacagagagctgctggagagaagcctggagagcagagaccacctgcacagagagcagagagagtacctggaccagctgaacgccctgagaagagagaagcagaagctggtggagaagatcatggaccagtacagagtgctggagcccgtgcccctgcccagaaccaagaagggcagctggctggccgacaaggtgaagagactgatgagacccagaagagagggcggcccccccggcggcctgagactgggcgccgacggcgccggcagcaccgagagcctgggcggcccccccgagaccgagctgcccgagggcagagaggccgacggcaccggcagccccagccccgcccccatgagaagagcccagagcagcctgtgcctgagagacgagaccctggccggcggccagagaagaaagctgagcagcagattccccgtgggcagaagcagcgagagcttcagccccggcgacacccccagacagagattcagacagagacaccccggccccctgggcgcccccgtgagccacagcaagggccccggcgtgggctgggagaacagcgccgagaccctgcaggagcacgagaccgacgccaacagagagggccccgaggtgcaggagcccgagaagagacccctgacccccagcctgagccagtag

SEQ ID NO: 77238 - DNA, 684 bp, synthetic construct
  misc_feature 1..684: note = Description of Artificial Sequence: Synthetic coding sequence
  source 1..684: mol_type = other DNA
atgggcggcaccaccagcaccagaagagtgaccttcgaggccgacgagaacgagaacatcaccgtggtgaagggcatcagactgagcgagaacgtgatcgacagaatgaaggagagcagccccagcggcagcaagagccagagatacagcggcgcctacggcgccagcgtgagcgacgaggagctgaagagaagagtggccgaggagctggccctggagcaggccaagaaggagagcgaggaccagaagagactgaagcaggccaaggagctggacagagagagagccgccgccaacgagcagctgaccagagccatcctgagagagagaatctgcagcgaggaggagagagccaaggccaagcacctggccagacagctggaggagaaggacagagtgctgaagaagcaggacgccttctacaaggagcagctggccagactggaggagagaagcagcgagttctacagagtgaccaccgagcagtaccagaaggccgccgaggaggtggaggccaagttcaagagatacgagagccaccccgtgtgcgccgacctgcaggccaagatcctgcagtgctacagagagaacacccaccagaccctgaagtgcagcgccctggccacccagtacatgcactgcgtgaaccacgccaagcagagcatgctggagaagggcggctag

SEQ ID NO: 77239 - DNA, 417 bp, synthetic construct
  misc_feature 1..417: note = Description of Artificial Sequence: Synthetic coding sequence
  source 1..417: mol_type = other DNA
atgggcggcaccaccagcaccagaagagtgaccttcgaggccgacgagaacgagaacatcaccgtggtgaagggcatcagactgagcgagaacgtgatcgacagaatgaaggagagcagccccagcggcagcaagagccagagatacagcggcgcctacggcgccagcgtgagcgacgaggagctgaagagaagagtggccgaggagctggccctggagcaggccaagaaggagagcgaggaccagaagagactgaagcaggccaaggagctggacagagagagagccgccgccaacgagcagctgaccagagccatcctgagagagagaatctgcagcgaggaggagagagccaaggccaagcacctgatcaaggtggagctgctgtgggtgaagcccggcgtgctgaccgcctag

SEQ ID NO: 77240 - DNA, 333 bp, synthetic construct
  misc_feature 1..333: note = Description of Artificial Sequence: Synthetic coding sequence
  source 1..333: mol_type = other DNA
atgaagtgcgaggagacccacgcccccaacagcaactgggtgtacgtgatgctgcccagcaagaagaccgtgagaatgcccagcgtgacccagagactgagagaccccgacatcaacccctgcctgagcgagagcgacgccagcaccagatgcctggacgagaacaactacgacagagagagatgcagcacctacttcctgagatacaagaactgcagaagattctggaacagcatcgtgatgcagagaagaaagaacggcgtgaagcccttcatgcccaccgccgccgagagagacgagatcctgagagccgtgggcaacatgccctactag

SEQ ID NO: 77241 - DNA, 258 bp, synthetic construct
  misc_feature 1..258: note = Description of Artificial Sequence: Synthetic coding sequence
  source 1..258: mol_type = other DNA
atgcccagcgtgacccagagactgagagaccccgacatcaacccctgcctgagcgagagcgacgccagcaccagatgcctggacgagaacaactacgacagagagagatgcagcacctacttcctgagatacaagaactgcagaagattctggaacagcatcgtgatgcagagaagaaagaacggcgtgaagcccttcatgcccaccgccgccgagagagacgagatcctgagagccgtgggcaacatgccctactag

SEQ ID NO: 77242 - DNA, 285 bp, synthetic construct
  misc_feature 1..285: note = Description of Artificial Sequence: Synthetic coding sequence
  source 1..285: mol_type = other DNA
atgctgcccagcaagaagaccgtgagaatgcccagcgtgacccagagactgagagaccccgacatcaacccctgcctgagcgagagcgacgccagcaccagatgcctggacgagaacaactacgacagagagagatgcagcacctacttcctgagatacaagaactgcagaagattctggaacagcatcgtgatgcagagaagaaagaacggcgtgaagcccttcatgcccaccgccgccgagagagacgagatcctgagagccgtgggcaacatgccctactag

SEQ ID NO: 77243 - DNA, 135 bp, synthetic construct
  misc_feature 1..135: note = Description of Artificial Sequence: Synthetic coding sequence
  source 1..135: mol_type = other DNA
atgcccagcgtgacccagagactgagagaccccgacatcaacccctgcctgagcgagagcgacgccagcaccagatgcctggacgagaacaactacgacagagagagatgcagcacctacttcctgagatactag

SEQ ID NO: 77244 - DNA, 294 bp, synthetic construct
  misc_feature 1..294: note = Description of Artificial Sequence: Synthetic coding sequence
  source 1..294: mol_type = other DNA
atgcaccagaccagaaccggcaagaagaccgtgagaatgcccagcgtgacccagagactgagagaccccgacatcaacccctgcctgagcgagagcgacgccagcaccagatgcctggacgagaacaactacgacagagagagatgcagcacctacttcctgagatacaagaactgcagaagattctggaacagcatcgtgatgcagagaagaaagaacggcgtgaagcccttcatgcccaccgccgccgagagagacgagatcctgagagccgtgggcaacatgccctactag

SEQ ID NO: 77245 - DNA, 207 bp, synthetic construct
  misc_feature 1..207: note = Description of Artificial Sequence: Synthetic coding sequence
  source 1..207: mol_type = other DNA
atgcaccagaccagaaccggcaagaagaccgtgagaatgcccagcgtgacccagagactgagagaccccgacatcaacccctgcctgagcatcctgttctacctgctgaacgacgccagcctgatcagcgtgagaaacctgatgctgccccccgacgtgtggatgaagatcaccatgaccggcaagggcgtgcccctgaccagctag

SEQ ID NO: 77246 - DNA, 264 bp, synthetic construct
  misc_feature 1..264: note = Description of Artificial Sequence: Synthetic coding sequence
  source 1..264: mol_type = other DNA
atgagcaccagcgtgccccagggccacacctggacccagagagtgaagaaggacgacgaggaggaggaccccctggaccagctgatcagcagaagcggctgcgccgccagccacttcgccgtgcaggagtgcatggcccagcaccaggactggagacagtgccagccccaggtgcaggccttcaaggactgcatgagcgagcagcaggccagaagacaggaggagctgcagagaagacaggagcaggccggcgcccaccactag

SEQ ID NO: 77247 - DNA, 264 bp, synthetic construct; identical to SEQ ID NO: 77246
  misc_feature 1..264: note = Description of Artificial Sequence: Synthetic coding sequence
  source 1..264: mol_type = other DNA

SEQ ID NO: 77248 - DNA, 291 bp, synthetic construct
  misc_feature 1..291: note = Description of Artificial Sequence: Synthetic coding sequence
  source 1..291: mol_type = other DNA
atgttctacagactgcccatccccagaatgagcaccagcgtgccccagggccacacctggacccagagagtgaagaaggacgacgaggaggaggaccccctggaccagctgatcagcagaagcggctgcgccgccagccacttcgccgtgcaggagtgcatggcccagcaccaggactggagacagtgccagccccaggtgcaggccttcaaggactgcatgagcgagcagcaggccagaagacaggaggagctgcagagaagacaggagcaggccggcgcccaccactag

SEQ ID NO: 77249 - DNA, 264 bp, synthetic construct; identical to SEQ ID NO: 77246
  misc_feature 1..264: note = Description of Artificial Sequence: Synthetic coding sequence
  source 1..264: mol_type = other DNA

SEQ ID NO: 77250 - DNA, 1731 bp, synthetic construct
  misc_feature 1..1731: note = Description of Artificial Sequence: Synthetic coding sequence
  source 1..1731: mol_type = other DNA
atggccgccagcgagaccgtgagactgagactgcagttcgactaccccccccccgccaccccccactgcaccgccttctggctgctggtggacctgaacagatgcagagtggtgaccgacctgatcagcctgatcagacagagattcggcttcagcagcggcgccttcctgggcctgtacctggagggcggcctgctgccccccgccgagagcgccagactggtgagagacaacgactgcctgagagtgaagctggaggagagaggcgtggccgagaacagcgtggtgatcagcaacggcgacatcaacctgagcctgagaaaggccaagaagagagccttccagctggaggagggcgaggagaccgagcccgactgcaagtacagcaagaagcactggaagagcagagagaacaacaacaacaacgagaaggtgctggacctggagcccaaggccgtgaccgaccagaccgtgagcaagaagaacaagagaaagaacaaggccacctgcggcaccgtgggcgacgacaacgaggaggccaagagaaagagccccaagaagaaggagaagtgcgagtacaagaagaaggccaagaaccccaagagccccaaggtgcaggccgtgaaggactgggccaaccagagatgcagcagccccaagggcagcgccagaaacagcctggtgaaggccaagagaaagggcagcgtgagcgtgtgcagcaaggagagccccagcagcagcagcgagagcgagagctgcgacgagagcatcagcgacggccccagcaaggtgaccctggaggccagaaacagcagcgagaagctgcccaccgagctgagcaaggaggagcccagcaccaagaacaccaccgccgacaagctggccatcaagctgggcttcagcctgacccccagcaagggcaagaccagcggcaccaccagcagcagcagcgacagcagcgccgagagcgacgaccagtgcctgatgagcagcagcacccccgagtgcgccgccggcttcctgaagaccgtgggcctgttcgccggcagaggcagacccggccccggcctgagcagccagaccgccggcgccgccggctggagaagaagcggcagcaacggcggcggccaggcccccggcgccagccccagcgtgagcctgcccgccagcctgggcagaggctggggcagagaggagaacctgttcagctggaagggcgccaagggcagaggcatgagaggcagaggcagaggcagaggccaccccgtgagctgcgtggtgaacagaagcaccgacaaccagagacagcagcagctgaacgacgtggtgaagaacagcagcaccatcatccagaaccccgtggagacccccaagaaggactacagcctgctgcccctgctggccgccgccccccaggtgggcgagaagatcgccttcaagctgctggagctgaccagcagctacagccccgacgtgagcgactacaaggagggcagaatcctgagccacaaccccgagacccagcaggtggacatcgagatcctgagcagcctgcccgccctgagagagcccggcaagttcgacctggtgtaccacaacgagaacggcgccgaggtggtggagtacgccgtgacccaggagagcaagatcaccgtgttctggaaggagctgatcgaccccagactgatcatcgagagccccagcaacaccagcagcaccgagcccgcctag

SEQ ID NO: 77251 - DNA, 519 bp, synthetic construct
  misc_feature 1..519: note = Description of Artificial Sequence: Synthetic coding sequence
  source 1..519: mol_type = other DNA
atggccagcgacgagggcaagctgttcgtgggcggcctgagcttcgacaccaacgagcagagcctggagcaggtgttcagcaagtacggccagatcagcgaggtggtggtggtgaaggacagagagacccagagaagcagaggcttcggcttcgtgaccttcgagaacatcgacgacgccaaggacgccatgatggccatgaacggcaagagcgtggacggcagacagatcagagtggaccaggccggcaagagcagcgacaacagaagcagaggctacagaggcggcagcgccggcggcagaggcttcttcagaggcggcagaggcagaggcagaggcttcagcagaggcggcggcgacagaggctacggcggcaacagattcgagagcagaagcggcggctacggcggcagcagagactactacagcagcagaagccagagcggcggctacagcgacagaagcagcggcggcagctacagagacagctacgacagctacgccacccacaacgagtag

SEQ ID NO: 77252 - DNA, 792 bp, synthetic construct
  misc_feature 1..792: note = Description of Artificial Sequence: Synthetic coding sequence
  source 1..792: mol_type = other DNA
atggccagcgacgagggcaagctgttcgtgggcggcctgagcttcgacaccaacgagcagagcctggagcaggtgttcagcaagtacggccagatcagcgaggtggtggtggtgaaggacagagagacccagagaagcagaggcttcggcttcgtgaccttcgagaacatcgacgacgccaaggacgccatgatggccatgaacggcaagagcgtggacggcagacagatcagagtggaccaggccggcggcggcgacagaggctacggcggcaacagattcgagagcagaagcggcggctacggcggcagcagagactactacagcagcagaagccagagcggcggctacagcgacagaagcagcggcggcagctacagagacagctacgacagctacggcaagagccacagcgagggcgccaccctgctgtggcccgccgtgggcgccagattcaccctggtgcccagccccagcaccctgggctggaccctgagaccctgccactgcgcctgccccgaggaggcccacctgagcagccagagccacttctacagaagaacccagaagcccaacgagaccgaccagaagggcaagggcgagagaggccccgccggccagagcgccagatgcatgtgcggcagaagacccgccagcctgggctgcggcggctggctgctgcccggcagaagacccagacccggcctggccagcggcgtgaagctgcccctggtggccagcgtgcccctgcactgcgcctgcttcctgagcagcgccacccacaacgagtag

SEQ ID NO: 77253 - DNA, 735 bp, synthetic construct
  misc_feature 1..735: note = Description of Artificial Sequence: Synthetic coding sequence
  source 1..735: mol_type = other DNA
atgagcagcagatggagcagaagcagccagagcaccgacagaagcctgaagagcgtggacggcagacagatcagagtggaccaggccggcaagagcagcgacaacagaagcagaggctacagaggcggcagcgccggcggcagaggcttcttcagaggcggcagaggcagaggcagaggcttcagcagaggcggcggcgacagaggctacggcggcaacagattcgagagcagaagcggcggctacggcggcagcagagactactacagcagcagaagccagagcggcggctacagcgacagaagcagcggcggcagctacagagacagctacgacagctacggcaagagccacagcgagggcgccaccctgctgtggcccgccgtgggcgccagattcaccctggtgcccagccccagcaccctgggctggaccctgagaccctgccactgcgcctgccccgaggaggcccacctgagcagccagagccacttctacagaagaacccagaagcccaacgagaccgaccagaagggcaagggcgagagaggccccgccggccagagcgccagatgcatgtgcggcagaagacccgccagcctgggctgcggcggctggctgctgcccggcagaagacccagacccggcctggccagcggcgtgaagctgcccctggtggccagcgtgcccctgcactgcgcctgcttcctgagcagcgccacccacaacgagtag

SEQ ID NO: 77254 - DNA, 519 bp, synthetic construct; identical to SEQ ID NO: 77251
  misc_feature 1..519: note = Description of Artificial Sequence: Synthetic coding sequence
  source 1..519: mol_type = other DNA

SEQ ID NO: 77255 - DNA, 2304 bp, synthetic construct
  misc_feature 1..2304: note = Description of Artificial Sequence: Synthetic coding sequence
  source 1..2304: mol_type = other DNA
atgagcttcgaccccaacctgctgcacaacaacggccacaacggctaccccaacggcaccagcgccgccctgagagagaccggcgtgatcgagaagctgctgaccagctacggcttcatccagtgcagcgagagacaggccagactgttcttccactgcagccagtacaacggcaacctgcaggacctgaaggtgggcgacgacgtggagttcgaggtgagcagcgacagaagaaccggcaagcccatcgccgtgaagctggtgaagatcaagcaggagatcctgcccgaggagagaatgaacggccaggaggtgttctacctgacctacacccccgaggacgtggagggcaacgtgcagctggagaccggcgacaagatcaacttcgtgatcgacaacaacaagcacaccggcgccgtgagcgccagaaacatcatgctgctgaagaagaagcaggccagatgccagggcgtggtgtgcgccatgaaggaggccttcggcttcatcgagagaggcgacgtggtgaaggagatcttcttccactacagcgagttcaagggcgacctggagaccctgcagcccggcgacgacgtggagttcaccatcaaggacagaaacggcaaggaggtggccaccgacgtgagactgctgccccagggcaccgtgatcttcgaggacatcagcatcgagcacttcgagggcaccgtgaccaaggtgatccccaaggtgcccagcaagaaccagaacgaccccctgcccggcagaatcaaggtggacttcgtgatccccaaggagctgcccttcggcgacaaggacaccaagagcaaggtgaccctgctggagggcgaccacgtgagattcaacatcagcaccgacagaagagacaagctggagagagccaccaacatcgaggtgctgagcaacaccttccagttcaccaacgaggccagagagatgggcgtgatcgccgccatgagagacggcttcggcttcatcaagtgcgtggacagagacgtgagaatgttcttccacttcagcgagatcctggacggcaaccagctgcacatcgccgacgaggtggagttcaccgtggtgcccgacatgctgagcgcccagagaaaccacgccatcagaatcaagaagctgcccaagggcaccgtgagcttccacagccacagcgaccacagattcctgggcaccgtggagaaggaggccaccttcagcaaccccaagaccaccagccccaacaagggcaaggagaaggaggccgaggacggcatcatcgcctacgacgactgcggcgtgaagctgaccatcgccttccaggccaaggacgtggagggcagcaccagcccccagatcggcgacaaggtggagttcagcatcagcgacaagcagagacccggccagcaggtggccacctgcgtgagactgctgggcagaaacagcaacagcaagagactgctgggctacgtggccaccctgaaggacaacttcggcttcatcgagaccgccaaccacgacaaggagatcttcttccactacagcgagttcagcggcgacgtggacagcctggagctgggcgacatggtggagtacagcctgagcaagggcaagggcaacaaggtgagcgccgagaaggtgaacaagacccacagcgtgaacggcatcaccgaggaggccgaccccaccatctacagcggcaaggtgatcagacccctgagaagcgtggaccccacccagaccgagtaccagggcatgatcgagatcgtggaggagggcgacatgaagggcgaggtgtaccccttcggcatcgtgggcatggccaacaagggcgactgcctgcagaagggcgagagcgtgaagttccagctgtgcgtgctgggccagaacgcccagaccatggcctacaacatcacccccctgagaagagccaccgtggagtgcgtgaaggaccagttcggcttcatcaactacgaggtgggcgacagcaagaagctgttcttccacgtgaaggaggtgcaggacggcatcgagctgcaggccggcgacgaggtggagttcagcgtgatcctgaaccagagaaccggcaagtgcagcgcctgcaacgtgtggagagtgtgcgagggccccaaggccgtggccgcccccagacccgacagactggtgaacagactgaagaacatcaccctggacgacgccagcgcccccagactgatggtgctgagacagcccagaggccccgacaacagcatgggcttcggcgccgagagaaagatcagacaggccggcgtgatcgactag

SEQ ID NO: 77256 - DNA, 2304 bp, synthetic construct; identical to SEQ ID NO: 77255
  misc_feature 1..2304: note = Description of Artificial Sequence: Synthetic coding sequence
  source 1..2304: mol_type = other DNA

SEQ ID NO: 77257 - DNA, 2397 bp, synthetic construct
  misc_feature 1..2397: note = Description of Artificial Sequence: Synthetic coding sequence
  source 1..2397: mol_type = other DNA
atgagcttcgaccccaacctgctgcacaacaacggccacaacggctaccccaacggcaccagcgccgccctgagagagaccggcgtgatcgagaagctgctgaccagctacggcttcatccagtgcagcgagagacaggccagactgttcttccactgcagccagtacaacggcaacctgcaggacctgaaggtgggcgacgacgtggagttcgaggtgagcagcgacagaagaaccggcaagcccatcgccgtgaagctggtgaagatcaagcaggagatcctgcccgaggagagaatgaacggccaggtggtgtgcgccgtgccccacaacctggagagcaagagccccgccgcccccggccagagccccaccggcagcgtgtgctacgagagaaacggcgaggtgttctacctgacctacacccccgaggacgtggagggcaacgtgcagctggagaccggcgacaagatcaacttcgtgatcgacaacaacaagcacaccggcgccgtgagcgccagaaacatcatgctgctgaagaagaagcaggccagatgccagggcgtggtgtgcgccatgaaggaggccttcggcttcatcgagagaggcgacgtggtgaaggagatcttcttccactacagcgagttcaagggcgacctggagaccctgcagcccggcgacgacgtggagttcaccatcaaggacagaaacggcaaggaggtggccaccgacgtgagactgctgccccagggcaccgtgatcttcgaggacatcagcatcgagcacttcgagggcaccgtgaccaaggtgatccccaaggtgcccagcaagaaccagaacgaccccctgcccggcagaatcaaggtggacttcgtgatccccaaggagctgcccttcggcgacaaggacaccaagagcaaggtgaccctgctggagggcgaccacgtgagattcaacatcagcaccgacagaagagacaagctggagagagccaccaacatcgaggtgctgagcaacaccttccagttcaccaacgaggccagagagatgggcgtgatcgccgccatgagagacggcttcggcttcatcaagtgcgtggacagagacgtgagaatgttcttccacttcagcgagatcctggacggcaaccagctgcacatcgccgacgaggtggagttcaccgtggtgcccgacatgctgagcgcccagagaaaccacgccatcagaatcaagaagctgcccaagggcaccgtgagcttccacagccacagcgaccacagattcctgggcaccgtggagaaggaggccaccttcagcaaccccaagaccaccagccccaacaagggcaaggagaaggaggccgaggacggcatcatcgcctacgacgactgcggcgtgaagctgaccatcgccttccaggccaaggacgtggagggcagcaccagcccccagatcggcgacaaggtggagttcagcatcagcgacaagcagagacccggccagcaggtggccacctgcgtgagactgctgggcagaaacagcaacagcaagagactgctgggctacgtggccaccctgaaggacaacttcggcttcatcgagaccgccaaccacgacaaggagatcttcttccactacagcgagttcagcggcgacgtggacagcctggagctgggcgacatggtggagtacagcctgagcaagggcaagggcaacaaggtgagcgccgagaaggtgaacaagacccacagcgtgaacggcatcaccgaggaggccgaccccaccatctacagcggcaaggtgatcagacccctgagaagcgtggaccccacccagaccgagtaccagggcatgatcgagatcgtggaggagggcgacatgaagggcgaggtgtaccccttcggcatcgtgggcatggccaacaagggcgactgcctgcagaagggcgagagcgtgaagttccagctgtgcgtgctgggccagaacgcccagaccatggcctacaacatcacccccctgagaagagccaccgtggagtgcgtgaaggaccagttcggcttcatcaactacgaggtgggcgacagcaagaagctgttcttccacgtgaaggaggtgcaggacggcatcgagctgcaggccggcgacgaggtggagttcagcgtgatcctgaaccagagaaccggcaagtgcagcgcctgcaacgtgtggagagtgtgcgagggccccaaggccgtggccgcccccagacccgacagactggtgaacagactgaagaacatcaccctggacgacgccagcgcccccagactgatggtgctgagacagcccagaggccccgacaacagcatgggcttcggcgccgagagaaagatcagacaggccggcgtgatcgactag

SEQ ID NO: 77258 - DNA, 2442 bp, synthetic construct
  misc_feature 1..2442: note = Description of Artificial Sequence: Synthetic coding sequence
  source 1..2442: mol_type = other DNA
atggagaacgtgttcaccgtgagcagcgacccccaccccagccccgccgccccccccagcctgagcctgcccctgagcagcagcagcaccagcagcggcaccaagaagcagaagagaacccccacctaccagagaagcatgagcttcgaccccaacctgctgcacaacaacggccacaacggctaccccaacggcaccagcgccgccctgagagagaccggcgtgatcgagaagctgctgaccagctacggcttcatccagtgcagcgagagacaggccagactgttcttccactgcagccagtacaacggcaacctgcaggacctgaaggtgggcgacgacgtggagttcgaggtgagcagcgacagaagaaccggcaagcccatcgccgtgaagctggtgaagatcaagcaggagatcctgcccgaggagagaatgaacggccaggaggtgttctacctgacctacacccccgaggacgtggagggcaacgtgcagctggagaccggcgacaagatcaacttcgtgatcgacaacaacaagcacaccggcgccgtgagcgccagaaacatcatgctgctgaagaagaagcaggccagatgccagggcgtggtgtgcgccatgaaggaggccttcggcttcatcgagagaggcgacgtggtgaaggagatcttcttccactacagcgagttcaagggcgacctggagaccctgcagcccggcgacgacgtggagttcaccatcaaggacagaaacggcaaggaggtggccaccgacgtgagactgctgccccagggcaccgtgatcttcgaggacatcagcatcgagcacttcgagggcaccgtgaccaaggtgatccccaaggtgcccagcaagaaccagaacgaccccctgcccggcagaatcaaggtggacttcgtgatccccaaggagctgcccttcggcgacaaggacaccaagagcaaggtgaccctgctggagggcgaccacgtgagattcaacatcagcaccgacagaagagacaagctggagagagccaccaacatcgaggtgctgagcaacaccttccagttcaccaacgaggccagagagatgggcgtgatcgccgccatgagagacggcttcggcttcatcaagtgcgtggacagagacgtgagaatgttcttccacttcagcgagatcctggacggcaaccagctgcacatcgccgacgaggtggagttcaccgtggtgcccgacatgctgagcgcccagagaaaccacgccatcagaatcaagaagctgcccaagggcaccgtgagcttccacagccacagcgaccacagattcctgggcaccgtggagaaggaggccaccttcagcaaccccaagaccaccagccccaacaagggcaaggagaaggaggccgaggacggcatcatcgcctacgacgactgcggcgtgaagctgaccatcgccttccaggccaaggacgtggagggcagcaccagcccccagatcggcgacaaggtggagttcagcatcagcgacaagcagagacccggccagcaggtggccacctgcgtgagactgctgggcagaaacagcaacagcaagagactgctgggctacgtggccaccctgaaggacaacttcggcttcatcgagaccgccaaccacgacaaggagatcttcttccactacagcgagttcagcggcgacgtggacagcctggagctgggcgacatggtggagtacagcctgagcaagggcaagggcaacaaggtgagcgccgagaaggtgaacaagacccacagcgtgaacggcatcaccgaggaggccgaccccaccatctacagcggcaaggtgatcagacccctgagaagcgtggaccccacccagaccgagtaccagggcatgatcgagatcgtggaggagggcgacatgaagggcgaggtgtaccccttcggcatcgtgggcatggccaacaagggcgactgcctgcagaagggcgagagcgtgaagttccagctgtgcgtgctgggccagaacgcccagaccatggcctacaacatcacccccctgagaagagccaccgtggagtgcgtgaaggaccagttcggcttcatcaactacgaggtgggcgacagcaagaagctgttcttccacgtgaaggaggtgcaggacggcatcgagctgcaggccggcgacgaggtggagttcagcgtgatcctgaaccagagaaccggcaagtgcagcgcctgcaacgtgtggagagtgtgcgagggccccaaggccgtggccgcccccagacccgacagactggtgaacagactgaagaacatcaccctggacgacgccagcgcccccagactgatggtgctgagacagcccagaggccccgacaacagcatgggcttcggcgccgagagaaagatcagacaggccggcgtgatcgactag

SEQ ID NO: 77259 - DNA, 2535 bp, synthetic construct
  misc_feature 1..2535: note = Description of Artificial Sequence: Synthetic coding sequence
  source 1..2535: mol_type = other DNA
atggagaacgtgttcaccgtgagcagcgacccccaccccagccccgccgccccccccagcctgagcctgcccctgagcagcagcagcaccagcagcggcaccaagaagcagaagagaacccccacctaccagagaagcatgagcttcgaccccaacctgctgcacaacaacggccacaacggctaccccaacggcaccagcgccgccctgagagagaccggcgtgatcgagaagctgctgaccagctacggcttcatccagtgcagcgagagacaggccagactgttcttccactgcagccagtacaacggcaacctgcaggacctgaaggtgggcgacgacgtggagttcgaggtgagcagcgacagaagaaccggcaagcccatcgccgtgaagctggtgaagatcaagcaggagatcctgcccgaggagagaatgaacggccaggtggtgtgcgccgtgccccacaacctggagagcaagagccccgccgcccccggccagagccccaccggcagcgtgtgctacgagagaaacggcgaggtgttctacctgacctacacccccgaggacgtggagggcaacgtgcagctggagaccggcgacaagatcaacttcgtgatcgacaacaacaagcacaccggcgccgtgagcgccagaaacatcatgctgctgaagaagaagcaggccagatgccagggcgtggtgtgcgccatgaaggaggccttcggcttcatcgagagaggcgacgtggtgaaggagatcttcttccactacagcgagttcaagggcgacctggagaccctgcagcccggcgacgacgtggagttcaccatcaaggacagaaacggcaaggaggtggccaccgacgtgagactgctgccccagggcaccgtgatcttcgaggacatcagcatcgagcacttcgagggcaccgtgaccaaggtgatccccaaggtgcccagcaagaaccagaacgaccccctgcccggcagaatcaaggtggacttcgtgatccccaaggagctgcccttcggcgacaaggacaccaagagcaaggtgaccctgctggagggcgaccacgtgagattcaacatcagcaccgacagaagagacaagctggagagagccaccaacatcgaggtgctgagcaacaccttccagttcaccaacgaggccagagagatgggcgtgatcgccgccatgagagacggcttcggcttcatcaagtgcgtggacagagacgtgagaatgttcttccacttcagcgagatcctggacggcaaccagctgcacatcgccgacgaggtggagttcaccgtggtgcccgacatgctgagcgcccagagaaaccacgccatcagaatcaagaagctgcccaagggcaccgtgagcttccacagccacagcgaccacagattcctgggcaccgtggagaaggaggccaccttcagcaaccccaagaccaccagccccaacaagggcaaggagaaggaggccgaggacggcatcatcgcctacgacgactgcggcgtgaagctgaccatcgccttccaggccaaggacgtggagggcagcaccagcccccagatcggcgacaaggtggagttcagcatcagcgacaagcagagacccggccagcaggtggccacctgcgtgagactgctgggcagaaacagcaacagcaagagactgctgggctacgtggccaccctgaaggacaacttcggcttcatcgagaccgccaaccacgacaaggagatcttcttccactacagcgagttcagcggcgacgtggacagcctggagctgggcgacatggtggagtacagcctgagcaagggcaagggcaacaaggtgagcgccgagaaggtgaacaagacccacagcgtgaacggcatcaccgaggaggccgaccccaccatctacagcggcaaggtgatcagacccctgagaagcgtggaccccacccagaccgagtaccagggcatgatcgagatcgtggaggagggcgacatgaagggcgaggtgtaccccttcggcatcgtgggcatggccaacaagggcgactgcctgcagaagggcgagagcgtgaagttccagctgtgcgtgctgggccagaacgcccagaccatggcctacaacatcacccccctgagaagagccaccgtggagtgcgtgaaggaccagttcggcttcatcaactacgaggtgggcgacagcaagaagctgttcttccacgtgaaggaggtgcaggacggcatcgagctgcaggccggcgacgaggtggagttcagcgtgatcctgaaccagagaaccggcaagtgcagcgcctgcaacgtgtggagagtgtgcgagggccccaaggccgtggccgcccccagacccgacagactggtgaacagactgaagaacatcaccctggacgacgccagcgcccccagactgatggtgctgagacagcccagaggccccgacaacagcatgggcttcggcgccgagagaaagatcagacaggccggcgtgatcgactag

SEQ ID NO: 77260 - DNA, 141 bp, synthetic construct
  misc_feature 1..141: note = Description of Artificial Sequence: Synthetic coding sequence
  source 1..141: mol_type = other DNA
atgagcttcgaccccaacctgctgcacaacaacggccacaacggctaccccaacggcaccagcgccgccctgagagagaccggcgtgatcgagaagctgctgaccagctacggcttcatccagtgcagcgagagacagtag

SEQ ID NO: 77261 - DNA, 24 bp, synthetic construct
  misc_feature 1..24: note = Description of Artificial Sequence: Synthetic coding sequence
  source 1..24: mol_type = other DNA
atgagcttcgaccccaacctgtag

SEQ ID NO: 77262 - DNA, 2007 bp, synthetic construct
  misc_feature 1..2007: note = Description of Artificial Sequence: Synthetic coding sequence
  source 1..2007: mol_type = other DNA
atgaacggccaggaggtgttctacctgacctacacccccgaggacgtggagggcaacgtgcagctggagaccggcgacaagatcaacttcgtgatcgacaacaacaagcacaccggcgccgtgagcgccagaaacatcatgctgctgaagaagaagcaggccagatgccagggcgtggtgtgcgccatgaaggaggccttcggcttcatcgagagaggcgacgtggtgaaggagatcttcttccactacagcgagttcaagggcgacctggagaccctgcagcccggcgacgacgtggagttcaccatcaaggacagaaacggcaaggaggtggccaccgacgtgagactgctgccccagggcaccgtgatcttcgaggacatcagcatcgagcacttcgagggcaccgtgaccaaggtgatccccaaggtgcccagcaagaaccagaacgaccccctgcccggcagaatcaaggtggacttcgtgatccccaaggagctgcccttcggcgacaaggacaccaagagcaaggtgaccctgctggagggcgaccacgtgagattcaacatcagcaccgacagaagagacaagctggagagagccaccaacatcgaggtgctgagcaacaccttccagttcaccaacgaggccagagagatgggcgtgatcgccgccatgagagacggcttcggcttcatcaagtgcgtggacagagacgtgagaatgttcttccacttcagcgagatcctggacggcaaccagctgcacatcgccgacgaggtggagttcaccgtggtgcccgacatgctgagcgcccagagaaaccacgccatcagaatcaagaagctgcccaagggcaccgtgagcttccacagccacagcgaccacagattcctgggcaccgtggagaaggaggccaccttcagcaaccccaagaccaccagccccaacaagggcaaggagaaggaggccgaggacggcatcatcgcctacgacgactgcggcgtgaagctgaccatcgccttccaggccaaggacgtggagggcagcaccagcccccagatcggcgacaaggtggagttcagcatcagcgacaagcagagacccggccagcaggtggccacctgcgtgagactgctgggcagaaacagcaacagcaagagactgctgggctacgtggccaccctgaaggacaacttcggcttcatcgagaccgccaaccacgacaaggagatcttcttccactacagcgagttcagcggcgacgtggacagcctggagctgggcgacatggtggagtacagcctgagcaagggcaagggcaacaaggtgagcgccgagaaggtgaacaagacccacagcgtgaacggcatcaccgaggaggccgaccccaccatctacagcggcaaggtgatcagacccctgagaagcgtggaccccacccagaccgagtaccagggcatgatcgagatcgtggaggagggcgacatgaagggcgaggtgtaccccttcggcatcgtgggcatggccaacaagggcgactgcctgcagaagggcgagagcgtgaagttccagctgtgcgtgctgggccagaacgcccagaccatggcctacaacatcacccccctgagaagagccaccgtggagtgcgtgaaggaccagttcggcttcatcaactacgaggtgggcgacagcaagaagctgttcttccacgtgaaggaggtgcaggacggcatcgagctgcaggccggcgacgaggtggagttcagcgtgatcctgaaccagagaaccggcaagtgcagcgcctgcaacgtgtggagagtgtgcgagggccccaaggccgtggccgcccccagacccgacagactggtgaacagactgaagaacatcaccctggacgacgccagcgcccccagactgatggtgctgagacagcccagaggccccgacaacagcatgggcttcggcgccgagagaaagatcagacaggccggcgtgatcgactag

SEQ ID NO: 77263 - DNA, 288 bp, synthetic construct
  misc_feature 1..288: note = Description of Artificial Sequence: Synthetic coding sequence
  source 1..288: mol_type = other DNA
atgagcttcgaccccaacctgctgcacaacaacggccacaacggctaccccaacggcaccagcgccgccctgagagagaccggcgtgatcgagaagctgctgaccagctacggcttcatccagtgcagcgagagacaggccagactgttcttccactgcagccagtacaacggcaacctgcaggacctgaaggtgggcgacgacgtggagttcgaggtgagcagcgacagaagaaccggcaagcccatcgccgtgaagctggtgaagatcaagcaggagatcctgtag

SEQ ID NO: 77264 - DNA, 2397 bp, synthetic construct; identical to SEQ ID NO: 77257
  misc_feature 1..2397: note = Description of Artificial Sequence: Synthetic coding sequence
  source 1..2397: mol_type = other DNA

SEQ ID NO: 77265 - DNA, 1329 bp, synthetic construct
  misc_feature 1..1329: note = Description of Artificial Sequence: Synthetic coding sequence
  source 1..1329: mol_type = other DNA
atggaggccagcagatgcagactgagccccagcggcgacagcgtgttccacgaggagatgatgaagatgagacaggccaagctggactaccagagactgctgctggagaagagacagagaaagaagagactggagcccttcatggtgcagcccaaccccgaggccagactgagaagagccaagcccagagccagcgacgagcagacccccctggtgaactgccacaccccccacagcaacgtgatcctgcacggcatcgacggccccgccgccgtgctgaagcccgacgaggtgcacgcccccagcgtgagcagcagcgtggtggaggaggacgccgagaacaccgtggacaccgccagcaagcccggcctgcaggagagactgcagaagcacgacatcagcgagagcgtgaacttcgacgaggagaccgacggcatcagccagagcgcctgcctggagagacccaacagcgccagcagccagaacagcaccgacaccggcaccagcggcagcgccaccgccgcccagcccgccgacaacctgctgggcgacatcgacgacctggaggacttcgtgtacagccccgccccccagggcgtgaccgtgagatgcagaatcatcagagacaagagaggcatggacagaggcctgttccccacctactacatgtacctggagaaggaggagaaccagaagatcttcctgctggccgccagaaagagaaagaagagcaagaccgccaactacctgatcagcatcgaccccgtggacctgagcagagagggcgagagctacgtgggcaagctgagaagcaacctgatgggcaccaagttcaccgtgtacgacagaggcatctgccccatgaagggcagaggcctggtgggcgccgcccacaccagacaggagctggccgccatcagctacgagaccaacgtgctgggcttcaagggccccagaaagatgagcgtgatcatccccggcatgaccctgaaccacaagcagatcccctaccagccccagaacaaccacgacagcctgctgagcagatggcagaacagaaccatggagaacctggtggagctgcacaacaaggcccccgtgtggaacagcgacacccagagctacgtgctgaacttcagaggcagagtgacccaggccagcgtgaagaacttccagatcgtgcacaagaacgaccccgactacatcgtgatgcagttcggcagagtggccgacgacgtgttcaccctggactacaactaccccctgtgcgccgtgcaggccttcggcatcggcctgagcagcttcgacagcaagctggcctgcgagtag

SEQ ID NO: 77266 - DNA, 912 bp, synthetic construct
  misc_feature 1..912: note = Description of Artificial Sequence: Synthetic coding sequence
  source 1..912: mol_type = other DNA
atgagcgaggccggcgaggccaccaccaccaccaccaccaccctgccccaggcccccaccgaggccgccgccgccgccccccaggaccccgcccccaagagccccgtgggcagcggcgccccccaggccgccgcccccgcccccgccgcccacgtggccggcaaccccggcggcgacgccgcccccgccgccaccggcaccgccgccgccgccagcctggccaccgccgccggcagcgaggacgccgagaagaaggtgctggccaccaaggtgctgggcaccgtgaagtggttcaacgtgagaaacggctacggcttcatcaacagaaacgacaccaaggaggacgtgttcgtgcaccagaccgccatcaagaagaacaaccccagaaagtacctgagaagcgtgggcgacggcgagaccgtggagttcgacgtggtggagggcgagaagggcgccgaggccgccaacgtgaccggccccgacggcgtgcccgtggagggcagcagatacgccgccgacagaagaagatacagaagaggctactacggcagaagaagaggcccccccagaaacgccggcgagatcggcgagatgaaggacggcgtgcccgagggcgcccagctgcagggccccgtgcacagaaaccccacctacagacccagatacagaagcagaggcccccccagacccagacccgcccccgccgtgggcgaggccgaggacaaggagaaccagcaggccaccagcggccccaaccagcccagcgtgagaagaggctacagaagaccctacaactacagaagaagacccagaccccccaacgcccccagccaggacggcaaggaggccaaggccggcgaggcccccaccgagaaccccgccccccccacccagcagagcagcgccgagtag

SEQ ID NO: 77267 - DNA, 339 bp, synthetic construct
  misc_feature 1..339: note = Description of Artificial Sequence: Synthetic coding sequence
  source 1..339: mol_type = other DNA
atggagaagatcctgatcctgctgctggtggccctgagcgtggcctacgccgcccccggccccagaggcatcatcatcaacctggagaacggcgagctgtgcatgaacagcgcccagtgcaagagcaactgctgccagcacagcagcgccctgggcctggccagatgcaccagcatggccagcgagaacagcgagtgcagcgtgaagaccctgtacggcatctactacaagtgcccctgcgagagaggcctgacctgcgagggcgacaagaccatcgtgggcagcatcaccaacaccaacttcggcatctgccacgacgccggcagaagcaagcagtag

SEQ ID NO: 77268 - DNA, 216 bp, synthetic construct
  misc_feature 1..216: note = Description of Artificial Sequence: Synthetic coding sequence
  source 1..216: mol_type = other DNA
atggagaagatcctgatcctgctgctggtggccctgagcgtggcctacgccgcccccggccccagaggcatcatcatcaacctgaccctgtacggcatctactacaagtgcccctgcgagagaggcctgacctgcgagggcgacaagaccatcgtgggcagcatcaccaacaccaacttcggcatctgccacgacgccggcagaagcaagcagtag

SEQ ID NO: 77269 - DNA, 408 bp, synthetic construct
  misc_feature 1..408: note = Description of Artificial Sequence: Synthetic coding sequence
  source 1..408: mol_type = other DNA
atgcagctgacctgggccagcatcagcctggtgaccagatgctggccccagacccccaccttccaggacctgctggcctgcctgggcgccagagccctgcccggcccccccggcgcccccggcagagacggcagcaagggcgagagaggcgcccccggccccagaggcagccccggcccccccggcagcttcgacttcctgctgctgatgctggccgacatcagaaacgacatcaccgagctgcaggagaaggtgttcggccacagaacccacagcagcgccgaggagttccccctgccccaggagttccccagctaccccgaggccatggacctgggcagcggcgacgaccaccccagaagaaccgagaccagagacctgagagcccccagagacttctacccctag

SEQ ID NO: 77270 - DNA, 1221 bp, synthetic construct
  misc_feature 1..1221: note = Description of Artificial Sequence: Synthetic coding sequence
  source 1..1221: mol_type = other DNA
atggtgccccccccccccagcagaggcggcgccgccagaggccagctgggcagaagcctgggccccctgctgctgctgctggccctgggccacacctggacctacagagaggagcccgaggacggcgacagagagatctgcagcgagagcaagatcgccaccaccaagtacccctgcctgaagagcagcggcgagctgaccacctgctacagaaagaagtgctgcaagggctacaagttcgtgctgggccagtgcatccccgaggactacgacgtgtgcgccgaggccccctgcgagcagcagtgcaccgacaacttcggcagagtgctgtgcacctgctaccccggctacagatacgacagagagagacacagaaagagagagaagccctactgcctggacatcgacgagtgcgccagcagcaacggcaccctgtgcgcccacatctgcatcaacaccctgggcagctacagatgcgagtgcagagagggctacatcagagaggacgacggcaagacctgcaccagaggcgacaagtaccccaacgacaccggccacgagaagagcgagaacatggtgaaggccggcacctgctgcgccacctgcaaggagttctaccagatgaagcagaccgtgctgcagctgaagcagaagatcgccctgctgcccaacaacgccgccgacctgggcaagtacatcaccggcgacaaggtgctggccagcaacacctacctgcccggcccccccggcctgcccggcggccagggcccccccggcagccccggccccaagggcagccccggcttccccggcatgcccggcccccccggccagcccggccccagaggcagcatgggccccatgggccccagccccgacctgagccacatcaagcagggcagaagaggccccgtgggcccccccggcgcccccggcagagacggcagcaagggcgagagaggcgcccccggccccagaggcagccccggcccccccggcagcttcgacttcctgctgctgatgctggccgacatcagaaacgacatcaccgagctgcaggagaaggtgttcggccacagaacccacagcagcgccgaggagttccccctgccccaggagttccccagctaccccgaggccatggacctgggcagcggcgacgaccaccccagaagaaccgagaccagagacctgagagcccccagagacttctacccctag

SEQ ID NO: 77271 - DNA, 699 bp, synthetic construct
  misc_feature 1..699: note = Description of Artificial Sequence: Synthetic coding sequence
  source 1..699: mol_type = other DNA
atgtggccccccggcagaagcatcaccgtgaagctgagagagaagaccgtgagcagaaagctggagatgaacggccccagcgccttccagggcctgatctgcggcaagtacaacggcatgtgcctgcagggccccgccggcgtgcccggcagagacggcagccccggcgccaacggcatccccggcacccccggcatccccggcagagacggcttcaagggcgagaagggcgagtgcctgagagagagcttcgaggagagctggacccccaactacaagcagtgcagctggagcagcctgaactacggcatcgacctgggcaagatcgccgagtgcaccttcaccaagatgagaagcaacagcgccctgagagtgctgttcagcggcagcctgagactgaagtgcagaaacgcctgctgccagagatggtacttcaccttcaacggcgccgagtgcagcggccccctgcccatcgaggccatcatctacctggaccagggcagccccgagatgaacagcaccatcaacatccacagaaccagcagcgtggagggcctgtgcgagggcatcggcgccggcctggtggacgtggccatctgggtgggcacctgcagcgactaccccaagggcgacgccagcaccggctggaacagcgtgagcagaatcatcatcgaggagctgcccaactacctgttctag

SEQ ID NO: 77272 - DNA, 732 bp, synthetic construct
  misc_feature 1..732: note = Description of Artificial Sequence: Synthetic coding sequence
  source 1..732: mol_type = other DNA
atgagaccccagggccccgccgccagcccccagagactgagaggcctgctgctgctgctgctgctgcagctgcccgcccccagcagcgccagcgagatccccaagggcaagcagaaggcccagctgagacagagagaggtggtggacctgtacaacggcatgtgcctgcagggccccgccggcgtgcccggcagagacggcagccccggcgccaacggcatccccggcacccccggcatccccggcagagacggcttcaagggcgagaagggcgagtgcctgagagagagcttcgaggagagctggacccccaactacaagcagtgcagctggagcagcctgaactacggcatcgacctgggcaagatcgccgagtgcaccttcaccaagatgagaagcaacagcgccctgagagtgctgttcagcggcagcctgagactgaagtgcagaaacgcctgctgccagagatggtacttcaccttcaacggcgccgagtgcagcggccccctgcccatcgaggccatcatctacctggaccagggcagccccgagatgaacagcaccatcaacatccacagaaccagcagcgtggagggcctgtgcgagggcatcggcgccggcctggtggacgtggccatctgggtgggcacctgcagcgactaccccaagggcgacgccagcaccggctggaacagcgtgagcagaatcatcatcgaggagctgcccaagtag

SEQ ID NO: 77273 - DNA, 690 bp, synthetic construct
  misc_feature 1..690: note = Description of Artificial Sequence: Synthetic coding sequence
  source 1..690: mol_type = other DNA
atgtggccccccggcagaagcatcaccgtgaagctgagagagaagaccgtgagcagaaagctggagatgaacggccccagcgccttccagggcctgatctgcggcaagtacaacggcatgtgcctgcagggccccgccggcgtgcccggcagagacggcagccccggcgccaacggcatccccggcacccccggcatccccggcagagacggcttcaagggcgagaagggcgagtgcctgagagagagcttcgaggagagctggacccccaactacaagcagtgcagctggagcagcctgaactacggcatcgacctgggcaagatcgccgagtgcaccttcaccaagatgagaagcaacagcgccctgagagtgctgttcagcggcagcctgagactgaagtgcagaaacgcctgctgccagagatggtacttcaccttcaacggcgccgagtgcagcggccccctgcccatcgaggccatcatctacctggaccagggcagccccgagatgaacagcaccatcaacatccacagaaccagcagcgtggagggcctgtgcgagggcatcggcgccggcctggtggacgtggccatctgggtgggcacctgcagcgactaccccaagggcgacgccagcaccggctggaacagcgtgagcagaatcatcatcgaggagctgcccaagtag

SEQ ID NO: 77274 - DNA, 5037 bp, synthetic construct
  misc_feature 1..5037: note = Description of Artificial Sequence: Synthetic coding sequence
  source 1..5037: mol_type = other DNA
atgcaccccggcctgtggctgctgctggtgaccctgtgcctgaccgaggagctggccgccgccggcgagaagagctacggcaagccctgcggcggccaggactgcagcggcagctgccagtgcttccccgagaagggcgccagaggcagacccggccccatcggcatccagggccccaccggcccccagggcttcaccggcagcaccggcctgagcggcctgaagggcgagagaggcttccccggcctgctgggcccctacggccccaagggcgacaagggccccatgggcgtgcccggcttcctgggcatcaacggcatccccggccaccccggccagcccggccccagaggcccccccggcctggacggctgcaacggcacccagggcgccgtgggcttccccggccccgacggctaccccggcctgctgggcccccccggcctgcccggccagaagggcagcaagggcgaccccgtgctggcccccggcagcttcaagggcatgaagggcgaccccggcctgcccggcctggacggcatcaccggcccccagggcgcccccggcttccccggcgccgtgggccccgccggcccccccggcctgcagggcccccccggcccccccggccccctgggccccgacggcaacatgggcctgggcttccagggcgagaagggcgtgaagggcgacgtgggcctgcccggccccgccggccccccccccagcaccggcgagctggagttcatgggcttccccaagggcaagaagggcagcaagggcgagcccggccccaagggcttccccggcatcagcggcccccccggcttccccggcctgggcaccaccggcgagaagggcgagaagggcgagaagggcatccccggcctgcccggccccagaggccccatgggcagcgagggcgtgcagggcccccccggccagcagggcaagaagggcaccctgggcttccccggcctgaacggcttccagggcatcgagggccagaagggcgacatcggcctgcccggccccgacgtgttcatcgacatcgacggcgccgtgatcagcggcaaccccggcgaccccggcgtgcccggcctgcccggcctgaagggcgacgagggcatccagggcctgagaggccccagcggcgtgcccggcctgcccgccctgagcggcgtgcccggcgccctgggcccccagggcttccccggcctgaagggcgaccagggcaaccccggcagaaccaccatcggcgccgccggcctgcccggcagagacggcctgcccggcccccccggcccccccggcccccccagccccgagttcgagaccgagaccctgcacaacaaggagagcggcttccccggcctgagaggcgagcagggccccaagggcaacctgggcctgaagggcatcaagggcgacagcggcttctgcgcctgcgacggcggcgtgcccaacaccggcccccccggcgagcccggcccccccggcccctggggcctgatcggcctgcccggcctgaagggcgccagaggcgacagaggcagcggcggcgcccagggccccgccggcgcccccggcctggtgggccccctgggccccagcggccccaagggcaagaagggcgagcccatcctgagcaccatccagggcatgcccggcgacagaggcgacagcggcagccagggcttcagaggcgtgatcggcgagcccggcaaggacggcgtgcccggcctgcccggcctgcccggcctgcccggcgacggcggccagggcttccccggcgagaagggcctgcccggcctgcccggcgagaagggccaccccggcccccccggcctgcccggcaacggcctgcccggcctgcccggccccagaggcctgcccggcgacaagggcaaggacggcctgcccggccagcagggcctgcccggcagcaagggcatcaccctgccctgcatcatccccggcagctacggccccagcggcttccccggcacccccggcttccccggccccaagggcagcagaggcctgcccggcacccccggccagcccggcagcagcggcagcaagggcgagcccggcagccccggcctggtgcacctgcccgagctgcccggcttccccggccccagaggcgagaagggcctgcccggcttccccggcctgcccggcaaggacggcctgcccggcatgatcggcagccccggcctgcccggcagcaagggcgccaccggcgacatcttcggcgccgagaacggcgcccccggcgagcagggcctgcagggcctgaccggccacaagggcttcctgggcgacagcggcctgcccggcctgaagggcgtgcacggcaagcccggcctgctgggccccaagggcgagagaggcagccccggcacccccggccaggtgggccagcccggcacccccggcagcagcggcccctacggcatcaagggcaagagcggcctgcccggcgcccccggcttccccggcatcagcggccaccccggcaagaagggcaccagaggcaagaagggcccccccggcagcatcgtgaagaagggcctgcccggcctgaagggcctgcccggcaaccccggcctggtgggcctgaagggcagccccggcagccccggcgtggccggcctgcccgccctgagcggccccaagggcgagaagggcagcgtgggcttcgtgggcttccccggcatccccggcctgcccggcatccccggcaccagaggcctgaagggcatccccggcagcaccggcaagatgggccccagcggcagagccggcacccccggcgagaagggcgacagaggcaaccccggccccgtgggcatccccagccccagaagacccatgagcaacctgtggctgaagggcgacaagggcagccagggcagcgccggcagcaacggcttccccggccccagaggcgacaagggcgaggccggcagacccggcccccccggcctgcccggcgcccccggcctgcccggcatcatcaagggcgtgagcggcaagcccggcccccccggcttcatgggcatcagaggcctgcccggcctgaagggcagcagcggcatcaccggcttccccggcatgcccggcgagagcggcagccagggcatcagaggcagccccggcctgcccggcgccagcggcctgcccggcctgaagggcgacaacggccagaccgtggagatcagcggcagccccggccccaagggccagcccggcgagagcggcttcaagggcaccaagggcagagacggcctgatcggcaacatcggcttccccggcaacaagggcgaggacggcaaggtgggcgtgagcggcgacgtgggcctgcccggcgcccccggcttccccggcgtggccggcatgagaggcgagcccggcctgcccggcagcagcggccaccagggcgccatcggccccctgggcagccccggcctgatcggccccaagggcttccccggcttccccggcctgcacggcctgaacggcctgcccggcaccaagggcacccacggcacccccggccccagcatcaccggcgtgcccggccccgccggcctgcccggccccaagggcgagaagggctaccccggcatcggcatcggcgcccccggcaagcccggcctgagaggccagaagggcgacagaggcttccccggcctgcagggccccgccggcctgcccggcgcccccggcatcagcctgcccagcctgatcgccggccagcccggcgaccccggcagacccggcctggacggcgagagaggcagacccggccccgccggcccccccggcccccccggccccagcagcaaccagggcgacaccggcgaccccggcttccccggcatccccggcttcagcggcctgcccggcgagctgggcctgaagggcatgagaggcgagcccggcttcatgggcacccccggcaaggtgggcccccccggcgaccccggcttccccggcatgaagggcaaggccggccccagaggcagcagcggcctgcagggcgaccccggccagacccccaccgccgaggccgtgcaggtgccccccggccccctgggcctgcccggcatcgacggcatccccggcctgaccggcgaccccggcgcccagggccccgtgggcctgcagggcagcaagggcctgcccggcatccccggcaaggacggccccagcggcctgcccggcccccccggcgccctgggcgaccccggcctgcccggcctgcagggcccccccggcttcgagggcgcccccggccagcagggccccttcggcatgcccggcatgcccggccagagcatgagagtgggctacaccctggtgaagcacagccagagcgagcaggtgcccccctgccccatcggcatgagccagctgtgggtgggctacagcctgctgttcgtggagggccaggagaaggcccacaaccaggacctgggcttcgccggcagctgcctgcccagattcagcaccatgcccttcatctactgcaacatcaacgaggtgtgccactacgccagaagaaacgacaagagctactggctgagcaccaccgcccccatccccatgatgcccgtgagccagacccagatcccccagtacatcagcagatgcagcgtgtgcgaggcccccagccaggccatcgccgtgcacagccaggacatcaccatcccccagtgccccctgggctggagaagcctgtggatcggctacagcttcctgatgcacaccgccgccggcgccgagggcggcggccagagcctggtgagccccggcagctgcctggaggacttcagagccacccccttcatcgagtgcagcggcgccagaggcacctgccactacttcgccaacaagtacagcttctggctgaccaccgtggaggagagacagcagttcggcgagctgcccgtgagcgagaccctgaaggccggccagctgcacaccagagtgagcagatgccaggtgtgcatgaagagcctgtag

SEQ ID NO: 77275 - DNA, 3087 bp, synthetic construct
  misc_feature 1..3087: note = Description of Artificial Sequence: Synthetic coding sequence
  source 1..3087: mol_type = other DNA
atgagagccgccagagccctgctgcccctgctgctgcaggcctgctggaccgccgcccaggacgagcccgagacccccagagccgtggccttccaggactgccccgtggacctgttcttcgtgctggacaccagcgagagcgtggccctgagactgaagccctacggcgccctggtggacaaggtgaagagcttcaccaagagattcatcgacaacctgagagacagatactacagatgcgacagaaacctggtgtggaacgccggcgccctgcactacagcgacgaggtggagatcatccagggcctgaccagaatgcccggcggcagagacgccctgaagagcagcgtggacgccgtgaagtacttcggcaagggcacctacaccgactgcgccatcaagaagggcctggagcagctgctggtgggcggcagccacctgaaggagaacaagtacctgatcgtggtgaccgacggccaccccctggagggctacaaggagccctgcggcggcctggaggacgccgtgaacgaggccaagcacctgggcgtgaaggtgttcagcgtggccatcacccccgaccacctggagcccagactgagcatcatcgccaccgaccacacctacagaagaaacttcaccgccgccgactggggccagagcagagacgccgaggaggccatcagccagaccatcgacaccatcgtggacatgatcaagaacaacgtggagcaggtgtgctgcagcttcgagtgccagcccgccagaggcccccccggcctgagaggcgaccccggcttcgagggcgagagaggcaagcccggcctgcccggcgagaagggcgaggccggcgaccccggcagacccggcgacctgggccccgtgggctaccagggcatgaagggcgagaagggcagcagaggcgagaagggcagcagaggccccaagggctacaagggcgagaagggcaagagaggcatcgacggcgtggacggcgtgaagggcgagatgggctaccccggcctgcccggctgcaagggcagccccggcttcgacggcatccagggcccccccggccccaagggcgaccccggcgccttcggcctgaagggcgagaagggcgagcccggcgccgacggcgaggccggcagacccggcagcagcggccccagcggcgacgagggccagcccggcgagcccggcccccccggcgagaagggcgaggccggcgacgagggcaaccccggccccgacggcgcccccggcgagagaggcggccccggcgagagaggccccagaggcacccccggcaccagaggccccagaggcgaccccggcgaggccggcccccagggcgaccagggcagagagggccccgtgggcgtgcccggcgaccccggcgaggccggccccatcggccccaagggctacagaggcgacgagggcccccccggcagcgagggcgccagaggcgcccccggccccgccggcccccccggcgaccccggcctgatgggcgagagaggcgaggacggccccgccggcaacggcaccgagggcttccccggcttccccggctaccccggcaacagaggcgcccccggcatcaacggcaccaagggctaccccggcctgaagggcgacgagggcgaggccggcgaccccggcgacgacaacaacgacatcgcccccagaggcgtgaagggcgccaagggctacagaggccccgagggcccccagggcccccccggccaccagggcccccccggccccgacgagtgcgagatcctggacatcatcatgaagatgtgcagctgctgcgagtgcaagtgcggccccatcgacctgctgttcgtgctggacagcagcgagagcatcggcctgcagaacttcgagatcgccaaggacttcgtggtgaaggtgatcgacagactgagcagagacgagctggtgaagttcgagcccggccagagctacgccggcgtggtgcagtacagccacagccagatgcaggagcacgtgagcctgagaagccccagcatcagaaacgtgcaggagctgaaggaggccatcaagagcctgcagtggatggccggcggcaccttcaccggcgaggccctgcagtacaccagagaccagctgctgccccccagccccaacaacagaatcgccctggtgatcaccgacggcagaagcgacacccagagagacaccacccccctgaacgtgctgtgcagccccggcatccaggtggtgagcgtgggcatcaaggacgtgttcgacttcatccccggcagcgaccagctgaacgtgatcagctgccagggcctggcccccagccagggcagacccggcctgagcctggtgaaggagaactacgccgagctgctggaggacgccttcctgaagaacgtgaccgcccagatctgcatcgacaagaagtgccccgactacacctgccccatcaccttcagcagccccgccgacatcaccatcctgctggacggcagcgccagcgtgggcagccacaacttcgacaccaccaagagattcgccaagagactggccgagagattcctgaccgccggcagaaccgaccccgcccacgacgtgagagtggccgtggtgcagtacagcggcaccggccagcagagacccgagagagccagcctgcagttcctgcagaactacaccgccctggccagcgccgtggacgccatggacttcatcaacgacgccaccgacgtgaacgacgccctgggctacgtgaccagattctacagagaggccagcagcggcgccgccaagaagagactgctgctgttcagcgacggcaacagccagggcgccacccccgccgccatcgagaaggccgtgcaggaggcccagagagccggcatcgagatcttcgtggtggtggtgggcagacaggtgaacgagccccacatcagagtgctggtgaccggcaagaccgccgagtacgacgtggcctacggcgagagccacctgttcagagtgcccagctaccaggccctgctgagaggcgtgttccaccagaccgtgagcagaaaggtggccctgggctag

SEQ ID NO: 77276 - DNA, 1770 bp, synthetic construct
  misc_feature 1..1770: note = Description of Artificial Sequence: Synthetic coding sequence
  source 1..1770: mol_type = other DNA
atgagagccgccagagccctgctgcccctgctgctgcaggcctgctggaccgccgcccaggacgagcccgagacccccagagccgtggccttccaggactgccccgtggacctgttcttcgtgctggacaccagcgagagcgtggccctgagactgaagccctacggcgccctggtggacaaggtgaagagcttcaccaagagattcatcgacaacctgagagacagatactacagatgcgacagaaacctggtgtggaacgccggcgccctgcactacagcgacgaggtggagatcatccagggcctgaccagaatgcccggcggcagagacgccctgaagagcagcgtggacgccgtgaagtacttcggcaagggcacctacaccgactgcgccatcaagaagggcctggagcagctgctggtgggcggcagccacctgaaggagaacaagtacctgatcgtggtgaccgacggccaccccctggagggctacaaggagccctgcggcggcctggaggacgccgtgaacgaggccaagcacctgggcgtgaaggtgttcagcgtggccatcacccccgaccacctggagcccagactgagcatcatcgccaccgaccacacctacagaagaaacttcaccgccgccgactggggccagagcagagacgccgaggaggccatcagccagaccatcgacaccatcgtggacatgatcaagaacaacgtggagcaggtgtgctgcagcttcgagtgccagcccgccagaggcccccccggcctgagaggcgaccccggcttcgagggcgagagaggcaagcccggcctgcccggcgagaagggcgaggccggcgaccccggcagacccggcgacctgggccccgtgggctaccagggcatgaagggcgagaagggcagcagaggcgagaagggcagcagaggccccaagggctacaagggcgagaagggcaagagaggcatcgacggcgtggacggcgtgaagggcgagatgggctaccccggcctgcccggctgcaagggcagccccggcttcgacggcatccagggcccccccggccccaagggcgaccccggcgccttcggcctgaagggcgagaagggcgagcccggcgccgacggcgaggccggcagacccggcagcagcggccccagcggcgacgagggccagcccggcgagcccggcccccccggcgagaagggcgaggccggcgacgagggcaaccccggccccgacggcgcccccggcgagagaggcggccccggcgagagaggccccagaggcacccccggcaccagaggccccagaggcgaccccggcgaggccggcccccagggcgaccagggcagagagggccccgtgggcgtgcccggcgaccccggcgaggccggccccatcggccccaagggctacagaggcgacgagggcccccccggcagcgagggcgccagaggcgcccccggccccgccggcccccccggcgaccccggcctgatgggcgagagaggcgaggacggccccgccggcaacggcaccgagggcttccccggcttccccggctaccccggcaacagaggcgcccccggcatcaacggcaccaagggctaccccggcctgaagggcgacgagggcgaggccggcgaccccggcgacgacaacaacgacatcgcccccagactgctgagagtgctgctggtgaccggcctggacctgggccccaccgccctggaggccgccgccgaccagcactag

SEQ ID NO: 77277 - DNA, 324 bp, synthetic construct
  misc_feature 1..324: note = Description of Artificial Sequence: Synthetic coding sequence
  source 1..324: mol_type = other DNA
atgagagccgccagagccctgctgcccctgctgctgcaggcctgctggaccgccgcccaggacgagcccgagacccccagagccgtggccttccaggactgccccgtggacctgttcttcgtgctggacaccagcgagagcgtggccctgagactgaagccctacggcgccctggtggacaaggtgaagagcttcaccaagagattcatcgacaacctgagagacagatactacagatgcgacagaaacctggtgtggaacgccggcgccctgcactacagcgacgaggtggagatcatccagggcctgaccagaatgccctag

SEQ ID NO: 77278 - DNA, 3060 bp, synthetic construct
  misc_feature 1..3060: note = Description of Artificial Sequence: Synthetic coding sequence
  source 1..3060: mol_type = other DNA
atgctgcagggcacctgcagcgtgctgctgctgtggggcatcctgggcgccatccaggcccagcagcaggaggtgatcagccccgacaccaccgagagaaacaacaactgccccgagaagaccgactgccccatccacgtgtacttcgtgctggacaccagcgagagcgtgaccatgcagagccccaccgacatcctgctgttccacatgaagcagttcgtgccccagttcatcagccagctgcagaacgagttctacctggaccaggtggccctgagctggagatacggcggcctgcacttcagcgaccaggtggaggtgttcagcccccccggcagcgacagagccagcttcatcaagaacctgcagggcatcagcagcttcagaagaggcaccttcaccgactgcgccctggccaacatgaccgagcagatcagacaggacagaagcaagggcaccgtgcacttcgccgtggtgatcaccgacggccacgtgaccggcagcccctgcggcggcatcaagctgcaggccgagagagccagagaggagggcatcagactgttcgccgtggcccccaaccagaacctgaaggagcagggcctgagagacatcgccagcaccccccacgagctgtacagaaacgactacgccaccatgctgcccgacagcaccgagatcgaccaggacaccatcaacagaatcatcaaggtgatgaagcacgaggcctacggcgagtgctacaaggtgagctgcctggagatccccggccccagcggccccaagggctacagaggccagaagggcgccaagggcaacatgggcgagcccggcgagcccggccagaagggcagacagggcgaccccggcatcgagggccccatcggcttccccggccccaagggcgtgcccggcttcaagggcgagaagggcgagttcggcgccgacggcagaaagggcgcccccggcctggccggcaagaacggcaccgacggccagaagggcaagctgggcagaatcggcccccccggctgcaagggcgaccccggcaacagaggccccgacggctaccccggcgaggccggcagccccggcgagagaggcgaccagggcggcaagggcgaccccggcagacccggcagaagaggcccccccggcgagatcggcgccaagggcagcaagggctaccagggcaacagcggcgcccccggcagccccggcgtgaagggcgccaagggcggccccggccccagaggccccaagggcgagcccggcagaagaggcgaccccggcaccaagggcagccccggcagcgacggccccaagggcgagaagggcgaccccggccccgagggccccagaggcctggccggcgaggtgggcaacaagggcgccaagggcgacagaggcctgcccggccccagaggcccccagggcgccctgggcgagcccggcaagcagggcagcagaggcgaccccggcgacgccggccccagaggcgacagcggccagcccggccccaagggcgaccccggcagacccggcttcagctaccccggccccagaggcgcccccggcgagaagggcgagcccggccccagaggccccgagggcggcagaggcgacttcggcctgaagggcgagcccggcagaaagggcgagaagggcgagcccgccgaccccggcccccccggcgagcccggccccagaggccccagaggcgtgcccggccccgagggcgagcccggcccccccggcgaccccggcctgaccgagtgcgacgtgatgacctacgtgagagagacctgcggctgctgcgactgcgagaagagatgcggcgccctggacgtggtgttcgtgatcgacagcagcgagagcatcggctacaccaacttcaccctggagaagaacttcgtgatcaacgtggtgaacagactgggcgccatcgccaaggaccccaagagcgagaccggcaccagagtgggcgtggtgcagtacagccacgagggcaccttcgaggccatccagctggacgacgagagaatcgacagcctgagcagcttcaaggaggccgtgaagaacctggagtggatcgccggcggcacctggacccccagcgccctgaagttcgcctacgacagactgatcaaggagagcagaagacagaagaccagagtgttcgccgtggtgatcaccgacggcagacacgaccccagagacgacgacctgaacctgagagccctgtgcgacagagacgtgaccgtgaccgccatcggcatcggcgacatgttccacgagaagcacgagagcgagaacctgtacagcatcgcctgcgacaagccccagcaggtgagaaacatgaccctgttcagcgacctggtggccgagaagttcatcgacgacatggaggacgtgctgtgccccgacccccagatcgtgtgccccgacctgccctgccagaccgagctgagcgtggcccagtgcacccagagacccgtggacatcgtgttcctgctggacggcagcgagagactgggcgagcagaacttccacaaggccagaagattcgtggagcaggtggccagaagactgaccctggccagaagagacgacgaccccctgaacgccagagtggccctgctgcagttcggcggccccggcgagcagcaggtggccttccccctgagccacaacctgaccgccatccacgaggccctggagaccacccagtacctgaacagcttcagccacgtgggcgccggcgtggtgcacgccatcaacgccatcgtgagaagccccagaggcggcgccagaagacacgccgagctgagcttcgtgttcctgaccgacggcgtgaccggcaacgacagcctgcacgagagcgcccacagcatgagaaagcagaacgtggtgcccaccgtgctggccctgggcagcgacgtggacatggacgtgctgaccaccctgagcctgggcgacagagccgccgtgttccacgagaaggactacgacagcctggcccagcccggcttcttcgacagattcatcagatggatctgctag

SEQ ID NO: 77279 - DNA, 2487 bp, synthetic construct
  misc_feature 1..2487: note = Description of Artificial Sequence: Synthetic coding sequence
  source 1..2487: mol_type = other DNA
atgctgcagggcacctgcagcgtgctgctgctgtggggcatcctgggcgccatccaggcccagcagcaggaggtgatcagccccgacaccaccgagagaaacaacaactgccccgagaagaccgactgccccatccacgtgtacttcgtgctggacaccagcgagagcgtgaccatgcagagccccaccgacatcctgctgttccacatgaagcagttcgtgccccagttcatcagccagctgcagaacgagttctacctggaccaggtggccctgagctggagatacggcggcctgcacttcagcgaccaggtggaggtgttcagcccccccggcagcgacagagccagcttcatcaagaacctgcagggcatcagcagcttcagaagaggcaccttcaccgactgcgccctggccaacatgaccgagcagatcagacaggacagaagcaagggcaccgtgcacttcgccgtggtgatcaccgacggccacgtgaccggcagcccctgcggcggcatcaagctgcaggccgagagagccagagaggagggcatcagactgttcgccgtggcccccaaccagaacctgaaggagcagggcctgagagacatcgccagcaccccccacgagctgtacagaaacgactacgccaccatgctgcccgacagcaccgagatcgaccaggacaccatcaacagaatcatcaaggtgatgaagcacgaggcctacggcgagtgctacaaggtgagctgcctggagatccccggccccagcggccccaagggctacagaggccagaagggcgccaagggcaacatgggcgagcccggcgagcccggccagaagggcagacagggcgaccccggcatcgagggccccatcggcttccccggccccaagggcgtgcccggcttcaagggcgagaagggcgagttcggcgccgacggcagaaagggcgcccccggcctggccggcaagaacggcaccgacggccagaagggcaagctgggcagaatcggcccccccggctgcaagggcgaccccggcaacagaggccccgacggctaccccggcgaggccggcagccccggcgagagaggcgaccagggcggcaagggcgaccccggcagacccggcagaagaggcccccccggcgagatcggcgccaagggcagcaagggctaccagggcaacagcggcgcccccggcagccccggcgtgaagggcgccaagggcggccccggccccagaggccccaagggcgagcccggcagaagaggcgaccccggcaccaagggcagccccggcagcgacggccccaagggcgagaagggcgaccccggccccgagggccccagaggcctggccggcgaggtgggcaacaagggcgccaagggcgacagaggcctgcccggccccagaggcccccagggcgccctgggcgagcccggcaagcagggcagcagaggcgaccccggcgacgccggccccagaggcgacagcggccagcccggccccaagggcgaccccggcagacccggcttcagctaccccggccccagaggcgcccccggcgagaagggcgagcccggccccagaggccccgagggcggcagaggcgacttcggcctgaagggcgagcccggcagaaagggcgagaagggcgagcccgccgaccccggcccccccggcgagcccggccccagaggccccagaggcgtgcccggccccgagggcgagcccggcccccccggcgaccccggcctgaccgagtgcgacgtgatgacctacgtgagagagacctgcggctgctgcgactgcgagaagagatgcggcgccctggacgtggtgttcgtgatcgacagcagcgagagcatcggctacaccaacttcaccctggagaagaacttcgtgatcaacgtggtgaacagactgggcgccatcgccaaggaccccaagagcgagaccggcaccagagtgggcgtggtgcagtacagccacgagggcaccttcgaggccatccagctggacgacgagagaatcgacagcctgagcagcttcaaggaggccgtgaagaacctggagtggatcgccggcggcacctggacccccagcgccctgaagttcgcctacgacagactgatcaaggagagcagaagacagaagaccagagtgttcgccgtggtgatcaccgacggcagacacgaccccagagacgacgacctgaacctgagagccctgtgcgacagagacgtgaccgtgaccgccatcggcatcggcgacatgttccacgagaagcacgagagcgagaacctgtacagcatcgcctgcgacaagccccagcaggtgagaaacatgaccctgttcagcgacctggtggccgagaagttcatcgacgacatggaggacgtgctgtgccccgacccccagatcgtgtgccccgacctgccctgccagaccggcctggacggcgccgtgctgtgctag

SEQ ID NO: 77280 - DNA, 2757 bp, synthetic construct
  misc_feature 1..2757: note = Description of Artificial Sequence: Synthetic coding sequence
  source 1..2757: mol_type = other DNA
atgctgcagggcacctgcagcgtgctgctgctgtggggcatcctgggcgccatccaggcccagcagcaggaggtgatcagccccgacaccaccgagagaaacaacaactgccccgagaagaccgactgccccatccacgtgtacttcgtgctggacaccagcgagagcgtgaccatgcagagccccaccgacatcctgctgttccacatgaagcagttcgtgccccagttcatcagccagctgcagaacgagttctacctggaccaggtggccctgagctggagatacggcggcctgcacttcagcgaccaggtggaggtgttcagcccccccggcagcgacagagccagcttcatcaagaacctgcagggcatcagcagcttcagaagaggcaccttcaccgactgcgccctggccaacatgaccgagcagatcagacaggacagaagcaagggcaccgtgcacttcgccgtggtgatcaccgacggccacgtgaccggcagcccctgcggcggcatcaagctgcaggccgagagagccagagaggagggcatcagactgttcgccgtggcccccaaccagaacctgaaggagcagggcctgagagacatcgccagcaccccccacgagctgtacagaaacgactacgccaccatgctgcccgacagcaccgagatcgaccaggacaccatcaacagaatcatcaaggtgatgaagcacgaggcctacggcgagtgctacaaggtgagctgcctggagatccccggccccagcggccccaagggctacagaggccagaagggcgccaagggcaacatgggcgagcccggcgagcccggccagaagggcagacagggcgaccccggcatcgagggccccatcggcttccccggccccaagggcgtgcccggcttcaagggcgagaagggcgagttcggcgccgacggcagaaagggcgcccccggcctggccggcaagaacggcaccgacggccagaagggcaagctgggcagaatcggcccccccggctgcaagggcgaccccggcaacagaggccccgacggctaccccggcgaggccggcagccccggcgagagaggcgaccagggcggcaagggcgaccccggcagacccggcagaagaggcccccccggcgagatcggcgccaagggcagcaagggctaccagggcaacagcggcgcccccggcagccccggcgtgaagggcgccaagggcggccccggccccagaggccccaagggcgagcccggcagaagaggcgaccccggcaccaagggcagccccggcagcgacggccccaagggcgagaagggcgaccccggccccgagggccccagaggcctggccggcgaggtgggcaacaagggcgccaagggcgacagaggcctgcccggccccagaggcccccagggcgccctgggcgagcccggcaagcagggcagcagaggcgaccccggcgacgccggccccagaggcgacagcggccagcccggccccaagggcgaccccggcagacccggcttcagctaccccggccccagaggcgcccccggcgagaagggcgagcccggccccagaggccccgagggcggcagaggcgacttcggcctgaagggcgagcccggcagaaagggcgagaagggcgagcccgccgaccccggcccccccggcgagcccggccccagaggccccagaggcgtgcccggccccgagggcgagcccggcccccccggcgaccccggcctgaccgagtgcgacgtgatgacctacgtgagagagacctgcggctgctgcgactgcgagaagagatgcggcgccctggacgtggtgttcgtgatcgacagcagcgagagcatcggctacaccaacttcaccctggagaagaacttcgtgatcaacgtggtgaacagactgggcgccatcgccaaggaccccaagagcgagaccggcaccagagtgggcgtggtgcagtacagccacgagggcaccttcgaggccatccagctggacgacgagagaatcgacagcctgagcagcttcaaggaggccgtgaagaacctggagtggatcgccggcggcacctggacccccagcgccctgaagttcgcctacgacagactgatcaaggagagcagaagacagaagaccagagtgttcgccgtggtgatcaccgacggcagacacgaccccagagacgacgacctgaacctgagagccctgtgcgacagagacgtgaccgtgaccgccatcggcatcggcgacatgttccacgagaagcacgagagcgagaacctgtacagcatcgcctgcgacaagccccagcaggtgagaaacatgaccctgttcagcgacctggtggccgagaagttcatcgacgacatggaggacgtgctgtgccccgacccccagatcgtgtgccccgacctgccctgccagaccgacgccccctggcccggcggcgagccccccgtgaccttcctgagaaccgaggagggccccgacgccaccttccccagaaccatccccctgatccagcagctgctgaacgccaccgagctgacccaggaccccgccgcctacagccagctggtggccgtgctggtgtacaccgccgagagagccaagttcgccaccggcgtggagagacaggactggatggagctgttcatcgacaccttcaagctggtgcacagagacatcgtgggcgaccccgagaccgccctggccctgtgctag

SEQ ID NO: 77281 - DNA, 2757 bp, synthetic construct; identical to SEQ ID NO: 77280
  misc_feature 1..2757: note = Description of Artificial Sequence: Synthetic coding sequence
  source 1..2757: mol_type = other DNA

SEQ ID NO: 77282 - DNA, 2487 bp, synthetic construct; identical to SEQ ID NO: 77279
  misc_feature 1..2487: note = Description of Artificial Sequence: Synthetic coding sequence
  source 1..2487: mol_type = other DNA

SEQ ID NO: 77283 - DNA, 543 bp, synthetic construct
  misc_feature 1..543: note = Description of Artificial Sequence: Synthetic coding sequence
  source 1..543: mol_type = other DNA
atgctgcagggcacctgcagcgtgctgctgctgtggggcatcctgggcgccatccaggcccagcagcaggaggtgatcagccccgacaccaccgagagaaacaacaactgccccgagaagaccgactgccccatccacgtgtacttcgtgctggacaccagcgagagcgtgaccatgcagagccccaccgacatcctgctgttccacatgaagcagttcgtgccccagttcatcagccagctgcagaacgagttctacctggaccaggtggccctgagctggagatacggcggcctgcacttcagcgaccaggtggaggtgttcagcccccccggcagcgacagagccagcttcatcaagaacctgcagggcatcagcagcttcagaagaggcaccttcaccgactgcgccctggccaacatgaccgagcagatcagacaggacagaagcaagggcaccgtgcacttcgccgtggtgatcaccgacggccacgtgaccggcagcccctgcggcggcatcaagctgcaggccgagagagcctag

SEQ ID NO: 77284 - DNA, 2235 bp, synthetic construct
  misc_feature 1..2235: note = Description of Artificial Sequence: Synthetic coding sequence
  source 1..2235: mol_type = other DNA
atggccgtgctgcccggccccctgcagctgctgggcgtgctgctgaccatcagcctgagcagcatcagactgatccaggccggcgcctactacggcatcaagcccctgcccccccagatccccccccagatgcccccccagatcccccagtaccagcccctgggccagcaggtgccccacatgcccctggccaaggacggcctggccatgggcaaggagatgccccacctgcagtacggcaaggagtacccccacctgccccagtacatgaaggagatccagcccgcccccagaatgggcaaggaggccgtgcccaagaagggcaaggagatccccctggccagcctgagaggcgagcagggccccagaggcgagcccggccccagaggcccccccggcccccccggcctgcccggccacggcatccccggcatcaagggcaagcccggcccccagggctaccccggcgtgggcaagcccggcatgcccggcatgcccggcaagcccggcgccatgggcatgcccggcgccaagggcgagatcggccagaagggcgagatcggccccatgggcatccccggcccccagggcccccccggcccccacggcctgcccggcatcggcaagcccggcggccccggcctgcccggccagcccggccccaagggcgacagaggccccaagggcctgcccggcccccagggcctgagaggccccaagggcgacaagggcttcggcatgcccggcgcccccggcgtgaagggcccccccggcatgcacggcccccccggccccgtgggcctgcccggcgtgggcaagcccggcgtgaccggcttccccggcccccagggccccctgggcaagcccggcgcccccggcgagcccggcccccagggccccatcggcgtgcccggcgtgcagggcccccccggcatccccggcatcggcaagcccggccaggacggcatccccggccagcccggcttccccggcggcaagggcgagcagggcctgcccggcctgcccggcccccccggcctgcccggcatcggcaagcccggcttccccggccccaagggcgacagaggcatgggcggcgtgcccggcgccctgggccccagaggcgagaagggccccatcggcgcccccggcatcggcggcccccccggcgagcccggcctgcccggcatccccggccccatgggcccccccggcgccatcggcttccccggccccaagggcgagggcggcatcgtgggcccccagggcccccccggccccaagggcgagcccggcctgcagggcttccccggcaagcccggcttcctgggcgaggtgggcccccccggcatgagaggcctgcccggccccatcggccccaagggcgaggccggccagaagggcgtgcccggcctgcccggcgtgcccggcctgctgggccccaagggcgagcccggcatccccggcgaccagggcctgcagggcccccccggcatccccggcatcggcggccccagcggccccatcggcccccccggcatccccggccccaagggcgagcccggcctgcccggcccccccggcttccccggcatcggcaagcccggcgtggccggcctgcacggcccccccggcaagcccggcgccctgggcccccagggccagcccggcctgcccggcccccccggcccccccggcccccccggcccccccgccgtgatgccccccaccccccccccccagggcgagtacctgcccgacatgggcctgggcatcgacggcgtgaagcccccccacgcctacggcgccaagaagggcaagaacggcggccccgcctacgagatgcccgccttcaccgccgagctgaccgcccccttcccccccgtgggcgcccccgtgaagttcaacaagctgctgtacaacggcagacagaactacaacccccagaccggcatcttcacctgcgaggtgcccggcgtgtactacttcgcctaccacgtgcactgcaagggcggcaacgtgtgggtggccctgttcaagaacaacgagcccgtgatgtacacctacgacgagtacaagaagggcttcctggaccaggccagcggcagcgccgtgctgctgctgagacccggcgacagagtgttcctgcagatgcccagcgagcaggccgccggcctgtacgccggccagtacgtgcacagcagcttcagcggctacctgctgtaccccatgtag

SEQ ID NO: 77285 - DNA, 2235 bp, synthetic construct; identical to SEQ ID NO: 77284
  misc_feature 1..2235: note = Description of Artificial Sequence: Synthetic coding sequence
  source 1..2235: mol_type = other DNA

SEQ ID NO: 77286 - DNA, 345 bp, synthetic construct
  misc_feature 1..345: note = Description of Artificial Sequence: Synthetic coding sequence
  source 1..345: mol_type = other DNA
atggccgtgctgcccggccccctgcagctgctgggcgtgctgctgaccatcagcctgagcagcatcagactgatccaggccggcgcctactacggcatcaagcccctgcccccccagatccccccccagatgcccccccagatcccccagtaccagcccctgggccagcaggtgccccacatgcccctggccaaggacggcctggccatgggcaaggagatgccccacctgcagtacggcaaggagtacccccacctgccccagtacatgaaggagatccagcccgcccccagaatgggcaaggaggccgtgcccaagaagggcaaggagatccccctggcctag

SEQ ID NO: 77287 - DNA, 2061 bp, synthetic construct
  misc_feature 1..2061: note = Description of Artificial Sequence: Synthetic coding sequence
  source 1..2061: mol_type = other DNA
atggtggccgagagaacccacaaggccgccgccaccggcgccagaggccccggcgagctgggcgcccccggcaccgtggccctggtggccgccagagccgagagaggcgccagactgcccagccccggcagctgcggcctgctgaccctggccctgtgcagcctggccctgagcctgctggcccacttcagaaccgccgagctgcaggccagagtgctgagactggaggccgagagaggcgagcagcagatggagaccgccatcctgggcagagtgaaccagctgctggacgagaagtggaagctgcacagcagaagaagaagagaggcccccaagaccagccccggctgcaactgcccccccggcccccccggccccaccggcagacccggcctgcccggcgacaagggcgccatcggcatgcccggcagagtgggcagccccggcgacgccggcctgagcatcatcggccccagaggcccccccggccagcccggcaccagaggcttccccggcttccccggccccatcggcctggacggcaagcccggccaccccggccccaagggcgacatgggcctgaccggcccccccggccagcccggcccccagggccagaagggcgagaagggccagtgcggcgagtacccccacagactgctgcccctgctgaacagcgtgagactggcccccccccccgtgatcaagagaagaaccttccagggcgagcagagccaggccagcatccagggcccccccggcccccccggcccccccggccccagcggccccctgggccaccccggcctgcccggccccatgggcccccccggcctgcccggcccccccggccccaagggcgaccccggcatccagggctaccacggcagaaagggcgagagaggcatgcccggcatgcccggcaagcacggcgccaagggcgcccccggcatcgccgtggccggcatgaagggcgagcccggcatccccggcaccaagggcgagaagggcgccgagggcagccccggcctgcccggcctgctgggccagaagggcgagaagggcgacgccggcaacagcatcggcggcggcagaggcgagcccggcccccccggcctgcccggcccccccggccccaagggcgaggccggcgtggacggccaggtgggcccccccggccagcccggcgacaagggcgagagaggcgccgccggcgagcagggccccgacggccccaagggcagcaagggcgagcccggcaagggcgagatggtggactacaacggcaacatcaacgaggccctgcaggagatcagaaccctggccctgatgggcccccccggcctgcccggccagatcggcccccccggcgcccccggcatccccggccagaagggcgagatcggcctgcccggcccccccggccacgacggcgagaagggccccagaggcaagcccggcgacatgggcccccccggcccccagggcccccccggcaaggacggcccccccggcgtgaagggcgagaacggccaccccggcagccccggcgagaagggcgagaagggcgagaccggccaggccggcagccccggcgagaagggcgaggccggcgagaagggcaaccccggcgccgaggtgcccggcctgcccggccccgagggcccccccggcccccccggcctgcagggcgtgcccggccccaagggcgaggccggcctggacggcgccaagggcgagaagggcttccagggcgagaagggcgacagaggccccctgggcctgcccggcacccccggccccatcggcgtgcccggccccgccggccccaagggcgagagaggcagcaagggcgaccccggcatgaccggccccaccggcgccgccggcctgcccggcctgcacggcccccccggcgacaagggcaacagaggcgagagaggcaagaagggcagcagaggccccaagggcgacaagggcgaccagggcgcccccggcctggacgccccctgccccctgggcgaggacggcctgcccgtgcagggctgctggaacaagtag

SEQ ID NO: 77288 - DNA, 1338 bp, synthetic construct
  misc_feature 1..1338: note = Description of Artificial Sequence: Synthetic coding sequence
  source 1..1338: mol_type = other DNA
atgaccggcagcagcttcagcctggcccacctgctgatcatcagcggcctgctgtgctacagcgccggctgcctggccctgcccagcctggaccagaagaagagaggcggccacaaggcctgctgcctgctgacccccccccccccccccctgttccccccccccttcttcagaggcggcagaagccccctgctgagccccgacatgaagaacctgatgctggagctggagaccagccagagcccctgcatgcagggcagcctgggcagccccggcccccccggcccccagggcccccccggcctgcccggcaagaccggccccaagggcgagaagggcgagctgggcagacccggcagaaagggcagacccggcccccccggcgtgcccggcatgcccggccccatcggctggcccggccccgagggccccagaggcgagaagggcgacctgggcatgatgggcctgcccggcagcagaggccccatgggcagcaagggctaccccggcagcagaggcgagaagggcagcagaggcgagaagggcgacctgggccccaagggcgagaagggcttccccggcttccccggcatgctgggccagaagggcgagatgggccccaagggcgagcccggcatcgccggccacagaggccccaccggcagacccggcaagagaggcaagcagggccagaagggcgacagcggcgtgatgggcccccccggcaagcccggccccagcggccagcccggcagacccggcccccccggccccccccccgccggccagctgatcatgggccccaagggcgagagaggcttccccggcccccccggcagatgcctgtgcggccccaccatgaacgtgaacaaccccagctacggcgagagcgtgtacggccccagcagccccagagtgcccgtgatcttcgtggtgaacaaccaggaggagctggagagactgaacacccagaacgccatcgccttcagaagagaccagagaagcctgtacttcaaggacagcctgggctggctgcccatccagctgacccccttctaccccgtggactacaccgccgaccagcacggcacctgcggcgacggcctgctgcagcccggcgaggagtgcgacgacggcaacagcgacgtgggcgacgactgcatcagatgccacagagcctactgcggcgacggccacagacacgagggcgtggaggactgcgacggcagcgacttcggctacctgacctgcgagacctacctgcccggcagctacggcgacctgcagtgcacccagtactgctacatcgacagcaccccctgcagatacttcacctag

SEQ ID NO: 77289 - DNA, 876 bp, synthetic construct
  misc_feature 1..876: note = Description of Artificial Sequence: Synthetic coding sequence
  source 1..876: mol_type = other DNA
atggtggtgctgaaccccatgaccctgggcatctacctgcagctgttcttcctgagcatcgtgagccagcccaccttcatcaacagcgtgctgcccatcagcgccgccctgcccagcctggaccagaagaagagaggcggccacaaggcctgctgcctgctgacccccccccccccccccctgttccccccccccttcttcagaggcggcagaagccccctgctgagccccgacatgaagaacctgatgctggagctggagaccagccagagcccctgcatgcagggcagcctgggcagccccggcccccccggcccccagggcccccccggcctgcccggcaagaccggccccaagggcgagaagggcgagctgggcagacccggcagaaagggcagacccggcccccccggcgtgcccggcatgcccggccccatcggctggcccggccccgagggccccagaggcgagaagggcgacctgggcatgatgggcctgcccggcagcagaggccccatgggcagcaagggctaccccggcagcagaggcgagaagggcagcagaggcgagaagggcgacctgggccccaagggcgagaagggcttccccggcttccccggcatgctgggccagaagggcgagatgggccccaagggcgagcccggcatcgccggccacagaggccccaccggcagacccggcaagagaggcaagcagagcagcagaaccccctgcaccctgcccagaagaccccccgtgccctgcggccagggcagcagaagccccgtgaccgtggtggccggcaaggagagccaggcctgcctgctgcccagattcgaggaggactacatcagcagcggcaccgagagaggctag

SEQ ID NO: 77290 - DNA, 1266 bp, synthetic construct
  misc_feature 1..1266: note = Description of Artificial Sequence: Synthetic coding sequence
  source 1..1266: mol_type = other DNA
atggtggtgctgaaccccatgaccctgggcatctacctgcagctgttcttcctgagcatcgtgagccagcccaccttcatcaacagcgtgctgcccatcagcgccgccctgcccagcctggaccagaagaagagaggcggccacaaggcctgctgcctgctgacccccccccccccccccctgttccccccccccttcttcagaggcggcagaagccccggcccccccggcctgcccggcaagaccggccccaagggcgagaagggcgagctgggcagacccggcagaaagggcagacccggcccccccggcgtgcccggcatgcccggccccatcggctggcccggccccgagggccccagaggcgagaagggcgacctgggcatgatgggcctgcccggcagcagaggccccatgggcagcaagggctaccccggcagcagaggcgagaagggcagcagaggcgagaagggcgacctgggccccaagggcgagaagggcttccccggcttccccggcatgctgggccagaagggcgagatgggccccaagggcgagcccggcatcgccggccacagaggccccaccggcagacccggcaagagaggcaagcagggccagaagggcgacagcggcgtgatgggcccccccggcaagcccggccccagcggccagcccggcagacccggcccccccggccccccccccgccggccagctgatcatgggccccaagggcgagagaggcttccccggcccccccggcagatgcctgtgcggccccaccatgaacgtgaacaaccccagctacggcgagagcgtgtacggccccagcagccccagagtgcccgtgatcttcgtggtgaacaaccaggaggagctggagagactgaacacccagaacgccatcgccttcagaagagaccagagaagcctgtacttcaaggacagcctgggctggctgcccatccagctgacccccttctaccccgtggactacaccgccgaccagcacggcacctgcggcgacggcctgctgcagcccggcgaggagtgcgacgacggcaacagcgacgtgggcgacgactgcatcagatgccacagagcctactgcggcgacggccacagacacgagggcgtggaggactgcgacggcagcgacttcggctacctgacctgcgagacctacctgcccggcagctacggcgacctgcagtgcacccagtactgctacatcgacagcaccccctgcagatacttcacctag

SEQ ID NO: 77291 - DNA, 1341 bp, synthetic construct
  misc_feature 1..1341: note = Description of Artificial Sequence: Synthetic coding sequence
  source 1..1341: mol_type = other DNA
atggtggtgctgaaccccatgaccctgggcatctacctgcagctgttcttcctgagcatcgtgagccagcccaccttcatcaacagcgtgctgcccatcagcgccgccctgcccagcctggaccagaagaagagaggcggccacaaggcctgctgcctgctgacccccccccccccccccctgttccccccccccttcttcagaggcggcagaagccccctgctgagccccgacatgaagaacctgatgctggagctggagaccagccagagcccctgcatgcagggcagcctgggcagccccggcccccccggcccccagggcccccccggcctgcccggcaagaccggccccaagggcgagaagggcagacccggcccccccggcgtgcccggcatgcccggccccatcggctggcccggccccgagggccccagaggcgagaagggcgacctgggcatgatgggcctgcccggcagcagaggccccatgggcagcaagggctaccccggcagcagaggcgagaagggcagcagaggcgagaagggcgacctgggccccaagggcgagaagggcttccccggcttccccggcatgctgggccagaagggcgagatgggccccaagggcgagcccggcatcgccggccacagaggccccaccggcagacccggcaagagaggcaagcagggccagaagggcgacagcggcgtgatgggcccccccggcaagcccggccccagcggccagcccggcagacccggcccccccggccccccccccgccggccagctgatcatgggccccaagggcgagagaggcttccccggcccccccggcagatgcctgtgcggccccaccatgaacgtgaacaaccccagctacggcgagagcgtgtacggccccagcagccccagagtgcccgtgatcttcgtggtgaacaaccaggaggagctggagagactgaacacccagaacgccatcgccttcagaagagaccagagaagcctgtacttcaaggacagcctgggctggctgcccatccagctgacccccttctaccccgtggactacaccgccgaccagcacggcacctgcggcgacggcctgctgcagcccggcgaggagtgcgacgacggcaacagcgacgtgggcgacgactgcatcagatgccacagagcctactgcggcgacggccacagacacgagggcgtggaggactgcgacggcagcgacttcggctacctgacctgcgagacctacctgcccggcagctacggcgacctgcagtgcacccagtactgctacatcgacagcaccccctgcagatacttcacctag

SEQ ID NO: 77292 - DNA, 1368 bp, synthetic construct
  misc_feature 1..1368: note = Description of Artificial Sequence: Synthetic coding sequence
  source 1..1368: mol_type = other DNA
atggtggtgctgaaccccatgaccctgggcatctacctgcagctgttcttcctgagcatcgtgagccagcccaccttcatcaacagcgtgctgcccatcagcgccgccctgcccagcctggaccagaagaagagaggcggccacaaggcctgctgcctgctgacccccccccccccccccctgttccccccccccttcttcagaggcggcagaagccccctgctgagccccgacatgaagaacctgatgctggagctggagaccagccagagcccctgcatgcagggcagcctgggcagccccggcccccccggcccccagggcccccccggcctgcccggcaagaccggccccaagggcgagaagggcgagctgggcagacccggcagaaagggcagacccggcccccccggcgtgcccggcatgcccggccccatcggctggcccggccccgagggccccagaggcgagaagggcgacctgggcatgatgggcctgcccggcagcagaggccccatgggcagcaagggctaccccggcagcagaggcgagaagggcagcagaggcgagaagggcgacctgggccccaagggcgagaagggcttccccggcttccccggcatgctgggccagaagggcgagatgggccccaagggcgagcccggcatcgccggccacagaggccccaccggcagacccggcaagagaggcaagcagggccagaagggcgacagcggcgtgatgggcccccccggcaagcccggccccagcggccagcccggcagacccggcccccccggccccccccccgccggccagctgatcatgggccccaagggcgagagaggcttccccggcccccccggcagatgcctgtgcggccccaccatgaacgtgaacaaccccagctacggcgagagcgtgtacggccccagcagccccagagtgcccgtgatcttcgtggtgaacaaccaggaggagctggagagactgaacacccagaacgccatcgccttcagaagagaccagagaagcctgtacttcaaggacagcctgggctggctgcccatccagctgacccccttctaccccgtggactacaccgccgaccagcacggcacctgcggcgacggcctgctgcagcccggcgaggagtgcgacgacggcaacagcgacgtgggcgacgactgcatcagatgccacagagcctactgcggcgacggccacagacacgagggcgtggaggactgcgacggcagcgacttcggctacctgacctgcgagacctacctgcccggcagctacggcgacctgcagtgcacccagtactgctacatcgacagcaccccctgcagatacttcacctag

SEQ ID NO: 77293 - DNA, 1338 bp, synthetic construct; identical to SEQ ID NO: 77288
  misc_feature 1..1338: note = Description of Artificial Sequence: Synthetic coding sequence
  source 1..1338: mol_type = other DNA

SEQ ID NO: 77294 - DNA, 585 bp, synthetic construct
  misc_feature 1..585: note = Description of Artificial Sequence: Synthetic coding sequence
  source 1..585: mol_type = other DNA
atcagcggcctgctgtgctacagcgccggctgcctggccctgcccagcctggaccagaagaagagaggcggccacaaggcctgctgcctgctgacccccccccccccccccctgttccccccccccttcttcagaggcggcagaagccccggcccccccggcctgcccggcaagaccggccccaagggcgagaagggcgagctgggcagacccggcagaaagggcagacccggcccccccggcgtgcccggcatgcccggccccatcggctggcccggccccgagggccccagaggcgagaagggcgacctgggcatgatgggcctgcccggcagcagaggccccatgggcagcaagggctaccccggcagcagaggcgagaagggcagcagaggcgagaagggcgacctgggccccaagggcgagaagggcttccccggcttccccggcatgctgggccagaagggcgagatgggccccaagggcgagcccggcatcgccggccacagaggccccaccggcagacccggcaagagaggcaagcagggccagaagggcgacagcggcgtgatgggccccccctag

SEQ ID NO: 77295 - DNA, 1338 bp, synthetic construct
  misc_feature 1..1338: note = Description of Artificial Sequence: Synthetic coding sequence
  source 1..1338: mol_type = other DNA
atgaccggcagcagcttcagcctggcccacctgctgatcatcagcggcctgctgtgctacagcgccggctgcctggccctgcccagcctggaccagaagaagagaggcggccacaaggcctgctgcctgctgacccccccccccccccccctgttccccccccccttcttcagaggcggcagaagccccctgctgagccccgacatgaagaacctgatgctggagctggagaccagccagagcccctgcatgcagggcagcctgggcagccccggcccccccggcccccagggcccccccggcctgcccggcaagaccggccccaagggcgagaagggcgagctgggcagacccggcagaaagggcagacccggcccccccggcgtgcccggcatgcccggccccatcggctggcccggccccgagggccccagaggcgagaagggcgacctgggcatgatgggcctgcccggcagcagaggccccatgggcagcaagggctaccccggcagcagaggcgagaagggcagcagaggcgagaagggcgacctgggccccaagggcgagaagtgcaaccccctgctgctgctgttccccagcttccagggcgagatgggccccaagggcgagcccggcatcgccggccacagaggccccaccggcagacccggcaagagaggcaagcagggccagaagggcgacagcggcgtgatgggcccccccggcaagcccggccccagcggccagcccggcagacccggcccccccggccccccccccgccggccagctgatcatgggccccaagggcgagagaggcttccccggcccccccggcagatgcctgtgcggccccaccatgaacgtgaacaaccccagctacggcgagagcgtgtacggccccagcagccccagagtgcccgtgatcttcgtggtgaacaaccaggaggagctggagagactgaacacccagaacgccatcgccttcagaagagaccagagaagcctgtacttcaaggacagcctgggctggctgcccatccagctgacccccttctaccccgtggactacaccgccgaccagcacggcacctgcggcgacggcctgctgcagcccggcgaggagtgcgacgacggcaacagcgacgtgggcgacgactgcatcagatgccacagagcctactgcggcgacggccacagacacgagggcgtggaggactgcgacggcagcgacttcggctacctgacctgcgagacctacctgcccggcagctacggcgacctgcagtgcacccagtactgctacatcgacagcaccccctgcagatacttcacctag

SEQ ID NO: 77296 - DNA, 2061 bp, synthetic construct
  misc_feature 1..2061: note = Description of Artificial Sequence: Synthetic coding sequence
  source 1..2061: mol_type = other DNA
atggccgacagaagaagagcctggaacaccgaggacgacctgcccgtgtacctggccagacccggcagcgccgcccagacccccagacagaagtacggcggcatgttcgccgccgtggagggcgcctacgagaacaagaccatcgacttcgacgcctacagcgtgggcagaagaggcagcgccagaacccccagaagcgccggcagacccgacgccgtgggcctgcccggccccggcggcagcgaggacaccgccagcgacgtgagcgagcccagcggcagcgccgtgagcagccccggcgagagagacgagagaccccccaccctgagaatcagaagacccgcccccagagacctgcccctgggcagagacaacggccagagcgacagactgctgatcaagggcggcagaatcatcaacgacgaccagagcctgtacgccgacgtgtacctggaggacggcctgatcaagcagatcggcgagaacctgatcgtgcccggcggcgtgaagaccatcgaggccaacggcagaatggtgatccccggcggcatcgacgtgaacacctacctgcagaagcccagccagggcatgaccgccgccgacgacttcttccagggcaccagagccgccctggtgggcggcaccaccatgatcatcgaccacgtggtgcccgagcccggcagcagcctgctgaccagcttcgagaagtggcacgaggccgccgacaccaagagctgctgcgactacagcctgcacgtggacatcaccagctggtacgacggcgtgagagaggagctggaggtgctggtgcaggacaagggcgtgaacagcttccaggtgtacatggcctacaaggacgtgtaccagatgagcgacagccagctgtacgaggccttcaccttcctgaagggcctgggcgccgtgatcctggtgcacgccgagaacggcgacctgatcgcccaggagcagaagagaatcctggagatgggcatcaccggccccgagggccacgccctgagcagacccgaggagctggaggccgaggccgtgttcagagccatcaccatcgccggcagaatcaactgccccgtgtacatcaccaaggtgatgagcaagagcgccgccgacatcatcgccctggccagaaagaagggccccctggtgttcggcgagcccatcgccgccagcctgggcaccgacggcacccactactggagcaagaactgggccaaggccgccgccttcgtgaccagcccccccctgagccccgaccccaccacccccgactacctgaccagcctgctggcctgcggcgacctgcaggtgaccggcagcggccactgcccctacagcaccgcccagaaggccgtgggcaaggacaacttcaccctgatccccgagggcgtgaacggcatcgaggagagaatgaccgtggtgtgggacaaggccgtggccaccggcaagatggacgagaaccagttcgtggccgtgaccagcaccaacgccgccaagatcttcaacctgtaccccagaaagggcagaatcgccgtgggcagcgacgccgacgtggtgatctgggaccccgacaagctgaagaccatcaccgccaagagccacaagagcgccgtggagtacaacatcttcgagggcatggagtgccacggcagccccctggtggtgatcagccagggcaagatcgtgttcgaggacggcaacatcaacgtgaacaagggcatgggcagattcatccccagaaaggccttccccgagcacctgtaccagagagtgaagatcagaaacaaggtgttcggcctgcagggcgtgagcagaggcatgtacgacggccccgtgtacgaggtgcccgccacccccaagtacgccacccccgcccccagcgccaagagcagccccagcaagcaccagcccccccccatcagaaacctgcaccagagcaacttcagcctgagcggcgcccagatcgacgacaacaaccccagaagaaccggccacagaatcgtggccccccccggcggcagaagcaacatcaccagcctgggctag

SEQ ID NO: 77297 - DNA, 1719 bp, synthetic construct
  misc_feature 1..1719: note = Description of Artificial Sequence: Synthetic coding sequence
  source 1..1719: mol_type = other DNA
atgagctaccagggcaagaagagcatcccccacatcaccagcgacagactgctgatcaagggcggcagaatcatcaacgacgaccagagcctgtacgccgacgtgtacctggaggacggcctgatcaagcagatcggcgagaacctgatcgtgcccggcggcgtgaagaccatcgaggccaacggcagaatggtgatccccggcggcatcgacgtgaacacctacctgcagaagcccagccagggcatgaccgccgccgacgacttcttccagggcaccagagccgccctggtgggcggcaccaccatgatcatcgaccacgtggtgcccgagcccggcagcagcctgctgaccagcttcgagaagtggcacgaggccgccgacaccaagagctgctgcgactacagcctgcacgtggacatcaccagctggtacgacggcgtgagagaggagctggaggtgctggtgcaggacaagggcgtgaacagcttccaggtgtacatggcctacaaggacgtgtaccagatgagcgacagccagctgtacgaggccttcaccttcctgaagggcctgggcgccgtgatcctggtgcacgccgagaacggcgacctgatcgcccaggagcagaagagaatcctggagatgggcatcaccggccccgagggccacgccctgagcagacccgaggagctggaggccgaggccgtgttcagagccatcaccatcgccggcagaatcaactgccccgtgtacatcaccaaggtgatgagcaagagcgccgccgacatcatcgccctggccagaaagaagggccccctggtgttcggcgagcccatcgccgccagcctgggcaccgacggcacccactactggagcaagaactgggccaaggccgccgccttcgtgaccagcccccccctgagccccgaccccaccacccccgactacctgaccagcctgctggcctgcggcgacctgcaggtgaccggcagcggccactgcccctacagcaccgcccagaaggccgtgggcaaggacaacttcaccctgatccccgagggcgtgaacggcatcgaggagagaatgaccgtggtgtgggacaaggccgtggccaccggcaagatggacgagaaccagttcgtggccgtgaccagcaccaacgccgccaagatcttcaacctgtaccccagaaagggcagaatcgccgtgggcagcgacgccgacgtggtgatctgggaccccgacaagctgaagaccatcaccgccaagagccacaagagcgccgtggagtacaacatcttcgagggcatggagtgccacggcagccccctggtggtgatcagccagggcaagatcgtgttcgaggacggcaacatcaacgtgaacaagggcatgggcagattcatccccagaaaggccttccccgagcacctgtaccagagagtgaagatcagaaacaaggtgttcggcctgcagggcgtgagcagaggcatgtacgacggccccgtgtacgaggtgcccgccacccccaagtacgccacccccgcccccagcgccaagagcagccccagcaagcaccagcccccccccatcagaaacctgcaccagagcaacttcagcctgagcggcgcccagatcgacgacaacaaccccagaagaaccggccacagaatcgtggccccccccggcggcagaagcaacatcaccagcctgggctag

SEQ ID NO: 77298 - DNA, 1713 bp, synthetic construct
  misc_feature 1..1713: note = Description of Artificial Sequence: Synthetic coding sequence
  source 1..1713: mol_type = other DNA
atgcagaagatgaacaacgaggtggtggacaagagcgacagactgctgatcaagggcggcagaatcatcaacgacgaccagagcctgtacgccgacgtgtacctggaggacggcctgatcaagcagatcggcgagaacctgatcgtgcccggcggcgtgaagaccatcgaggccaacggcagaatggtgatccccggcggcatcgacgtgaacacctacctgcagaagcccagccagggcatgaccgccgccgacgacttcttccagggcaccagagccgccctggtgggcggcaccaccatgatcatcgaccacgtggtgcccgagcccggcagcagcctgctgaccagcttcgagaagtggcacgaggccgccgacaccaagagctgctgcgactacagcctgcacgtggacatcaccagctggtacgacggcgtgagagaggagctggaggtgctggtgcaggacaagggcgtgaacagcttccaggtgtacatggcctacaaggacgtgtaccagatgagcgacagccagctgtacgaggccttcaccttcctgaagggcctgggcgccgtgatcctggtgcacgccgagaacggcgacctgatcgcccaggagcagaagagaatcctggagatgggcatcaccggccccgagggccacgccctgagcagacccgaggagctggaggccgaggccgtgttcagagccatcaccatcgccggcagaatcaactgccccgtgtacatcaccaaggtgatgagcaagagcgccgccgacatcatcgccctggccagaaagaagggccccctggtgttcggcgagcccatcgccgccagcctgggcaccgacggcacccactactggagcaagaactgggccaaggccgccgccttcgtgaccagcccccccctgagccccgaccccaccacccccgactacctgaccagcctgctggcctgcggcgacctgcaggtgaccggcagcggccactgcccctacagcaccgcccagaaggccgtgggcaaggacaacttcaccctgatccccgagggcgtgaacggcatcgaggagagaatgaccgtggtgtgggacaaggccgtggccaccggcaagatggacgagaaccagttcgtggccgtgaccagcaccaacgccgccaagatcttcaacctgtaccccagaaagggcagaatcgccgtgggcagcgacgccgacgtggtgatctgggaccccgacaagctgaagaccatcaccgccaagagccacaagagcgccgtggagtacaacatcttcgagggcatggagtgccacggcagccccctggtggtgatcagccagggcaagatcgtgttcgaggacggcaacatcaacgtgaacaagggcatgggcagattcatccccagaaaggccttccccgagcacctgtaccagagagtgaagatcagaaacaaggtgttcggcctgcagggcgtgagcagaggcatgtacgacggccccgtgtacgaggtgcccgccacccccaagtacgccacccccgcccccagcgccaagagcagccccagcaagcaccagcccccccccatcagaaacctgcaccagagcaacttcagcctgagcggcgcccagatcgacgacaacaaccccagaagaaccggccacagaatcgtggccccccccggcggcagaagcaacatcaccagcctgggctag

SEQ ID NO: 77299 - DNA, 1719 bp, synthetic construct; identical to SEQ ID NO: 77297
  misc_feature 1..1719: note = Description of Artificial Sequence: Synthetic coding sequence
  source 1..1719: mol_type = other DNA

SEQ ID NO: 77300 - DNA, 834 bp, synthetic construct
  misc_feature 1..834: note = Description of Artificial Sequence: Synthetic coding sequence
  source 1..834: mol_type = other DNA
atgaacggcttcgccagcctgctgagaagaaaccagttcatcctgctggtgctgttcctgctgcagatccagagcctgggcctggacatcgacagcagacccaccgccgaggtgtgcgccacccacaccatcagccccggccccaagggcgacgacggcgagaagggcgaccccggcgaggagggcaagcacggcaaggtgggcagaatgggccccaagggcatcaagggcgagctgggcgacatgggcgaccagggcaacatcggcaagaccggccccatcggcaagaagggcgacaagggcgagaagggcctgctgggcatccccggcgagaagggcaaggccggcaccgtgtgcgactgcggcagatacagaaagttcgtgggccagctggacatcagcatcgccagactgaagaccagcatgaagttcgtgaagaacgtgatcgccggcatcagagagaccgaggagaagttctactacatcgtgcaggaggagaagaactacagagagagcctgacccactgcagaatcagaggcggcatgctggccatgcccaaggacgaggccgccaacaccctgatcgccgactacgtggccaagagcggcttcttcagagtgttcatcggcgtgaacgacctggagagagagggccagtacatgttcaccgacaacacccccctgcagaactacagcaactggaacgagggcgagcccagcgacccctacggccacgaggactgcgtggagatgctgagcagcggcagatggaacgacaccgagtgccacctgaccatgtacttcgtgtgcgagttcatcaagaagaagaagtag

SEQ ID NO: 77301 - DNA, 807 bp, synthetic construct
  misc_feature 1..807: note = Description of Artificial Sequence: Synthetic coding sequence
  source 1..807: mol_type = other DNA
atgacccccgccctgtgcagaagcagcagcctggccagcaagggcatgagagagagaagagagaccaaggccccccccgacggcctggaggagagcgcccccagagagaagaagcagagccagcccgtggtgaccgccagcgacatcagcaagagaaagtgcaccagcagcttcgtggagatgggcagccagggcgacatgggcgacaagggccagaagggcagcgtgggcagacacggcaagatcggccccatcggcagcaagggcgagaagggcgacagcggcgacatcggcccccccggccccaacggcgagcccggcctgccctgcgagtgcagccagctgagaaaggccatcggcgagatggacaaccaggtgagccagctgaccagcgagctgaagttcatcaagaacgccgtggccggcgtgagagagaccgagagcaagatctacctgctggtgaaggaggagaagagatacgccgacgcccagctgagctgccagggcagaggcggcaccctgagcatgcccaaggacgaggccgccaacggcctgatggccgcctacctggcccaggccggcctggccagagtgttcatcggcatcaacgacctggagaaggagggcgccttcgtgtacagcgaccacagccccatgagaaccttcaacaagtggagaagcggcgagcccaacaacgcctacgacgaggaggactgcgtggagatggtggccagcggcggctggaacgacgtggcctgccacaccaccatgtacttcatgtgcgagttcgacaaggagaacatgtag

SEQ ID NO: 77302 - DNA, 816 bp, synthetic construct
  misc_feature 1..816: note = Description of Artificial Sequence: Synthetic coding sequence
  source 1..816: mol_type = other DNA
atgagaggcaacctggccctggtgggcgtgctgatcagcctggccttcctgagcctgctgcccagcggccacccccagcccgccggcgacgacgcctgcagcgtgcagatcctggtgcccggcctgaagggcgacgccggcgagaagggcgacaagggcgcccccggcagacccggcagagtgggccccaccggcgagaagggcgacatgggcgacaagggccagaagggcagcgtgggcagacacggcaagatcggccccatcggcagcaagggcgagaagggcgacagcggcgacatcggcccccccggccccaacggcgagcccggcctgccctgcgagtgcagccagctgagaaaggccatcggcgagatggacaaccaggtgagccagctgaccagcgagctgaagttcatcaagaacgccgtggccggcgtgagagagaccgagagcaagatctacctgctggtgaaggaggagaagagatacgccgacgcccagctgagctgccagggcagaggcggcaccctgagcatgcccaaggacgaggccgccaacggcctgatggccgcctacctggcccaggccggcctggccagagtgttcatcggcatcaacgacctggagaaggagggcgccttcgtgtacagcgaccacagccccatgagaaccttcaacaagtggagaagcggcgagcccaacaacgcctacgacgaggaggactgcgtggagatggtggccagcggcggctggaacgacgtggcctgccacaccaccatgtacttcatgtgcgagttcgacaaggagaacatgtag

SEQ ID NO: 77303 - DNA, 744 bp, synthetic construct
  misc_feature 1..744: note = Description of Artificial Sequence: Synthetic coding sequence
  source 1..744: mol_type = other DNA
atgagaggcaacctggccctggtgggcgtgctgatcagcctggccttcctgagcctgctgcccagcggccacccccagcccgccggcgacgacgcctgcagcgtgcagatcctggtgcccggcctgaagggcgacgccggcgagaagggcgacaagggcgcccccggcagacccggcagagtgggccccaccggcgagaagggcgagaagggcgacagcggcgacatcggcccccccggccccaacggcgagcccggcctgccctgcgagtgcagccagctgagaaaggccatcggcgagatggacaaccaggtgagccagctgaccagcgagctgaagttcatcaagaacgccgtggccggcgtgagagagaccgagagcaagatctacctgctggtgaaggaggagaagagatacgccgacgcccagctgagctgccagggcagaggcggcaccctgagcatgcccaaggacgaggccgccaacggcctgatggccgcctacctggcccaggccggcctggccagagtgttcatcggcatcaacgacctggagaaggagggcgccttcgtgtacagcgaccacagccccatgagaaccttcaacaagtggagaagcggcgagcccaacaacgcctacgacgaggaggactgcgtggagatggtggccagcggcggctggaacgacgtggcctgccacaccaccatgtacttcatgtgcgagttcgacaaggagaacatgtag

SEQ ID NO: 77304 - DNA, 858 bp, synthetic construct
  misc_feature 1..858: note = Description of Artificial Sequence: Synthetic coding sequence
  source 1..858: mol_type = other DNA
atgaagaagcagagaggcgtgggcgtgctgcccgccctgagaatgagaggcaacctggccctggtgggcgtgctgatcagcctggccttcctgagcctgctgcccagcggccacccccagcccgccggcgacgacgcctgcagcgtgcagatcctggtgcccggcctgaagggcgacgccggcgagaagggcgacaagggcgcccccggcagacccggcagagtgggccccaccggcgagaagggcgacatgggcgacaagggccagaagggcagcgtgggcagacacggcaagatcggccccatcggcagcaagggcgagaagggcgacagcggcgacatcggcccccccggccccaacggcgagcccggcctgccctgcgagtgcagccagctgagaaaggccatcggcgagatggacaaccaggtgagccagctgaccagcgagctgaagttcatcaagaacgccgtggccggcgtgagagagaccgagagcaagatctacctgctggtgaaggaggagaagagatacgccgacgcccagctgagctgccagggcagaggcggcaccctgagcatgcccaaggacgaggccgccaacggcctgatggccgcctacctggcccaggccggcctggccagagtgttcatcggcatcaacgacctggagaaggagggcgccttcgtgtacagcgaccacagccccatgagaaccttcaacaagtggagaagcggcgagcccaacaacgcctacgacgaggaggactgcgtggagatggtggccagcggcggctggaacgacgtggcctgccacaccaccatgtacttcatgtgcgagttcgacaaggagaacatgtag

SEQ ID NO: 77305 - DNA, 666 bp, synthetic construct
  misc_feature 1..666: note = Description of Artificial Sequence: Synthetic coding sequence
  source 1..666: mol_type = other DNA
atgtggtgggtgccccccagcccctacggctgcctgccctgcgccctgcccggcgacatgggcgacaagggccagaagggcagcgtgggcagacacggcaagatcggccccatcggcagcaagggcgagaagggcgacagcggcgacatcggcccccccggccccaacggcgagcccggcctgccctgcgagtgcagccagctgagaaaggccatcggcgagatggacaaccaggtgagccagctgaccagcgagctgaagttcatcaagaacgccgtggccggcgtgagagagaccgagagcaagatctacctgctggtgaaggaggagaagagatacgccgacgcccagctgagctgccagggcagaggcggcaccctgagcatgcccaaggacgaggccgccaacggcctgatggccgcctacctggcccaggccggcctggccagagtgttcatcggcatcaacgacctggagaaggagggcgccttcgtgtacagcgaccacagccccatgagaaccttcaacaagtggagaagcggcgagcccaacaacgcctacgacgaggaggactgcgtggagatggtggccagcggcggctggaacgacgtggcctgccacaccaccatgtacttcatgtgcgagttcgacaaggagaacatgtag

SEQ ID NO: 77306 - DNA, 666 bp, synthetic construct
  misc_feature 1..666: note = Description of Artificial Sequence: Synthetic coding sequence
  source 1..666: mol_type = other DNA
atgtggtgggtgccccccagcccctacggctgcctgccctgcgccctgcccggcgacgccggcgagaagggcgacaagggcgcccccggcagacccggcagagtgggccccaccggcgagaagggcgagaagggcgacagcggcgacatcggcccccccggccccaacggcgagcccggcctgccctgcgagtgcagccagctgagaaaggccatcggcgagatggacaaccaggtgagccagctgaccagcgagctgaagttcatcaagaacgccgtggccggcgtgagagagaccgagagcaagatctacctgctggtgaaggaggagaagagatacgccgacgcccagctgagctgccagggcagaggcggcaccctgagcatgcccaaggacgaggccgccaacggcctgatggccgcctacctggcccaggccggcctggccagagtgttcatcggcatcaacgacctggagaaggagggcgccttcgtgtacagcgaccacagccccatgagaaccttcaacaagtggagaagcggcgagcccaacaacgcctacgacgaggaggactgcgtggagatggtggccagcggcggctggaacgacgtggcctgccacaccaccatgtacttcatgtgcgagttcgacaaggagaacatgtag

SEQ ID NO: 77307 - DNA, 594 bp, synthetic construct
  misc_feature 1..594: note = Description of Artificial Sequence: Synthetic coding sequence
  source 1..594: mol_type = other DNA
atgtggtgggtgccccccagcccctacggctgcctgccctgcgccctgcccggcgagaagggcgacagcggcgacatcggcccccccggccccaacggcgagcccggcctgccctgcgagtgcagccagctgagaaaggccatcggcgagatggacaaccaggtgagccagctgaccagcgagctgaagttcatcaagaacgccgtggccggcgtgagagagaccgagagcaagatctacctgctggtgaaggaggagaagagatacgccgacgcccagctgagctgccagggcagaggcggcaccctgagcatgcccaaggacgaggccgccaacggcctgatggccgcctacctggcccaggccggcctggccagagtgttcatcggcatcaacgacctggagaaggagggcgccttcgtgtacagcgaccacagccccatgagaaccttcaacaagtggagaagcggcgagcccaacaacgcctacgacgaggaggactgcgtggagatggtggccagcggcggctggaacgacgtggcctgccacaccaccatgtacttcatgtgcgagttcgacaaggagaacatgtag

SEQ ID NO: 77308 - DNA, 2229 bp, synthetic construct
  misc_feature 1..2229: note = Description of Artificial Sequence: Synthetic coding sequence
  source 1..2229: mol_type = other DNA
atgaaggacgacttcgccgaggaggaggaggtgcagagcttcggctacaagagattcggcatccaggagggcacccagtgcaccaagtgcaagaacaactgggccctgaagttcagcatcatcctgctgtacatcctgtgcgccctgctgaccatcaccgtggccatcctgggctacaaggtggtggagaagatggacaacgtgaccggcggcatggagaccagcagacagacctacgacgacaagctgaccgccgtggagagcgacctgaagaagctgggcgaccagaccggcaagaaggccatcagcaccaacagcgagctgagcaccttcagaagcgacatcctggacctgagacagcagctgagagagatcaccgagaagaccagcaagaacaaggacaccctggagaagctgcaggccagcggcgacgccctggtggacagacagagccagctgaaggagaccctggagaacaacagcttcctgatcaccaccgtgaacaagaccctgcaggcctacaacggctacgtgaccaacctgcagcaggacaccagcgtgctgcagggcaacctgcagaaccagatgtacagccacaacgtggtgatcatgaacctgaacaacctgaacctgacccaggtgcagcagagaaacctgatcaccaacctgcagagaagcgtggacgacaccagccaggccatccagagaatcaagaacgacttccagaacctgcagcaggtgttcctgcaggccaagaaggacaccgactggctgaaggagaaggtgcagagcctgcagaccctggccgccaacaacagcgccctggccaaggccaacaacgacaccctggaggacatgaacagccagctgaacagcttcaccggccagatggagaacatcaccaccatcagccaggccaacgagcagaacctgaaggacctgcaggacctgcacaaggacgccgagaacagaaccgccatcaagttcaaccagctggaggagagattccagctgttcgagaccgacatcgtgaacatcatcagcaacatcagctacaccgcccaccacctgagaaccctgaccagcaacctgaacgaggtgagaaccacctgcaccgacaccctgaccaagcacaccgacgacctgaccagcctgaacaacaccctggccaacatcagactggacagcgtgagcctgagaatgcagcaggacctgatgagaagcagactggacaccgaggtggccaacctgagcgtgatcatggaggagatgaagctggtggacagcaagcacggccagctgatcaagaacttcaccatcctgcagggcccccccggccccagaggccccagaggcgacagaggcagccagggcccccccggccccaccggcaacaagggccagaagggcgagaagggcgagcccggcccccccggccccgccggcgagagaggccccatcggccccgccggcccccccggcgagagaggcggcaagggcagcaagggcagccagggccccaagggcagcagaggcagccccggcaagcccggcccccagggcagcagcggcgaccccggcccccccggcccccccggcaaggagggcctgcccggcccccagggcccccccggcttccagggcctgcagggcaccgtgggcgagcccggcgtgcccggccccagaggcctgcccggcctgcccggcgtgcccggcatgcccggccccaagggcccccccggcccccccggccccagcggcgccgtggtgcccctggccctgcagaacgagcccacccccgcccccgaggacaacggctgccccccccactggaagaacttcaccgacaagtgctactacttcagcgtggagaaggagatcttcgaggacgccaagctgttctgcgaggacaagagcagccacctggtgttcatcaacaccagagaggagcagcagtggatcaagaagcagatggtgggcagagagagccactggatcggcctgaccgacagcgagagagagaacgagtggaagtggctggacggcaccagccccgactacaagaactggaaggccggccagcccgacaactggggccacggccacggccccggcgaggactgcgccggcctgatctacgccggccagtggaacgacttccagtgcgaggacgtgaacaacttcatctgcgagaaggacagagagaccgtgctgagcagcgccctgtag

SEQ ID NO: 77309 - DNA, 2919 bp, synthetic construct
  misc_feature 1..2919: note = Description of Artificial Sequence: Synthetic coding sequence
  source 1..2919: mol_type = other DNA
atgggccccggcgtgctgctgctgctgctggtggccaccgcctggcacggccagggcatccccgtgatcgagcccagcgtgcccgagctggtggtgaagcccggcgccaccgtgaccctgagatgcgtgggcaacggcagcgtggagtgggacggcccccccagcccccactggaccctgtacagcgacggcagcagcagcatcctgagcaccaacaacgccaccttccagaacaccggcacctacagatgcaccgagcccggcgaccccctgggcggcagcgccgccatccacctgtacgtgaaggaccccgccagaccctggaacgtgctggcccaggaggtggtggtgttcgaggaccaggacgccctgctgccctgcctgctgaccgaccccgtgctggaggccggcgtgagcctggtgagagtgagaggcagacccctgatgagacacaccaactacagcttcagcccctggcacggcttcaccatccacagagccaagttcatccagagccaggactaccagtgcagcgccctgatgggcggcagaaaggtgatgagcatcagcatcagactgaaggtgcagaaggtgatccccggcccccccgccctgaccctggtgcccgccgagctggtgagaatcagaggcgaggccgcccagatcgtgtgcagcgccagcagcgtggacgtgaacttcgacgtgttcctgcagcacaacaacaccaagctggccatcccccagcagagcgacttccacaacaacagataccagaaggtgctgaccctgaacctggaccaggtggacttccagcacgccggcaactacagctgcgtggccagcaacgtgcagggcaagcacagcaccagcatgttcttcagagtggtggagagcgcctacctgaacctgagcagcgagcagaacctgatccaggaggtgaccgtgggcgagggcctgaacctgaaggtgatggtggaggcctaccccggcctgcagggcttcaactggacctacctgggccccttcagcgaccaccagcccgagcccaagctggccaacgccaccaccaaggacacctacagacacaccttcaccctgagcctgcccagactgaagcccagcgaggccggcagatacagcttcctggccagaaaccccggcggctggagagccctgaccttcgagctgaccctgagatacccccccgaggtgagcgtgatctggaccttcatcaacggcagcggcaccctgctgtgcgccgccagcggctacccccagcccaacgtgacctggctgcagtgcagcggccacaccgacagatgcgacgaggcccaggtgctgcaggtgtgggacgacccctaccccgaggtgctgagccaggagcccttccacaaggtgaccgtgcagagcctgctgaccgtggagaccctggagcacaaccagacctacgagtgcagagcccacaacagcgtgggcagcggcagctgggccttcatccccatcagcgccggcgcccacacccacccccccgacgagttcctgttcacccccgtggtggtggcctgcatgagcatcatggccctgctgctgctgctgctgctgctgctgctgtacaagtacaagcagaagcccaagtaccaggtgagatggaagatcatcgagagctacgagggcaacagctacaccttcatcgaccccacccagctgccctacaacgagaagtgggagttccccagaaacaacctgcagttcggcaagaccctgggcgccggcgccttcggcaaggtggtggaggccaccgccttcggcctgggcaaggaggacgccgtgctgaaggtggccgtgaagatgctgaagagcaccgcccacgccgacgagaaggaggccctgatgagcgagctgaagatcatgagccacctgggccagcacgagaacatcgtgaacctgctgggcgcctgcacccacggcggccccgtgctggtgatcaccgagtactgctgctacggcgacctgctgaacttcctgagaagaaaggccgaggccatgctgggccccagcctgagccccggccaggaccccgagggcggcgtggactacaagaacatccacctggagaagaagtacgtgagaagagacagcggcttcagcagccagggcgtggacacctacgtggagatgagacccgtgagcaccagcagcaacgacagcttcagcgagcaggacctggacaaggaggacggcagacccctggagctgagagacctgctgcacttcagcagccaggtggcccagggcatggccttcctggccagcaagaactgcatccacagagacgtggccgccagaaacgtgctgctgaccaacggccacgtggccaagatcggcgacttcggcctggccagagacatcatgaacgacagcaactacatcgtgaagggcaacgccagactgcccgtgaagtggatggcccccgagagcatcttcgactgcgtgtacaccgtgcagagcgacgtgtggagctacggcatcctgctgtgggagatcttcagcctgggcctgaacccctaccccggcatcctggtgaacagcaagttctacaagctggtgaaggacggctaccagatggcccagcccgccttcgcccccaagaacatctacagcatcatgcaggcctgctgggccctggagcccacccacagacccaccttccagcagatctgcagcttcctgcaggagcaggcccaggaggacagaagagagagagactacaccaacctgcccagcagcagcagaagcggcggcagcggcagcagcagcagcgagctggaggaggagagcagcagcgagcacctgacctgctgcgagcagggcgacatcgcccagcccctgctgcagcccaacaactaccagttctgctag

SEQ ID NO: 77310 - DNA, 1506 bp, synthetic construct
  misc_feature 1..1506: note = Description of Artificial Sequence: Synthetic coding sequence
  source 1..1506: mol_type = other DNA
atgagacacaccaactacagcttcagcccctggcacggcttcaccatccacagagccaagttcatccagagccaggactaccagtgcagcgccctgatgggcggcagaaaggtgatgagcatcagcatcagactgaaggtgcagaaggtgatccccggcccccccgccctgaccctggtgcccgccgagctggtgagaatcagaggcgaggccgcccagatcgtgtgcagcgccagcagcgtggacgtgaacttcgacgtgttcctgcagcacaacaacaccaagctggccatcccccagcagagcgacttccacaacaacagataccagaaggtgctgaccctgaacctggaccaggtggacttccagcacgccggcaactacagctgcgtggccagcaacgtgcagggcaagcacagcaccagcatgttcttcagagtggtggagagcgcctacctgaacctgagcagcgagcagaacctgatccaggaggtgaccgtgggcgagggcctgaacctgaaggtgatggtggaggcctaccccggcctgcagggcttcaactggacctacctgggccccttcagcgaccaccagcccgagcccaagctggccaacgccaccaccaaggacacctacagacacaccttcaccctgagcctgcccagactgaagcccagcgaggccggcagatacagcttcctggccagaaaccccggcggctggagagccctgaccttcgagctgaccctgagatacccccccgaggtgagcgtgatctggaccttcatcaacggcagcggcaccctgctgtgcgccgccagcggctacccccagcccaacgtgacctggctgcagtgcagcggccacaccgacagatgcgacgaggcccaggtgctgcaggtgtgggacgacccctaccccgaggtgctgagccaggagcccttccacaaggtgaccgtgcagagcctgctgaccgtggagaccctggagcacaaccagacctacgagtgcagagcccacaacagcgtgggcagcggcagctgggccttcatccccatcagcgccggcgcccacacccacccccccgacgagttcctgttcacccccgtggtggtggcctgcatgagcatcatggccctgctgctgctgctgctgctgctgctgctgtacaagtacaagcagaagcccaagtaccaggtgagatggaagatcatcgagagctacgagggcaacagctacaccttcatcgaccccacccagctgccctacaacgagaagtgggagttccccagaaacaacctgcagttcggcaagaccctgggcgccggcgccttcggcaaggtggtggaggccaccgccttcggcctgggcaaggaggacgccgtgctgaaggtggccgtgaagatgctgaagagcaccgcccacgccgacgagaaggaggccagcggcctgtaccagagcgccgagcagcagcagaagagatggcagagacagcagcagcagtag

SEQ ID NO: 77311 - DNA, 2016 bp, synthetic construct
  misc_feature 1..2016: note = Description of Artificial Sequence: Synthetic coding sequence
  source 1..2016: mol_type = other DNA
atgggccccggcgtgctgctgctgctgctggtggccaccgcctggcacggccagggcatccccgtgatcgagcccagcgtgcccgagctggtggtgaagcccggcgccaccgtgaccctgagatgcgtgggcaacggcagcgtggagtgggacggcccccccagcccccactggaccctgtacagcgacggcagcagcagcatcctgagcaccaacaacgccaccttccagaacaccggcacctacagatgcaccgagcccggcgaccccctgggcggcagcgccgccatccacctgtacgtgaaggaccccgccagaccctggaacgtgctggcccaggaggtggtggtgttcgaggaccaggacgccctgctgccctgcctgctgaccgaccccgtgctggaggccggcgtgagcctggtgagagtgagaggcagacccctgatgagacacaccaactacagcttcagcccctggcacggcttcaccatccacagagccaagttcatccagagccaggactaccagtgcagcgccctgatgggcggcagaaaggtgatgagcatcagcatcagactgaaggtgcagaaggtgatccccggcccccccgccctgaccctggtgcccgccgagctggtgagaatcagaggcgaggccgcccagatcgtgtgcagcgccagcagcgtggacgtgaacttcgacgtgttcctgcagcacaacaacaccaagctggccatcccccagcagagcgacttccacaacaacagataccagaaggtgctgaccctgaacctggaccaggtggacttccagcacgccggcaactacagctgcgtggccagcaacgtgcagggcaagcacagcaccagcatgttcttcagagtggtggagagcgcctacctgaacctgagcagcgagcagaacctgatccaggaggtgaccgtgggcgagggcctgaacctgaaggtgatggtggaggcctaccccggcctgcagggcttcaactggacctacctgggccccttcagcgaccaccagcccgagcccaagctggccaacgccaccaccaaggacacctacagacacaccttcaccctgagcctgcccagactgaagcccagcgaggccggcagatacagcttcctggccagaaaccccggcggctggagagccctgaccttcgagctgaccctgagatacccccccgaggtgagcgtgatctggaccttcatcaacggcagcggcaccctgctgtgcgccgccagcggctacccccagcccaacgtgacctggctgcagtgcagcggccacaccgacagatgcgacgaggcccaggtgctgcaggtgtgggacgacccctaccccgaggtgctgagccaggagcccttccacaaggtgaccgtgcagagcctgctgaccgtggagaccctggagcacaaccagacctacgagtgcagagcccacaacagcgtgggcagcggcagctgggccttcatccccatcagcgccggcgcccacacccacccccccgacgagttcctgttcacccccgtggtggtggcctgcatgagcatcatggccctgctgctgctgctgctgctgctgctgctgtacaagtacaagcagaagcccaagtaccaggtgagatggaagatcatcgagagctacgagggcaacagctacaccttcatcgaccccacccagctgccctacaacgagaagtgggagttccccagaaacaacctgcagttcggcaagaccctgggcgccggcgccttcggcaaggtggtggaggccaccgccttcggcctgggcaaggaggacgccgtgctgaaggtggccgtgaagatgctgaagagcaccgcccacgccgacgagaaggaggccctgatgagcgagctgaagatcatgagccacctgggccagcacgagaacatcgtgaacctgctgggcgcctgcacccacggcggcaccgtggccagccccgccagagtgtggacccccatgtggagatag

SEQ ID NO: 77312 - DNA, 921 bp, synthetic construct
  misc_feature 1..921: note = Description of Artificial Sequence: Synthetic coding sequence
  source 1..921: mol_type = other DNA
atgggccccggcgtgctgctgctgctgctggtggccaccgcctggcacggccagggcatccccgtgatcgagcccagcgtgcccgagctggtggtgaagcccggcgccaccgtgaccctgagatgcgtgggcaacggcagcgtggagtgggacggcccccccagcccccactggaccctgtacagcgacggcagcagcagcatcctgagcaccaacaacgccaccttccagaacaccggcacctacagatgcaccgagcccggcgaccccctgggcggcagcgccgccatccacctgtacgtgaaggaccccgccagaccctggaacgtgctggcccaggaggtggtggtgttcgaggaccaggacgccctgctgccctgcctgctgaccgaccccgtgctggaggccggcgtgagcctggtgagagtgagaggcagacccctgatgagacacaccaactacagcttcagcccctggcacggcttcaccatccacagagccaagttcatccagagccaggactaccagtgcagcgccctgatgggcggcagaaaggtgatgagcatcagcatcagactgaaggtgcagaaggtgatccccggcccccccgccctgaccctggtgcccgccgagctggtgagaatcagaggcgaggccgcccagatcgtgtgcagcgccagcagcgtggacgtgaacttcgacgtgttcctgcagcacaacaacaccaagctggccatcccccagcagagcgacttccacaacaacagataccagaaggtgctgaccctgaacctggaccaggtggacttccagcacgccggcaactacagctgcgtggccagcaacgtgcagggcaagcacagcaccagcatgttcttcagagtggtgggcacccccagccccagcctgtgccccgcctag

SEQ ID NO: 77313 - DNA, 1134 bp, synthetic construct
  misc_feature 1..1134: note = Description of Artificial Sequence: Synthetic coding sequence
  source 1..1134: mol_type = other DNA
atgctgctgctggtgaccagcctgctgctgtgcgagctgccccaccccgccttcctgctgatccccgagaagagcgacctgagaaccgtggcccccgccagcagcctgaacgtgagattcgacagcagaaccatgaacctgagctgggactgccaggagaacaccaccttcagcaagtgcttcctgaccgacaagaagaacagagtggtggagcccagactgagcaacaacgagtgcagctgcaccttcagagagatctgcctgcacgagggcgtgaccttcgaggtgcacgtgaacaccagccagagaggcttccagcagaagctgctgtaccccaacagcggcagagagggcaccgccgcccagaacttcagctgcttcatctacaacgccgacctgatgaactgcacctgggccagaggccccaccgcccccagagacgtgcagtacttcctgtacatcagaaacagcaagagaagaagagagatcagatgcccctactacatccaggacagcggcacccacgtgggctgccacctggacaacctgagcggcctgaccagcagaaactacttcctggtgaacggcaccagcagagagatcggcatccagttcttcgacagcctgctggacaccaagaagatcgagagattcaacccccccagcaacgtgaccgtgagatgcaacaccacccactgcctggtgagatggaagcagcccagaacctaccagaagctgagctacctggacttccagtaccagctggacgtgcacagaaagaacacccagcccggcaccgagaacctgctgatcaacgtgagcggcgacctggagaacagatacaacttccccagcagcgagcccagagccaagcacagcgtgaagatcagagccgccgacgtgagaatcctgaactggagcagctggagcgaggccatcgagttcgaccacctgggcggcatccaccccagaggcagagagagactgcccagaagaggcctggacagagagggcaactacctgagacccagaggctgcagaaacggcatggacatcagcgccagcgccaccagaggcaactgcttcctggacgacgccgtgaacctgtacatcatcttctacgtgttcatctag

SEQ ID NO: 77314 - DNA, 702 bp, synthetic construct
  misc_feature 1..702: note = Description of Artificial Sequence: Synthetic coding sequence
  source 1..702: mol_type = other DNA
atgctgctgctggtgaccagcctgctgctgtgcgagctgccccaccccgccttcctgctgatccccgagaagagcgacctgagaaccgtggcccccgccagcagcctgaacgtgagattcgacagcagaaccatgaacctgagctgggactgccaggagaacaccaccttcagcaagtgcttcctgaccgacaagaagaacagagtggtggagcccagactgagcaacaacgagtgcagctgcaccttcagagagatctgcctgcacgagggcgtgaccttcgaggtgcacgtgaacaccagccagagaggcttccagcagaagctgctgtaccccaacagcggcagagagggcaccgccgcccagaacttcagctgcttcatctacaacgccgacctgatgaactgcacctgggccagaggccccaccgcccccagagacgtgcagtacttcctgtacatcagaaacagcaagagaagaagagagatcagatgcccctactacatccaggacagcggcacccacgtgggctgccacctggacaacctgagcggcctgaccagcagaaactacttcctggtgaacggcaccagcagagagatcggcatccagttcttcgacagcctgctggacaccaagaagatcggcagcctgggctacagcggctgcagcagacagttccacagaagcaagaccaactag

SEQ ID NO: 77315 - DNA, 1002 bp, synthetic construct
  misc_feature 1..1002: note = Description of Artificial Sequence: Synthetic coding sequence
  source 1..1002: mol_type = other DNA
atgctgctgctggtgaccagcctgctgctgtgcgagctgccccaccccgccttcctgctgatccccgagaagagcgacctgagaaccgtggcccccgccagcagcctgaacgtgagattcgacagcagaaccatgaacctgagctgggactgccaggagaacaccaccttcagcaagtgcttcctgaccgacaagaagaacagagtggtggagcccagactgagcaacaacgagtgcagctgcaccttcagagagatctgcctgcacgagggcgtgaccttcgaggtgcacgtgaacaccagccagagaggcttccagcagaagctgctgtaccccaacagcggcagagagggcaccgccgcccagaacttcagctgcttcatctacaacgccgacctgatgaactgcacctgggccagaggccccaccgcccccagagacgtgcagtacttcctgtacatcagaaacagcaagagaagaagagagatcagatgcccctactacatccaggacagcggcacccacgtgggctgccacctggacaacctgagcggcctgaccagcagaaactacttcctggtgaacggcaccagcagagagatcggcatccagttcttcgacagcctgctggacaccaagaagatcgagagattcaacccccccagcaacgtgaccgtgagatgcaacaccacccactgcctggtgagatggaagcagcccagaacctaccagaagctgagctacctggacttccagtaccagctggacgtgcacagaaagaacacccagcccggcaccgagaacctgctgatcaacgtgagcggcgacctggagaacagatacaacttccccagcagcgagcccagagccaagcacagcgtgaagatcagagccgccgacgtgagaatcctgaactggagcagctggagcgaggccatcgagttcggcagcctgggctacagcggctgcagcagacagttccacagaagcaagaccaactag

SEQ ID NO: 77316 - DNA, 1002 bp, synthetic construct; identical to SEQ ID NO: 77315
  misc_feature 1..1002: note = Description of Artificial Sequence: Synthetic coding sequence
  source 1..1002: mol_type = other DNA

SEQ ID NO: 77317 - DNA, 861 bp, synthetic construct
  misc_feature 1..861: note = Description of Artificial Sequence: Synthetic coding sequence
  source 1..861: mol_type = other DNA
atgctgctgctggtgaccagcctgctgctgtgcgagctgccccaccccgccttcctgctgatccccgagaagagcgacctgagaaccgtggcccccgccagcagcctgaacgtgagattcgacagcagaaccatgaacctgagctgggactgccaggagaacaccaccttcagcaagtgcttcctgaccgacaagaagaacagagtggtggagcccagactgagcaacaacgagtgcagctgcaccttcagagagatctgcctgcacgagggcgtgaccttcgaggtgcacgtgaacaccagccagagaggcttccagcagaagctgctgtaccccaacagcggcagagagggcaccgccgcccagaacttcagctgcttcatctacaacgccgacctgatgaactgcacctgggccagaggccccaccgcccccagagacgtgcagtacttcctgtacatcagaaacagcaagagaagaagagagatcagatgcccctactacatccaggacagcggcacccacgtgggctgccacctggacaacctgagcggcctgaccagcagaaactacttcctggtgaacggcaccagcagagagatcggcatccagttcttcgacagcctgctggacaccaagaagatcgagagattcaacccccccagcaacgtgaccgtgagatgcaacaccacccactgcctggtgagatggaagcagcccagaacctaccagaagctgagctacctggacttccagtaccagctggacgtgcacagaaagaacacccagcccggcaccgagaacctgctggtggtgctgaccaccggcaccagcgccctgtgcaccttcatgtgcagctag

SEQ ID NO: 77318 - DNA, 1233 bp, synthetic construct
  misc_feature 1..1233: note = Description of Artificial Sequence: Synthetic coding sequence
  source 1..1233: mol_type = other DNA
atgctgctgctggtgaccagcctgctgctgtgcgagctgccccaccccgccttcctgctgatccccgagaagagcgacctgagaaccgtggcccccgccagcagcctgaacgtgagattcgacagcagaaccatgaacctgagctgggactgccaggagaacaccaccttcagcaagtgcttcctgaccgacaagaagaacagagtggtggagcccagactgagcaacaacgagtgcagctgcaccttcagagagatctgcctgcacgagggcgtgaccttcgaggtgcacgtgaacaccagccagagaggcttccagcagaagctgctgtaccccaacagcggcagagagggcaccgccgcccagaacttcagctgcttcatctacaacgccgacctgatgaactgcacctgggccagaggccccaccgcccccagagacgtgcagtacttcctgtacatcagaaacagcaagagaagaagagagatcagatgcccctactacatccaggacagcggcacccacgtgggctgccacctggacaacctgagcggcctgaccagcagaaactacttcctggtgaacggcaccagcagagagatcggcatccagttcttcgacagcctgctggacaccaagaagatcgagagattcaacccccccagcaacgtgaccgtgagatgcaacaccacccactgcctggtgagatggaagcagcccagaacctaccagaagctgagctacctggacttccagtaccagctggacgtgcacagaaagaacacccagcccggcaccgagaacctgctgatcaacgtgagcggcgacctggagaacagatacaacttccccagcagcgagcccagagccaagcacagcgtgaagatcagagccgccgacgtgagaatcctgaactggagcagctggagcgaggccatcgagttcggcagcgacgacggcaacctgggcagcgtgtacatctacgtgctgctgatcgtgggcaccctggtgtgcggcatcgtgctgggcttcctgttcaagagattcctgagaatccagagactgttcccccccgtgccccagatcaaggacaagctgaacgacaaccacgaggtggaggacgagatgggcccccagagacaccacagatgcggctggaacctgtaccccacccccggccccagccccggcagcggcagcagccccagactgggcagcgagagcagcctgtag

SEQ ID NO: 77319 - DNA, 1203 bp, synthetic construct
  misc_feature 1..1203: note = Description of Artificial Sequence: Synthetic coding sequence
  source 1..1203: mol_type = other DNA
atgctgctgctggtgaccagcctgctgctgtgcgagctgccccaccccgccttcctgctgatccccgagaagagcgacctgagaaccgtggcccccgccagcagcctgaacgtgagattcgacagcagaaccatgaacctgagctgggactgccaggagaacaccaccttcagcaagtgcttcctgaccgacaagaagaacagagtggtggagcccagactgagcaacaacgagtgcagctgcaccttcagagagatctgcctgcacgagggcgtgaccttcgaggtgcacgtgaacaccagccagagaggcttccagcagaagctgctgtaccccaacagcggcagagagggcaccgccgcccagaacttcagctgcttcatctacaacgccgacctgatgaactgcacctgggccagaggccccaccgcccccagagacgtgcagtacttcctgtacatcagaaacagcaagagaagaagagagatcagatgcccctactacatccaggacagcggcacccacgtgggctgccacctggacaacctgagcggcctgaccagcagaaactacttcctggtgaacggcaccagcagagagatcggcatccagttcttcgacagcctgctggacaccaagaagatcgagagattcaacccccccagcaacgtgaccgtgagatgcaacaccacccactgcctggtgagatggaagcagcccagaacctaccagaagctgagctacctggacttccagtaccagctggacgtgcacagaaagaacacccagcccggcaccgagaacctgctgatcaacgtgagcggcgacctggagaacagatacaacttccccagcagcgagcccagagccaagcacagcgtgaagatcagagccgccgacgtgagaatcctgaactggagcagctggagcgaggccatcgagttcggcagcgacgacggcaacctgggcagcgtgtacatctacgtgctgctgatcgtgggcaccctggtgtgcggcatcgtgctgggcttcctgttcaagagattcctgagaatccagagactgttcccccccgtgccccagatcaaggacaagctgaacgacaaccacgaggtggaggacgagatcatctgggaggagttcacccccgaggagggcaagggctacagagaggaggtgctgaccgtgaaggagatcacctag

SEQ ID NO: 77320 - DNA, 1203 bp, synthetic construct; identical to SEQ ID NO: 77319
  misc_feature 1..1203: note = Description of Artificial Sequence: Synthetic coding sequence
  source 1..1203: mol_type = other DNA

SEQ ID NO: 77321 - DNA, 717 bp, synthetic construct
  misc_feature 1..717: note = Description of Artificial Sequence: Synthetic coding sequence
  source 1..717: mol_type = other DNA
atgctgctgctggtgaccagcctgctgctgtgcgagctgccccaccccgccttcctgctgatccccgagaagagcgacctgagaaccgtggcccccgccagcagcctgaacgtgagattcgacagcagaaccatgaacctgagctgggactgccaggagaacaccaccttcagcaagtgcttcctgaccgacaagaagaacagagtggtggagcccagactgagcaacaacgagtgcagctgcaccttcagagagatctgcctgcacgagggcgtgaccttcgaggtgcacgtgaacaccagccagagaggcttccagcagaagctgctgtaccccaacagcggcagagagggcaccgccgcccagaacttcagctgcttcatctacaacgccgacctgatgaactgcacctgggccagaggccccaccgcccccagagacgtgcagtacttcctgtacatcagaaacagcaagagaagaagagagatcagatgcccctactacatccaggacagcggcacccacgtgggctgccacctggacaacctgagcggcctgaccagcagaaactacttcctggtgaacggcaccagcagagagatcggcatccagttcttcgacagcctgctggacaccaagaagatcgagagattcaacccccccagcaacgtgaccgtgagatgcaacaccacccactgcctggtgagatggaagtag

SEQ ID NO: 77322 - DNA, 1305 bp, synthetic construct
  misc_feature 1..1305: note = Description of Artificial Sequence: Synthetic coding sequence
  source 1..1305: mol_type = other DNA
atgctgctgctggtgaccagcctgctgctgtgcgagctgccccaccccgccttcctgctgatccccgagaagagcgacctgagaaccgtggcccccgccagcagcctgaacgtgagattcgacagcagaaccatgaacctgagctgggactgccaggagaacaccaccttcagcaagtgcttcctgaccgacaagaagaacagagtggtggagcccagactgagcaacaacgagtgcagctgcaccttcagagagatctgcctgcacgagggcgtgaccttcgaggtgcacgtgaacaccagccagagaggcttccagcagaagctgctgtaccccaacagcggcagagagggcaccgccgcccagaacttcagctgcttcatctacaacgccgacctgatgaactgcacctgggccagaggccccaccgcccccagagacgtgcagtacttcctgtacatcagaaacagcaagagaagaagagagatcagatgcccctactacatccaggacagcggcacccacgtgggctgccacctggacaacctgagcggcctgaccagcagaaactacttcctggtgaacggcaccagcagagagatcggcatccagttcttcgacagcctgctggacaccaagaagatcgagagattcaacccccccagcaacgtgaccgtgagatgcaacaccacccactgcctggtgagatggaagcagcccagaacctaccagaagctgagctacctggacttccagtaccagctggacgtgcacagaaagaacacccagcccggcaccgagaacctgctgatcaacgtgagcggcgacctggagaacagatacaacttccccagcagcgagcccagagccaagcacagcgtgaagatcagagccgccgacgtgagaatcctgaactggagcagctggagcgaggccatcgagttcggcagccacagcgtgacccaggccggcgtgcagtggcacaacctgggcagcctgcagccccccagccccagactgaagagattcagctgcctgagactgcccggcagcgacgacggcaacctgggcagcgtgtacatctacgtgctgctgatcgtgggcaccctggtgtgcggcatcgtgctgggcttcctgttcaagagattcctgagaatccagagactgttcccccccgtgccccagatcaaggacaagctgaacgacaaccacgaggtggaggacgagatcatctgggaggagttcacccccgaggagggcaagggctacagagaggaggtgctgaccgtgaaggagatcacctag

SEQ ID NO: 77323 - DNA, 567 bp, synthetic construct
  misc_feature 1..567: note = Description of Artificial Sequence: Synthetic coding sequence
  source 1..567: mol_type = other DNA
atgctgctgctggtgaccagcctgctgctgtgcgagctgccccaccccgccttcctgctgatccccgagaagagcgacctgagaaccgtggcccccgccagcagcctgaacgtgagattcgacagcagaaccatgaacctgagctgggactgccaggagaacaccaccttcagcaagtgcttcctgaccgacaagaagaacagagtggtggagcccagactgagcaacaacgagtgcagctgcaccttcagagagatctgcctgcacgagggcgtgaccttcgaggtgcacgtgaacaccagccagagaggcttccagcagaagctgctgtaccccaacagcggcagagagggcaccgccgcccagaacttcagctgcttcatctacaacgccgacctgatgaactgcacctgggccagaggccccaccgcccccagagacgtgcagtacttcctgtacatcagaaacagcaagagaagaagagagatcagatgcccctactacatccaggacagcggcacccacgtgggctgccacctggacaacctgagcggcctgaccagctag

SEQ ID NO: 77324 - DNA, 1203 bp, synthetic construct; identical to SEQ ID NO: 77319
  misc_feature 1..1203: note = Description of Artificial Sequence: Synthetic coding sequence
  source 1..1203: mol_type = other DNA

SEQ ID NO: 77325 - DNA, 804 bp, synthetic construct
  misc_feature 1..804: note = Description of Artificial Sequence: Synthetic coding sequence
  source 1..804: mol_type = other DNA
atgaactgcacctgggccagaggccccaccgcccccagagacgtgcagtacttcctgtacatcagaaacagcaagagaagaagagagatcagatgcccctactacatccaggacagcggcacccacgtgggctgccacctggacaacctgagcggcctgaccagcagaaactacttcctggtgaacggcaccagcagagagatcggcatccagttcttcgacagcctgctggacaccaagaagatcgagagattcaacccccccagcaacgtgaccgtgagatgcaacaccacccactgcctggtgagatggaagcagcccagaacctaccagaagctgagctacctggacttccagtaccagctggacgtgcacagaaagaacacccagcccggcaccgagaacctgctgatcaacgtgagcggcgacctggagaacagatacaacttccccagcagcgagcccagagccaagcacagcgtgaagatcagagccgccgacgtgagaatcctgaactggagcagctggagcgaggccatcgagttcggcagcgacgacggcaacctgggcagcgtgtacatctacgtgctgctgatcgtgggcaccctggtgtgcggcatcgtgctgggcttcctgttcaagagattcctgagaatccagagactgttcccccccgtgccccagatcaaggacaagctgaacgacaaccacgaggtggaggacgagatcatctgggaggagttcacccccgaggagggcaagggctacagagaggaggtgctgaccgtgaaggagatcacctag

SEQ ID NO: 77326 - DNA, 2712 bp, synthetic construct
  misc_feature 1..2712: note = Description of Artificial Sequence: Synthetic coding sequence
  source 1..2712: mol_type = other DNA
atggtgctggcccagggcctgctgagcatggccctgctggccctgtgctgggagagaagcctggccggcgccgaggagaccatccccctgcagaccctgagatgctacaacgactacaccagccacatcacctgcagatgggccgacacccaggacgcccagagactggtgaacgtgaccctgatcagaagagtgaacgaggacctgctggagcccgtgagctgcgacctgagcgacgacatgccctggagcgcctgcccccaccccagatgcgtgcccagaagatgcgtgatcccctgccagagcttcgtggtgaccgacgtggactacttcagcttccagcccgacagacccctgggcaccagactgaccgtgaccctgacccagcacgtgcagccccccgagcccagagacctgcagatcagcaccgaccaggaccacttcctgctgacctggagcgtggccctgggcagcccccagagccactggctgagccccggcgacctggagttcgaggtggtgtacaagagactgcaggacagctgggaggacgccgccatcctgctgagcaacaccagccaggccaccctgggccccgagcacctgatgcccagcagcacctacgtggccagagtgagaaccagactggcccccggcagcagactgagcggcagacccagcaagtggagccccgaggtgtgctgggacagccagcccggcgacgaggcccagccccagaacctggagtgcttcttcgacggcgccgccgtgctgagctgcagctgggaggtgagaaaggaggtggccagcagcgtgagcttcggcctgttctacaagcccagccccgacgccggcagcgccgtgctgctgagagaggaggagtgcagccccgtgctgagagagggcctgggcagcctgcacaccagacaccactgccagatccccgtgcccgaccccgccacccacggccagtacatcgtgagcgtgcagcccagaagagccgagaagcacatcaagagcagcgtgaacatccagatggccccccccagcctgaacgtgaccaaggacggcgacagctacagcctgagatgggagaccatgaagatgagatacgagcacatcgaccacaccttcgagatccagtacagaaaggacaccgccacctggaaggacagcaagaccgagaccctgcagaacgcccacagcatggccctgcccgccctggagcccagcaccagatactgggccagagtgagagtgagaaccagcagaaccggctacaacggcatctggagcgagtggagcgaggccagaagctgggacaccgagagcgtgctgcccatgtgggtgctggccctgatcgtgatcttcctgaccatcgccgtgctgctggccctgagattctgcggcatctacggctacagactgagaagaaagtgggaggagaagatccccaaccccagcaagagccacctgttccagaacggcagcgccgagctgtggccccccggcagcatgagcgccttcaccagcggcagccccccccaccagggcccctggggcagcagattccccgagctggagggcgtgttccccgtgggcttcggcgacagcgaggtgagccccctgaccatcgaggaccccaagcacgtgtgcgacccccccagcggccccgacaccacccccgccgccagcgacctgcccaccgagcagccccccagcccccagcccggcccccccgccgccagccacacccccgagaagcaggccagcagcttcgacttcaacggcccctacctgggccccccccacagcagaagcctgcccgacatcctgggccagcccgagcccccccaggagggcggcagccagaagagccccccccccggcagcctggagtacctgtgcctgcccgccggcggccaggtgcagctggtgcccctggcccaggccatgggccccggccaggccgtggaggtggagagaagacccagccagggcgccgccggcagccccagcctggagagcggcggcggccccgccccccccgccctgggccccagagtgggcggccaggaccagaaggacagccccgtggccatccccatgagcagcggcgacaccgaggaccccggcgtggccagcggctacgtgagcagcgccgacctggtgttcacccccaacagcggcgccagcagcgtgagcctggtgcccagcctgggcctgcccagcgaccagacccccagcctgtgccccggcctggccagcggcccccccggcgcccccggccccgtgaagagcggcttcgagggctacgtggagctgccccccatcgagggcagaagccccagaagccccagaaacaaccccgtgccccccgaggccaagagccccgtgctgaaccccggcgagagacccgccgacgtgagccccaccagcccccagcccgagggcctgctggtgctgcagcaggtgggcgactactgcttcctgcccggcctgggccccggccccctgagcctgagaagcaagcccagcagccccggccccggccccgagatcaagaacctggaccaggccttccaggtgaagaagccccccggccaggccgtgccccaggtgcccgtgatccagctgttcaaggccctgaagcagcaggactacctgagcctgcccccctgggaggtgaacaagcccggcgaggtgtgctag

SEQ ID NO: 77327 - DNA, 2694 bp, synthetic construct
  misc_feature 1..2694: note = Description of Artificial Sequence: Synthetic coding sequence
  source 1..2694: mol_type = other DNA
atggtgctggcccagggcctgctgagcatggccctgctggccctgtgctgggagagaagcctggccggcgccgaggagaccatccccctgcagaccctgagatgctacaacgactacaccagccacatcacctgcagatgggccgacacccaggacgcccagagactggtgaacgtgaccctgatcagaagagtgaacgaggacctgctggagcccgtgagctgcgacctgagcgacgacatgccctggagcgcctgcccccaccccagatgcgtgcccagaagatgcgtgatcccctgccagagcttcgtggtgaccgacgtggactacttcagcttccagcccgacagacccctgggcaccagactgaccgtgaccctgacccagcacgtgcagccccccgagcccagagacctgcagatcagcaccgaccaggaccacttcctgctgacctggagcgtggccctgggcagcccccagagccactggctgagccccggcgacctggagttcgaggtggtgtacaagagactgcaggacagctgggaggacgccgccatcctgctgagcaacaccagccaggccaccctgggccccgagcacctgatgcccagcagcacctacgtggccagagtgagaaccagactggcccccggcagcagactgagcggcagacccagcaagtggagccccgaggtgtgctgggacagccagcccggcgacgaggcccagccccagaacctggagtgcttcttcgacggcgccgccgtgctgagctgcagctgggaggtgagaaaggaggtggccagcagcgtgagcttcggcctgttctacaagcccagccccgacgccggcgaggaggagtgcagccccgtgctgagagagggcctgggcagcctgcacaccagacaccactgccagatccccgtgcccgaccccgccacccacggccagtacatcgtgagcgtgcagcccagaagagccgagaagcacatcaagagcagcgtgaacatccagatggccccccccagcctgaacgtgaccaaggacggcgacagctacagcctgagatgggagaccatgaagatgagatacgagcacatcgaccacaccttcgagatccagtacagaaaggacaccgccacctggaaggacagcaagaccgagaccctgcagaacgcccacagcatggccctgcccgccctggagcccagcaccagatactgggccagagtgagagtgagaaccagcagaaccggctacaacggcatctggagcgagtggagcgaggccagaagctgggacaccgagagcgtgctgcccatgtgggtgctggccctgatcgtgatcttcctgaccatcgccgtgctgctggccctgagattctgcggcatctacggctacagactgagaagaaagtgggaggagaagatccccaaccccagcaagagccacctgttccagaacggcagcgccgagctgtggccccccggcagcatgagcgccttcaccagcggcagccccccccaccagggcccctggggcagcagattccccgagctggagggcgtgttccccgtgggcttcggcgacagcgaggtgagccccctgaccatcgaggaccccaagcacgtgtgcgacccccccagcggccccgacaccacccccgccgccagcgacctgcccaccgagcagccccccagcccccagcccggcccccccgccgccagccacacccccgagaagcaggccagcagcttcgacttcaacggcccctacctgggccccccccacagcagaagcctgcccgacatcctgggccagcccgagcccccccaggagggcggcagccagaagagccccccccccggcagcctggagtacctgtgcctgcccgccggcggccaggtgcagctggtgcccctggcccaggccatgggccccggccaggccgtggaggtggagagaagacccagccagggcgccgccggcagccccagcctggagagcggcggcggccccgccccccccgccctgggccccagagtgggcggccaggaccagaaggacagccccgtggccatccccatgagcagcggcgacaccgaggaccccggcgtggccagcggctacgtgagcagcgccgacctggtgttcacccccaacagcggcgccagcagcgtgagcctggtgcccagcctgggcctgcccagcgaccagacccccagcctgtgccccggcctggccagcggcccccccggcgcccccggccccgtgaagagcggcttcgagggctacgtggagctgccccccatcgagggcagaagccccagaagccccagaaacaaccccgtgccccccgaggccaagagccccgtgctgaaccccggcgagagacccgccgacgtgagccccaccagcccccagcccgagggcctgctggtgctgcagcaggtgggcgactactgcttcctgcccggcctgggccccggccccctgagcctgagaagcaagcccagcagccccggccccggccccgagatcaagaacctggaccaggccttccaggtgaagaagccccccggccaggccgtgccccaggtgcccgtgatccagctgttcaaggccctgaagcagcaggactacctgagcctgcccccctgggaggtgaacaagcccggcgaggtgtgctag

SEQ ID NO: 77328 - DNA, 690 bp, synthetic construct
  misc_feature 1..690: note = Description of Artificial Sequence: Synthetic coding sequence
  source 1..690: mol_type = other DNA
atgccctggagcgcctgcccccaccccagatgcgtgcccagaagatgcgtgatcccctgccagagcttcgtggtgaccgacgtggactacttcagcttccagcccgacagacccctgggcaccagactgaccgtgaccctgacccagcacgtgcagccccccgagcccagagacctgcagatcagcaccgaccaggaccacttcctgctgacctggagcgtggccctgggcagcccccagagccactggctgagccccggcgacctggagttcgaggtggtgtacaagagactgcaggacagctgggaggacgccgccatcctgctgagcaacaccagccaggccaccctgggccccgagcacctgatgcccagcagcacctacgtggccagagtgagaaccagactggcccccggcagcagactgagcggcagacccagcaagtggagccccgaggtgtgctgggacagccagcccggcgacgaggcccagccccagaacctggagtgcttcttcgacggcgccgccgtgctgagctgcagctgggaggtgagaaaggaggtggccagcagcgtgagcttcggcctgttctacaagcccagccccgacgccggcgaggaggagtgcagccccgtgctgagagagggcctgggcagcctgcacaccagacaccactgccagatcccctag

SEQ ID NO: 77329 - DNA, 2535 bp, synthetic construct
  misc_feature 1..2535: note = Description of Artificial Sequence: Synthetic coding sequence
  source 1..2535: mol_type = other DNA
atgggcaagctgagaccctggagagacctgctggagcccgtgagctgcgacctgagcgacgacatgccctggagcgcctgcccccaccccagatgcgtgcccagaagatgcgtgatcccctgccagagcttcgtggtgaccgacgtggactacttcagcttccagcccgacagacccctgggcaccagactgaccgtgaccctgacccagcacgtgcagccccccgagcccagagacctgcagatcagcaccgaccaggaccacttcctgctgacctggagcgtggccctgggcagcccccagagccactggctgagccccggcgacctggagttcgaggtggtgtacaagagactgcaggacagctgggaggacgccgccatcctgctgagcaacaccagccaggccaccctgggccccgagcacctgatgcccagcagcacctacgtggccagagtgagaaccagactggcccccggcagcagactgagcggcagacccagcaagtggagccccgaggtgtgctgggacagccagcccggcgacgaggcccagccccagaacctggagtgcttcttcgacggcgccgccgtgctgagctgcagctgggaggtgagaaaggaggtggccagcagcgtgagcttcggcctgttctacaagcccagccccgacgccggcagcgccgtgctgctgagagaggaggagtgcagccccgtgctgagagagggcctgggcagcctgcacaccagacaccactgccagatccccgtgcccgaccccgccacccacggccagtacatcgtgagcgtgcagcccagaagagccgagaagcacatcaagagcagcgtgaacatccagatggccccccccagcctgaacgtgaccaaggacggcgacagctacagcctgagatgggagaccatgaagatgagatacgagcacatcgaccacaccttcgagatccagtacagaaaggacaccgccacctggaaggacagcaagaccgagaccctgcagaacgcccacagcatggccctgcccgccctggagcccagcaccagatactgggccagagtgagagtgagaaccagcagaaccggctacaacggcatctggagcgagtggagcgaggccagaagctgggacaccgagagcgtgctgcccatgtgggtgctggccctgatcgtgatcttcctgaccatcgccgtgctgctggccctgagattctgcggcatctacggctacagactgagaagaaagtgggaggagaagatccccaaccccagcaagagccacctgttccagaacggcagcgccgagctgtggccccccggcagcatgagcgccttcaccagcggcagccccccccaccagggcccctggggcagcagattccccgagctggagggcgtgttccccgtgggcttcggcgacagcgaggtgagccccctgaccatcgaggaccccaagcacgtgtgcgacccccccagcggccccgacaccacccccgccgccagcgacctgcccaccgagcagccccccagcccccagcccggcccccccgccgccagccacacccccgagaagcaggccagcagcttcgacttcaacggcccctacctgggccccccccacagcagaagcctgcccgacatcctgggccagcccgagcccccccaggagggcggcagccagaagagccccccccccggcagcctggagtacctgtgcctgcccgccggcggccaggtgcagctggtgcccctggcccaggccatgggccccggccaggccgtggaggtggagagaagacccagccagggcgccgccggcagccccagcctggagagcggcggcggccccgccccccccgccctgggccccagagtgggcggccaggaccagaaggacagccccgtggccatccccatgagcagcggcgacaccgaggaccccggcgtggccagcggctacgtgagcagcgccgacctggtgttcacccccaacagcggcgccagcagcgtgagcctggtgcccagcctgggcctgcccagcgaccagacccccagcctgtgccccggcctggccagcggcccccccggcgcccccggccccgtgaagagcggcttcgagggctacgtggagctgccccccatcgagggcagaagccccagaagccccagaaacaaccccgtgccccccgaggccaagagccccgtgctgaaccccggcgagagacccgccgacgtgagccccaccagcccccagcccgagggcctgctggtgctgcagcaggtgggcgactactgcttcctgcccggcctgggccccggccccctgagcctgagaagcaagcccagcagccccggccccggccccgagatcaagaacctggaccaggccttccaggtgaagaagccccccggccaggccgtgccccaggtgcccgtgatccagctgttcaaggccctgaagcagcaggactacctgagcctgcccccctgggaggtgaacaagcccggcgaggtgtgctag

SEQ ID NO: 77330 - DNA, 2670 bp, synthetic construct
  misc_feature 1..2670: note = Description of Artificial Sequence: Synthetic coding sequence
  source 1..2670: mol_type = other DNA
atggtgctggcccagggcctgctgagcatggccctgctggccctgtgctgggagagaagcctggccggcgccgaggagaccatccccctgcagaccctgagatgctacaacgactacaccagccacatcacctgcagatgggccgacacccaggacgcccagagactggtgaacgtgaccctgatcagaagagtgaacgaggacctgctggagcccgtgagctgcgacctgagcgacgacatgccctggagcgcctgcccccaccccagatgcgtgcccagaagatgcgtgatcccctgccagagcttcgtggtgaccgacgtggactacttcagcttccagcccgacagacccctgggcaccagactgaccgtgaccctgacccagcacgtgcagccccccgagcccagagacctgcagatcagcaccgaccaggaccacttcctgctgacctggagcgtggccctgggcagcccccagagccactggctgagccccggcgacctggagttcgaggtggtgtacaagagactgcaggacagctgggaggacgccgccatcctgctgagcaacaccagccaggccaccctgggccccgagcacctgatgcccagcagcacctacgtggccagagtgagaaccagactggcccccggcagcagactgagcggcagacccagcaagtggagccccgaggtgtgctgggacagccagcccggcgacgaggcccagccccagaacctggagtgcttcttcgacggcgccgccgtgctgagctgcagctgggaggtgagaaaggaggtggccagcagcgtgagcttcggcctgttctacaagcccagccccgacgccggcgaggaggagtgcagccccgtgctgagagagggcctgggcagcctgcacaccagacaccactgccagatccccgtgcccgaccccgccacccacggccagtacatcgtgagcgtgcagcccagaagagccgagaagcacatcaagagcagcgtgaacatccagatggccccccccagcctgaacgtgaccaaggacggcgacagctacagcctgagatgggagaccatgaagatgagatacgagcacatcgaccacaccttcgagatccagtacagaaaggacaccgccacctggaaggacagcaagaccgagaccctgcagaacgcccacagcatggccctgcccgccctggagcccagcaccagatactgggccagagtgagagtgagaaccagcagaaccggctacaacggcatctggagcgagtggagcgaggccagaagctgggacaccgagagcgtgctgcccatgtgggtgctggccctgatcgtgatcttcctgaccatcgccgtgctgctggccctgagattctgcggcatctacggctacagactgagaagaaagtgggaggagaagatccccaaccccagcaagagccacctgttccagaacggcagcgccgagctgtggccccccggcagcatgagcgccttcaccagcggcagccccccccaccagggcccctggggcagcagattccccgagctggagggcgtgttccccgtgggcttcggcgacagcgaggtgagccccctgaccatcgaggaccccaagcacgtgtgcgacccccccagcggccccgacaccacccccgccgccagcgacctgcccaccgagcagccccccagcccccagcccggcccccccgccgccagccacacccccgagaagcaggccagcagcttcgacttcaacggcccctacctgggccccccccacagcagaagcctgcccgacatcctgggccagcccgagcccccccaggagggcggcagccagaagagccccccccccggcagcctggagtacctgtgcctgcccgccggcggccaggtgcagctggtgcccctggcccaggccatgggccccggccaggccgtggaggtggagagaagacccagccagggcgccgccggcagccccagcctggagagcggcggcggccccgccccccccgccctgggccccagagtgggcggccaggaccagaaggacagccccgtggccatccccatgagcagcggcgacaccgaggaccccggcgtggccagcggctacgtgagcagcgccgacctggtgttcacccccaacagcggcgccagcagcgtgagcctggtgcccagcctgggcctgcccagcgaccagacccccagcctgtgccccggcctggccagcggcccccccggcgcccccggccccgtgaagagcggcttcgagggctacgtggagctgccccccatcgagggcagaagccccagaagccccagaaacaaccccgtgccccccgaggccaagagccccgtgctgaaccccggcgagagacccgccgacgtgagccccaccagcccccagcccgagggcctgctggtgctgcagcaggtgggcgactactgcttcctgcccggcctgggccccggccccctgagcctgagaagcaagcccagcagccccggccccggccccgagatcaagaacctggaccaggccttccaggtgaagaagccccccggccaggccgtgccccaggtgcccgtgatccagctgttcaaggccctggtggtgagcgtgatgagcgtgggcccccccgtgccctag

SEQ ID NO: 77331 - DNA, 2352 bp, synthetic construct
  misc_feature 1..2352: note = Description of Artificial Sequence: Synthetic coding sequence
  source 1..2352: mol_type = other DNA
atggccagactgggcaactgcagcctgacctgggccgccctgatcatcctgctgctgcccggcagcctggaggagtgcggccacatcagcgtgagcgcccccatcgtgcacctgggcgaccccatcaccgccagctgcatcatcaagcagaactgcagccacctggaccccgagccccagatcctgtggagactgggcgccgagctgcagcccggcggcagacagcagagactgagcgacggcacccaggagagcatcatcaccctgccccacctgaaccacacccaggccttcctgagctgctgcctgaactggggcaacagcctgcagatcctggaccaggtggagctgagagccggctacccccccgccatcccccacaacctgagctgcctgatgaacctgaccaccagcagcctgatctgccagtgggagcccggccccgagacccacctgcccaccagcttcaccctgaagagcttcaagagcagaggcaactgccagacccagggcgacagcatcctggactgcgtgcccaaggacggccagagccactgctgcatccccagaaagcacctgctgctgtaccagaacatgggcatctgggtgcaggccgagaacgccctgggcaccagcatgagcccccagctgtgcctggaccccatggacgtggtgaagctggagccccccatgctgagaaccatggaccccagccccgaggccgcccccccccaggccggctgcctgcagctgtgctgggagccctggcagcccggcctgcacatcaaccagaagtgcgagctgagacacaagccccagagaggcgaggccagctgggccctggtgggccccctgcccctggaggccctgcagtacgagctgtgcggcctgctgcccgccaccgcctacaccctgcagatcagatgcatcagatggcccctgcccggccactggagcgactggagccccagcctggagctgagaaccaccgagagagcccccaccgtgagactggacacctggtggagacagagacagctggaccccagaaccgtgcagctgttctggaagcccgtgcccctggaggaggacagcggcagaatccagggctacgtggtgagctggagacccagcggccaggccggcgccatcctgcccctgtgcaacaccaccgagctgagctgcaccttccacctgcccagcgaggcccaggaggtggccctggtggcctacaacagcgccggcaccagcagacccacccccgtggtgttcagcgagagcagaggccccgccctgaccagactgcacgccatggccagagacccccacagcctgtgggtgggctgggagccccccaacccctggccccagggctacgtgatcgagtggggcctgggcccccccagcgccagcaacagcaacaagacctggagaatggagcagaacggcagagccaccggcttcctgctgaaggagaacatcagacccttccagctgtacgagatcatcgtgacccccctgtaccaggacaccatgggccccagccagcacgtgtacgcctacagccaggagatggcccccagccacgcccccgagctgcacctgaagcacatcggcaagacctgggcccagctggagtgggtgcccgagccccccgagctgggcaagagccccctgacccactacaccatcttctggaccaacgcccagaaccagagcttcagcgccatcctgaacgccagcagcagaggcttcgtgctgcacggcctggagcccgccagcctgtaccacatccacctgatggccgccagccaggccggcgccaccaacagcaccgtgctgaccctgatgaccctgacccccgagggcagcgagctgcacatcatcctgggcctgttcggcctgctgctgctgctgacctgcctgtgcggcaccgcctggctgtgctgcagccccaacagaaagaaccccctgtggcccagcgtgcccgaccccgcccacagcagcctgggcagctgggtgcccaccatcatggaggaggacgccttccagctgcccggcctgggcaccccccccatcaccaagctgaccgtgctggaggaggacgagaagaagcccgtgccctgggagagccacaacagcagcgagacctgcggcctgcccaccctggtgcagacctacgtgctgcagggcgaccccagagccgtgagcacccagccccagagccagagcggcaccagcgaccaggccggcccccccagaagaagcgcctacttcaaggaccagatcatgctgcaccccgccccccccaacggcctgctgtgcctgttccccatcaccagcgtgctgtag

SEQ ID NO: 77332 - DNA, 2310 bp, synthetic construct
  misc_feature 1..2310: note = Description of Artificial Sequence: Synthetic coding sequence
  source 1..2310: mol_type = other DNA
atggccagactgggcaactgcagcctgacctgggccgccctgatcatcctgctgctgcccggcagcctggaggagtgcggccacatcagcgtgagcgcccccatcgtgcacctgggcgaccccatcaccgccagctgcatcatcaagcagaactgcagccacctggaccccgagccccagatcctgtggagactgggcgccgagctgcagcccggcggcagacagcagagactgagcgacggcacccaggagagcatcatcaccctgccccacctgaaccacacccaggccttcctgagctgctgcctgaactggggcaacagcctgcagatcctggaccaggtggagctgagagccggctacccccccgccatcccccacaacctgagctgcctgatgaacctgaccaccagcagcctgatctgccagtgggagcccggccccgagacccacctgcccaccagcttcaccctgaagagcttcaagagcagaggcaactgccagacccagggcgacagcatcctggactgcgtgcccaaggacggccagagccactgctgcatccccagaaagcacctgctgctgtaccagaacatgggcatctgggtgcaggccgagaacgccctgggcaccagcatgagcccccagctgtgcctggaccccatggacgtggtgaagctggagccccccatgctgagaaccatggaccccagccccgaggccgcccccccccaggccggctgcctgcagctgtgctgggagccctggcagcccggcctgcacatcaaccagaagtgcgagctgagacacaagccccagagaggcgaggccagctgggccctggtgggccccctgcccctggaggccctgcagtacgagctgtgcggcctgctgcccgccaccgcctacaccctgcagatcagatgcatcagatggcccctgcccggccactggagcgactggagccccagcctggagctgagaaccaccgagagagcccccaccgtgagactggacacctggtggagacagagacagctggaccccagaaccgtgcagctgttctggaagcccgtgcccctggaggaggacagcggcagaatccagggctacgtggtgagctggagacccagcggccaggccggcgccatcctgcccctgtgcaacaccaccgagctgagctgcaccttccacctgcccagcgaggcccaggaggtggccctggtggcctacaacagcgccggcaccagcagacccacccccgtggtgttcagcgagagcagaggccccgccctgaccagactgcacgccatggccagagacccccacagcctgtgggtgggctgggagccccccaacccctggccccagggctacgtgatcgagtggggcctgggcccccccagcgccagcaacagcaacaagacctggagaatggagcagaacggcagagccaccggcttcctgctgaaggagaacatcagacccttccagctgtacgagatcatcgtgacccccctgtaccaggacaccatgggccccagccagcacgtgtacgcctacagccaggagatggcccccagccacgcccccgagctgcacctgaagcacatcggcaagacctgggcccagctggagtgggtgcccgagccccccgagctgggcaagagccccctgacccactacaccatcttctggaccaacgcccagaaccagagcttcagcgccatcctgaacgccagcagcagaggcttcgtgctgcacggcctggagcccgccagcctgtaccacatccacctgatggccgccagccaggccggcgccaccaacagcaccgtgctgaccctgatgaccctgacccccgccggcagaatccccagcggccaggtgagccagacccagctgaccgccgcctgggcccccggctgcccccagagctggagaagaatgcccagcagctgccccgccctggccagacaccccagccccagcagccagtgctggagaagaatgaagagaagcagatgccccggcagccccatcaccgcccagagacccgtggccagccccctgtggagcagacccatgtgcagcagaggcacccaggagcagttcccccccagccccaaccccagcctggcccccgccatcagaagcttcatgggcagctgctgggccgccccccaggcccagggccagggcaccatcagcgccgtgacccccctgagccccagctggagagccagcccccccgcccccagccccatgagaaccagcggcagcagacccgccccctggggcccctggtag

SEQ ID NO: 77333 - DNA, 2511 bp, synthetic construct
  misc_feature 1..2511: note = Description of Artificial Sequence: Synthetic coding sequence
  source 1..2511: mol_type = other DNA
atggccagactgggcaactgcagcctgacctgggccgccctgatcatcctgctgctgcccggcagcctggaggagtgcggccacatcagcgtgagcgcccccatcgtgcacctgggcgaccccatcaccgccagctgcatcatcaagcagaactgcagccacctggaccccgagccccagatcctgtggagactgggcgccgagctgcagcccggcggcagacagcagagactgagcgacggcacccaggagagcatcatcaccctgccccacctgaaccacacccaggccttcctgagctgctgcctgaactggggcaacagcctgcagatcctggaccaggtggagctgagagccggctacccccccgccatcccccacaacctgagctgcctgatgaacctgaccaccagcagcctgatctgccagtgggagcccggccccgagacccacctgcccaccagcttcaccctgaagagcttcaagagcagaggcaactgccagacccagggcgacagcatcctggactgcgtgcccaaggacggccagagccactgctgcatccccagaaagcacctgctgctgtaccagaacatgggcatctgggtgcaggccgagaacgccctgggcaccagcatgagcccccagctgtgcctggaccccatggacgtggtgaagctggagccccccatgctgagaaccatggaccccagccccgaggccgcccccccccaggccggctgcctgcagctgtgctgggagccctggcagcccggcctgcacatcaaccagaagtgcgagctgagacacaagccccagagaggcgaggccagctgggccctggtgggccccctgcccctggaggccctgcagtacgagctgtgcggcctgctgcccgccaccgcctacaccctgcagatcagatgcatcagatggcccctgcccggccactggagcgactggagccccagcctggagctgagaaccaccgagagagcccccaccgtgagactggacacctggtggagacagagacagctggaccccagaaccgtgcagctgttctggaagcccgtgcccctggaggaggacagcggcagaatccagggctacgtggtgagctggagacccagcggccaggccggcgccatcctgcccctgtgcaacaccaccgagctgagctgcaccttccacctgcccagcgaggcccaggaggtggccctggtggcctacaacagcgccggcaccagcagacccacccccgtggtgttcagcgagagcagaggccccgccctgaccagactgcacgccatggccagagacccccacagcctgtgggtgggctgggagccccccaacccctggccccagggctacgtgatcgagtggggcctgggcccccccagcgccagcaacagcaacaagacctggagaatggagcagaacggcagagccaccggcttcctgctgaaggagaacatcagacccttccagctgtacgagatcatcgtgacccccctgtaccaggacaccatgggccccagccagcacgtgtacgcctacagccaggagatggcccccagccacgcccccgagctgcacctgaagcacatcggcaagacctgggcccagctggagtgggtgcccgagccccccgagctgggcaagagccccctgacccactacaccatcttctggaccaacgcccagaaccagagcttcagcgccatcctgaacgccagcagcagaggcttcgtgctgcacggcctggagcccgccagcctgtaccacatccacctgatggccgccagccaggccggcgccaccaacagcaccgtgctgaccctgatgaccctgacccccgagggcagcgagctgcacatcatcctgggcctgttcggcctgctgctgctgctgacctgcctgtgcggcaccgcctggctgtgctgcagccccaacagaaagaaccccctgtggcccagcgtgcccgaccccgcccacagcagcctgggcagctgggtgcccaccatcatggaggaggacgccttccagctgcccggcctgggcaccccccccatcaccaagctgaccgtgctggaggaggacgagaagaagcccgtgccctgggagagccacaacagcagcgagacctgcggcctgcccaccctggtgcagacctacgtgctgcagggcgaccccagagccgtgagcacccagccccagagccagagcggcaccagcgaccaggtgctgtacggccagctgctgggcagccccaccagccccggccccggccactacctgagatgcgacagcacccagcccctgctggccggcctgacccccagccccaagagctacgagaacctgtggttccaggccagccccctgggcaccctggtgacccccgcccccagccaggaggacgactgcgtgttcggccccctgctgaacttccccctgctgcagggcatcagagtgcacggcatggaggccctgggcagcttctag

SEQ ID NO: 77334 - DNA, 2592 bp, synthetic construct
  misc_feature 1..2592: note = Description of Artificial Sequence: Synthetic coding sequence
  source 1..2592: mol_type = other DNA
atggccagactgggcaactgcagcctgacctgggccgccctgatcatcctgctgctgcccggcagcctggaggagtgcggccacatcagcgtgagcgcccccatcgtgcacctgggcgaccccatcaccgccagctgcatcatcaagcagaactgcagccacctggaccccgagccccagatcctgtggagactgggcgccgagctgcagcccggcggcagacagcagagactgagcgacggcacccaggagagcatcatcaccctgccccacctgaaccacacccaggccttcctgagctgctgcctgaactggggcaacagcctgcagatcctggaccaggtggagctgagagccggctacccccccgccatcccccacaacctgagctgcctgatgaacctgaccaccagcagcctgatctgccagtgggagcccggccccgagacccacctgcccaccagcttcaccctgaagagcttcaagagcagaggcaactgccagacccagggcgacagcatcctggactgcgtgcccaaggacggccagagccactgctgcatccccagaaagcacctgctgctgtaccagaacatgggcatctgggtgcaggccgagaacgccctgggcaccagcatgagcccccagctgtgcctggaccccatggacgtggtgaagctggagccccccatgctgagaaccatggaccccagccccgaggccgcccccccccaggccggctgcctgcagctgtgctgggagccctggcagcccggcctgcacatcaaccagaagtgcgagctgagacacaagccccagagaggcgaggccagctgggccctggtgggccccctgcccctggaggccctgcagtacgagctgtgcggcctgctgcccgccaccgcctacaccctgcagatcagatgcatcagatggcccctgcccggccactggagcgactggagccccagcctggagctgagaaccaccgagagagcccccaccgtgagactggacacctggtggagacagagacagctggaccccagaaccgtgcagctgttctggaagcccgtgcccctggaggaggacagcggcagaatccagggctacgtggtgagctggagacccagcggccaggccggcgccatcctgcccctgtgcaacaccaccgagctgagctgcaccttccacctgcccagcgaggcccaggaggtggccctggtggcctacaacagcgccggcaccagcagacccacccccgtggtgttcagcgagagcagaggccccgccctgaccagactgcacgccatggccagagacccccacagcctgtgggtgggctgggagccccccaacccctggccccagggctacgtgatcgagtggggcctgggcccccccagcgccagcaacagcaacaagacctggagaatggagcagaacggcagagccaccggcttcctgctgaaggagaacatcagacccttccagctgtacgagatcatcgtgacccccctgtaccaggacaccatgggccccagccagcacgtgtacgcctacagccaggagatggcccccagccacgcccccgagctgcacctgaagcacatcggcaagacctgggcccagctggagtgggtgcccgagccccccgagctgggcaagagccccctgacccactacaccatcttctggaccaacgcccagaaccagagcttcagcgccatcctgaacgccagcagcagaggcttcgtgctgcacggcctggagcccgccagcctgtaccacatccacctgatggccgccagccaggccggcgccaccaacagcaccgtgctgaccctgatgaccctgacccccgagggcagcgagctgcacatcatcctgggcctgttcggcctgctgctgctgctgacctgcctgtgcggcaccgcctggctgtgctgcagccccaacagaaagaaccccctgtggcccagcgtgcccgaccccgcccacagcagcctgggcagctgggtgcccaccatcatggaggagctgcccggccccagacagggccagtggctgggccagaccagcgagatgagcagagccctgaccccccacccctgcgtgcaggacgccttccagctgcccggcctgggcaccccccccatcaccaagctgaccgtgctggaggaggacgagaagaagcccgtgccctgggagagccacaacagcagcgagacctgcggcctgcccaccctggtgcagacctacgtgctgcagggcgaccccagagccgtgagcacccagccccagagccagagcggcaccagcgaccaggtgctgtacggccagctgctgggcagccccaccagccccggccccggccactacctgagatgcgacagcacccagcccctgctggccggcctgacccccagccccaagagctacgagaacctgtggttccaggccagccccctgggcaccctggtgacccccgcccccagccaggaggacgactgcgtgttcggccccctgctgaacttccccctgctgcagggcatcagagtgcacggcatggaggccctgggcagcttctag

SEQ ID NO: 77335 - DNA, 2352 bp, synthetic construct; identical to SEQ ID NO: 77331
  misc_feature 1..2352: note = Description of Artificial Sequence: Synthetic coding sequence
  source 1..2352: mol_type = other DNA

SEQ ID NO: 77336 - DNA, 2511 bp, synthetic construct; identical to SEQ ID NO: 77333
  misc_feature 1..2511: note = Description of Artificial Sequence: Synthetic coding sequence
  source 1..2511: mol_type = other DNA

SEQ ID NO: 77337 - DNA, 2511 bp, synthetic construct; identical to SEQ ID NO: 77333
  misc_feature 1..2511: note = Description of Artificial Sequence: Synthetic coding sequence
  source 1..2511: mol_type = other DNA

SEQ ID NO: 77338 - DNA, 2592 bp, synthetic construct; identical to SEQ ID NO: 77334
  misc_feature 1..2592: note = Description of Artificial Sequence: Synthetic coding sequence
  source 1..2592: mol_type = other DNA

SEQ ID NO: 77339 - DNA, 1167 bp, synthetic construct
  misc_feature 1..1167: note = Description of Artificial Sequence: Synthetic coding sequence
  source 1..1167: mol_type = other DNA
tgaaccagcagacccacccccgtggtgttcagcgagagcagaggccccgccctgaccagactgcacgccatggccagagacccccacagcctgtgggtgggctgggagccccccaacccctggccccagggctacgtgatcgagtggggcctgggcccccccagcgccagcaacagcaacaagacctggagaatggagcagaacggcagagccaccggcttcctgctgaaggcccccagccacgcccccgagctgcacctgaagcacatcggcaagacctgggcccagctggagtgggtgcccgagccccccgagctgggcaagagccccctgacccactacaccatcttctggaccaacgcccagaaccagagcttcagcgccatcctgaacgccagcagcagaggcttcgtgctgcacggcctggagcccgccagcctgtaccacatccacctgatggccgccagccaggccggcgccaccaacagcaccgtgctgaccctgatgaccctgacccccgagggcagcgagctgcacatcatcctgggcctgttcggcctgctgctgctgctgacctgcctgtgcggcaccgcctggctgtgctgcagccccaacagaaagaaccccctgtggcccagcgtgcccgaccccgcccacagcagcctgggcagctgggtgcccaccatcatggaggaggacgccttccagctgcccggcctgggcaccccccccatcaccaagctgaccgtgctggaggaggacgagaagaagcccgtgccctgggagagccacaacagcagcgagacctgcggcctgcccaccctggtgcagacctacgtgctgcagggcgaccccagagccgtgagcacccagccccagagccagagcggcaccagcgaccaggtgctgtacggccagctgctgggcagccccaccagccccggccccggccactacctgagatgcgacagcacccagcccctgctggccggcctgacccccagccccaagagctacgagaacctgtggttccaggccagccccctgggcaccctggtgacccccgcccccagccaggaggacgactgcgtgttcggccccctgctgaacttccccctgctgcagggcatcagagtgcacggcatggaggccctgggcagcttctag

SEQ ID NO: 77340 - DNA, 66 bp, synthetic construct
  misc_feature 1..66: note = Description of Artificial Sequence: Synthetic coding sequence
  source 1..66: mol_type = other DNA
atggccagactgggcaactgcagcctgacctgggccgccctgatcatcctgctgctgcccggctag

SEQ ID NO: 77341 - DNA, 675 bp, synthetic construct
  misc_feature 1..675: note = Description of Artificial Sequence: Synthetic coding sequence
  source 1..675: mol_type = other DNA
atgagcgccgtgggcgccgccaccccctacctgcaccaccccggcgacagccacagcggcagagtgagcttcctgggcgcccagctgccccccgaggtggccgccatggccagactgctgggcgacctggacagaagcaccttcagaaagctgctgaagttcgtggtgagcagcctgcagggcgaggactgcagagaggccgtgcagagactgggcgtgagcgccaacctgcccgaggagcagctgggcgccctgctggccggcatgcacaccctgctgcagcaggccctgagactgccccccaccagcctgaagcccgacaccttcagagaccagctgcaggagctgtgcatcccccaggacctggtgggcgacctggccagcgtggtgttcggcagccagagacccctgctggacagcgtggcccagcagcagggcgcctggctgccccacgtggccgacttcagatggagagtggacgtggccatcagcaccagcgccctggccagaagcctgcagcccagcgtgctgatgcagctgaagctgagcgacggcagcgcctacagattcgaggtgcccaccgccaagttccaggagctgagatacagcgtggccctggtgctgaaggagatggccgacctggagaagagatgcgagagaagactgcaggactag

SEQ ID NO: 77342 - DNA, 675 bp, synthetic construct; identical to SEQ ID NO: 77341
  misc_feature 1..675: note = Description of Artificial Sequence: Synthetic coding sequence
  source 1..675: mol_type = other DNA

SEQ ID NO: 77343 - DNA, 675 bp, synthetic construct; identical to SEQ ID NO: 77341
  misc_feature 1..675: note = Description of Artificial Sequence: Synthetic coding sequence
  source 1..675: mol_type = other DNA

SEQ ID NO: 77344 - DNA, 297 bp, synthetic construct
  misc_feature 1..297: note = Description of Artificial Sequence: Synthetic coding sequence
  source 1..297: mol_type = other DNA
atggaggccagcagcgagccccccctggacgccaagagcgacgtgaccaaccagctggtggacttccagtggaagctgggcatggccgtgagcagcgacacctgcagaagcctgaagtacccctacgtggccgtgatgctgaaggtggccgaccacagcggccaggtgaagaccaagtgcttcgagatgaccatcccccagttccagccccagctgctggccaccagcagcctgctgagcgccagcaacttctacagacagttcaaggagatcgccgccgtgatcgagaccgtgtag

SEQ ID NO: 77345 - DNA, 258 bp, synthetic construct
  misc_feature 1..258: note = Description of Artificial Sequence: Synthetic coding sequence
  source 1..258: mol_type = other DNA
atggaggccagcagcgagccccccctggacgccaagagcgacgtgaccaaccagctggtggacttccagtggaagctgggcatggccgtgagcagcgacacctgcagaagcctgaagtacccctacgtggccgtgatgctgaaggtggccgaccacagcggccaggtgaagaccaagtgcttcgagatgaccatcccccagttccagaacttctacagacagttcaaggagatcgccgccgtgatcgagaccgtgtag

SEQ ID NO: 77346 - DNA, 258 bp, synthetic construct; identical to SEQ ID NO: 77345
  misc_feature 1..258: note = Description of Artificial Sequence: Synthetic coding sequence
  source 1..258: mol_type = other DNA

SEQ ID NO: 77347 - DNA, 7470 bp, synthetic construct
  misc_feature 1..7470: note = Description of Artificial Sequence: Synthetic coding sequence
  source 1..7470: mol_type = other DNA
atgggcgccagcagccccagaagccccgagcccgtgggcccccccgcccccggcctgcccttctgctgcggcggcagcctgctggccgtggtggtgctgctggccctgcccgtggcctggggccagtgcaacgcccccgagtggctgcccttcgccagacccaccaacctgaccgacgagttcgagttccccatcggcacctacctgaactacgagtgcagacccggctacagcggcagacccttcagcatcatctgcctgaagaacagcgtgtggaccggcgccaaggacagatgcagaagaaagagctgcagaaacccccccgaccccgtgaacggcatggtgcacgtgatcaagggcatccagttcggcagccagatcaagtacagctgcaccaagggctacagactgatcggcagcagcagcgccacctgcatcatcagcggcgacaccgtgatctgggacaacgagacccccatctgcgacagaatcccctgcggcctgccccccaccatcaccaacggcgacttcatcagcaccaacagagagaacttccactacggcagcgtggtgacctacagatgcaaccccggcagcggcggcagaaaggtgttcgagctggtgggcgagcccagcatctactgcaccagcaacgacgaccaggtgggcatctggagcggccccgccccccagtgcatcatccccaacaagtgcaccccccccaacgtggagaacggcatcctggtgagcgacaacagaagcctgttcagcctgaacgaggtggtggagttcagatgccagcccggcttcgtgatgaagggccccagaagagtgaagtgccaggccctgaacaagtgggagcccgagctgcccagctgcagcagagtgtgccagcccccccccgacgtgctgcacgccgagagaacccagagagacaaggacaacttcagccccggccaggaggtgttctacagctgcgagcccggctacgacctgagaggcgccgccagcatgagatgcaccccccagggcgactggagccccgccgcccccacctgcgaggtgaagagctgcgacgacttcatgggccagctgctgaacggcagagtgctgttccccgtgaacctgcagctgggcgccaaggtggacttcgtgtgcgacgagggcttccagctgaagggcagcagcgccagctactgcgtgctggccggcatggagagcctgtggaacagcagcgtgcccgtgtgcgagcagatcttctgccccagcccccccgtgatccccaacggcagacacaccggcaagcccctggaggtgttccccttcggcaagaccgtgaactacacctgcgacccccaccccgacagaggcaccagcttcgacctgatcggcgagagcaccatcagatgcaccagcgacccccagggcaacggcgtgtggagcagccccgcccccagatgcggcatcctgggccactgccaggcccccgaccacttcctgttcgccaagctgaagacccagaccaacgccagcgacttccccatcggcaccagcctgaagtacgagtgcagacccgagtactacggcagacccttcagcatcacctgcctggacaacctggtgtggagcagccccaaggacgtgtgcaagagaaagagctgcaagaccccccccgaccccgtgaacggcatggtgcacgtgatcaccgacatccaggtgggcagcagaatcaactacagctgcaccaccggccacagactgatcggccacagcagcgccgagtgcatcctgagcggcaacgccgcccactggagcaccaagccccccatctgccagagaatcccctgcggcctgccccccaccatcgccaacggcgacttcatcagcaccaacagagagaacttccactacggcagcgtggtgacctacagatgcaaccccggcagcggcggcagaaaggtgttcgagctggtgggcgagcccagcatctactgcaccagcaacgacgaccaggtgggcatctggagcggccccgccccccagtgcatcatccccaacaagtgcaccccccccaacgtggagaacggcatcctggtgagcgacaacagaagcctgttcagcctgaacgaggtggtggagttcagatgccagcccggcttcgtgatgaagggccccagaagagtgaagtgccaggccctgaacaagtgggagcccgagctgcccagctgcagcagagtgtgccagcccccccccgacgtgctgcacgccgagagaacccagagagacaaggacaacttcagccccggccaggaggtgttctacagctgcgagcccggctacgacctgagaggcgccgccagcatgagatgcaccccccagggcgactggagccccgccgcccccacctgcgaggtgaagagctgcgacgacttcatgggccagctgctgaacggcagagtgctgttccccgtgaacctgcagctgggcgccaaggtggacttcgtgtgcgacgagggcttccagctgaagggcagcagcgccagctactgcgtgctggccggcatggagagcctgtggaacagcagcgtgcccgtgtgcgagcagatcttctgccccagcccccccgtgatccccaacggcagacacaccggcaagcccctggaggtgttccccttcggcaagaccgtgaactacacctgcgacccccaccccgacagaggcaccagcttcgacctgatcggcgagagcaccatcagatgcaccagcgacccccagggcaacggcgtgtggagcagccccgcccccagatgcggcatcctgggccactgccaggcccccgaccacttcctgttcgccaagctgaagacccagaccaacgccagcgacttccccatcggcaccagcctgaagtacgagtgcagacccgagtactacggcagacccttcagcatcacctgcctggacaacctggtgtggagcagccccaaggacgtgtgcaagagaaagagctgcaagaccccccccgaccccgtgaacggcatggtgcacgtgatcaccgacatccaggtgggcagcagaatcaactacagctgcaccaccggccacagactgatcggccacagcagcgccgagtgcatcctgagcggcaacgccgcccactggagcaccaagccccccatctgccagagaatcccctgcggcctgccccccaccatcgccaacggcgacttcatcagcaccaacagagagaacttccactacggcagcgtggtgacctacagatgcaaccccggcagcggcggcagaaaggtgttcgagctggtgggcgagcccagcatctactgcaccagcaacgacgaccaggtgggcatctggagcggccccgccccccagtgcatcatccccaacaagtgcaccccccccaacgtggagaacggcatcctggtgagcgacaacagaagcctgttcagcctgaacgaggtggtggagttcagatgccagcccggcttcgtgatgaagggccccagaagagtgaagtgccaggccctgaacaagtgggagcccgagctgcccagctgcagcagagtgtgccagcccccccccgacgtgctgcacgccgagagaacccagagagacaaggacaacttcagccccggccaggaggtgttctacagctgcgagcccggctacgacctgagaggcgccgccagcatgagatgcaccccccagggcgactggagccccgccgcccccacctgcgaggtgaagagctgcgacgacttcatgggccagctgctgaacggcagagtgctgttccccgtgaacctgcagctgggcgccaaggtggacttcgtgtgcgacgagggcttccagctgaagggcagcagcgccagctactgcgtgctggccggcatggagagcctgtggaacagcagcgtgcccgtgtgcgagcagatcttctgccccagcccccccgtgatccccaacggcagacacaccggcaagcccctggaggtgttccccttcggcaaggccgtgaactacacctgcgacccccaccccgacagaggcaccagcttcgacctgatcggcgagagcaccatcagatgcaccagcgacccccagggcaacggcgtgtggagcagccccgcccccagatgcggcatcctgggccactgccaggcccccgaccacttcctgttcgccaagctgaagacccagaccaacgccagcgacttccccatcggcaccagcctgaagtacgagtgcagacccgagtactacggcagacccttcagcatcacctgcctggacaacctggtgtggagcagccccaaggacgtgtgcaagagaaagagctgcaagaccccccccgaccccgtgaacggcatggtgcacgtgatcaccgacatccaggtgggcagcagaatcaactacagctgcaccaccggccacagactgatcggccacagcagcgccgagtgcatcctgagcggcaacaccgcccactggagcaccaagccccccatctgccagagaatcccctgcggcctgccccccaccatcgccaacggcgacttcatcagcaccaacagagagaacttccactacggcagcgtggtgacctacagatgcaacctgggcagcagaggcagaaaggtgttcgagctggtgggcgagcccagcatctactgcaccagcaacgacgaccaggtgggcatctggagcggccccgccccccagtgcatcatccccaacaagtgcaccccccccaacgtggagaacggcatcctggtgagcgacaacagaagcctgttcagcctgaacgaggtggtggagttcagatgccagcccggcttcgtgatgaagggccccagaagagtgaagtgccaggccctgaacaagtgggagcccgagctgcccagctgcagcagagtgtgccagcccccccccgagatcctgcacggcgagcacacccccagccaccaggacaacttcagccccggccaggaggtgttctacagctgcgagcccggctacgacctgagaggcgccgccagcctgcactgcaccccccagggcgactggagccccgaggcccccagatgcgccgtgaagagctgcgacgacttcctgggccagctgccccacggcagagtgctgttccccctgaacctgcagctgggcgccaaggtgagcttcgtgtgcgacgagggcttcagactgaagggcagcagcgtgagccactgcgtgctggtgggcatgagaagcctgtggaacaacagcgtgcccgtgtgcgagcacatcttctgccccaacccccccgccatcctgaacggcagacacaccggcacccccagcggcgacatcccctacggcaaggagatcagctacacctgcgacccccaccccgacagaggcatgaccttcaacctgatcggcgagagcaccatcagatgcaccagcgacccccacggcaacggcgtgtggagcagccccgcccccagatgcgagctgagcgtgagagccggccactgcaagacccccgagcagttccccttcgccagccccaccatccccatcaacgacttcgagttccccgtgggcaccagcctgaactacgagtgcagacccggctacttcggcaagatgttcagcatcagctgcctggagaacctggtgtggagcagcgtggaggacaactgcagaagaaagagctgcggccccccccccgagcccttcaacggcatggtgcacatcaacaccgacacccagttcggcagcaccgtgaactacagctgcaacgagggcttcagactgatcggcagccccagcaccacctgcctggtgagcggcaacaacgtgacctgggacaagaaggcccccatctgcgagatcatcagctgcgagcccccccccaccatcagcaacggcgacttctacagcaacaacagaaccagcttccacaacggcaccgtggtgacctaccagtgccacaccggccccgacggcgagcagctgttcgagctggtgggcgagagaagcatctactgcaccagcaaggacgaccaggtgggcgtgtggagcagccccccccccagatgcatcagcaccaacaagtgcaccgcccccgaggtggagaacgccatcagagtgcccggcaacagaagcttcttcaccctgaccgagatcatcagattcagatgccagcccggcttcgtgatggtgggcagccacaccgtgcagtgccagaccaacggcagatggggccccaagctgccccactgcagcagagtgtgccagcccccccccgagatcctgcacggcgagcacaccctgagccaccaggacaacttcagccccggccaggaggtgttctacagctgcgagcccagctacgacctgagaggcgccgccagcctgcactgcaccccccagggcgactggagccccgaggcccccagatgcaccgtgaagagctgcgacgacttcctgggccagctgccccacggcagagtgctgctgcccctgaacctgcagctgggcgccaaggtgagcttcgtgtgcgacgagggcttcagactgaagggcagaagcgccagccactgcgtgctggccggcatgaaggccctgtggaacagcagcgtgcccgtgtgcgagcagatcttctgccccaacccccccgccatcctgaacggcagacacaccggcacccccttcggcgacatcccctacggcaaggagatcagctacgcctgcgacacccaccccgacagaggcatgaccttcaacctgatcggcgagagcagcatcagatgcaccagcgacccccagggcaacggcgtgtggagcagccccgcccccagatgcgagctgagcgtgcccgccgcctgcccccacccccccaagatccagaacggccactacatcggcggccacgtgagcctgtacctgcccggcatgaccatcagctacatctgcgaccccggctacctgctggtgggcaagggcttcatcttctgcaccgaccagggcatctggagccagctggaccactactgcaaggaggtgaactgcagcttccccctgttcatgaacggcatcagcaaggagctggagatgaagaaggtgtaccactacggcgactacgtgaccctgaagtgcgaggacggctacaccctggagggcagcccctggagccagtgccaggccgacgacagatgggacccccccctggccaagtgcaccagcagaacccacgacgccctgatcgtgggcaccctgagcggcaccatcttcttcatcctgctgatcatcttcctgagctggatcatcctgaagcacagaaagggcaacaacgcccacgagaaccccaaggaggtggccatccacctgcacagccagggcggcagcagcgtgcaccccagaaccctgcagaccaacgaggagaacagcagagtgctgccctag

SEQ ID NO: 77348 - DNA, 6120 bp, synthetic construct
  misc_feature 1..6120: note = Description of Artificial Sequence: Synthetic coding sequence
  source 1..6120: mol_type = other DNA
atgggcgccagcagccccagaagccccgagcccgtgggcccccccgcccccggcctgcccttctgctgcggcggcagcctgctggccgtggtggtgctgctggccctgcccgtggcctggggccagtgcaacgcccccgagtggctgcccttcgccagacccaccaacctgaccgacgagttcgagttccccatcggcacctacctgaactacgagtgcagacccggctacagcggcagacccttcagcatcatctgcctgaagaacagcgtgtggaccggcgccaaggacagatgcagaagaaagagctgcagaaacccccccgaccccgtgaacggcatggtgcacgtgatcaagggcatccagttcggcagccagatcaagtacagctgcaccaagggctacagactgatcggcagcagcagcgccacctgcatcatcagcggcgacaccgtgatctgggacaacgagacccccatctgcgacagaatcccctgcggcctgccccccaccatcgccaacggcgacttcatcagcaccaacagagagaacttccactacggcagcgtggtgacctacagatgcaaccccggcagcggcggcagaaaggtgttcgagctggtgggcgagcccagcatctactgcaccagcaacgacgaccaggtgggcatctggagcggccccgccccccagtgcatcatccccaacaagtgcaccccccccaacgtggagaacggcatcctggtgagcgacaacagaagcctgttcagcctgaacgaggtggtggagttcagatgccagcccggcttcgtgatgaagggccccagaagagtgaagtgccaggccctgaacaagtgggagcccgagctgcccagctgcagcagagtgtgccagcccccccccgacgtgctgcacgccgagagaacccagagagacaaggacaacttcagccccggccaggaggtgttctacagctgcgagcccggctacgacctgagaggcgccgccagcatgagatgcaccccccagggcgactggagccccgccgcccccacctgcgaggtgaagagctgcgacgacttcatgggccagctgctgaacggcagagtgctgttccccgtgaacctgcagctgggcgccaaggtggacttcgtgtgcgacgagggcttccagctgaagggcagcagcgccagctactgcgtgctggccggcatggagagcctgtggaacagcagcgtgcccgtgtgcgagcagatcttctgccccagcccccccgtgatccccaacggcagacacaccggcaagcccctggaggtgttccccttcggcaagaccgtgaactacacctgcgacccccaccccgacagaggcaccagcttcgacctgatcggcgagagcaccatcagatgcaccagcgacccccagggcaacggcgtgtggagcagccccgcccccagatgcggcatcctgggccactgccaggcccccgaccacttcctgttcgccaagctgaagacccagaccaacgccagcgacttccccatcggcaccagcctgaagtacgagtgcagacccgagtactacggcagacccttcagcatcacctgcctggacaacctggtgtggagcagccccaaggacgtgtgcaagagaaagagctgcaagaccccccccgaccccgtgaacggcatggtgcacgtgatcaccgacatccaggtgggcagcagaatcaactacagctgcaccaccggccacagactgatcggccacagcagcgccgagtgcatcctgagcggcaacgccgcccactggagcaccaagccccccatctgccagagaatcccctgcggcctgccccccaccatcgccaacggcgacttcatcagcaccaacagagagaacttccactacggcagcgtggtgacctacagatgcaaccccggcagcggcggcagaaaggtgttcgagctggtgggcgagcccagcatctactgcaccagcaacgacgaccaggtgggcatctggagcggccccgccccccagtgcatcatccccaacaagtgcaccccccccaacgtggagaacggcatcctggtgagcgacaacagaagcctgttcagcctgaacgaggtggtggagttcagatgccagcccggcttcgtgatgaagggccccagaagagtgaagtgccaggccctgaacaagtgggagcccgagctgcccagctgcagcagagtgtgccagcccccccccgacgtgctgcacgccgagagaacccagagagacaaggacaacttcagccccggccaggaggtgttctacagctgcgagcccggctacgacctgagaggcgccgccagcatgagatgcaccccccagggcgactggagccccgccgcccccacctgcgaggtgaagagctgcgacgacttcatgggccagctgctgaacggcagagtgctgttccccgtgaacctgcagctgggcgccaaggtggacttcgtgtgcgacgagggcttccagctgaagggcagcagcgccagctactgcgtgctggccggcatggagagcctgtggaacagcagcgtgcccgtgtgcgagcagatcttctgccccagcccccccgtgatccccaacggcagacacaccggcaagcccctggaggtgttccccttcggcaaggccgtgaactacacctgcgacccccaccccgacagaggcaccagcttcgacctgatcggcgagagcaccatcagatgcaccagcgacccccagggcaacggcgtgtggagcagccccgcccccagatgcggcatcctgggccactgccaggcccccgaccacttcctgttcgccaagctgaagacccagaccaacgccagcgacttccccatcggcaccagcctgaagtacgagtgcagacccgagtactacggcagacccttcagcatcacctgcctggacaacctggtgtggagcagccccaaggacgtgtgcaagagaaagagctgcaagaccccccccgaccccgtgaacggcatggtgcacgtgatcaccgacatccaggtgggcagcagaatcaactacagctgcaccaccggccacagactgatcggccacagcagcgccgagtgcatcctgagcggcaacaccgcccactggagcaccaagccccccatctgccagagaatcccctgcggcctgccccccaccatcgccaacggcgacttcatcagcaccaacagagagaacttccactacggcagcgtggtgacctacagatgcaacctgggcagcagaggcagaaaggtgttcgagctggtgggcgagcccagcatctactgcaccagcaacgacgaccaggtgggcatctggagcggccccgccccccagtgcatcatccccaacaagtgcaccccccccaacgtggagaacggcatcctggtgagcgacaacagaagcctgttcagcctgaacgaggtggtggagttcagatgccagcccggcttcgtgatgaagggccccagaagagtgaagtgccaggccctgaacaagtgggagcccgagctgcccagctgcagcagagtgtgccagcccccccccgagatcctgcacggcgagcacacccccagccaccaggacaacttcagccccggccaggaggtgttctacagctgcgagcccggctacgacctgagaggcgccgccagcctgcactgcaccccccagggcgactggagccccgaggcccccagatgcgccgtgaagagctgcgacgacttcctgggccagctgccccacggcagagtgctgttccccctgaacctgcagctgggcgccaaggtgagcttcgtgtgcgacgagggcttcagactgaagggcagcagcgtgagccactgcgtgctggtgggcatgagaagcctgtggaacaacagcgtgcccgtgtgcgagcacatcttctgccccaacccccccgccatcctgaacggcagacacaccggcacccccagcggcgacatcccctacggcaaggagatcagctacacctgcgacccccaccccgacagaggcatgaccttcaacctgatcggcgagagcaccatcagatgcaccagcgacccccacggcaacggcgtgtggagcagccccgcccccagatgcgagctgagcgtgagagccggccactgcaagacccccgagcagttccccttcgccagccccaccatccccatcaacgacttcgagttccccgtgggcaccagcctgaactacgagtgcagacccggctacttcggcaagatgttcagcatcagctgcctggagaacctggtgtggagcagcgtggaggacaactgcagaagaaagagctgcggccccccccccgagcccttcaacggcatggtgcacatcaacaccgacacccagttcggcagcaccgtgaactacagctgcaacgagggcttcagactgatcggcagccccagcaccacctgcctggtgagcggcaacaacgtgacctgggacaagaaggcccccatctgcgagatcatcagctgcgagcccccccccaccatcagcaacggcgacttctacagcaacaacagaaccagcttccacaacggcaccgtggtgacctaccagtgccacaccggccccgacggcgagcagctgttcgagctggtgggcgagagaagcatctactgcaccagcaaggacgaccaggtgggcgtgtggagcagccccccccccagatgcatcagcaccaacaagtgcaccgcccccgaggtggagaacgccatcagagtgcccggcaacagaagcttcttcaccctgaccgagatcatcagattcagatgccagcccggcttcgtgatggtgggcagccacaccgtgcagtgccagaccaacggcagatggggccccaagctgccccactgcagcagagtgtgccagcccccccccgagatcctgcacggcgagcacaccctgagccaccaggacaacttcagccccggccaggaggtgttctacagctgcgagcccagctacgacctgagaggcgccgccagcctgcactgcaccccccagggcgactggagccccgaggcccccagatgcaccgtgaagagctgcgacgacttcctgggccagctgccccacggcagagtgctgctgcccctgaacctgcagctgggcgccaaggtgagcttcgtgtgcgacgagggcttcagactgaagggcagaagcgccagccactgcgtgctggccggcatgaaggccctgtggaacagcagcgtgcccgtgtgcgagcagatcttctgccccaacccccccgccatcctgaacggcagacacaccggcacccccttcggcgacatcccctacggcaaggagatcagctacgcctgcgacacccaccccgacagaggcatgaccttcaacctgatcggcgagagcagcatcagatgcaccagcgacccccagggcaacggcgtgtggagcagccccgcccccagatgcgagctgagcgtgcccgccgcctgcccccacccccccaagatccagaacggccactacatcggcggccacgtgagcctgtacctgcccggcatgaccatcagctacatctgcgaccccggctacctgctggtgggcaagggcttcatcttctgcaccgaccagggcatctggagccagctggaccactactgcaaggaggtgaactgcagcttccccctgttcatgaacggcatcagcaaggagctggagatgaagaaggtgtaccactacggcgactacgtgaccctgaagtgcgaggacggctacaccctggagggcagcccctggagccagtgccaggccgacgacagatgggacccccccctggccaagtgcaccagcagaacccacgacgccctgatcgtgggcaccctgagcggcaccatcttcttcatcctgctgatcatcttcctgagctggatcatcctgaagcacagaaagggcaacaacgcccacgagaaccccaaggaggtggccatccacctgcacagccagggcggcagcagcgtgcaccccagaaccctgcagaccaacgaggagaacagcagagtgctgccctag

SEQ ID NO: 77349 - DNA, 6120 bp, synthetic construct
  misc_feature 1..6120: note = Description of Artificial Sequence: Synthetic coding sequence
  source 1..6120: mol_type = other DNA
atgggcgccagcagccccagaagccccgagcccgtgggcccccccgcccccggcctgcccttctgctgcggcggcagcctgctggccgtggtggtgctgctggccctgcccgtggcctggggccagtgcaacgcccccgagtggctgcccttcgccagacccaccaacctgaccgacgagttcgagttccccatcggcacctacctgaactacgagtgcagacccggctacagcggcagacccttcagcatcatctgcctgaagaacagcgtgtggaccggcgccaaggacagatgcagaagaaagagctgcagaaacccccccgaccccgtgaacggcatggtgcacgtgatcaagggcatccagttcggcagccagatcaagtacagctgcaccaagggctacagactgatcggcagcagcagcgccacctgcatcatcagcggcgacaccgtgatctgggacaacgagacccccatctgcgacagaatcccctgcggcctgccccccaccatcaccaacggcgacttcatcagcaccaacagagagaacttccactacggcagcgtggtgacctacagatgcaaccccggcagcggcggcagaaaggtgttcgagctggtgggcgagcccagcatctactgcaccagcaacgacgaccaggtgggcatctggagcggccccgccccccagtgcatcatccccaacaagtgcaccccccccaacgtggagaacggcatcctggtgagcgacaacagaagcctgttcagcctgaacgaggtggtggagttcagatgccagcccggcttcgtgatgaagggccccagaagagtgaagtgccaggccctgaacaagtgggagcccgagctgcccagctgcagcagagtgtgccagcccccccccgacgtgctgcacgccgagagaacccagagagacaaggacaacttcagccccggccaggaggtgttctacagctgcgagcccggctacgacctgagaggcgccgccagcatgagatgcaccccccagggcgactggagccccgccgcccccacctgcgaggtgaagagctgcgacgacttcatgggccagctgctgaacggcagagtgctgttccccgtgaacctgcagctgggcgccaaggtggacttcgtgtgcgacgagggcttccagctgaagggcagcagcgccagctactgcgtgctggccggcatggagagcctgtggaacagcagcgtgcccgtgtgcgagcagatcttctgccccagcccccccgtgatccccaacggcagacacaccggcaagcccctggaggtgttccccttcggcaagaccgtgaactacacctgcgacccccaccccgacagaggcaccagcttcgacctgatcggcgagagcaccatcagatgcaccagcgacccccagggcaacggcgtgtggagcagccccgcccccagatgcggcatcctgggccactgccaggcccccgaccacttcctgttcgccaagctgaagacccagaccaacgccagcgacttccccatcggcaccagcctgaagtacgagtgcagacccgagtactacggcagacccttcagcatcacctgcctggacaacctggtgtggagcagccccaaggacgtgtgcaagagaaagagctgcaagaccccccccgaccccgtgaacggcatggtgcacgtgatcaccgacatccaggtgggcagcagaatcaactacagctgcaccaccggccacagactgatcggccacagcagcgccgagtgcatcctgagcggcaacgccgcccactggagcaccaagccccccatctgccagagaatcccctgcggcctgccccccaccatcgccaacggcgacttcatcagcaccaacagagagaacttccactacggcagcgtggtgacctacagatgcaaccccggcagcggcggcagaaaggtgttcgagctggtgggcgagcccagcatctactgcaccagcaacgacgaccaggtgggcatctggagcggccccgccccccagtgcatcatccccaacaagtgcaccccccccaacgtggagaacggcatcctggtgagcgacaacagaagcctgttcagcctgaacgaggtggtggagttcagatgccagcccggcttcgtgatgaagggccccagaagagtgaagtgccaggccctgaacaagtgggagcccgagctgcccagctgcagcagagtgtgccagcccccccccgacgtgctgcacgccgagagaacccagagagacaaggacaacttcagccccggccaggaggtgttctacagctgcgagcccggctacgacctgagaggcgccgccagcatgagatgcaccccccagggcgactggagccccgccgcccccacctgcgaggtgaagagctgcgacgacttcatgggccagctgctgaacggcagagtgctgttccccgtgaacctgcagctgggcgccaaggtggacttcgtgtgcgacgagggcttccagctgaagggcagcagcgccagctactgcgtgctggccggcatggagagcctgtggaacagcagcgtgcccgtgtgcgagcagatcttctgccccagcccccccgtgatccccaacggcagacacaccggcaagcccctggaggtgttccccttcggcaagaccgtgaactacacctgcgacccccaccccgacagaggcaccagcttcgacctgatcggcgagagcaccatcagatgcaccagcgacccccagggcaacggcgtgtggagcagccccgcccccagatgcggcatcctgggccactgccaggcccccgaccacttcctgttcgccaagctgaagacccagaccaacgccagcgacttccccatcggcaccagcctgaagtacgagtgcagacccgagtactacggcagacccttcagcatcacctgcctggacaacctggtgtggagcagccccaaggacgtgtgcaagagaaagagctgcaagaccccccccgaccccgtgaacggcatggtgcacgtgatcaccgacatccaggtgggcagcagaatcaactacagctgcaccaccggccacagactgatcggccacagcagcgccgagtgcatcctgagcggcaacaccgcccactggagcaccaagccccccatctgccagagaatcccctgcggcctgccccccaccatcgccaacggcgacttcatcagcaccaacagagagaacttccactacggcagcgtggtgacctacagatgcaacctgggcagcagaggcagaaaggtgttcgagctggtgggcgagcccagcatctactgcaccagcaacgacgaccaggtgggcatctggagcggccccgccccccagtgcatcatccccaacaagtgcaccccccccaacgtggagaacggcatcctggtgagcgacaacagaagcctgttcagcctgaacgaggtggtggagttcagatgccagcccggcttcgtgatgaagggccccagaagagtgaagtgccaggccctgaacaagtgggagcccgagctgcccagctgcagcagagtgtgccagcccccccccgagatcctgcacggcgagcacacccccagccaccaggacaacttcagccccggccaggaggtgttctacagctgcgagcccggctacgacctgagaggcgccgccagcctgcactgcaccccccagggcgactggagccccgaggcccccagatgcgccgtgaagagctgcgacgacttcctgggccagctgccccacggcagagtgctgttccccctgaacctgcagctgggcgccaaggtgagcttcgtgtgcgacgagggcttcagactgaagggcagcagcgtgagccactgcgtgctggtgggcatgagaagcctgtggaacaacagcgtgcccgtgtgcgagcacatcttctgccccaacccccccgccatcctgaacggcagacacaccggcacccccagcggcgacatcccctacggcaaggagatcagctacacctgcgacccccaccccgacagaggcatgaccttcaacctgatcggcgagagcaccatcagatgcaccagcgacccccacggcaacggcgtgtggagcagccccgcccccagatgcgagctgagcgtgagagccggccactgcaagacccccgagcagttccccttcgccagccccaccatccccatcaacgacttcgagttccccgtgggcaccagcctgaactacgagtgcagacccggctacttcggcaagatgttcagcatcagctgcctggagaacctggtgtggagcagcgtggaggacaactgcagaagaaagagctgcggccccccccccgagcccttcaacggcatggtgcacatcaacaccgacacccagttcggcagcaccgtgaactacagctgcaacgagggcttcagactgatcggcagccccagcaccacctgcctggtgagcggcaacaacgtgacctgggacaagaaggcccccatctgcgagatcatcagctgcgagcccccccccaccatcagcaacggcgacttctacagcaacaacagaaccagcttccacaacggcaccgtggtgacctaccagtgccacaccggccccgacggcgagcagctgttcgagctggtgggcgagagaagcatctactgcaccagcaaggacgaccaggtgggcgtgtggagcagccccccccccagatgcatcagcaccaacaagtgcaccgcccccgaggtggagaacgccatcagagtgcccggcaacagaagcttcttcaccctgaccgagatcatcagattcagatgccagcccggcttcgtgatggtgggcagccacaccgtgcagtgccagaccaacggcagatggggccccaagctgccccactgcagcagagtgtgccagcccccccccgagatcctgcacggcgagcacaccctgagccaccaggacaacttcagccccggccaggaggtgttctacagctgcgagcccagctacgacctgagaggcgccgccagcctgcactgcaccccccagggcgactggagccccgaggcccccagatgcaccgtgaagagctgcgacgacttcctgggccagctgccccacggcagagtgctgctgcccctgaacctgcagctgggcgccaaggtgagcttcgtgtgcgacgagggcttcagactgaagggcagaagcgccagccactgcgtgctggccggcatgaaggccctgtggaacagcagcgtgcccgtgtgcgagcagatcttctgccccaacccccccgccatcctgaacggcagacacaccggcacccccttcggcgacatcccctacggcaaggagatcagctacgcctgcgacacccaccccgacagaggcatgaccttcaacctgatcggcgagagcagcatcagatgcaccagcgacccccagggcaacggcgtgtggagcagccccgcccccagatgcgagctgagcgtgcccgccgcctgcccccacccccccaagatccagaacggccactacatcggcggccacgtgagcctgtacctgcccggcatgaccatcagctacatctgcgaccccggctacctgctggtgggcaagggcttcatcttctgcaccgaccagggcatctggagccagctggaccactactgcaaggaggtgaactgcagcttccccctgttcatgaacggcatcagcaaggagctggagatgaagaaggtgtaccactacggcgactacgtgaccctgaagtgcgaggacggctacaccctggagggcagcccctggagccagtgccaggccgacgacagatgggacccccccctggccaagtgcaccagcagaacccacgacgccctgatcgtgggcaccctgagcggcaccatcttcttcatcctgctgatcatcttcctgagctggatcatcctgaagcacagaaagggcaacaacgcccacgagaaccccaaggaggtggccatccacctgcacagccagggcggcagcagcgtgcaccccagaaccctgcagaccaacgaggagaacagcagagtgctgccctag

SEQ ID NO: 77350 - DNA, 6120 bp, synthetic construct
  misc_feature 1..6120: note = Description of Artificial Sequence: Synthetic coding sequence
  source 1..6120: mol_type = other DNA
atgggcgccagcagccccagaagccccgagcccgtgggcccccccgcccccggcctgcccttctgctgcggcggcagcctgctggccgtggtggtgctgctggccctgcccgtggcctggggccagtgcaacgcccccgagtggctgcccttcgccagacccaccaacctgaccgacgagttcgagttccccatcggcacctacctgaactacgagtgcagacccggctacagcggcagacccttcagcatcatctgcctgaagaacagcgtgtggaccggcgccaaggacagatgcagaagaaagagctgcagaaacccccccgaccccgtgaacggcatggtgcacgtgatcaagggcatccagttcggcagccagatcaagtacagctgcaccaagggctacagactgatcggcagcagcagcgccacctgcatcatcagcggcgacaccgtgatctgggacaacgagacccccatctgcgacagaatcccctgcggcctgccccccaccatcaccaacggcgacttcatcagcaccaacagagagaacttccactacggcagcgtggtgacctacagatgcaaccccggcagcggcggcagaaaggtgttcgagctggtgggcgagcccagcatctactgcaccagcaacgacgaccaggtgggcatctggagcggccccgccccccagtgcatcatccccaacaagtgcaccccccccaacgtggagaacggcatcctggtgagcgacaacagaagcctgttcagcctgaacgaggtggtggagttcagatgccagcccggcttcgtgatgaagggccccagaagagtgaagtgccaggccctgaacaagtgggagcccgagctgcccagctgcagcagagtgtgccagcccccccccgacgtgctgcacgccgagagaacccagagagacaaggacaacttcagccccggccaggaggtgttctacagctgcgagcccggctacgacctgagaggcgccgccagcatgagatgcaccccccagggcgactggagccccgccgcccccacctgcgaggtgaagagctgcgacgacttcatgggccagctgctgaacggcagagtgctgttccccgtgaacctgcagctgggcgccaaggtggacttcgtgtgcgacgagggcttccagctgaagggcagcagcgccagctactgcgtgctggccggcatggagagcctgtggaacagcagcgtgcccgtgtgcgagcagatcttctgccccagcccccccgtgatccccaacggcagacacaccggcaagcccctggaggtgttccccttcggcaagaccgtgaactacacctgcgacccccaccccgacagaggcaccagcttcgacctgatcggcgagagcaccatcagatgcaccagcgacccccagggcaacggcgtgtggagcagccccgcccccagatgcggcatcctgggccactgccaggcccccgaccacttcctgttcgccaagctgaagacccagaccaacgccagcgacttccccatcggcaccagcctgaagtacgagtgcagacccgagtactacggcagacccttcagcatcacctgcctggacaacctggtgtggagcagccccaaggacgtgtgcaagagaaagagctgcaagaccccccccgaccccgtgaacggcatggtgcacgtgatcaccgacatccaggtgggcagcagaatcaactacagctgcaccaccggccacagactgatcggccacagcagcgccgagtgcatcctgagcggcaacgccgcccactggagcaccaagccccccatctgccagagaatcccctgcggcctgccccccaccatcgccaacggcgacttcatcagcaccaacagagagaacttccactacggcagcgtggtgacctacagatgcaaccccggcagcggcggcagaaaggtgttcgagctggtgggcgagcccagcatctactgcaccagcaacgacgaccaggtgggcatctggagcggccccgccccccagtgcatcatccccaacaagtgcaccccccccaacgtggagaacggcatcctggtgagcgacaacagaagcctgttcagcctgaacgaggtggtggagttcagatgccagcccggcttcgtgatgaagggccccagaagagtgaagtgccaggccctgaacaagtgggagcccgagctgcccagctgcagcagagtgtgccagcccccccccgacgtgctgcacgccgagagaacccagagagacaaggacaacttcagccccggccaggaggtgttctacagctgcgagcccggctacgacctgagaggcgccgccagcatgagatgcaccccccagggcgactggagccccgccgcccccacctgcgaggtgaagagctgcgacgacttcatgggccagctgctgaacggcagagtgctgttccccgtgaacctgcagctgggcgccaaggtggacttcgtgtgcgacgagggcttccagctgaagggcagcagcgccagctactgcgtgctggccggcatggagagcctgtggaacagcagcgtgcccgtgtgcgagcagatcttctgccccagcccccccgtgatccccaacggcagacacaccggcaagcccctggaggtgttccccttcggcaaggccgtgaactacacctgcgacccccaccccgacagaggcaccagcttcgacctgatcggcgagagcaccatcagatgcaccagcgacccccagggcaacggcgtgtggagcagccccgcccccagatgcggcatcctgggccactgccaggcccccgaccacttcctgttcgccaagctgaagacccagaccaacgccagcgacttccccatcggcaccagcctgaagtacgagtgcagacccgagtactacggcagacccttcagcatcacctgcctggacaacctggtgtggagcagccccaaggacgtgtgcaagagaaagagctgcaagaccccccccgaccccgtgaacggcatggtgcacgtgatcaccgacatccaggtgggcagcagaatcaactacagctgcaccaccggccacagactgatcggccacagcagcgccgagtgcatcctgagcggcaacaccgcccactggagcaccaagccccccatctgccagagaatcccctgcggcctgccccccaccatcgccaacggcgacttcatcagcaccaacagagagaacttccactacggcagcgtggtgacctacagatgcaacctgggcagcagaggcagaaaggtgttcgagctggtgggcgagcccagcatctactgcaccagcaacgacgaccaggtgggcatctggagcggccccgccccccagtgcatcatccccaacaagtgcaccccccccaacgtggagaacggcatcctggtgagcgacaacagaagcctgttcagcctgaacgaggtggtggagttcagatgccagcccggcttcgtgatgaagggccccagaagagtgaagtgccaggccctgaacaagtgggagcccgagctgcccagctgcagcagagtgtgccagcccccccccgagatcctgcacggcgagcacacccccagccaccaggacaacttcagccccggccaggaggtgttctacagctgcgagcccggctacgacctgagaggcgccgccagcctgcactgcaccccccagggcgactggagccccgaggcccccagatgcgccgtgaagagctgcgacgacttcctgggccagctgccccacggcagagtgctgttccccctgaacctgcagctgggcgccaaggtgagcttcgtgtgcgacgagggcttcagactgaagggcagcagcgtgagccactgcgtgctggtgggcatgagaagcctgtggaacaacagcgtgcccgtgtgcgagcacatcttctgccccaacccccccgccatcctgaacggcagacacaccggcacccccagcggcgacatcccctacggcaaggagatcagctacacctgcgacccccaccccgacagaggcatgaccttcaacctgatcggcgagagcaccatcagatgcaccagcgacccccacggcaacggcgtgtggagcagccccgcccccagatgcgagctgagcgtgagagccggccactgcaagacccccgagcagttccccttcgccagccccaccatccccatcaacgacttcgagttccccgtgggcaccagcctgaactacgagtgcagacccggctacttcggcaagatgttcagcatcagctgcctggagaacctggtgtggagcagcgtggaggacaactgcagaagaaagagctgcggccccccccccgagcccttcaacggcatggtgcacatcaacaccgacacccagttcggcagcaccgtgaactacagctgcaacgagggcttcagactgatcggcagccccagcaccacctgcctggtgagcggcaacaacgtgacctgggacaagaaggcccccatctgcgagatcatcagctgcgagcccccccccaccatcagcaacggcgacttctacagcaacaacagaaccagcttccacaacggcaccgtggtgacctaccagtgccacaccggccccgacggcgagcagctgttcgagctggtgggcgagagaagcatctactgcaccagcaaggacgaccaggtgggcgtgtggagcagccccccccccagatgcatcagcaccaacaagtgcaccgcccccgaggtggagaacgccatcagagtgcccggcaacagaagcttcttcaccctgaccgagatcatcagattcagatgccagcccggcttcgtgatggtgggcagccacaccgtgcagtgccagaccaacggcagatggggccccaagctgccccactgcagcagagtgtgccagcccccccccgagatcctgcacggcgagcacaccctgagccaccaggacaacttcagccccggccaggaggtgttctacagctgcgagcccagctacgacctgagaggcgccgccagcctgcactgcaccccccagggcgactggagccccgaggcccccagatgcaccgtgaagagctgcgacgacttcctgggccagctgccccacggcagagtgctgctgcccctgaacctgcagctgggcgccaaggtgagcttcgtgtgcgacgagggcttcagactgaagggcagaagcgccagccactgcgtgctggccggcatgaaggccctgtggaacagcagcgtgcccgtgtgcgagcagatcttctgccccaacccccccgccatcctgaacggcagacacaccggcacccccttcggcgacatcccctacggcaaggagatcagctacgcctgcgacacccaccccgacagaggcatgaccttcaacctgatcggcgagagcagcatcagatgcaccagcgacccccagggcaacggcgtgtggagcagccccgcccccagatgcgagctgagcgtgcccgccgcctgcccccacccccccaagatccagaacggccactacatcggcggccacgtgagcctgtacctgcccggcatgaccatcagctacatctgcgaccccggctacctgctggtgggcaagggcttcatcttctgcaccgaccagggcatctggagccagctggaccactactgcaaggaggtgaactgcagcttccccctgttcatgaacggcatcagcaaggagctggagatgaagaaggtgtaccactacggcgactacgtgaccctgaagtgcgaggacggctacaccctggagggcagcccctggagccagtgccaggccgacgacagatgggacccccccctggccaagtgcaccagcagaacccacgacgccctgatcgtgggcaccctgagcggcaccatcttcttcatcctgctgatcatcttcctgagctggatcatcctgaagcacagaaagggcaacaacgcccacgagaaccccaaggaggtggccatccacctgcacagccagggcggcagcagcgtgcaccccagaaccctgcagaccaacgaggagaacagcagagtgctgccctag

SEQ ID NO: 77351 - DNA, 6120 bp, synthetic construct; identical to SEQ ID NO: 77350
  misc_feature 1..6120: note = Description of Artificial Sequence: Synthetic coding sequence
  source 1..6120: mol_type = other DNA

SEQ ID NO: 77352 - DNA, 1755 bp, synthetic construct
  misc_feature 1..1755: note = Description of Artificial Sequence: Synthetic coding sequence
  source 1..1755: mol_type = other DNA
ggccactgccaggcccccgaccacttcctgttcgccaagctgaagacccagaccaacgccagcgacttccccatcggcaccagcctgaagtacgagtgcagacccgagtactacggcagacccttcagcatcacctgcctggacaacctggtgtggagcagccccaaggacgtgtgcaagagaaagagctgcaagaccccccccgaccccgtgaacggcatggtgcacgtgatcaccgacatccaggtgggcagcagaatcaactacagctgcaccaccggccacagactgatcggccacagcagcgccgagtgcatcctgagcggcaacgccgcccactggagcaccaagccccccatctgccagagaatcccctgcggcctgccccccaccatcgccaacggcgacttcatcagcaccaacagagagaacttccactacggcagcgtggtgacctacagatgcaaccccggcagcggcggcagaaaggtgttcgagctggtgggcgagcccagcatctactgcaccagcaacgacgaccaggtgggcatctggagcggccccgccccccagtgcatcatccccaacaagtgcaccccccccaacgtggagaacggcatcctggtgagcgacaacagaagcctgttcagcctgaacgaggtggtggagttcagatgccagcccggcttcgtgatgaagggccccagaagagtgaagtgccaggccctgaacaagtgggagcccgagctgcccagctgcagcagagtgtgccagcccccccccgacgtgctgcacgccgagagaacccagagagacaaggacaacttcagccccggccaggaggtgttctacagctgcgagcccggctacgacctgagaggcgccgccagcatgagatgcaccccccagggcgactggagccccgccgcccccacctgcgaggtgaagagctgcgacgacttcatgggccagctgctgaacggcagagtgctgttccccgtgaacctgcagctgggcgccaaggtggacttcgtgtgcgacgagggcttccagctgaagggcagcagcgccagctactgcgtgctggccggcatggagagcctgtggaacagcagcgtgcccgtgtgcgagcagatcttctgccccagcccccccgtgatccccaacggcagacacaccggcaagcccctggaggtgttccccttcggcaagaccgtgaactacacctgcgacccccaccccgacagaggcaccagcttcgacctgatcggcgagagcaccatcagatgcaccagcgacccccagggcaacggcgtgtggagcagccccgcccccagatgcggcatcctgggccactgccaggcccccgaccacttcctgttcgccaagctgaagacccagaccaacgccagcgacttccccatcggcaccagcctgaagtacgagtgcagacccgagtactacggcagacccttcagcatcacctgcctggacaacctggtgtggagcagccccaaggacgtgtgcaagagaaagagctgcaagaccccccccgaccccgtgaacggcatggtgcacgtgatcaccgacatccaggtgggcagcagaatcaactacagctgcaccaccggccacagactgatcggccacagcagcgccgagtgcatcctgagcggcaacgccgcccactggagcaccaagccccccatctgccagagaagctgccacctgccctgcgagctgttcggcagatag

SEQ ID NO: 77353 - DNA, 1335 bp, synthetic construct
  misc_feature 1..1335: note = Description of Artificial Sequence: Synthetic coding sequence
  source 1..1335: mol_type = other DNA
atggccccccccgtgagactggagagacccttccccagcagaagattccccggcctgctgctggccgccctggtgctgctgctgagcagcttcagcgaccagtgcaacgtgcccgagtggctgcccttcgccagacccaccaacctgaccgacgacttcgagttccccatcggcacctacctgaactacgagtgcagacccggctacagcggcagacccttcagcatcatctgcctgaagaacagcgtgtggaccagcgccaaggacaagtgcaagagaaagagctgcagaaacccccccgaccccgtgaacggcatggcccacgtgatcaaggacatccagttcagaagccagatcaagtacagctgccccaagggctacagactgatcggcagcagcagcgccacctgcatcatcagcggcaacaccgtgatctgggacaacaagacccccgtgtgcgacagaatcatctgcggcctgccccccaccatcgccaacggcgacttcaccagcatcagcagagagtacttccactacggcagcgtggtgacctaccactgcaacctgggcagcagaggcaagaaggtgttcgagctggtgggcgagcccagcatctactgcaccagcaaggacgaccaggtgggcatctggagcggccccgccccccagtgcatcatccccaacaagtgcaccccccccaacgtggagaacggcatcctggtgagcgacaacagaagcctgttcagcctgaacgaggtggtggagttcagatgccagcccggcttcggcatgaagggccccagccacgtgaagtgccaggccctgaacaagtgggagcccgagctgcccagctgcagcagagtgtgccagcccccccccgacgtgctgcacgccgagagaacccagagagacaaggacaacttcagccccggccaggaggtgttctacagctgcgagcccggctacgacctgagaggcagcacctacctgcactgcaccccccagggcgactggagccccgccgcccccagatgcgaggtgaagagctgcgacgacttcctgggccagctgcccaacggccacgtgctgttccccctgaacctgcagctgggcgccaaggtggacttcgtgtgcgacgagggcttccagctgaagggcagcagcgccagctactgcgtgctggccggcatggagagcctgtggaacagcagcgtgcccgtgtgcgagagaaagagctgcgagaccccccccgtgcccgtgaacggcatggtgcacgtgatcaccgacatccacgtgggcagcagaatcaactacagctgcaccaccggcttctag

SEQ ID NO: 77354 - DNA, 1710 bp, synthetic construct
  misc_feature 1..1710: note = Description of Artificial Sequence: Synthetic coding sequence
  source 1..1710: mol_type = other DNA
atggccccccccgtgagactggagagacccttccccagcagaagattccccggcctgctgctggccgccctggtgctgctgctgagcagcttcagcgaccagtgcaacgtgcccgagtggctgcccttcgccagacccaccaacctgaccgacgacttcgagttccccatcggcacctacctgaactacgagtgcagacccggctacagcggcagacccttcagcatcatctgcctgaagaacagcgtgtggaccagcgccaaggacaagtgcaagagaaagagctgcagaaacccccccgaccccgtgaacggcatggcccacgtgatcaaggacatccagttcagaagccagatcaagtacagctgccccaagggctacagactgatcggcagcagcagcgccacctgcatcatcagcggcaacaccgtgatctgggacaacaagacccccgtgtgcgacagaatcatctgcggcctgccccccaccatcgccaacggcgacttcaccagcatcagcagagagtacttccactacggcagcgtggtgacctaccactgcaacctgggcagcagaggcaagaaggtgttcgagctggtgggcgagcccagcatctactgcaccagcaaggacgaccaggtgggcatctggagcggccccgccccccagtgcatcatccccaacaagtgcaccccccccaacgtggagaacggcatcctggtgagcgacaacagaagcctgttcagcctgaacgaggtggtggagttcagatgccagcccggcttcggcatgaagggccccagccacgtgaagtgccaggccctgaacaagtgggagcccgagctgcccagctgcagcagagtgtgccagcccccccccgacgtgctgcacgccgagagaacccagagagacaaggacaacttcagccccggccaggaggtgttctacagctgcgagcccggctacgacctgagaggcagcacctacctgcactgcaccccccagggcgactggagccccgccgcccccagatgcgaggtgaagagctgcgacgacttcctgggccagctgcccaacggccacgtgctgttccccctgaacctgcagctgggcgccaaggtggacttcgtgtgcgacgagggcttccagctgaagggcagcagcgccagctactgcgtgctggccggcatggagagcctgtggaacagcagcgtgcccgtgtgcgagagaaagagctgcgagaccccccccgtgcccgtgaacggcatggtgcacgtgatcaccgacatccacgtgggcagcagaatcaactacagctgcaccaccggccacagactgatcggccacagcagcgccgagtgcatcctgagcggcaacaccgcccactggagcatgaagccccccatctgccagcagatcttctgccccaacccccccgccatcctgaacggcagacacaccggcacccccctgggcgacatcccctacggcaaggaggtgagctacacctgcgacccccaccccgacagaggcatgaccttcaacctgatcggcgagagcaccatcagaagaaccagcgagccccacggcaacggcgtgtggagcagccccgcccccagatgcgagctgcccgtgggcgccggcagccacgacgccctgatcgtgggcaagttctacgaggtgttcgccgaggagttctgccacctgtag

SEQ ID NO: 77355 - DNA, 3279 bp, synthetic construct
  misc_feature 1..3279: note = Description of Artificial Sequence: Synthetic coding sequence
  source 1..3279: mol_type = other DNA
atgggcgccgccggcctgctgggcgtgttcctggccctggtggcccccggcgtgctgggcatcagctgcggcagccccccccccatcctgaacggcagaatcagctactacagcacccccatcgccgtgggcaccgtgatcagatacagctgcagcggcaccttcagactgatcggcgagaagagcctgctgtgcatcaccaaggacaaggtggacggcacctgggacaagcccgcccccaagtgcgagtacttcaacaagtacagcagctgccccgagcccatcgtgcccggcggctacaagatcagaggcagcaccccctacagacacggcgacagcgtgaccttcgcctgcaagaccaacttcagcatgaacggcaacaagagcgtgtggtgccaggccaacaacatgtggggccccaccagactgcccacctgcgtgagcgtgttccccctggagtgccccgccctgcccatgatccacaacggccaccacaccagcgagaacgtgggcagcatcgcccccggcctgagcgtgacctacagctgcgagagcggctacctgctggtgggcgagaagatcatcaactgcctgagcagcggcaagtggagcgccgtgccccccacctgcgaggaggccagatgcaagagcctgggcagattccccaacggcaaggtgaaggagccccccatcctgagagtgggcgtgaccgccaacttcttctgcgacgagggctacagactgcagggcccccccagcagcagatgcgtgatcgccggccagggcgtggcctggaccaagatgcccgtgtgcgaggagatcttctgccccagccccccccccatcctgaacggcagacacatcggcaacagcctggccaacgtgagctacggcagcatcgtgacctacacctgcgaccccgaccccgaggagggcgtgaacttcatcctgatcggcgagagcaccctgagatgcaccgtggacagccagaagaccggcacctggagcggccccgcccccagatgcgagctgagcaccagcgccgtgcagtgcccccacccccagatcctgagaggcagaatggtgagcggccagaaggacagatacacctacaacgacaccgtgatcttcgcctgcatgttcggcttcaccctgaagggcagcaagcagatcagatgcaacgcccagggcacctgggagcccagcgcccccgtgtgcgagaaggagtgccaggccccccccaacatcctgaacggccagaaggaggacagacacatggtgagattcgaccccggcaccagcatcaagtacagctgcaaccccggctacgtgctggtgggcgaggagagcatccagtgcaccagcgagggcgtgtggaccccccccgtgccccagtgcaaggtggccgcctgcgaggccaccggcagacagctgctgaccaagccccagcaccagttcgtgagacccgacgtgaacagcagctgcggcgagggctacaagctgagcggcagcgtgtaccaggagtgccagggcaccatcccctggttcatggagatcagactgtgcaaggagatcacctgcccccccccccccgtgatctacaacggcgcccacaccggcagcagcctggaggacttcccctacggcaccaccgtgacctacacctgcaaccccggccccgagagaggcgtggagttcagcctgatcggcgagagcaccatcagatgcaccagcaacgaccaggagagaggcacctggagcggccccgcccccctgtgcaagctgagcctgctggccgtgcagtgcagccacgtgcacatcgccaacggctacaagatcagcggcaaggaggccccctacttctacaacgacaccgtgaccttcaagtgctacagcggcttcaccctgaagggcagcagccagatcagatgcaaggccgacaacacctgggaccccgagatccccgtgtgcgagaagggctgccagagcccccccggcctgcaccacggcagacacaccggcggcaacaccgtgttcttcgtgagcggcatgaccgtggactacacctgcgaccccggctacctgctggtgggcaacaagagcatccactgcatgcccagcggcaactggagccccagcgcccccagatgcgaggagacctgccagcacgtgagacagagcctgcaggagctgcccgccggcagcagagtggagctggtgaacaccagctgccaggacggctaccagctgaccggccacgcctaccagatgtgccaggacgccgagaacggcatctggttcaagaagatccccctgtgcaaggtgatccactgccaccccccccccgtgatcgtgaacggcaagcacaccggcatgatggccgagaacttcctgtacggcaacgaggtgagctacgagtgcgaccagggcttctacctgctgggcgagaagaagctgcagtgcagaagcgacagcaagggccacggcagctggagcggccccagcccccagtgcctgagaagcccccccgtgaccagatgccccaaccccgaggtgaagcacggctacaagctgaacaagacccacagcgcctacagccacaacgacatcgtgtacgtggactgcaaccccggcttcatcatgaacggcagcagagtgatcagatgccacaccgacaacacctgggtgcccggcgtgcccacctgcatcaagaaggccttcatcggctgcccccccccccccaagacccccaacggcaaccacaccggcggcaacatcgccagattcagccccggcatgagcatcctgtacagctgcgaccagggctacctgctggtgggcgaggccctgctgctgtgcacccacgagggcacctggagccagcccgccccccactgcaaggaggtgaactgcagcagccccgccgacatggacggcatccagaagggcctggagcccagaaagatgtaccagtacggcgccgtggtgaccctggagtgcgaggacggctacatgctggagggcagcccccagagccagtgccagagcgaccaccagtggaacccccccctggccgtgtgcagaagcagaagcctggcccccgtgctgtgcggcatcgccgccggcctgatcctgctgaccttcctgatcgtgatcaccctgtacgtgatcagcaagcacagagccagaaactactacaccgacaccagccagaaggaggccttccacctggaggccagagaggtgtacagcgtggacccctacaaccccgccagctag

SEQ ID NO: 77356 - DNA, 3102 bp, synthetic construct
  misc_feature 1..3102: note = Description of Artificial Sequence: Synthetic coding sequence
  source 1..3102: mol_type = other DNA
atgggcgccgccggcctgctgggcgtgttcctggccctggtggcccccggcgtgctgggcatcagctgcggcagccccccccccatcctgaacggcagaatcagctactacagcacccccatcgccgtgggcaccgtgatcagatacagctgcagcggcaccttcagactgatcggcgagaagagcctgctgtgcatcaccaaggacaaggtggacggcacctgggacaagcccgcccccaagtgcgagtacttcaacaagtacagcagctgccccgagcccatcgtgcccggcggctacaagatcagaggcagcaccccctacagacacggcgacagcgtgaccttcgcctgcaagaccaacttcagcatgaacggcaacaagagcgtgtggtgccaggccaacaacatgtggggccccaccagactgcccacctgcgtgagcgtgttccccctggagtgccccgccctgcccatgatccacaacggccaccacaccagcgagaacgtgggcagcatcgcccccggcctgagcgtgacctacagctgcgagagcggctacctgctggtgggcgagaagatcatcaactgcctgagcagcggcaagtggagcgccgtgccccccacctgcgaggaggccagatgcaagagcctgggcagattccccaacggcaaggtgaaggagccccccatcctgagagtgggcgtgaccgccaacttcttctgcgacgagggctacagactgcagggcccccccagcagcagatgcgtgatcgccggccagggcgtggcctggaccaagatgcccgtgtgcgaggagatcttctgccccagccccccccccatcctgaacggcagacacatcggcaacagcctggccaacgtgagctacggcagcatcgtgacctacacctgcgaccccgaccccgaggagggcgtgaacttcatcctgatcggcgagagcaccctgagatgcaccgtggacagccagaagaccggcacctggagcggccccgcccccagatgcgagctgagcaccagcgccgtgcagtgcccccacccccagatcctgagaggcagaatggtgagcggccagaaggacagatacacctacaacgacaccgtgatcttcgcctgcatgttcggcttcaccctgaagggcagcaagcagatcagatgcaacgcccagggcacctgggagcccagcgcccccgtgtgcgagaaggagtgccaggccccccccaacatcctgaacggccagaaggaggacagacacatggtgagattcgaccccggcaccagcatcaagtacagctgcaaccccggctacgtgctggtgggcgaggagagcatccagtgcaccagcgagggcgtgtggaccccccccgtgccccagtgcaaggtggccgcctgcgaggccaccggcagacagctgctgaccaagccccagcaccagttcgtgagacccgacgtgaacagcagctgcggcgagggctacaagctgagcggcagcgtgtaccaggagtgccagggcaccatcccctggttcatggagatcagactgtgcaaggagatcacctgcccccccccccccgtgatctacaacggcgcccacaccggcagcagcctggaggacttcccctacggcaccaccgtgacctacacctgcaaccccggccccgagagaggcgtggagttcagcctgatcggcgagagcaccatcagatgcaccagcaacgaccaggagagaggcacctggagcggccccgcccccctgtgcaagctgagcctgctggccgtgcagtgcagccacgtgcacatcgccaacggctacaagatcagcggcaaggaggccccctacttctacaacgacaccgtgaccttcaagtgctacagcggcttcaccctgaagggcagcagccagatcagatgcaaggccgacaacacctgggaccccgagatccccgtgtgcgagaaggagacctgccagcacgtgagacagagcctgcaggagctgcccgccggcagcagagtggagctggtgaacaccagctgccaggacggctaccagctgaccggccacgcctaccagatgtgccaggacgccgagaacggcatctggttcaagaagatccccctgtgcaaggtgatccactgccaccccccccccgtgatcgtgaacggcaagcacaccggcatgatggccgagaacttcctgtacggcaacgaggtgagctacgagtgcgaccagggcttctacctgctgggcgagaagaagctgcagtgcagaagcgacagcaagggccacggcagctggagcggccccagcccccagtgcctgagaagcccccccgtgaccagatgccccaaccccgaggtgaagcacggctacaagctgaacaagacccacagcgcctacagccacaacgacatcgtgtacgtggactgcaaccccggcttcatcatgaacggcagcagagtgatcagatgccacaccgacaacacctgggtgcccggcgtgcccacctgcatcaagaaggccttcatcggctgcccccccccccccaagacccccaacggcaaccacaccggcggcaacatcgccagattcagccccggcatgagcatcctgtacagctgcgaccagggctacctgctggtgggcgaggccctgctgctgtgcacccacgagggcacctggagccagcccgccccccactgcaaggaggtgaactgcagcagccccgccgacatggacggcatccagaagggcctggagcccagaaagatgtaccagtacggcgccgtggtgaccctggagtgcgaggacggctacatgctggagggcagcccccagagccagtgccagagcgaccaccagtggaacccccccctggccgtgtgcagaagcagaagcctggcccccgtgctgtgcggcatcgccgccggcctgatcctgctgaccttcctgatcgtgatcaccctgtacgtgatcagcaagcacagagccagaaactactacaccgacaccagccagaaggaggccttccacctggaggccagagaggtgtacagcgtggacccctacaaccccgccagctag

SEQ ID NO: 77357 - DNA, 2916 bp, synthetic construct
  misc_feature 1..2916: note = Description of Artificial Sequence: Synthetic coding sequence
  source 1..2916: mol_type = other DNA
atgggcgccgccggcctgctgggcgtgttcctggccctggtggcccccggcgtgctgggcatcagctgcggcagccccccccccatcctgaacggcagaatcagctactacagcacccccatcgccgtgggcaccgtgatcagatacagctgcagcggcaccttcagactgatcggcgagaagagcctgctgtgcatcaccaaggacaaggtggacggcacctgggacaagcccgcccccaagtgcgagtacttcaacaagtacagcagctgccccgagcccatcgtgcccggcggctacaagatcagaggcagcaccccctacagacacggcgacagcgtgaccttcgcctgcaagaccaacttcagcatgaacggcaacaagagcgtgtggtgccaggccaacaacatgtggggccccaccagactgcccacctgcgtgagcgtgttccccctggagtgccccgccctgcccatgatccacaacggccaccacaccagcgagaacgtgggcagcatcgcccccggcctgagcgtgacctacagctgcgagagcggctacctgctggtgggcgagaagatcatcaactgcctgagcagcggcaagtggagcgccgtgccccccacctgcgaggaggccagatgcaagagcctgggcagattccccaacggcaaggtgaaggagccccccatcctgagagtgggcgtgaccgccaacttcttctgcgacgagggctacagactgcagggcccccccagcagcagatgcgtgatcgccggccagggcgtggcctggaccaagatgcccgtgtgcgaggagatcttctgccccagccccccccccatcctgaacggcagacacatcggcaacagcctggccaacgtgagctacggcagcatcgtgacctacacctgcgaccccgaccccgaggagggcgtgaacttcatcctgatcggcgagagcaccctgagatgcaccgtggacagccagaagaccggcacctggagcggccccgcccccagatgcgagctgagcaccagcgccgtgcagtgcccccacccccagatcctgagaggcagaatggtgagcggccagaaggacagatacacctacaacgacaccgtgatcttcgcctgcatgttcggcttcaccctgaagggcagcaagcagatcagatgcaacgcccagggcacctgggagcccagcgcccccgtgtgcgagaaggagtgccaggccccccccaacatcctgaacggccagaaggaggacagacacatggtgagattcgaccccggcaccagcatcaagtacagctgcaaccccggctacgtgctggtgggcgaggagagcatccagtgcaccagcgagggcgtgtggaccccccccgtgccccagtgcaaggtggccgcctgcgaggccaccggcagacagctgctgaccaagccccagcaccagttcgtgagacccgacgtgaacagcagctgcggcgagggctacaagctgagcggcagcgtgtaccaggagtgccagggcaccatcccctggttcatggagatcagactgtgcaaggagatcacctgcccccccccccccgtgatctacaacggcgcccacaccggcagcagcctggaggacttcccctacggcaccaccgtgacctacacctgcaaccccggccccgagagaggcgtggagttcagcctgatcggcgagagcaccatcagatgcaccagcaacgaccaggagagaggcacctggagcggccccgcccccctgtgcaagctgagcctgctggccgtgcagtgcagccacgtgcacatcgccaacggctacaagatcagcggcaaggaggccccctacttctacaacgacaccgtgaccttcaagtgctacagcggcttcaccctgaagggcagcagccagatcagatgcaaggccgacaacacctgggaccccgagatccccgtgtgcgagaaggagacctgccagcacgtgagacagagcctgcaggagctgcccgccggcagcagagtggagctggtgaacaccagctgccaggacggctaccagctgaccggccacgcctaccagatgtgccaggacgccgagaacggcatctggttcaagaagatccccctgtgcaaggtgatccactgccaccccccccccgtgatcgtgaacggcaagcacaccggcatgatggccgagaacttcctgtacggcaacgaggtgagctacgagtgcgaccagggcttctacctgctgggcgagaagaagctgcagtgcagaagcgacagcaagggccacggcagctggagcggccccagcccccagtgcctgagaagcccccccgtgaccagatgccccaaccccgaggtgaagcacggctacaagctgaacaagacccacagcgcctacagccacaacgacatcgtgtacgtggactgcaaccccggcttcatcatgaacggcagcagagtgatcagatgccacaccgacaacacctgggtgcccggcgtgcccacctgcatcaagaaggaggtgaactgcagcagccccgccgacatggacggcatccagaagggcctggagcccagaaagatgtaccagtacggcgccgtggtgaccctggagtgcgaggacggctacatgctggagggcagcccccagagccagtgccagagcgaccaccagtggaacccccccctggccgtgtgcagaagcagaagcctggcccccgtgctgtgcggcatcgccgccggcctgatcctgctgaccttcctgatcgtgatcaccctgtacgtgatcagcaagcacagagccagaaactactacaccgacaccagccagaaggaggccttccacctggaggccagagaggtgtacagcgtggacccctacaaccccgccagctag

SEQ ID NO: 77358 - DNA, 3021 bp, synthetic construct
  misc_feature 1..3021: note = Description of Artificial Sequence: Synthetic coding sequence
  source 1..3021: mol_type = other DNA
atgggcgccgccggcctgctgggcgtgttcctggccctggtggcccccggcgtgctgggcatcagctgcggcagccccccccccatcctgaacggcagaatcagctactacagcacccccatcgccgtgggcaccgtgatcagatacagctgcagcggcaccttcagactgatcggcgagaagagcctgctgtgcatcaccaaggacaaggtggacggcacctgggacaagcccgcccccaagtgcgagtacttcaacaagtacagcagctgccccgagcccatcgtgcccggcggctacaagatcagaggcagcaccccctacagacacggcgacagcgtgaccttcgcctgcaagaccaacttcagcatgaacggcaacaagagcgtgtggtgccaggccaacaacatgtggggccccaccagactgcccacctgcgtgagcgtgttccccctggagtgccccgccctgcccatgatccacaacggccaccacaccagcgagaacgtgggcagcatcgcccccggcctgagcgtgacctacagctgcgagagcggctacctgctggtgggcgagaagatcatcaactgcctgagcagcggcaagtggagcgccgtgccccccacctgcgaggaggccagatgcaagagcctgggcagattccccaacggcaaggtgaaggagccccccatcctgagagtgggcgtgaccgccaacttcttctgcgacgagggctacagactgcagggcccccccagcagcagatgcgtgatcgccggccagggcgtggcctggaccaagatgcccgtgtgcgaggagatcttctgccccagccccccccccatcctgaacggcagacacatcggcaacagcctggccaacgtgagctacggcagcatcgtgacctacacctgcgaccccgaccccgaggagggcgtgaacttcatcctgatcggcgagagcaccctgagatgcaccgtggacagccagaagaccggcacctggagcggccccgcccccagatgcgagctgagcaccagcgccgtgcagtgcccccacccccagatcctgagaggcagaatggtgagcggccagaaggacagatacacctacaacgacaccgtgatcttcgcctgcatgttcggcttcaccctgaagggcagcaagcagatcagatgcaacgcccagggcacctgggagcccagcgcccccgtgtgcgagaaggagtgccaggccccccccaacatcctgaacggccagaaggaggacagacacatggtgagattcgaccccggcaccagcatcaagtacagctgcaaccccggctacgtgctggtgggcgaggagagcatccagtgcaccagcgagggcgtgtggaccccccccgtgccccagtgcaaggtggccgcctgcgaggccaccggcagacagctgctgaccaagccccagcaccagttcgtgagacccgacgtgaacagcagctgcggcgagggcaaccacctgcccaccaccccctgctacctgcagtggggcacccacagagagttcctgagaagattcagcatctggaaccacggccacctgcacatgcccggccccgagagaggcgtggagttcagcctgatcggcgagagcaccatcagatgcaccagcaacgaccaggagagaggcacctggagcggccccgcccccctgtgcaagctgagcctgctggccgtgcagtgcagccacgtgcacatcgccaacggctacaagatcagcggcaaggaggccccctacttctacaacgacaccgtgaccttcaagtgctacagcggcttcaccctgaagggcagcagccagatcagatgcaaggccgacaacacctgggaccccgagatccccgtgtgcgagaaggagacctgccagcacgtgagacagagcctgcaggagctgcccgccggcagcagagtggagctggtgaacaccagctgccaggacggctaccagctgaccggccacgcctaccagatgtgccaggacgccgagaacggcatctggttcaagaagatccccctgtgcaaggtgatccactgccaccccccccccgtgatcgtgaacggcaagcacaccggcatgatggccgagaacttcctgtacggcaacgaggtgagctacgagtgcgaccagggcttctacctgctgggcgagaagaagctgcagtgcagaagcgacagcaagggccacggcagctggagcggccccagcccccagtgcctgagaagcccccccgtgaccagatgccccaaccccgaggtgaagcacggctacaagctgaacaagacccacagcgcctacagccacaacgacatcgtgtacgtggactgcaaccccggcttcatcatgaacggcagcagagtgatcagatgccacaccgacaacacctgggtgcccggcgtgcccacctgcatcaagaaggccttcatcggctgcccccccccccccaagacccccaacggcaaccacaccggcggcaacatcgccagattcagccccggcatgagcatcctgtacagctgcgaccagggctacctgctggtgggcgaggccctgctgctgtgcacccacgagggcacctggagccagcccgccccccactgcaaggaggtgaactgcagcagccccgccgacatggacggcatccagaagggcctggagcccagaaagatgtaccagtacggcgccgtggtgaccctggagtgcgaggacggctacatgctggagggcagcccccagagccagtgccagagcgaccaccagtggaacccccccctggccgtgtgcagaagcagaagcctggcccccgtgctgtgcggcatcgccgccggcctgatcctgctgaccttcctgatcgtgatcaccctgtacgtgatcagcaagcacagagccagaaactactacaccgacaccagccagaaggaggccttccacctggaggccagagaggtgtacagcgtggacccctacaaccccgccagctag

SEQ ID NO: 77359 - DNA, 2226 bp, synthetic construct
  misc_feature 1..2226: note = Description of Artificial Sequence: Synthetic coding sequence
  source 1..2226: mol_type = other DNA
atggccgccgccgagggccccgtgggcgacggcgagctgtggcagacctggctgcccaaccacgtggtgttcctgagactgagagagggcctgaagaaccagagccccaccgaggccgagaagcccgccagcagcagcctgcccagcagcccccccccccagctgctgaccagaaacgtggtgttcggcctgggcggcgagctgttcctgtgggacggcgaggacagcagcttcctggtggtgagactgagaggccccagcggcggcggcgaggagcccgccctgagccagtaccagagactgctgtgcatcaacccccccctgttcgagatctaccaggtgctgctgagccccacccagcaccacgtggccctgatcggcatcaagggcctgatggtgctggagctgcccaagagatggggcaagaacagcgagttcgagggcggcaagagcaccgtgaactgcagcaccacccccgtggccgagagattcttcaccagcagcaccagcctgaccctgaagcacgccgcctggtaccccagcgagatcctggacccccacgtggtgctgctgaccagcgacaacgtgatcagaatctacagcctgagagagccccagacccccaccaacgtgatcatcctgagcgaggccgaggaggagagcctggtgctgaacaagggcagagcctacaccgccagcctgggcgagaccgccgtggccttcgacttcggccccctggccgccgtgcccaagaccctgttcggccagaacggcaaggacgaggtggtggcctaccccctgtacatcctgtacgagaacggcgagaccttcctgacctacatcagcctgctgcacagccccggcaacatcggcaagctgctgggccccctgcccatgcaccccgccgccgaggacaactacggctacgacgcctgcgccgtgctgtgcctgccctgcgtgcccaacatcctggtgatcgccaccgagagcggcatgctgtaccactgcgtggtgctggagggcgaggaggaggacgaccacaccagcgagaagagctgggacagcagaatcgacctgatccccagcctgtacgtgttcgagtgcgtggagctggagctggccctgaagctggccagcggcgaggacgaccccttcgacagcgacttcagctgccccgtgaagctgcacagagaccccaagtgccccagcagataccactgcacccacgaggccggcgtgcacagcgtgggcctgacctggatccacaagctgcacaagttcctgggcagcgacgaggaggacaaggacagcctgcaggagctgagcaccgagcagaagtgcttcgtggagcacatcctgtgcaccaagcccctgccctgcagacagcccgcccccatcagaggcttctggatcgtgcccgacatcctgggccccaccatgatctgcatcaccagcacctacgagtgcctgatctggcccctgctgagcaccgtgcaccccgccagcccccccctgctgtgcaccagagaggacgtggaggtggccgagagccccctgagagtgctggccgagacccccgacagcttcgagaagcacatcagaagcatcctgcagagaagcgtggccaaccccgccttcctgaaggccagcgagaaggacatcgcccccccccccgaggagtgcctgcagctgctgagcagagccacccaggtgttcagagagcagtacatcctgaagcaggacctggccaaggaggagatccagagaagagtgaagctgctgtgcgaccagaagaagaagcagctggaggacctgagctactgcagagaggagagaaagagcctgagagagatggccgagagactggccgacaagtacgaggaggccaaggagaagcaggaggacatcatgaacagaatgaagaagctgctgcacagcttccacagcgagctgcccgtgctgagcgacagcgagagagacatgaagaaggagctgcagctgatccccgaccagctgagacacctgggcaacgccatcaagcaggtgaccatgaagaaggactaccagcagcagaagatggagaaggtgctgagcctgcccaagcccaccatcatcctgagcgcctaccagagaaagtgcatccagagcatcctgaaggaggagggcgagcacatcagagagatggtgaagcagatcaacgacatcagaaaccacgtgaacttctag

SEQ ID NO: 77360 - DNA, 762 bp, synthetic construct
  misc_feature 1..762: note = Description of Artificial Sequence: Synthetic coding sequence
  source 1..762: mol_type = other DNA
atgatgatgaagatcccctggggcagcatccccgtgctgatgctgctgctgctgctgggcctgatcgacatcagccaggcccagctgagctgcaccggcccccccgccatccccggcatccccggcatccccggcacccccggccccgacggccagcccggcacccccggcatcaagggcgagaagggcctgcccggcctggccggcgaccacggcgagttcggcgagaagggcgaccccggcatccccggcaaccccggcaaggtgggccccaagggccccatgggccccaagggcggccccggcgcccccggcgcccccggccccaagggcgagagcggcgactacaaggccacccagaagatcgccttcagcgccaccagaaccatcaacgtgcccctgagaagagaccagaccatcagattcgaccacgtgatcaccaacatgaacaacaactacgagcccagaagcggcaagttcacctgcaaggtgcccggcctgtactacttcacctaccacgccagcagcagaggcaacctgtgcgtgaacctgatgagaggcagagagagagcccagaaggtggtgaccttctgcgactacgcctacaacaccttccaggtgaccaccggcggcatggtgctgaagctggagcagggcgagaacgtgttcctgcaggccaccgacaagaacagcctgctgggcatggagggcgccaacagcatcttcagcggcttcctgctgttccccgacatggaggcctag

SEQ ID NO: 77361 - DNA, 690 bp, synthetic construct
  misc_feature 1..690: note = Description of Artificial Sequence: Synthetic coding sequence
  source 1..690: mol_type = other DNA
atgaagatcccctggggcagcatccccgtgctgatgctgctgctgctgctgggcctgatcgacatcagccaggcccagctgagctgcaccggcccccccgccatccccggcatccccggcatccccggcacccccggccccgacggccagcccggcacccccggcatcaagggcgagaagggcctgcccggcctggccggcgaccacggcgagttcggcgagaagggcgaccccggcatccccggcaaccccggcaaggtgggccccaagggccccatgggccccaagggcggccccggcgcccccggcgcccccggccccaagggcgagagcggcgactacaaggccacccagaagatcgccttcagcgccaccagaaccatcaacgtgcccctgagaagagaccagaccatcagattcgaccacgtgatcaccaacatgaacaacaactacgagcccagaagcggcaagttcacctgcaaggtgcccggcctgtactacttcacctaccacgccagcagcagaggcaacctgtgcgtgaacctgatgagaggcagagagagagcccagaaggtggtgaccttctgcgactacgcctacaacaccttccaggtgaccaccggcggcatggtgctgaagctggagcagggcgagaacgtgttcctgcaggccaccgacaagaacagctag

SEQ ID NO: 77362 - DNA, 756 bp, synthetic construct
  misc_feature 1..756: note = Description of Artificial Sequence: Synthetic coding sequence
  source 1..756: mol_type = other DNA
atgaagatcccctggggcagcatccccgtgctgatgctgctgctgctgctgggcctgatcgacatcagccaggcccagctgagctgcaccggcccccccgccatccccggcatccccggcatccccggcacccccggccccgacggccagcccggcacccccggcatcaagggcgagaagggcctgcccggcctggccggcgaccacggcgagttcggcgagaagggcgaccccggcatccccggcaaccccggcaaggtgggccccaagggccccatgggccccaagggcggccccggcgcccccggcgcccccggccccaagggcgagagcggcgactacaaggccacccagaagatcgccttcagcgccaccagaaccatcaacgtgcccctgagaagagaccagaccatcagattcgaccacgtgatcaccaacatgaacaacaactacgagcccagaagcggcaagttcacctgcaaggtgcccggcctgtactacttcacctaccacgccagcagcagaggcaacctgtgcgtgaacctgatgagaggcagagagagagcccagaaggtggtgaccttctgcgactacgcctacaacaccttccaggtgaccaccggcggcatggtgctgaagctggagcagggcgagaacgtgttcctgcaggccaccgacaagaacagcctgctgggcatggagggcgccaacagcatcttcagcggcttcctgctgttccccgacatggaggcctag

SEQ ID NO: 77363 - DNA, 462 bp, synthetic construct
  misc_feature 1..462: note = Description of Artificial Sequence: Synthetic coding sequence
  source 1..462: mol_type = other DNA
atgaagatcccctggggcagcatccccgtgctgatgctgctgctgctgctgggcctgatcgacatcagccaggcccagctgagctgcaccggcccccccgccatccccggcatccccggcatccccggcacccccggccccgacggccagcccggcacccccggcatcaagggcgagaagggcctgcccggcctggccggcgaccacggcgagttcggcgagaagggcgaccccggcatccccggcaaccccggcaaggtgggccccaagggccccatgggccccaagggcggccccggcgcccccggcgcccccggccccaagggcgagagcggcgactacaaggccacccagaagatcgccttcagcgccaccagaaccatcaacgtgcccctgagaagagaccagaccatcagattcgaccacgtgatcaccaacatgaacaacaactacgagccctag

SEQ ID NO: 77364 - DNA, 738 bp, synthetic construct
  misc_feature 1..738: note = Description of Artificial Sequence: Synthetic coding sequence
  source 1..738: mol_type = other DNA
atggacgtgggccccagcagcctgccccacctgggcctgaagctgctgctgctgctgctgctgctgcccctgagaggccaggccaacaccggctgctacggcatccccggcatgcccggcctgcccggcgcccccggcaaggacggctacgacggcctgcccggccccaagggcgagcccggcatccccgccatccccggcatcagaggccccaagggccagaagggcgagcccggcctgcccggccaccccggcaagaacggccccatgggcccccccggcatgcccggcgtgcccggccccatgggcatccccggcgagcccggcgaggagggcagatacaagcagaagttccagagcgtgttcaccgtgaccagacagacccaccagccccccgcccccaacagcctgatcagattcaacgccgtgctgaccaacccccagggcgactacgacaccagcaccggcaagttcacctgcaaggtgcccggcctgtactacttcgtgtaccacgccagccacaccgccaacctgtgcgtgctgctgtacagaagcggcgtgaaggtggtgaccttctgcggccacaccagcaagaccaaccaggtgaacagcggcggcgtgctgctgagactgcaggtgggcgaggaggtgtggctggccgtgaacgactactacgacatggtgggcatccagggcagcgacagcgtgttcagcggcttcctgctgttccccgactag

SEQ ID NO: 77365 - DNA, 738 bp, synthetic construct; identical to SEQ ID NO: 77364
  misc_feature 1..738: note = Description of Artificial Sequence: Synthetic coding sequence
  source 1..738: mol_type = other DNA

SEQ ID NO: 77366 - DNA, 738 bp, synthetic construct; identical to SEQ ID NO: 77364
  misc_feature 1..738: note = Description of Artificial Sequence: Synthetic coding sequence
  source 1..738: mol_type = other DNA

SEQ ID NO: 77367 - DNA, 777 bp, synthetic construct
  misc_feature 1..777: note = Description of Artificial Sequence: Synthetic coding sequence
  source 1..777: mol_type = other DNA
atgctgctggtgctggtggtgctgatccccgtgctggtgagcagcggcggccccgagggccactacgagatgctgggcacctgcagaatggtgtgcgacccctaccccgccagaggccccggcgccggcgccagaaccgacggcggcgacgccctgagcgagcagagcggcgcccccccccccagcaccctggtgcagggcccccagggcaagcccggcagaaccggcaagcccggcccccccggcccccccggcgaccccggcccccccggccccgtgggcccccccggcgagaagggcgagcccggcaagcccggcccccccggcctgcccggcgccggcggcagcggcgccatcagcaccgccacctacaccaccgtgcccagagtggccttctacgccggcctgaagaacccccacgagggctacgaggtgctgaagttcgacgacgtggtgaccaacctgggcaacaactacgacgccgccagcggcaagttcacctgcaacatccccggcacctacttcttcacctaccacgtgctgatgagaggcggcgacggcaccagcatgtgggccgacctgtgcaagaacggccaggtgagagccagcgccatcgcccaggacgccgaccagaactacgactacgccagcaacagcgtgatcctgcacctggacgccggcgacgaggtgttcatcaagctggacggcggcaaggcccacggcggcaacagcaacaagtacagcaccttcagcggcttcatcatctacagcgactag

SEQ ID NO: 77368 - DNA, 864 bp, synthetic construct
  misc_feature 1..864: note = Description of Artificial Sequence: Synthetic coding sequence
  source 1..864: mol_type = other DNA
atggccctgggcctgctgatcgccgtgcccctgctgctgcaggccgcccccagaggcgccgcccactacgagatgatgggcacctgcagaatgatctgcgacccctacaccgccgcccccggcggcgagccccccggcgccaaggcccagccccccggccccagcaccgccgccctggaggtgatgcaggacctgagcgccaacccccccccccccttcatccagggccccaagggcgaccccggcagacccggcaagcccggccccagaggcccccccggcgagcccggcccccccggccccagaggcccccccggcgagaagggcgacagcggcagacccggcctgcccggcctgcagctgaccgccggcaccgccagcggcgtgggcgtggtgggcggcggcgccggcgtgggcggcgacagcgagggcgaggtgaccagcgccctgagcgccaccttcagcggccccaagatcgccttctacgtgggcctgaagagcccccacgagggctacgaggtgctgaagttcgacgacgtggtgaccaacctgggcaaccactacgaccccaccaccggcaagttcagctgccaggtgagaggcatctacttcttcacctaccacatcctgatgagaggcggcgacggcaccagcatgtgggccgacctgtgcaagaacggccaggtgagagccagcgccatcgcccaggacgccgaccagaactacgactacgccagcaacagcgtggtgctgcacctggacagcggcgacgaggtgtacgtgaagctggacggcggcaaggcccacggcggcaacaacaacaagtacagcaccttcagcggcttcctgctgtaccccgactag

SEQ ID NO: 77369 - DNA, 2007 bp, synthetic construct
  misc_feature 1..2007: note = Description of Artificial Sequence: Synthetic coding sequence
  source 1..2007: mol_type = other DNA
atgagcgtgagattcagagtgggcagagaggagaacgcccagtggtggctgctgtacctgctggtgcccgccctgttctgcagagccggcggcagcatccccatcccccagaagctgttcggcgaggtgaccagccccctgttccccaagccctaccccaacaacttcgagaccaccaccgtgatcaccgtgcccaccggctacagagtgaagctggtgttccagcagttcgacctggagcccagcgagggctgcttctacgactacgtgaagatcagcgccgacaagaagagcctgggcagattctgcggccagctgggcagccccctgggcaacccccccggcaagaaggagttcatgagccagggcaacaagatgctgctgaccttccacaccgacttcagcaacgaggagaacggcaccatcatgttctacaagggcttcctggcctactaccaggccgtggacctggacgagtgcgccagcagaagcaagagcggcgaggaggacccccagccccagtgccagcacctgtgccacaactacgtgggcggctacttctgcagctgcagacccggctacgagctgcaggaggacagacacagctgccaggccgagtgcagcagcgagctgtacaccgaggccagcggctacatcagcagcctggagtaccccagaagctacccccccgacctgagatgcaactacagcatcagagtggagagaggcctgaccctgcacctgaagttcctggagcccttcgacatcgacgaccaccagcaggtgcactgcccctacgaccagctgcagatctacgccaacggcaagaacatcggcgagttctgcggcaagcagagaccccccgacctggacaccagcagcaacgccgtggacctgctgttcttcaccgacgagagcggcgacagcagaggctggaagctgagatacaccaccgagatcatcaagtgcccccagcccaagaccctggacgagttcaccatcatccagaacctgcagccccagtaccagttcagagactacttcatcgccacctgcaagcagggctaccagctgatcgagggcatccaggtggtggccggcgtggtggacgtgagcgccggcagagtgagctggagcaccagcagccagacctgctgcaccagagtgtacacctgcaccgcccagggcatctggaagaacgagcagaagggcgagaagatccccagatgcctgcccgtgtgcggcaagcccgtgaaccccgtggagcagagacagagaatcatcggcggccagaaggccaagatgggcaacttcccctggcaggtgttcaccaacatccacggcagaggcggcggcgccctgctgggcgacagatggatcctgaccgccgcccacaccctgtaccccaaggagcacgaggcccagagcaacgccagcctggacgtgttcctgggccacaccaacgtggaggagctgatgaagctgggcaaccaccccatcagaagagtgagcgtgcaccccgactacagacaggacgagagctacaacttcgagggcgacatcgccctgctggagctggagaacagcgtgaccctgggccccaacctgctgcccatctgcctgcccgacaacgacaccttctacgacctgggcctgatgggctacgtgagcggcttcggcgtgatggaggagaagatcgcccacgacctgagattcgtgagactgcccgtggccaacccccaggcctgcgagaactggctgagaggcaagaacagaatggacgtgttcagccagaacatgttctgcgccggccaccccagcctgaagcaggacgcctgccagggcgacagcggcggcgtgttcgccgtgagagaccccaacaccgacagatgggtggccaccggcatcgtgagctggggcatcggctgcagcagaggctacggcttctacaccaaggtgctgaactacgtggactggatcaagaaggagatggaggaggaggactag

SEQ ID NO: 77370 - DNA, 1131 bp, synthetic construct
  misc_feature 1..1131: note = Description of Artificial Sequence: Synthetic coding sequence
  source 1..1131: mol_type = other DNA
atgtggctgctgtacctgctggtgcccgccctgttctgcagagccggcggcagcatccccatcccccagaagctgttcggcgaggtgaccagccccctgttccccaagccctaccccaacaacttcgagaccaccaccgtgatcaccgtgcccaccggctacagagtgaagctggtgttccagcagttcgacctggagcccagcgagggctgcttctacgactacgtgaagatcagcgccgacaagaagagcctgggcagattctgcggccagctgggcagccccctgggcaacccccccggcaagaaggagttcatgagccagggcaacaagatgctgctgaccttccacaccgacttcagcaacgaggagaacggcaccatcatgttctacaagggcttcctggcctactaccaggccgtggacctggacgagtgcgccagcagaagcaagagcggcgaggaggacccccagccccagtgccagcacctgtgccacaactacgtgggcggctacttctgcagctgcagacccggctacgagctgcaggaggacagacacagctgccaggccgagtgcagcagcgagctgtacaccgaggccagcggctacatcagcagcctggagtaccccagaagctacccccccgacctgagatgcaactacagcatcagagtggagagaggcctgaccctgcacctgaagttcctggagcccttcgacatcgacgaccaccagcaggtgcactgcccctacgaccagctgcagatctacgccaacggcaagaacatcggcgagttctgcggcaagcagagaccccccgacctggacaccagcagcaacgccgtggacctgctgttcttcaccgacgagagcggcgacagcagaggctggaagctgagatacaccaccgagatcatcaagtgcccccagcccaagaccctggacgagttcaccatcatccagaacctgcagccccagtaccagttcagagactacttcatcgccacctgcaagcagggctaccagctgatcgagggctgcacccccgcccagcacagagccttcggcagaatgaacagaagagagagaagattcctgggcgcctgccagtgcgtgggcagcccctag

SEQ ID NO: 77371 - DNA, 1962 bp, synthetic construct
  misc_feature 1..1962: note = Description of Artificial Sequence: Synthetic coding sequence
  source 1..1962: mol_type = other DNA
tggctgctgtacctgctggtgcccgccctgttctgcagagccggcggcagcatccccatcccccagaagctgttcggcgaggtgaccagccccctgttccccaagccctaccccaacaacttcgagaccaccaccgtgatcaccgtgcccaccggctacagagtgaagctggtgttccagcagttcgacctggagcccagcgagggctgcttctacgactacgtgaagatcagcgccgacaagaagagcctgggcagattctgcggccagctgggcagccccctgggcaacccccccggcaagaaggagttcatgagccagggcaacaagatgctgctgaccttccacaccgacttcagcaacgaggagaacggcaccatcatgttctacaagggcttcctggcctactaccaggccgtggacctggacgagtgcgccagcagaagcaagagcggcgaggaggacccccagccccagtgccagcacctgtgccacaactacgtgggcggctacttctgcagctgcagacccggctacgagctgcaggaggacagacacagctgccaggccgagtgcagcagcgagctgtacaccgaggccagcggctacatcagcagcctggagtaccccagaagctacccccccgacctgagatgcaactacagcatcagagtggagagaggcctgaccctgcacctgaagttcctggagcccttcgacatcgacgaccaccagcaggtgcactgcccctacgaccagctgcagatctacgccaacggcaagaacatcggcgagttctgcggcaagcagagaccccccgacctggacaccagcagcaacgccgtggacctgctgttcttcaccgacgagagcggcgacagcagaggctggaagctgagatacaccaccgagatcatcaagtgcccccagcccaagaccctggacgagttcaccatcatccagaacctgcagccccagtaccagttcagagactacttcatcgccacctgcaagcagggctaccagctgatcgagggcatccaggtggtggccggcgtggtggacgtgagcgccggcagagtgagctggagcaccagcagccagacctgctgcaccagagtgtacacctgcaccgcccagggcatctggaagaacgagcagaagggcgagaagatccccagatgcctgcccgtgtgcggcaagcccgtgaaccccgtggagcagagacagagaatcatcggcggccagaaggccaagatgggcaacttcccctggcaggtgttcaccaacatccacggcagaggcggcggcgccctgctgggcgacagatggatcctgaccgccgcccacaccctgtaccccaaggagcacgaggcccagagcaacgccagcctggacgtgttcctgggccacaccaacgtggaggagctgatgaagctgggcaaccaccccatcagaagagtgagcgtgcaccccgactacagacaggacgagagctacaacttcgagggcgacatcgccctgctggagctggagaacagcgtgaccctgggccccaacctgctgcccatctgcctgcccgacaacgacaccttctacgacctgggcctgatgggctacgtgagcggcttcggcgtgatggaggagaagatcgcccacgacctgagattcgtgagactgcccgtggccaacccccaggcctgcgagaactggctgagaggcaagaacagaatggacgtgttcagccagaacatgttctgcgccggccaccccagcctgaagcaggacgcctgccagggcgacagcggcggcgtgttcgccgtgagagaccccaacaccgacagatgggtggccaccggcatcgtgagctggggcatcggctgcagcagaggctacggcttctacaccaaggtgctgaactacgtggactggatcaagaaggagatggaggaggaggactag

SEQ ID NO: 77372 - DNA, 1464 bp, synthetic construct
  misc_feature 1..1464: note = Description of Artificial Sequence: Synthetic coding sequence
  source 1..1464: mol_type = other DNA
atgcccggccccagagtgtggggcaagtacctgtggagaagcccccacagcaagggctgccccggcgccatgtggtggctgctgctgtggggcgtgctgcaggcctgccccaccagaggcagcgtgctgctggcccaggagctgccccagcagctgaccagccccggctaccccgagccctacggcaagggccaggagagcagcaccgacatcaaggcccccgagggcttcgccgtgagactggtgttccaggacttcgacctggagcccagccaggactgcgccggcgacagcgtgaccatcagcttcgtgggcagcgaccccagccagttctgcggccagcagggcagccccctgggcagaccccccggccagagagagttcgtgagcagcggcagaagcctgagactgaccttcagaacccagcccagcagcgagaacaagaccgcccacctgcacaagggcttcctggccctgtaccagaccgtggccgtgaactacagccagcccatcagcgaggccagcagaggcagcgaggccatcaacgcccccggcgacaaccccgccaaggtgcagaaccactgccaggagccctactaccaggccgccgccgccggcgccctgacctgcgccacccccggcacctggaaggacagacaggacggcgaggaggtgctgcagtgcatgcccgtgtgcggcagacccgtgacccccatcgcccagaaccagaccaccctgggcagcagcagagccaagctgggcaacttcccctggcaggccttcaccagcatccacggcagaggcggcggcgccctgctgggcgacagatggatcctgaccgccgcccacaccatctaccccaaggacagcgtgagcctgagaaagaaccagagcgtgaacgtgttcctgggccacaccgccatcgacgagatgctgaagctgggcaaccaccccgtgcacagagtggtggtgcaccccgactacagacagaacgagagccacaacttcagcggcgacatcgccctgctggagctgcagcacagcatccccctgggccccaacgtgctgcccgtgtgcctgcccgacaacgagaccctgtacagaagcggcctgctgggctacgtgagcggcttcggcatggagatgggctggctgaccaccgagctgaagtacagcagactgcccgtggcccccagagaggcctgcaacgcctggctgcagaagagacagagacccgaggtgttcagcgacaacatgttctgcgtgggcgacgagacccagagacacagcgtgtgccagggcgacagcggcagcgtgtacgtggtgtgggacaaccacgcccaccactgggtggccaccggcatcgtgagctggggcatcggctgcggcgagggctacgacttctacaccaaggtgctgagctacgtggactggatcaagggcgtgatgaacggcaagaactag

SEQ ID NO: 77373 - DNA, 1317 bp, synthetic construct
  misc_feature 1..1317: note = Description of Artificial Sequence: Synthetic coding sequence
  source 1..1317: mol_type = other DNA
atgcccggccccagagtgtggggcaagtacctgtggagaagcccccacagcaagggctgccccggcgccatgtggtggctgctgctgtggggcgtgctgcaggcctgccccaccagaggcagcgtgctgctggcccaggagctgccccagcagctgaccagccccggctaccccgagccctacggcaagggccaggagagcagcaccgacatcaaggcccccgagggcttcgccgtgagactggtgttccaggacttcgacctggagcccagccaggactgcgccggcgacagcgtgaccatcagcttcgtgggcagcgaccccagccagttctgcggccagcagggcagccccctgggcagaccccccggccagagagagttcgtgagcagcggcagaagcctgagactgaccttcagaacccagcccagcagcgagaacaagaccgcccacctgcacaagggcttcctggccctgtaccagaccgtggccgtgaactacagccagcccatcagcgaggccagcagaggcagcgaggccatcaacgcccccggcgacaaccccgccaaggtgcagaaccactgccaggagccctactaccaggccgccgccgccggcgccctgacctgcgccacccccggcacctggaaggacagacaggacggcgaggaggtgctgcagtgcatgcccgtgtgcggcagacccgtgacccccatcgcccagaaccagaccaccctgggcagcagcagagccaagctgggcaacttcccctggcaggccttcaccagcatccacggcagaggcggcggcgccctgctgggcgacagatggatcctgaccgccgcccacaccatctaccccaaggacagcgtgagcctgagaaagaaccagagcgtgaacgtgttcctgggccacaccgccatcgacgagatgctgaagctgggcaaccaccccgtgcacagagtggtggtgcaccccgactacagacagaacgagagccacaacttcagcggcgacatcgccctgctggagctgcagcacagcatccccctgggccccaacgtgctgcccgtgtgcctgcccgacaacgagaccctgtacagaagcggcctgctgggctacgtgagcggcttcggcatggagatgggctggctgaccaccgagctgaagtacagcagactgcccgtggcccccagagaggcctgcaacgcctggctgcagaagagacagagacccgaggtgttcagcgacaacatgttctgcgtgggcgacgaggccggcgagagcctggagcccggcagaagaagactgcagtag

SEQ ID NO: 77374 - DNA, 2067 bp, synthetic construct
  misc_feature 1..2067: note = Description of Artificial Sequence: Synthetic coding sequence
  source 1..2067: mol_type = other DNA
atgtggtgcatcgtgctgttcagcctgctggcctgggtgtacgccgagcccaccatgtacggcgagatcctgagccccaactacccccaggcctaccccagcgaggtggagaagagctgggacatcgaggtgcccgagggctacggcatccacctgtacttcacccacctggacatcgagctgagcgagaactgcgcctacgacagcgtgcagatcatcagcggcgacaccgaggagggcagactgtgcggccagagaagcagcaacaacccccacagccccatcgtggaggagttccaggtgccctacaacaagctgcaggtgatcttcaagagcgacttcagcaacgaggagagattcaccggcttcgccgcctactacgtggccaccgacatcaacgagtgcaccgacttcgtggacgtgccctgcagccacttctgcaacaacttcatcggcggctacttctgcagctgcccccccgagtacttcctgcacgacgacatgaagaactgcggcgtgaactgcagcggcgacgtgttcaccgccctgatcggcgagatcgccagccccaactaccccaagccctaccccgagaacagcagatgcgagtaccagatcagactggagaagggcttccaggtggtggtgaccctgagaagagaggacttcgacgtggaggccgccgacagcgccggcaactgcctggacagcctggtgttcgtggccggcgacagacagttcggcccctactgcggccacggcttccccggccccctgaacatcgagaccaagagcaacgccctggacatcatcttccagaccgacctgaccggccagaagaagggctggaagctgagataccacggcgaccccatgccctgccccaaggaggacacccccaacagcgtgtgggagcccgccaaggccaagtacgtgttcagagacgtggtgcagatcacctgcctggacggcttcgaggtggtggagggcagagtgggcgccaccagcttctacagcacctgccagagcaacggcaagtggagcaacagcaagctgaagtgccagcccgtggactgcggcatccccgagagcatcgagaacggcaaggtggaggaccccgagagcaccctgttcggcagcgtgatcagatacacctgcgaggagccctactactacatggagaacggcggcggcggcgagtaccactgcgccggcaacggcagctgggtgaacgaggtgctgggccccgagctgcccaagtgcgtgcccgtgtgcggcgtgcccagagagcccttcgaggagaagcagagaatcatcggcggcagcgacgccgacatcaagaacttcccctggcaggtgttcttcgacaacccctgggccggcggcgccctgatcaacgagtactgggtgctgaccgccgcccacgtggtggagggcaacagagagcccaccatgtacgtgggcagcaccagcgtgcagaccagcagactggccaagagcaagatgctgacccccgagcacgtgttcatccaccccggctggaagctgctggaggtgcccgagggcagaaccaacttcgacaacgacatcgccctggtgagactgaaggaccccgtgaagatgggccccaccgtgagccccatctgcctgcccggcaccagcagcgactacaacctgatggacggcgacctgggcctgatcagcggctggggcagaaccgagaagagagacagagccgtgagactgaaggccgccagactgcccgtggcccccctgagaaagtgcaaggaggtgaaggtggagaagcccaccgccgacgccgaggcctacgtgttcacccccaacatgatctgcgccggcggcgagaagggcatggacagctgcaagggcgacagcggcggcgccttcgccgtgcaggaccccaacgacaagaccaagttctacgccgccggcctggtgagctggggcccccagtgcggcacctacggcctgtacaccagagtgaagaactacgtggactggatcatgaagaccatgcaggagaacagcacccccagagaggactag

SEQ ID NO: 77375 - DNA, 2067 bp, synthetic construct; identical to SEQ ID NO: 77374
  misc_feature 1..2067: note = Description of Artificial Sequence: Synthetic coding sequence
  source 1..2067: mol_type = other DNA

SEQ ID NO: 77376 - DNA, 2049 bp, synthetic construct
  misc_feature 1..2049: note = Description of Artificial Sequence: Synthetic coding sequence
  source 1..2049: mol_type = other DNA
atgtacggcgagatcctgagccccaactacccccaggcctaccccagcgaggtggagaagagctgggacatcgaggtgcccgagggctacggcatccacctgtacttcacccacctggacatcgagctgagcgagaactgcgcctacgacagcgtgcagatcatcagcggcgacaccgaggagggcagactgtgcggccagagaagcagcaacaacccccacagccccatcgtggaggagttccaggtgccctacaacaagctgcaggtgatcttcaagagcgacttcagcaacgaggagagattcaccggcttcgccgcctactacgtggccaccgacaaggacgagtgcagcggcagagcccagctgtggaaccacatgagcgacgtgccctgcagccacttctgcaacaacttcatcggcggctacttctgcagctgcccccccgagtacttcctgcacgacgacatgaagaactgcggcgtgaactgcagcggcgacgtgttcaccgccctgatcggcgagatcgccagccccaactaccccaagccctaccccgagaacagcagatgcgagtaccagatcagactggagaagggcttccaggtgcacctgagcctgctgctgaagctggagtgcagcggcgccatcaccgcccactgcagcctggacctgctgggcagcatcgccggcgacagacagttcggcccctactgcggccacggcttccccggccccctgaacatcgagaccaagagcaacgccctggacatcatcttccagaccgacctgaccggccagaagaagggctggaagctgagataccacggcgaccccatgccctgccccaaggaggacacccccaacagcgtgtgggagcccgccaaggccaagtacgtgttcagagacgtggtgcagatcacctgcctggacggcttcgaggtggtggagggcagagtgggcgccaccagcttctacagcacctgccagagcaacggcaagtggagcaacagcaagctgaagtgccagcccgtggactgcggcatccccgagagcatcgagaacggcaaggtggaggaccccgagagcaccctgttcggcagcgtgatcagatacacctgcgaggagccctactactacatggagaacggcggcggcggcgaggagagagagagaggcgagtaccactgcgccggcaacggcagctgggtgaacgaggtgctgggccccgagctgcccaagtgcgtgcccgtgtgcggcgtgcccagagagcccttcgaggagaagcagagaatcatcggcggcagcgacgccgacatcaagaacttcccctggcaggtgttcttcgacaacccctgggccggcggcgccctgatcaacgagtactgggtgctgaccgccgcccacgtggtggagggcaacagagagcccaccatgtacgtgggcagcaccagcgtgcagaccagcagactggccaagagcaagatgctgacccccgagcacgtgttcatccaccccggctggaagctgctggaggtgcccgagggcagaaccaacttcgacaacgacatcgccctggtgagactgaaggaccccgtgaagatgggccccaccgtgagccccatctgcctgcccggcaccagcagcgactacaacctgatggacggcgacctgggcctgatcagcggctggggcagaaccgagaagagagacagagccgtgagactgaaggccgccagactgcccgtggcccccctgagaaagtgcaaggaggtgaaggtggagaagcccaccgccgacgccgaggcctacgtgttcacccccaacatgatctgcgccggcggcgagaagggcatggacagctgcaagggcgacagcggcggcgccttcgccgtgcaggaccccaacgacaagaccaagttctacgccgccggcctggtgagctggggcccccagtgcggcacctacggcctgtacaccagagtgaagaactacgtggactggatcatgaagaccatgcaggagaacagcacccccagagaggactag

SEQ ID NO: 77377 - DNA, 507 bp, synthetic construct
  misc_feature 1..507: note = Description of Artificial Sequence: Synthetic coding sequence
  source 1..507: mol_type = other DNA
atgtggtgcatcgtgctgttcagcctgctggcctgggtgtacgccgagcccaccatgtacggcgagatcctgagccccaactacccccaggcctaccccagcgaggtggagaagagctgggacatcgaggtgcccgagggctacggcatccacctgtacttcacccacctggacatcgagctgagcgagaactgcgcctacgacagcgtgcagatcatcagcggcgacaccgaggagggcagactgtgcggccagagaagcagcaacaacccccacagccccatcgtggaggagttccaggtgccctacaacaagctgcaggtgatcttcaagagcgacttcagcaacgaggagagattcaccggcttcgccgcctactacgtggccaccgacatcaacgagtgcaccgacttcgtggacgtgccctgcagccacttctgcaacaacttcatcggcggctacttctgcagctgcccccccgagtacttcctgcacgacgacatgtag

SEQ ID NO: 77378 - DNA, 2067 bp, synthetic construct; identical to SEQ ID NO: 77374
  misc_feature 1..2067: note = Description of Artificial Sequence: Synthetic coding sequence
  source 1..2067: mol_type = other DNA

SEQ ID NO: 77379 - DNA, 312 bp, synthetic construct
  misc_feature 1..312: note = Description of Artificial Sequence: Synthetic coding sequence
  source 1..312: mol_type = other DNA
atgtggtgcatcgtgctgttcagcctgctggcctgggtgtacgccgagcccaccatgtacggcgagatcctgagccccaactacccccaggcctaccccagcgaggtggagaagagctgggacatcgaggtgcccgagggctacggcatccacctgtacttcacccacctggacatcgagctgagcgagaactgcgcctacgacagcgtgcagatcatcagcggcgacaccgaggagggcagactgtgcggccagagaagcagcaacaacccccacagccccatcgtggaggagttccaggtgccctactag

SEQ ID NO: 77380 - DNA, 306 bp, synthetic construct
  misc_feature 1..306: note = Description of Artificial Sequence: Synthetic coding sequence
  source 1..306: mol_type = other DNA
atgtggtgcatcgtgctgttcagcctgctggcctgggtgtacgccgagcccaccatgtacggcgagatcctgagccccaactacccccaggcctaccccagcgaggtggagaagagctgggacatcgaggtgcccgagggctacggcatccacctgtacttcacccacctggacatcgagctgagcgagaactgcgcctacgacagcgtgcagatcatcagcggcgacaccgaggagggcagactgtgcggccagagaagcagcaacaacccccacagccccatcgtggaggagttccaggtgtag

SEQ ID NO: 77381 - DNA, 2259 bp, synthetic construct
  misc_feature 1..2259: note = Description of Artificial Sequence: Synthetic coding sequence
  source 1..2259: mol_type = other DNA
atgggccccctgatggtgctgttctgcctgctgttcctgtaccccggcctggccgacagcgcccccagctgcccccagaacgtgaacatcagcggcggcaccttcaccctgagccacggctgggcccccggcagcctgctgacctacagctgcccccagggcctgtaccccagccccgccagcagactgtgcaagagcagcggccagtggcagacccccggcgccaccagaagcctgagcaaggccgtgtgcaagcccgtgagatgccccgcccccgtgagcttcgagaacggcatctacacccccagactgggcagctaccccgtgggcggcaacgtgagcttcgagtgcgaggacggcttcatcctgagaggcagccccgtgagacagtgcagacccaacggcatgtgggacggcgagaccgccgtgtgcgacaacggcgccggccactgccccaaccccggcatcagcctgggcgccgtgagaaccggcttcagattcggccacggcgacaaggtgagatacagatgcagcagcaacctggtgctgaccggcagcagcgagagagagtgccagggcaacggcgtgtggagcggcaccgagcccatctgcagacagccctacagctacgacttccccgaggacgtggcccccgccctgggcaccagcttcagccacatgctgggcgccaccaaccccacccagaagaccaaggagagcctgggcagaaagatccagatccagagaagcggccacctgaacctgtacctgctgctggactgcagccagagcgtgagcgagaacgacttcctgatcttcaaggagagcgccagcctgatggtggacagaatcttcagcttcgagatcaacgtgagcgtggccatcatcaccttcgccagcgagcccaaggtgctgatgagcgtgctgaacgacaacagcagagacatgaccgaggtgatcagcagcctggagaacgccaactacaaggaccacgagaacggcaccggcaccaacacctacgccgccctgaacagcgtgtacctgatgatgaacaaccagatgagactgctgggcatggagaccatggcctggcaggagatcagacacgccatcatcctgctgaccgacggcaagagcaacatgggcggcagccccaagaccgccgtggaccacatcagagagatcctgaacatcaaccagaagagaaacgactacctggacatctacgccatcggcgtgggcaagctggacgtggactggagagagctgaacgagctgggcagcaagaaggacggcgagagacacgccttcatcctgcaggacaccaaggccctgcaccaggtgttcgagcacatgctggacgtgagcaagctgaccgacaccatctgcggcgtgggcaacatgagcgccaacgccagcgaccaggagagaaccccctggcacgtgaccatcaagcccaagagccaggagacctgcagaggcgccctgatcagcgaccagtgggtgctgaccgccgcccactgcttcagagacggcaacgaccacagcctgtggagagtgaacgtgggcgaccccaagagccagtggggcaaggagttcctgatcgagaaggccgtgatcagccccggcttcgacgtgttcgccaagaagaaccagggcatcctggagttctacggcgacgacatcgccctgctgaagctggcccagaaggtgaagatgagcacccacgccagacccatctgcctgccctgcaccatggaggccaacctggccctgagaagaccccagggcagcacctgcagagaccacgagaacgagctgctgaacaagcagagcgtgcccgcccacttcgtggccctgaacggcagcaagctgaacatcaacctgaagatgggcgtggagtggaccagctgcgccgaggtggtgagccaggagaagaccatgttccccaacctgaccgacgtgagagaggtggtgaccgaccagttcctgtgcagcggcacccaggaggacgagagcccctgcaagggcgagagcggcggcgccgtgttcctggagagaagattcagattcttccaggtgggcctggtgagctggggcctgtacaacccctgcctgggcagcgccgacaagaacagcagaaagagagcccccagaagcaaggtgcccccccccagagacttccacatcaacctgttcagaatgcagccctggctgagacagcacctgggcgacgtgctgaacttcctgcccctgtag

SEQ ID NO: 77382 - DNA, 1134 bp, synthetic construct
  misc_feature 1..1134: note = Description of Artificial Sequence: Synthetic coding sequence
  source 1..1134: mol_type = other DNA
atgaccgaggtgatcagcagcctggagaacgccaactacaaggaccacgagaacggcaccggcaccaacacctacgccgccctgaacagcgtgtacctgatgatgaacaaccagatgagactgctgggcatggagaccatggcctggcaggagatcagacacgccatcatcctgctgaccgacggcaagagcaacatgggcggcagccccaagaccgccgtggaccacatcagagagatcctgaacatcaaccagaagagaaacgactacctggacatctacgccatcggcgtgggcaagctggacgtggactggagagagctgaacgagctgggcagcaagaaggacggcgagagacacgccttcatcctgcaggacaccaaggccctgcaccaggtgttcgagcacatgctggacgtgagcaagctgaccgacaccatctgcggcgtgggcaacatgagcgccaacgccagcgaccaggagagaaccccctggcacgtgaccatcaagcccaagagccaggagacctgcagaggcgccctgatcagcgaccagtgggtgctgaccgccgcccactgcttcagagacggcaacgaccacagcctgtggagagtgaacgtgggcgaccccaagagccagtggggcaaggagttcctgatcgagaaggccgtgatcagccccggcttcgacgtgttcgccaagaagaaccagggcatcctggagttctacggcgacgacatcgccctgctgaagctggcccagaaggtgaagatgagcacccacgccagacccatctgcctgccctgcaccatggaggccaacctggccctgagaagaccccagggcagcacctgcagagaccacgagaacgagctgctgaacaagcagagcgtgcccgcccacttcgtggccctgaacggcagcaagctgaacatcaacctgaagatgggcgtggagtggaccagctgcgccgaggtggtgagccaggagaagaccatgttccccaacctgaccgacgtgagagaggtggtgaccgaccagttcctgtgcagcggcacccaggaggacgagagcccctgcaagggcggcagcggcgagctgggcagcctgcagcccctgccctggctgtgctag

SEQ ID NO: 77383 - DNA, 2259 bp, synthetic construct; identical to SEQ ID NO: 77381
  misc_feature 1..2259: note = Description of Artificial Sequence: Synthetic coding sequence
  source 1..2259: mol_type = other DNA

SEQ ID NO: 77384 - DNA, 1578 bp, synthetic construct
  misc_feature 1..1578: note = Description of Artificial Sequence: Synthetic coding sequence
  source 1..1578: mol_type = other DNA
atggtgctgttctgcctgctgttcctgtaccccgccggccactgccccaaccccggcatcagcctgggcgccgtgagaaccggcttcagattcggccacggcgacaaggtgagatacagatgcagcagcaacctggtgctgaccggcagcagcgagagagagtgccagggcaacggcgtgtggagcggcaccgagcccatctgcagacagccctacagctacgacttccccgaggacgtggcccccgccctgggcaccagcttcagccacatgctgggcgccaccaaccccacccagaagaccaaggaccacgagaacggcaccggcaccaacacctacgccgccctgaacagcgtgtacctgatgatgaacaaccagatgagactgctgggcatggagaccatggcctggcaggagatcagacacgccatcatcctgctgaccgacggcaagagcaacatgggcggcagccccaagaccgccgtggaccacatcagagagatcctgaacatcaaccagaagagaaacgactacctggacatctacgccatcggcgtgggcaagctggacgtggactggagagagctgaacgagctgggcagcaagaaggacggcgagagacacgccttcatcctgcaggacaccaaggccctgcaccaggtgttcgagcacatgctggacgtgagcaagctgaccgacaccatctgcggcgtgggcaacatgagcgccaacgccagcgaccaggagagaaccccctggcacgtgaccatcaagcccaagagccaggagacctgcagaggcgccctgatcagcgaccagtgggtgctgaccgccgcccactgcttcagagacggcaacgaccacagcctgtggagagtgaacgtgggcgaccccaagagccagtggggcaaggagttcctgatcgagaaggccgtgatcagccccggcttcgacgtgttcgccaagaagaaccagggcatcctggagttctacggcgacgacatcgccctgctgaagctggcccagaaggtgaagatgagcacccacgccagacccatctgcctgccctgcaccatggaggccaacctggccctgagaagaccccagggcagcacctgcagagaccacgagaacgagctgctgaacaagcagagcgtgcccgcccacttcgtggccctgaacggcagcaagctgaacatcaacctgaagatgggcgtggagtggaccagctgcgccgaggtggtgagccaggagaagaccatgttccccaacctgaccgacgtgagagaggtggtgaccgaccagttcctgtgcagcggcacccaggaggacgagagcccctgcaagggcgagagcggcggcgccgtgttcctggagagaagattcagattcttccaggtgggcctggtgagctggggcctgtacaacccctgcctgggcagcgccgacaagaacagcagaaagagagcccccagaagcaaggtgcccccccccagagacttccacatcaacctgttcagaatgcagccctggctgagacagcacctgggcgacgtgctgaacttcctgcccctgtag

SEQ ID NO: 77385 - DNA, 2259 bp, synthetic construct; identical to SEQ ID NO: 77381
  misc_feature 1..2259: note = Description of Artificial Sequence: Synthetic coding sequence
  source 1..2259: mol_type = other DNA

SEQ ID NO: 77386 - DNA, 1578 bp, synthetic construct; identical to SEQ ID NO: 77384
  misc_feature 1..1578: note = Description of Artificial Sequence: Synthetic coding sequence
  source 1..1578: mol_type = other DNA

SEQ ID NO: 77387 - DNA, 2259 bp, synthetic construct; identical to SEQ ID NO: 77381
  misc_feature 1..2259: note = Description of Artificial Sequence: Synthetic coding sequence
  source 1..2259: mol_type = other DNA

SEQ ID NO: 77388 - DNA, 420 bp, synthetic construct
  misc_feature 1..420: note = Description of Artificial Sequence: Synthetic coding sequence
  source 1..420: mol_type = other DNA
atgggccccctgatggtgctgttctgcctgctgttcctgtaccccggcctggccgacagcgcccccagctgcccccagaacgtgaacatcagcggcggcaccttcaccctgagccacggctgggcccccggcagcctgctgacctacagctgcccccagggcctgtaccccagccccgccagcagactgtgcaagagcagcggccagtggcagacccccggcgccaccagaagcctgagcaaggccgtgtgcaagcccgtgagatgccccgcccccgtgagcttcgagaacggcatctacacccccagactgggcagctaccccgtgggcggcaacgtgagcttcgagtgcgaggacggcttcatcctgagaggcagccccgtgagacagtgcagacccaacggcatgtgggacggctag

SEQ ID NO: 77389 - DNA, 510 bp, synthetic construct
  misc_feature 1..510: note = Description of Artificial Sequence: Synthetic coding sequence
  source 1..510: mol_type = other DNA
atgagagccctgtgcatcagagagacctgcagcagcgagctgggcttcagcagaaactggagcagaagaaaggccggccactgccccaaccccggcatcagcctgggcgccgtgagaaccggcttcagattcggccacggcgacaaggtgagatacagatgcagcagcaacctggtgctgaccggcagcagcgagagagagtgccagggcaacggcgtgtggagcggcaccgagcccatctgcagacagccctacagctacgacttccccgaggacgtggcccccgccctgggcaccagcttcagccacatgctgggcgccaccaaccccacccagaagaccaaggaccacgagaacggcaccggcaccaacacctacgccgccctgaacagcgtgtacctgatgatgaacaaccagatgagactgctgggcatggagaccatggcctggcaggagatcagacacgccatcatcctgctgaccgacggcaagagcaacatgggcggctag

SEQ ID NO: 77390 - DNA, 420 bp, synthetic construct; identical to SEQ ID NO: 77388
  misc_feature 1..420: note = Description of Artificial Sequence: Synthetic coding sequence
  source 1..420: mol_type = other DNA

SEQ ID NO: 77391 - DNA, 2259 bp, synthetic construct; identical to SEQ ID NO: 77381
  misc_feature 1..2259: note = Description of Artificial Sequence: Synthetic coding sequence
  source 1..2259: mol_type = other DNA

SEQ ID NO: 77392 - DNA, 378 bp, synthetic construct
  misc_feature 1..378: note = Description of Artificial Sequence: Synthetic coding sequence
  source 1..378: mol_type = other DNA
atgggccccctgatggtgctgttctgcctgctgttcctgtaccccggcctggccgacagcgcccccagctgcccccagaacgtgaacatcagcggcggcaccttcaccctgagccacggctgggcccccggcagcctgctgacctacagctgcccccagggcctgtaccccagccccgccagcagactgtgcaagagcagcggccagtggcagacccccggcgccaccagaagcctgagcaaggccgtgtgcaagcccggccactgccccaaccccggcatcagcctgggcgccgtgagaaccggcttcagattcggccacggcgacaaggtgagatacagatgcagcagcaacctggtgctgaccggcagcagctag

SEQ ID NO: 77393 - DNA, 510 bp, synthetic construct; identical to SEQ ID NO: 77389
  misc_feature 1..510: note = Description of Artificial Sequence: Synthetic coding sequence
  source 1..510: mol_type = other DNA

SEQ ID NO: 77394 - DNA, 1062 bp, synthetic construct
  misc_feature 1..1062: note = Description of Artificial Sequence: Synthetic coding sequence
  source 1..1062: mol_type = other DNA
atgggccccctgatggtgctgttctgcctgctgttcctgtaccccgccggccactgccccaaccccggcatcagcctgggcgccgtgagaaccggcttcagattcggccacggcgacaaggtgagatacagatgcagcagcaacctggtgctgaccggcagcagcgagagagagtgccagggcaacggcgtgtggagcggcaccgagcccatctgcagacagccctacagctacgacttccccgaggacgtggcccccgccctgggcaccagcttcagccacatgctgggcgccaccaaccccacccagaagaccaaggagagcctgggcagaaagatccagatccagagaagcggccacctgaacctgtacctgctgctggactgcagccagagcgtgagcgagaacgacttcctgatcttcaaggagagcgccagcctgatggtggacagaatcttcagcttcgagatcaacgtgagcgtggccatcatcaccttcgccagcgagcccaaggtgctgatgagcgtgctgaacgacaacagcagagacatgaccgaggtgatcagcagcctggagaacgccaactacaaggaccacgagaacggcaccggcaccaacacctacgccgccctgaacagcgtgtacctgatgatgaacaaccagatgagactgctgggcatggagaccatggcctggcaggagatcagacacgccatcatcctgctgaccgacggcaagagcaacatgggcggcagccccaagaccgccgtggaccacatcagagagatcctgaacatcaaccagaagagaaacgactacctggacatctacgccatcggcgtgggcaagctggacgtggactggagagagctgaacgagctgggcagcaagaaggacggcgagagacacgccttcatcctgcaggacaccaaggccctgcaccaggtgttcgagcacatgctggacgtgagcaagctgaccgacaccatctgcggcgtgggcaacatgagcgccaacgccagcgaccaggagagaaccccctggcacgtgaccatcaagtag

SEQ ID NO: 77395 - DNA, 2259 bp, synthetic construct; identical to SEQ ID NO: 77381
  misc_feature 1..2259: note = Description of Artificial Sequence: Synthetic coding sequence
  source 1..2259: mol_type = other DNA

SEQ ID NO: 77396 - DNA, 1062 bp, synthetic construct; identical to SEQ ID NO: 77394
  misc_feature 1..1062: note = Description of Artificial Sequence: Synthetic coding sequence
  source 1..1062: mol_type = other DNA

SEQ ID NO: 77397 - DNA, 1062 bp, synthetic construct; identical to SEQ ID NO: 77394
  misc_feature 1..1062: note = Description of Artificial Sequence: Synthetic coding sequence
  source 1..1062: mol_type = other DNA

SEQ ID NO: 77398 - DNA, 510 bp, synthetic construct; identical to SEQ ID NO: 77389
  misc_feature 1..510: note = Description of Artificial Sequence: Synthetic coding sequence
  source 1..510: mol_type = other DNA

SEQ ID NO: 77399 - DNA, 1578 bp, synthetic construct; identical to SEQ ID NO: 77384
  misc_feature 1..1578: note = Description of Artificial Sequence: Synthetic coding sequence
  source 1..1578: mol_type = other DNA

SEQ ID NO: 77400 - DNA, 1062 bp, synthetic construct; identical to SEQ ID NO: 77394
  misc_feature 1..1062: note = Description of Artificial Sequence: Synthetic coding sequence
  source 1..1062: mol_type = other DNA

SEQ ID NO: 77401 - DNA, 405 bp, synthetic construct
  misc_feature 1..405: note = Description of Artificial Sequence: Synthetic coding sequence
  source 1..405: mol_type = other DNA
tgaggccactgccccaaccccggcatcagcctgggcgccgtgagaaccggcttcagattcggccacggcgacaaggtgagatacagatgcagcagcaacctggtgctgaccggcagcagcgagagagagtgccagggcaacggcgtgtggagcggcaccgagcccatctgcagacagccctacagctacgacttccccgaggacgtggcccccgccctgggcaccagcttcagccacatgctgggcgccaccaaccccacccagaagaccaaggagagcctgggcagaaagatccagatccagagaagcggccacctgaacctgtacctgctgctggactgcagccagagcgtgagcgagaacgacttcctgatcttcaaggagagcgccagcctgatggtgtag

SEQ ID NO: 77402 - DNA, 1578 bp, synthetic construct; identical to SEQ ID NO: 77384
  misc_feature 1..1578: note = Description of Artificial Sequence: Synthetic coding sequence
  source 1..1578: mol_type = other DNA

SEQ ID NO: 77403 - DNA, 1578 bp, synthetic construct; identical to SEQ ID NO: 77384
  misc_feature 1..1578: note = Description of Artificial Sequence: Synthetic coding sequence
  source 1..1578: mol_type = other DNA

SEQ ID NO: 77404 - DNA, 1062 bp, synthetic construct; identical to SEQ ID NO: 77394
  misc_feature 1..1062: note = Description of Artificial Sequence: Synthetic coding sequence
  source 1..1062: mol_type = other DNA

SEQ ID NO: 77405 - DNA, 477 bp, synthetic construct
  misc_feature 1..477: note = Description of Artificial Sequence: Synthetic coding sequence
  source 1..477: mol_type = other DNA
atgagagccctgtgcatcagagagacctgcagcagcgagctgggcttcagcagaaactggagcagaagaaaggccggccactgccccaaccccggcatcagcctgggcgccgtgagaaccggcttcagattcggccacggcgacaaggtgagatacagatgcagcagcaacctggtgctgaccggcagcagcgagagagagtgccagggcaacggcgtgtggagcggcaccgagcccatctgcagacagccctacagctacgacttccccgaggacgtggcccccgccctgggcaccagcttcagccacatgctgggcgccaccaaccccacccagaagaccaaggagagcctgggcagaaagatccagatccagagaagcggccacctgaacctgtacctgctgctggactgcagccagagcgtgagcgagaacgacttcctgatcttcaaggagagcgccagcctgatggtgtag

SEQ ID NO: 77406 - DNA, 477 bp, synthetic construct; identical to SEQ ID NO: 77405
  misc_feature 1..477: note = Description of Artificial Sequence: Synthetic coding sequence
  source 1..477: mol_type = other DNA

SEQ ID NO: 77407 - DNA, 978 bp, synthetic construct
  misc_feature 1..978: note = Description of Artificial Sequence: Synthetic coding sequence
  source 1..978: mol_type = other DNA
atgggcaccagaagcgccatcgccgcccccagaatcctgtgcagcagaggcctgagaagcggcagcgccagagccaccggcagcggcgtggagagaagccccagcgccgccaaccccaccctgatgaccagcctgagaacctggcccctgccctgggccctgcccagccccacctgcctgggcccccccatcccccccagaagacagagaatcttcagcttcgagatcaacgtgagcgtggccatcatcaccttcgccagcgagcccaaggtgctgatgagcgtgctgaacgacaacagcagagacatgaccgaggtgatcagcagcctggagaacgccaactacaaggaccacgagaacggcaccggcaccaacacctacgccgccctgaacagcgtgtacctgatgatgaacaaccagatgagactgctgggcatggagaccatggcctggcaggagatcagacacgccatcatcctgctgaccgacggcaagagcaacatgggcggcagccccaagaccgccgtggaccacatcagagagatcctgaacatcaaccagaagagaaacgactacctggacatctacgccatcggcgtgggcaagctggacgtggactggagagagctgaacgagctgggcagcaagaaggacggcgagagacacgccttcatcctgcaggacaccaaggccctgcaccaggtgttcgagcacatgctggacgtgagcaagctgaccgacaccatctgcggcgtgggcaacatgagcgccaacgccagcgaccaggagagaaccccctggcacgtgaccatcaagcccaagagccaggagacctgcagaggcgccctgatcagcgaccagtgggtgctgaccgccgcccactgcttcagagacggcaacgaccacagcctgtggagagtgaacgtgggcgaccccaagagccagtggggcaaggagttcctgatcgagaaggcctag

SEQ ID NO: 77408 - DNA, 477 bp, synthetic construct; identical to SEQ ID NO: 77405
  misc_feature 1..477: note = Description of Artificial Sequence: Synthetic coding sequence
  source 1..477: mol_type = other DNA

SEQ ID NO: 77409 - DNA, 1062 bp, synthetic construct; identical to SEQ ID NO: 77394
  misc_feature 1..1062: note = Description of Artificial Sequence: Synthetic coding sequence
  source 1..1062: mol_type = other DNA

SEQ ID NO: 77410 - DNA, 420 bp, synthetic construct; identical to SEQ ID NO: 77388
  misc_feature 1..420: note = Description of Artificial Sequence: Synthetic coding sequence
  source 1..420: mol_type = other DNA

SEQ ID NO: 77411 - DNA, 438 bp, synthetic construct
  misc_feature 1..438: note = Description of Artificial Sequence: Synthetic coding sequence
  source 1..438: mol_type = other DNA
tgaggccactgccccaaccccggcatcagcctgggcgccgtgagaaccggcttcagattcggccacggcgacaaggtgagatacagatgcagcagcaacctggtgctgaccggcagcagcgagagagagtgccagggcaacggcgtgtggagcggcaccgagcccatctgcagacagccctacagctacgacttccccgaggacgtggcccccgccctgggcaccagcttcagccacatgctgggcgccaccaaccccacccagaagaccaaggaccacgagaacggcaccggcaccaacacctacgccgccctgaacagcgtgtacctgatgatgaacaaccagatgagactgctgggcatggagaccatggcctggcaggagatcagacacgccatcatcctgctgaccgacggcaagagcaacatgggcggctag

SEQ ID NO: 77412 - DNA, 378 bp, synthetic construct; identical to SEQ ID NO: 77392
  misc_feature 1..378: note = Description of Artificial Sequence: Synthetic coding sequence
  source 1..378: mol_type = other DNA

SEQ ID NO: 77413 - DNA, 420 bp, synthetic construct; identical to SEQ ID NO: 77388
  misc_feature 1..420: note = Description of Artificial Sequence: Synthetic coding sequence
  source 1..420: mol_type = other DNA

SEQ ID NO: 77414 - DNA, 477 bp, synthetic construct; identical to SEQ ID NO: 77405
  misc_feature 1..477: note = Description of Artificial Sequence: Synthetic coding sequence
  source 1..477: mol_type = other DNA

SEQ ID NO: 77415 - DNA, 378 bp, synthetic construct; identical to SEQ ID NO: 77392
  misc_feature 1..378: note = Description of Artificial Sequence: Synthetic coding sequence
  source 1..378: mol_type = other DNA

SEQ ID NO: 77416 - DNA, 1863 bp, synthetic construct
  misc_feature 1..1863: note = Description of Artificial Sequence: Synthetic coding sequence
  source 1..1863: mol_type = other DNA
atgggccccctgatggtgctgttctgcctgctgttcctgtaccccgccggccactgccccaaccccggcatcagcctgggcgccgtgagaaccggcttcagattcggccacggcgacaaggtgagatacagatgcagcagcaacctggtgctgaccggcagcagcgagagagagtgccagggcaacggcgtgtggagcggcaccgagcccatctgcagacagccctacagctacgacttccccgaggacgtggcccccgccctgggcaccagcttcagccacatgctgggcgccaccaaccccacccagaagaccaaggagagcctgggcagaaagatccagatccagagaagcggccacctgaacctgtacctgctgctggactgcagccagagcgtgagcgagaacgacttcctgatcttcaaggagagcgccagcctgatggtggacagaatcttcagcttcgagatcaacgtgagcgtggccatcatcaccttcgccagcgagcccaaggtgctgatgagcgtgctgaacgacaacagcagagacatgaccgaggtgatcagcagcctggagaacgccaactacaaggaccacgagaacggcaccggcaccaacacctacgccgccctgaacagcgtgtacctgatgatgaacaaccagatgagactgctgggcatggagaccatggcctggcaggagatcagacacgccatcatcctgctgaccgacggcaagagcaacatgggcggcagccccaagaccgccgtggaccacatcagagagatcctgaacatcaaccagaagagaaacgactacctggacatctacgccatcggcgtgggcaagctggacgtggactggagagagctgaacgagctgggcagcaagaaggacggcgagagacacgccttcatcctgcaggacaccaaggccctgcaccaggtgttcgagcacatgctggacgtgagcaagctgaccgacaccatctgcggcgtgggcaacatgagcgccaacgccagcgaccaggagagaaccccctggcacgtgaccatcaagcccaagagccaggagacctgcagaggcgccctgatcagcgaccagtgggtgctgaccgccgcccactgcttcagagacggcaacgaccacagcctgtggagagtgaacgtgggcgaccccaagagccagtggggcaaggagttcctgatcgagaaggccgtgatcagccccggcttcgacgtgttcgccaagaagaaccagggcatcctggagttctacggcgacgacatcgccctgctgaagctggcccagaaggtgaagatgagcacccacgccagacccatctgcctgccctgcaccatggaggccaacctggccctgagaagaccccagggcagcacctgcagagaccacgagaacgagctgctgaacaagcagagcgtgcccgcccacttcgtggccctgaacggcagcaagctgaacatcaacctgaagatgggcgtggagtggaccagctgcgccgaggtggtgagccaggagaagaccatgttccccaacctgaccgacgtgagagaggtggtgaccgaccagttcctgtgcagcggcacccaggaggacgagagcccctgcaagggcgagagcggcggcgccgtgttcctggagagaagattcagattcttccaggtgggcctggtgagctggggcctgtacaacccctgcctgggcagcgccgacaagaacagcagaaagagagcccccagaagcaaggtgcccccccccagagacttccacatcaacctgttcagaatgcagccctggctgagacagcacctgggcgacgtgctgaacttcctgcccctgtag

SEQ ID NO: 77417 - DNA, 378 bp, synthetic construct; identical to SEQ ID NO: 77392
  misc_feature 1..378: note = Description of Artificial Sequence: Synthetic coding sequence
  source 1..378: mol_type = other DNA

SEQ ID NO: 77418 - DNA, 420 bp, synthetic construct; identical to SEQ ID NO: 77388
  misc_feature 1..420: note = Description of Artificial Sequence: Synthetic coding sequence
  source 1..420: mol_type = other DNA

SEQ ID NO: 77419 - DNA, 378 bp, synthetic construct; identical to SEQ ID NO: 77392
  misc_feature 1..378: note = Description of Artificial Sequence: Synthetic coding sequence
  source 1..378: mol_type = other DNA

SEQ ID NO: 77420 - DNA, 2259 bp, synthetic construct; identical to SEQ ID NO: 77381
  misc_feature 1..2259: note = Description of Artificial Sequence: Synthetic coding sequence
  source 1..2259: mol_type = other DNA

SEQ ID NO: 77421 - DNA, 378 bp, synthetic construct; identical to SEQ ID NO: 77392
  misc_feature 1..378: note = Description of Artificial Sequence: Synthetic coding sequence
  source 1..378: mol_type = other DNA

SEQ ID NO: 77422 - DNA, 510 bp, synthetic construct; identical to SEQ ID NO: 77389
  misc_feature 1..510: note = Description of Artificial Sequence: Synthetic coding sequence
  source 1..510: mol_type = other DNA

SEQ ID NO: 77423 - DNA, 1578 bp, synthetic construct; identical to SEQ ID NO: 77384
  misc_feature 1..1578: note = Description of Artificial Sequence: Synthetic coding sequence
  source 1..1578: mol_type = other DNA

SEQ ID NO: 77424 - DNA, 438 bp, synthetic construct; identical to SEQ ID NO: 77411
  misc_feature 1..438: note = Description of Artificial Sequence: Synthetic coding sequence
  source 1..438: mol_type = other DNA

SEQ ID NO: 77425 - DNA, 405 bp, synthetic construct; identical to SEQ ID NO: 77401
  misc_feature 1..405: note = Description of Artificial Sequence: Synthetic coding sequence
  source 1..405: mol_type = other DNA

SEQ ID NO: 77426 - DNA, 420 bp, synthetic construct; identical to SEQ ID NO: 77388
  misc_feature 1..420: note = Description of Artificial Sequence: Synthetic coding sequence
  source 1..420: mol_type = other DNA

SEQ ID NO: 77427 - DNA, 420 bp, synthetic construct; identical to SEQ ID NO: 77388
  misc_feature 1..420: note = Description of Artificial Sequence: Synthetic coding sequence
  source 1..420: mol_type = other DNA

SEQ ID NO: 77428 - DNA, 1617 bp, synthetic construct
  misc_feature 1..1617: note = Description of Artificial Sequence: Synthetic coding sequence
  source 1..1617: mol_type = other DNA
atgagagccctgtgcatcagagagacctgcagcagcgagctgggcttcagcagaaactggagcagaagaaaggccggccactgccccaaccccggcatcagcctgggcgccgtgagaaccggcttcagattcggccacggcgacaaggtgagatacagatgcagcagcaacctggtgctgaccggcagcagcgagagagagtgccagggcaacggcgtgtggagcggcaccgagcccatctgcagacagccctacagctacgacttccccgaggacgtggcccccgccctgggcaccagcttcagccacatgctgggcgccaccaaccccacccagaagaccaaggaccacgagaacggcaccggcaccaacacctacgccgccctgaacagcgtgtacctgatgatgaacaaccagatgagactgctgggcatggagaccatggcctggcaggagatcagacacgccatcatcctgctgaccgacggcaagagcaacatgggcggcagccccaagaccgccgtggaccacatcagagagatcctgaacatcaaccagaagagaaacgactacctggacatctacgccatcggcgtgggcaagctggacgtggactggagagagctgaacgagctgggcagcaagaaggacggcgagagacacgccttcatcctgcaggacaccaaggccctgcaccaggtgttcgagcacatgctggacgtgagcaagctgaccgacaccatctgcggcgtgggcaacatgagcgccaacgccagcgaccaggagagaaccccctggcacgtgaccatcaagcccaagagccaggagacctgcagaggcgccctgatcagcgaccagtgggtgctgaccgccgcccactgcttcagagacggcaacgaccacagcctgtggagagtgaacgtgggcgaccccaagagccagtggggcaaggagttcctgatcgagaaggccgtgatcagccccggcttcgacgtgttcgccaagaagaaccagggcatcctggagttctacggcgacgacatcgccctgctgaagctggcccagaaggtgaagatgagcacccacgccagacccatctgcctgccctgcaccatggaggccaacctggccctgagaagaccccagggcagcacctgcagagaccacgagaacgagctgctgaacaagcagagcgtgcccgcccacttcgtggccctgaacggcagcaagctgaacatcaacctgaagatgggcgtggagtggaccagctgcgccgaggtggtgagccaggagaagaccatgttccccaacctgaccgacgtgagagaggtggtgaccgaccagttcctgtgcagcggcacccaggaggacgagagcccctgcaagggcgagagcggcggcgccgtgttcctggagagaagattcagattcttccaggtgggcctggtgagctggggcctgtacaacccctgcctgggcagcgccgacaagaacagcagaaagagagcccccagaagcaaggtgcccccccccagagacttccacatcaacctgttcagaatgcagccctggctgagacagcacctgggcgacgtgctgaacttcctgcccctgtag

SEQ ID NO: 77429 - DNA, 1521 bp, synthetic construct
  misc_feature 1..1521: note = Description of Artificial Sequence: Synthetic coding sequence
  source 1..1521: mol_type = other DNA
atgggcaccagaagcgccatcgccgcccccagaatcctgtgcagcagaggcctgagaagcggcagcgccagagccaccggcagcggcgtggagagaagccccagcgccgccatcttcagcttcgagatcaacgtgagcgtggccatcatcaccttcgccagcgagcccaaggtgctgatgagcgtgctgaacgacaacagcagagacatgaccgaggtgatcagcagcctggagaacgccaactacaaggaccacgagaacggcaccggcaccaacacctacgccgccctgaacagcgtgtacctgatgatgaacaaccagatgagactgctgggcatggagaccatggcctggcaggagatcagacacgccatcatcctgctgaccgacggcaagagcaacatgggcggcagccccaagaccgccgtggaccacatcagagagatcctgaacatcaaccagaagagaaacgactacctggacatctacgccatcggcgtgggcaagctggacgtggactggagagagctgaacgagctgggcagcaagaaggacggcgagagacacgccttcatcctgcaggacaccaaggccctgcaccaggtgttcgagcacatgctggacgtgagcaagctgaccgacaccatctgcggcgtgggcaacatgagcgccaacgccagcgaccaggagagaaccccctggcacgtgaccatcaagcccaagagccaggagacctgcagaggcgccctgatcagcgaccagtgggtgctgaccgccgcccactgcttcagagacggcaacgaccacagcctgtggagagtgaacgtgggcgaccccaagagccagtggggcaaggagttcctgatcgagaaggccgtgatcagccccggcttcgacgtgttcgccaagaagaaccagggcatcctggagttctacggcgacgacatcgccctgctgaagctggcccagaaggtgaagatgagcacccacgccagacccatctgcctgccctgcaccatggaggccaacctggccctgagaagaccccagggcagcacctgcagagaccacgagaacgagctgctgaacaagcagagcgtgcccgcccacttcgtggccctgaacggcagcaagctgaacatcaacctgaagatgggcgtggagtggaccagctgcgccgaggtggtgagccaggagaagaccatgttccccaacctgaccgacgtgagagaggtggtgaccgaccagttcctgtgcagcggcacccaggaggacgagagcccctgcaagggcgagagcggcggcgccgtgttcctggagagaagattcagattcttccaggtgggcctggtgagctggggcctgtacaacccctgcctgggcagcgccgacaagaacagcagaaagagagcccccagaagcaaggtgcccccccccagagacttccacatcaacctgttcagaatgcagccctggctgagacagcacctgggcgacgtgctgaacttcctgcccctgtag

SEQ ID NO: 77430 - DNA, 1521 bp, synthetic construct; identical to SEQ ID NO: 77429
  misc_feature 1..1521: note = Description of Artificial Sequence: Synthetic coding sequence
  source 1..1521: mol_type = other DNA

SEQ ID NO: 77431 - DNA, 1521 bp, synthetic construct; identical to SEQ ID NO: 77429
  misc_feature 1..1521: note = Description of Artificial Sequence: Synthetic coding sequence
  source 1..1521: mol_type = other DNA

SEQ ID NO: 77432 - DNA, 1134 bp, synthetic construct; identical to SEQ ID NO: 77382
  misc_feature 1..1134: note = Description of Artificial Sequence: Synthetic coding sequence
  source 1..1134: mol_type = other DNA

SEQ ID NO: 77433 - DNA, 978 bp, synthetic construct; identical to SEQ ID NO: 77407
  misc_feature 1..978: note = Description of Artificial Sequence: Synthetic coding sequence
  source 1..978: mol_type = other DNA

SEQ ID NO: 77434 - DNA, 1521 bp, synthetic construct; identical to SEQ ID NO: 77429
  misc_feature 1..1521: note = Description of Artificial Sequence: Synthetic coding sequence
  source 1..1521: mol_type = other DNA

SEQ ID NO: 77435 - DNA, 1521 bp, synthetic construct; identical to SEQ ID NO: 77429
  misc_feature 1..1521: note = Description of Artificial Sequence: Synthetic coding sequence
  source 1..1521: mol_type = other DNA

SEQ ID NO: 77436 - DNA, 1617 bp, synthetic construct; identical to SEQ ID NO: 77428
  misc_feature 1..1617: note = Description of Artificial Sequence: Synthetic coding sequence
  source 1..1617: mol_type = other DNA

SEQ ID NO: 77437 - DNA, 1134 bp, synthetic construct; identical to SEQ ID NO: 77382
  misc_feature 1..1134: note = Description of Artificial Sequence: Synthetic coding sequence
  source 1..1134: mol_type = other DNA

SEQ ID NO: 77438 - DNA, 1863 bp, synthetic construct; identical to SEQ ID NO: 77416
  misc_feature 1..1863: note = Description of Artificial Sequence: Synthetic coding sequence
  source 1..1863: mol_type = other DNA

SEQ ID NO: 77439 - DNA, 1863 bp, synthetic construct; identical to SEQ ID NO: 77416
  misc_feature 1..1863: note = Description of Artificial Sequence: Synthetic coding sequence
  source 1..1863: mol_type = other DNA

SEQ ID NO: 77440 - DNA, 978 bp, synthetic construct; identical to SEQ ID NO: 77407
  misc_feature 1..978: note = Description of Artificial Sequence: Synthetic coding sequence
  source 1..978: mol_type = other DNA

SEQ ID NO: 77441 - DNA, 978 bp, synthetic construct; identical to SEQ ID NO: 77407
  misc_feature 1..978: note = Description of Artificial Sequence: Synthetic coding sequence
  source 1..978: mol_type = other DNA

SEQ ID NO: 77442 - DNA, 1521 bp, synthetic construct; identical to SEQ ID NO: 77429
  misc_feature 1..1521: note = Description of Artificial Sequence: Synthetic coding sequence
  source 1..1521: mol_type = other DNA

SEQ ID NO: 77443 - DNA, 978 bp, synthetic construct; identical to SEQ ID NO: 77407
  misc_feature 1..978: note = Description of Artificial Sequence: Synthetic coding sequence
  source 1..978: mol_type = other DNA

SEQ ID NO: 77444 - DNA, 1863 bp, synthetic construct; identical to SEQ ID NO: 77416
  misc_feature 1..1863: note = Description of Artificial Sequence: Synthetic coding sequence
  source 1..1863: mol_type = other DNA

SEQ ID NO: 77445 - DNA, 1134 bp, synthetic construct; identical to SEQ ID NO: 77382
  misc_feature 1..1134: note = Description of Artificial Sequence: Synthetic coding sequence
  source 1..1134: mol_type = other DNA

SEQ ID NO: 77446 - DNA, 1134 bp, synthetic construct; identical to SEQ ID NO: 77382
  misc_feature 1..1134: note = Description of Artificial Sequence: Synthetic coding sequence
  source 1..1134: mol_type = other DNA

SEQ ID NO: 77447 - DNA, 978 bp, synthetic construct; identical to SEQ ID NO: 77407
  misc_feature 1..978: note = Description of Artificial Sequence: Synthetic coding sequence
  source 1..978: mol_type = other DNA

SEQ ID NO: 77448 - DNA, 1134 bp, synthetic construct; identical to SEQ ID NO: 77382
  misc_feature 1..1134: note = Description of Artificial Sequence: Synthetic coding sequence
  source 1..1134: mol_type = other DNA

SEQ ID NO: 77449 - DNA, 1617 bp, synthetic construct; identical to SEQ ID NO: 77428
  misc_feature 1..1617: note = Description of Artificial Sequence: Synthetic coding sequence
  source 1..1617: mol_type = other DNA

SEQ ID NO: 77450 - DNA, 1863 bp, synthetic construct; identical to SEQ ID NO: 77416
  misc_feature 1..1863: note = Description of Artificial Sequence: Synthetic coding sequence
  source 1..1863: mol_type = other DNA

SEQ ID NO: 77451 - DNA, 1863 bp, synthetic construct; identical to SEQ ID NO: 77416
  misc_feature 1..1863: note = Description of Artificial Sequence: Synthetic coding sequence
  source 1..1863: mol_type = other DNA

SEQ ID NO: 77452 - DNA, 1863 bp, synthetic construct; identical to SEQ ID NO: 77416
  misc_feature 1..1863: note = Description of Artificial Sequence: Synthetic coding sequence
  source 1..1863: mol_type = other DNA

SEQ ID NO: 77453 - DNA, 978 bp, synthetic construct; identical to SEQ ID NO: 77407
  misc_feature 1..978: note = Description of Artificial Sequence: Synthetic coding sequence
  source 1..978: mol_type = other DNA

SEQ ID NO: 77454 - DNA, 1134 bp, synthetic construct; identical to SEQ ID NO: 77382
  misc_feature 1..1134: note = Description of Artificial Sequence: Synthetic coding sequence
  source 1..1134: mol_type = other DNA

SEQ ID NO: 77455 - DNA, 1617 bp, synthetic construct; identical to SEQ ID NO: 77428
  misc_feature 1..1617: note = Description of Artificial Sequence: Synthetic coding sequence
  source 1..1617: mol_type = other DNA

SEQ ID NO: 77456 - DNA, 1617 bp, synthetic construct; identical to SEQ ID NO: 77428
  misc_feature 1..1617: note = Description of Artificial Sequence: Synthetic coding sequence
  source 1..1617: mol_type = other DNA

SEQ ID NO: 77457 - DNA, 4992 bp, synthetic construct
  misc_feature 1..4992: note = Description of Artificial Sequence: Synthetic coding sequence
  source 1..4992: mol_type = other DNA
atgggccccaccagcggccccagcctgctgctgctgctgctgacccacctgcccctggccctgggcagccccatgtacagcatcatcacccccaacatcctgagactggagagcgaggagaccatggtgctggaggcccacgacgcccagggcgacgtgcccgtgaccgtgaccgtgcacgacttccccggcaagaagctggtgctgagcagcgagaagaccgtgctgacccccgccaccaaccacatgggcaacgtgaccttcaccatccccgccaacagagagttcaagagcgagaagggcagaaacaagttcgtgaccgtgcaggccaccttcggcacccaggtggtggagaaggtggtgctggtgagcctgcagagcggctacctgttcatccagaccgacaagaccatctacacccccggcagcaccgtgctgtacagaatcttcaccgtgaaccacaagctgctgcccgtgggcagaaccgtgatggtgaacatcgagaaccccgagggcatccccgtgaagcaggacagcctgagcagccagaaccagctgggcgtgctgcccctgagctgggacatccccgagctggtgaacatgggccagtggaagatcagagcctactacgagaacagcccccagcaggtgttcagcaccgagttcgaggtgaaggagtacgtgctgcccagcttcgaggtgatcgtggagcccaccgagaagttctactacatctacaacgagaagggcctggaggtgaccatcaccgccagattcctgtacggcaagaaggtggagggcaccgccttcgtgatcttcggcatccaggacggcgagcagagaatcagcctgcccgagagcctgaagagaatccccatcgaggacggcagcggcgaggtggtgctgagcagaaaggtgctgctggacggcgtgcagaaccccagagccgaggacctggtgggcaagagcctgtacgtgagcgccaccgtgatcctgcacagcggcagcgacatggtgcaggccgagagaagcggcatccccatcgtgaccagcccctaccagatccacttcaccaagacccccaagtacttcaagcccggcatgcccttcgacctgatggtgttcgtgaccaaccccgacggcagccccgcctacagagtgcccgtggccgtgcagggcgaggacaccgtgcagagcctgacccagggcgacggcgtggccaagctgagcatcaacacccaccccagccagaagcccctgagcatcaccgtgagaaccaagaagcaggagctgagcgaggccgagcaggccaccagaaccatgcaggccctgccctacagcaccgtgggcaacagcaacaactacctgcacctgagcgtgctgagaaccgagctgagacccggcgagaccctgaacgtgaacttcctgctgagaatggacagagcccacgaggccaagatcagatactacacctacctgatcatgaacaagggcagactgctgaaggccggcagacaggtgagagagcccggccaggacctggtggtgctgcccctgagcatcaccaccgacttcatccccagcttcagactggtggcctactacaccctgatcggcgccagcggccagagagaggtggtggccgacagcgtgtgggtggacgtgaaggacagctgcgtgggcagcctggtggtgaagagcggccagagcgaggacagacagcccgtgcccggccagcagatgaccctgaagatcgagggcgaccacggcgccagagtggtgctggtggccgtggacaagggcgtgttcgtgctgaacaagaagaacaagctgacccagagcaagatctgggacgtggtggagaaggccgacatcggctgcacccccggcagcggcaaggactacgccggcgtgttcagcgacgccggcctgaccttcaccagcagcagcggccagcagaccgcccagagagccgagctgcagtgcccccagcccgccgccagaagaagaagaagcgtgcagctgaccgagaagagaatggacaaggtgggcaagtaccccaaggagctgagaaagtgctgcgaggacggcatgagagagaaccccatgagattcagctgccagagaagaaccagattcatcagcctgggcgaggcctgcaagaaggtgttcctggactgctgcaactacatcaccgagctgagaagacagcacgccagagccagccacctgggcctggccagaagcaacctggacgaggacatcatcgccgaggagaacatcgtgagcagaagcgagttccccgagagctggctgtggaacgtggaggacctgaaggagccccccaagaacggcatcagcaccaagctgatgaacatcttcctgaaggacagcatcaccacctgggagatcctggccgtgagcatgagcgacaagaagggcatctgcgtggccgaccccttcgaggtgaccgtgatgcaggacttcttcatcgacctgagactgccctacagcgtggtgagaaacgagcaggtggagatcagagccgtgctgtacaactacagacagaaccaggagctgaaggtgagagtggagctgctgcacaaccccgccttctgcagcctggccaccaccaagagaagacaccagcagaccgtgaccatcccccccaagagcagcctgagcgtgccctacgtgatcgtgcccctgaagaccggcctgcaggaggtggaggtgaaggccgccgtgtaccaccacttcatcagcgacggcgtgagaaagagcctgaaggtggtgcccgagggcatcagaatgaacaagaccgtggccgtgagaaccctggaccccgagagactgggcagagagggcgtgcagaaggaggacatcccccccgccgacctgagcgaccaggtgcccgacaccgagagcgagaccagaatcctgctgcagggcacccccgtggcccagatgaccgaggacgccgtggacgccgagagactgaagcacctgatcgtgacccccagcggctgcggcgagcagaacatgatcggcatgacccccaccgtgatcgccgtgcactacctggacgagaccgagcagtgggagaagttcggcctggagaagagacagggcgccctggagctgatcaagaagggctacacccagcagctggccttcagacagcccagcagcgccttcgccgccttcgtgaagagagcccccagcacctggctgaccgcctacgtggtgaaggtgttcagcctggccgtgaacctgatcgccatcgacagccaggtgctgtgcggcgccgtgaagtggctgatcctggagaagcagaagcccgacggcgtgttccaggaggacgcccccgtgatccaccaggagatgatcggcggcctgagaaacaacaacgagaaggacatggccctgaccgccttcgtgctgatcagcctgcaggaggccaaggacatctgcgaggagcaggtgaacagcctgcccggcagcatcaccaaggccggcgacttcctggaggccaactacatgaacctgcagagaagctacaccgtggccatcgccggctacgccctggcccagatgggcagactgaagggccccctgctgaacaagttcctgaccaccgccaaggacaagaacagatgggaggaccccggcaagcagctgtacaacgtggaggccaccagctacgccctgctggccctgctgcagctgaaggacttcgacttcgtgccccccgtggtgagatggctgaacgagcagagatactacggcggcggctacggcagcacccaggccaccttcatggtgttccaggccctggcccagtaccagaaggacgcccccgaccaccaggagctgaacctggacgtgagcctgcagctgcccagcagaagcagcaagatcacccacagaatccactgggagagcgccagcctgctgagaagcgaggagaccaaggagaacgagggcttcaccgtgaccgccgagggcaagggccagggcaccctgagcgtggtgaccatgtaccacgccaaggccaaggaccagctgacctgcaacaagttcgacctgaaggtgaccatcaagcccgcccccgagaccgagaagagaccccaggacgccaagaacaccatgatcctggagatctgcaccagatacagaggcgaccaggacgccaccatgagcatcctggacatcagcatgatgaccggcttcgcccccgacaccgacgacctgaagcagctggccaacggcgtggacagatacatcagcaagtacgagctggacaaggccttcagcgacagaaacaccctgatcatctacctggacaaggtgagccacagcgaggacgactgcctggccttcaaggtgcaccagtacttcaacgtggagctgatccagcccggcgccgtgaaggtgtacgcctactacaacctggaggagagctgcaccagattctaccaccccgagaaggaggacggcaagctgaacaagctgtgcagagacgagctgtgcagatgcgccgaggagaactgcttcatccagaagagcgacgacaaggtgaccctggaggagagactggacaaggcctgcgagcccggcgtggactacgtgtacaagaccagactggtgaaggtgcagctgagcaacgacttcgacgagtacatcatggccatcgagcagaccatcaagagcggcagcgacgaggtgcaggtgggccagcagagaaccttcatcagccccatcaagtgcagagaggccctgaagctggaggagaagaagcactacctgatgtggggcctgagcagcgacttctggggcgagaagcccaacctgagctacatcatcggcaaggacacctgggtggagcactggcccgaggaggacgagtgccaggacgaggagaaccagaagcagtgccaggacctgggcgccttcaccgagagcatggtggtgttcggctgccccaactag

SEQ ID NO: 77458 - DNA, 1794 bp, synthetic construct
  misc_feature 1..1794: note = Description of Artificial Sequence: Synthetic coding sequence
  source 1..1794: mol_type = other DNA
atgcacccccccaagacccccagcggcgccctgcacagaaagagaaagatggccgcctggcccttcagcagactgtggaaggtgagcgaccccatcctgttccagatgaccctgatcgccgccctgctgcccgccgtgctgggcaactgcggccccccccccaccctgagcttcgccgcccccatggacatcaccctgaccgagaccagattcaagaccggcaccaccctgaagtacacctgcctgcccggctacgtgagaagccacagcacccagaccctgacctgcaacagcgacggcgagtgggtgtacaacaccttctgcatctacaagagatgcagacaccccggcgagctgagaaacggccaggtggagatcaagaccgacctgagcttcggcagccagatcgagttcagctgcagcgagggcttcttcctgatcggcagcaccaccagcagatgcgaggtgcaggacagaggcgtgggctggagccaccccctgccccagtgcgagatcgtgaagtgcaagcccccccccgacatcagaaacggcagacacagcggcgaggagaacttctacgcctacggcttcagcgtgacctacagctgcgaccccagattcagcctgctgggccacgccagcatcagctgcaccgtggagaacgagaccatcggcgtgtggagacccagcccccccacctgcgagaagatcacctgcagaaagcccgacgtgagccacggcgagatggtgagcggcttcggccccatctacaactacaaggacaccatcgtgttcaagtgccagaagggcttcgtgctgagaggcagcagcgtgatccactgcgacgccgacagcaagtggaaccccagcccccccgcctgcgagcccaacagctgcatcaacctgcccgacatcccccacgccagctgggagacctaccccagacccaccaaggaggacgtgtacgtggtgggcaccgtgctgagatacagatgccaccccggctacaagcccaccaccgacgagcccaccaccgtgatctgccagaagaacctgagatggaccccctaccagggctgcgaggccctgtgctgccccgagcccaagctgaacaacggcgagatcacccagcacagaaagagcagacccgccaaccactgcgtgtacttctacggcgacgagatcagcttcagctgccacgagaccagcagattcagcgccatctgccagggcgacggcacctggagccccagaacccccagctgcggcgacatctgcaacttcccccccaagatcgcccacggccactacaagcagagcagcagctacagcttcttcaaggaggagatcatctacgagtgcgacaagggctacatcctggtgggccaggccaagctgagctgcagctacagccactggagcgcccccgccccccagtgcaaggccctgtgcagaaagcccgagctggtgaacggcagactgagcgtggacaaggaccagtacgtggagcccgagaacgtgaccatccagtgcgacagcggctacggcgtggtgggcccccagagcatcacctgcagcggcaacagaacctggtaccccgaggtgcccaagtgcgagtgggagacccccgagggctgcgagcaggtgctgaccggcaagagactgatgcagtgcctgcccaaccccgaggacgtgaagatggccctggaggtgtacaagctgagcctggagatcgagcagctggagctgcagagagacagcgccagacagagcaccctggacaaggagctgtag

SEQ ID NO: 77459 - DNA, 459 bp, synthetic construct
  misc_feature 1..459: note = Description of Artificial Sequence: Synthetic coding sequence
  source 1..459: mol_type = other DNA
atgcacccccccaagacccccagcggcgccctgcacagaaagagaaagatggccgcctggcccttcagcagactgtggaaggtgagcgaccccatcctgttccagatgaccctgatcgccgccctgctgcccgccgtgctgggcaactgcggccccccccccaccctgagcttcgccgcccccatggacatcaccctgaccgagaccagattcaagaccggcaccaccctgaagtacacctgcctgcccggctacgtgagaagccacagcacccagaccctgacctgcaacagcgacggcgagtgggtgtacaacaccttctgcatctacaagagatgcagacaccccggcgagctgagaaacggccaggtggagatcaagaccgacctgagcttcggcagccagatcgagttcagctgcagcgagggcttcttcctgatcggcagcaccaccagctag

SEQ ID NO: 77460 - DNA, 759 bp, synthetic construct
  misc_feature 1..759: note = Description of Artificial Sequence: Synthetic coding sequence
  source 1..759: mol_type = other DNA
atgttcttctggtgcgcctgctgcctgatggtggcctggagagtgagcgccagcgacgccgagcactgccccgagctgccccccgtggacaacagcatcttcgtggccaaggaggtggagggccagatcctgggcacctacgtgtgcatcaagggctaccacctggtgggcaagaagaccctgttctgcaacgccagcaaggagtgggacaacaccaccaccgagtgcagactgggccactgccccgaccccgtgctggtgaacggcgagttcagcagcagcggccccgtgaacgtgagcgacaagatcaccttcatgtgcaacgaccactacatcctgaagggcagcaacagaagccagtgcctggaggaccacacctgggccccccccttccccatctgcaagagcagagactgcgacccccccggcaaccccgtgcacggctacttcgagggcaacaacttcaccctgggcagcaccatcagctactactgcgaggacagatactacctggtgggcgtgcaggagcagcagtgcgtggacggcgagtggagcagcgccctgcccgtgtgcaagctgatccaggaggcccccaagcccgagtgcgagaaggccctgctggccttccaggagagcaagaacctgtgcgaggccatggagaacttcatgcagcagctgaaggagagcggcatgaccatggaggagctgaagtacagcctggagctgaagaaggccgagctgaaggccaagctgctgtag

SEQ ID NO: 77461 - DNA, 756 bp, synthetic construct
  misc_feature 1..756: note = Description of Artificial Sequence: Synthetic coding sequence
  source 1..756: mol_type = other DNA
atgttcttctggtgcgcctgctgcctgatggtggcctggagagtgagcgccagcgacgagcactgccccgagctgccccccgtggacaacagcatcttcgtggccaaggaggtggagggccagatcctgggcacctacgtgtgcatcaagggctaccacctggtgggcaagaagaccctgttctgcaacgccagcaaggagtgggacaacaccaccaccgagtgcagactgggccactgccccgaccccgtgctggtgaacggcgagttcagcagcagcggccccgtgaacgtgagcgacaagatcaccttcatgtgcaacgaccactacatcctgaagggcagcaacagaagccagtgcctggaggaccacacctgggccccccccttccccatctgcaagagcagagactgcgacccccccggcaaccccgtgcacggctacttcgagggcaacaacttcaccctgggcagcaccatcagctactactgcgaggacagatactacctggtgggcgtgcaggagcagcagtgcgtggacggcgagtggagcagcgccctgcccgtgtgcaagctgatccaggaggcccccaagcccgagtgcgagaaggccctgctggccttccaggagagcaagaacctgtgcgaggccatggagaacttcatgcagcagctgaaggagagcggcatgaccatggaggagctgaagtacagcctggagctgaagaaggccgagctgaaggccaagctgctgtag

SEQ ID NO: 77462 - DNA, 759 bp, synthetic construct; identical to SEQ ID NO: 77460
  misc_feature 1..759: note = Description of Artificial Sequence: Synthetic coding sequence
  source 1..759: mol_type = other DNA

SEQ ID NO: 77463 - DNA, 759 bp, synthetic construct; identical to SEQ ID NO: 77460
  misc_feature 1..759: note = Description of Artificial Sequence: Synthetic coding sequence
  source 1..759: mol_type = other DNA

SEQ ID NO: 77464 - DNA, 657 bp, synthetic construct
  misc_feature 1..657: note = Description of Artificial Sequence: Synthetic coding sequence
  source 1..657: mol_type = other DNA
atggtggcctggagagtgagcgccagcgacgagcactgccccgagctgccccccgtggacaacagcatcttcgtggccaaggaggtggagggccagatcctgggcacctacgtgtgcatcaagggctaccacctggtgggcaagaagaccctgttctgcaacgccagcaaggagtgggacaacaccaccaccgagtgcagactgggccactgccccgaccccgtgctggtgaacggcgagttcagcagcagcggccccgtgaacgtgagcgacaagatcaccttcatgtgcaacgaccactacatcctgaagggcagcaacagaagccagtgcctggaggaccacacctgggccccccccttccccatctgcaagagcatcccccagaccagacccctgcccttccagccctgcagccccctgttcctgttcctgctgagacagagcctggccctgttccccagactggagtgcagcggcagaatcctggcccactgcaacctgcacctgcccggcagcagcagcagccacgccagcgccagccaggtggccggcatcaccggcgcccaccccagatgggccaacttctgcatcttcagcagagactgggtgagcccctgctggcccggctggagccagatccccgacctgagatag

SEQ ID NO: 77465 - DNA, 546 bp, synthetic construct
  misc_feature 1..546: note = Description of Artificial Sequence: Synthetic coding sequence
  source 1..546: mol_type = other DNA
atgttcttctggtgcgcctgctgcctgatggtggcctggagagtgagcgccagcgacgccgagcactgccccgagctgccccccgtggacaacagcatcttcgtggccaaggaggtggagggccagatcctgggcacctacgtgtgcatcaagggctaccacctggtgggcaagaagaccctgttctgcaacgccagcaaggagtgggacaacaccaccaccgagtgcagactgggccactgccccgaccccgtgctggtgaacggcgagttcagcagcagcggccccgtgaacgtgagcgacaagatcaccttcatgtgcaacgaccactacatcctgaagggcagcaacagaagccagtgcctggaggaccacacctgggccccccccttccccatctgcaagagcagagactgcgacccccccggcaaccccgtgcacggctacttcgagggcaacaacttcaccctgggcagcaccatcagctactactgcgaggacagatactacctggtgggcgtgcaggagcagcagtgcgtggactag

SEQ ID NO: 77466 - DNA, 5235 bp, synthetic construct
  misc_feature 1..5235: note = Description of Artificial Sequence: Synthetic coding sequence
  source 1..5235: mol_type = other DNA
atgagactgctgtggggcctgatctgggccagcagcttcttcaccctgagcctgcagaagcccagactgctgctgttcagccccagcgtggtgcacctgggcgtgcccctgagcgtgggcgtgcagctgcaggacgtgcccagaggccaggtggtgaagggcagcgtgttcctgagaaaccccagcagaaacaacgtgccctgcagccccaaggtggacttcaccctgagcagcgagagagacttcgccctgctgagcctgcaggtgcccctgaaggacgccaagagctgcggcctgcaccagctgctgagaggccccgaggtgcagctggtggcccacagcccctggctgaaggacagcctgagcagaaccaccaacatccagggcatcaacctgctgttcagcagcagaagaggccacctgttcctgcagaccgaccagcccatctacaaccccggccagagagtgagatacagagtgttcgccctggaccagaagatgagacccagcaccgacaccatcaccgtgatggtggagaacagccacggcctgagagtgagaaagaaggaggtgtacatgcccagcagcatcttccaggacgacttcgtgatccccgacatcagcgagcccggcacctggaagatcagcgccagattcagcgacggcctggagagcaacagcagcacccagttcgaggtgaagaagtacgtgctgcccaacttcgaggtgaagatcacccccggcaagccctacatcctgaccgtgcccggccacctggacgagatgcagctggacatccaggccagatacatctacggcaagcccgtgcagggcgtggcctacgtgagattcggcctgctggacgaggacggcaagaagaccttcttcagaggcctggagagccagaccaagctggtgaacggccagagccacatcagcctgagcaaggccgagttccaggacgccctggagaagctgaacatgggcatcaccgacctgcagggcctgagactgtacgtggccgccgccatcatcgagtaccccggcggcgagatggaggaggccgagctgaccagctggtacttcgtgagcagccccttcagcctggacctgagcaagaccaagagacacctggtgcccggcgcccccttcctgctgcaggccctggtgagagagatgagcggcagccccgccagcggcatccccgtgaaggtgagcgccaccgtgagcagccccggcagcgtgcccgaggtgcaggacatccagcagaacaccgacggcagcggccaggtgagcatccccatcatcatcccccagaccatcagcgagctgcagctgagcgtgagcgccggcagcccccaccccgccatcgccagactgaccgtggccgccccccccagcggcggccccggcttcctgagcatcgagtggcccgacagcagaccccccagagtgggcgacaccctgaacctgaacctgagagccgtgggcagcggcgccaccttcagccactactactacatgatcctgagcagaggccagatcgtgttcatgaacagagagcccaagagaaccctgaccagcgtgagcgtgttcgtggaccaccacctggcccccagcttctacttcgtggccttctactaccacggcgaccaccccgtggccaacagcctgagagtggacgtgcaggccggcgcctgcgagggcaagctggagctgagcgtggacggcgccaagcagtacagaaacggcgagagcgtgaagctgcacctggagaccgacagcctggccctggtggccctgggcgccctggacaccgccctgtacgccgccggcagcaagagccacaagcccctgaacatgggcaaggtgttcgaggccatgaacagctacgacctgggctgcggccccggcggcggcgacagcgccctgcaggtgttccaggccgccggcctggccttcagcgacggcgaccagtggaccctgagcagaaagagactgagctgccccaaggagaagaccaccagaaagaagagaaacgtgaacttccagaaggccatcaacgagaagctgggccagtacgccagccccaccgccaagagatgctgccaggacggcgtgaccagactgcccatgatgagaagctgcgagcagagagccgccagagtgcagcagcccgactgcagagagcccttcctgagctgctgccagttcgccgagagcctgagaaagaagagcagagacaagggccaggccggcctgcagagagccctggagatcctgcaggaggaggacctgatcgacgaggacgacatccccgtgagaagcttcttccccgagaactggctgtggagagtggagaccgtggacagattccagatcctgaccctgtggctgcccgacagcctgaccacctgggagatccacggcctgagcctgagcaagaccaagggcctgtgcgtggccacccccgtgcagctgagagtgttcagagagttccacctgcacctgagactgcccatgagcgtgagaagattcgagcagctggagctgagacccgtgctgtacaactacctggacaagaacctgaccgtgagcgtgcacgtgagccccgtggagggcctgtgcctggccggcggcggcggcctggcccagcaggtgctggtgcccgccggcagcgccagacccgtggccttcagcgtggtgcccaccgccgccgccgccgtgagcctgaaggtggtggccagaggcagcttcgagttccccgtgggcgacgccgtgagcaaggtgctgcagatcgagaaggagggcgccatccacagagaggagctggtgtacgagctgaaccccctggaccacagaggcagaaccctggagatccccggcaacagcgaccccaacatgatccccgacggcgacttcaacagctacgtgagagtgaccgccagcgaccccctggacaccctgggcagcgagggcgccctgagccccggcggcgtggccagcctgctgagactgcccagaggctgcggcgagcagaccatgatctacctggcccccaccctggccgccagcagatacctggacaagaccgagcagtggagcaccctgccccccgagaccaaggaccacgccgtggacctgatccagaagggctacatgagaatccagcagttcagaaaggccgacggcagctacgccgcctggctgagcagagacagcagcacctggctgaccgccttcgtgctgaaggtgctgagcctggcccaggagcaggtgggcggcagccccgagaagctgcaggagaccagcaactggctgctgagccagcagcaggccgacggcagcttccaggacccctgccccgtgctggacagaagcatgcagggcggcctggtgggcaacgacgagaccgtggccctgaccgccttcgtgaccatcgccctgcaccacggcctggccgtgttccaggacgagggcgccgagcccctgaagcagagagtggaggccagcatcagcaaggccaacagcttcctgggcgagaaggccagcgccggcctgctgggcgcccacgccgccgccatcaccgcctacgccctgaccctgaccaaggcccccgtggacctgctgggcgtggcccacaacaacctgatggccatggcccaggagaccggcgacaacctgtactggggcagcgtgaccggcagccagagcaacgccgtgagccccacccccgcccccagaaaccccagcgaccccatgccccaggcccccgccctgtggatcgagaccaccgcctacgccctgctgcacctgctgctgcacgagggcaaggccgagatggccgaccaggccgccgcctggctgaccagacagggcagcttccagggcggcttcagaagcacccaggacaccgtgatcgccctggacgccctgagcgcctactggatcgccagccacaccaccgaggagagaggcctgaacgtgaccctgagcagcaccggcagaaacggcttcaagagccacgccctgcagctgaacaacagacagatcagaggcctggaggaggagctgcagttcagcctgggcagcaagatcaacgtgaaggtgggcggcaacagcaagggcaccctgaaggtgctgagaacctacaacgtgctggacatgaagaacaccacctgccaggacctgcagatcgaggtgaccgtgaagggccacgtggagtacaccatggaggccaacgaggactacgaggactacgagtacgacgagctgcccgccaaggacgaccccgacgcccccctgcagcccgtgacccccctgcagctgttcgagggcagaagaaacagaagaagaagagaggcccccaaggtggtggaggagcaggagagcagagtgcactacaccgtgtgcatctggagaaacggcaaggtgggcctgagcggcatggccatcgccgacgtgaccctgctgagcggcttccacgccctgagagccgacctggagaagctgaccagcctgagcgacagatacgtgagccacttcgagaccgagggcccccacgtgctgctgtacttcgacagcgtgcccaccagcagagagtgcgtgggcttcgaggccgtgcaggaggtgcccgtgggcctggtgcagcccgccagcgccaccctgtacgactactacaaccccgagagaagatgcagcgtgttctacggcgcccccagcaagagcagactgctggccaccctgtgcagcgccgaggtgtgccagtgcgccgagggcaagtgccccagacagagaagagccctggagagaggcctgcaggacgaggacggctacagaatgaagttcgcctgctactaccccagagtggagtacggcttccaggtgaaggtgctgagagaggacagcagagccgccttcagactgttcgagaccaagatcacccaggtgctgcacttcaccaaggacgtgaaggccgccgccaaccagatgagaaacttcctggtgagagccagctgcagactgagactggagcccggcaaggagtacctgatcatgggcctggacggcgccacctacgacctggagggccacccccagtacctgctggacagcaacagctggatcgaggagatgcccagcgagagactgtgcagaagcaccagacagagagccgcctgcgcccagctgaacgacttcctgcaggagtacggcacccagggctgccaggtgtag

SEQ ID NO: 77467 - DNA, 5235 bp, synthetic construct
  misc_feature 1..5235: note = Description of Artificial Sequence: Synthetic coding sequence
  source 1..5235: mol_type = other DNA
atgagactgctgtggggcctgatctgggccagcagcttcttcaccctgagcctgcagaagcccagactgctgctgttcagccccagcgtggtgcacctgggcgtgcccctgagcgtgggcgtgcagctgcaggacgtgcccagaggccaggtggtgaagggcagcgtgttcctgagaaaccccagcagaaacaacgtgccctgcagccccaaggtggacttcaccctgagcagcgagagagacttcgccctgctgagcctgcaggtgcccctgaaggacgccaagagctgcggcctgcaccagctgctgagaggccccgaggtgcagctggtggcccacagcccctggctgaaggacagcctgagcagaaccaccaacatccagggcatcaacctgctgttcagcagcagaagaggccacctgttcctgcagaccgaccagcccatctacaaccccggccagagagtgagatacagagtgttcgccctggaccagaagatgagacccagcaccgacaccatcaccgtgatggtggagaacagccacggcctgagagtgagaaagaaggaggtgtacatgcccagcagcatcttccaggacgacttcgtgatccccgacatcagcgagcccggcacctggaagatcagcgccagattcagcgacggcctggagagcaacagcagcacccagttcgaggtgaagaagtacgtgctgcccaacttcgaggtgaagatcacccccggcaagccctacatcctgaccgtgcccggccacctggacgagatgcagctggacatccaggccagatacatctacggcaagcccgtgcagggcgtggcctacgtgagattcggcctgctggacgaggacggcaagaagaccttcttcagaggcctggagagccagaccaagctggtgaacggccagagccacatcagcctgagcaaggccgagttccaggacgccctggagaagctgaacatgggcatcaccgacctgcagggcctgagactgtacgtggccgccgccatcatcgagagccccggcggcgagatggaggaggccgagctgaccagctggtacttcgtgagcagccccttcagcctggacctgagcaagaccaagagacacctggtgcccggcgcccccttcctgctgcaggccctggtgagagagatgagcggcagccccgccagcggcatccccgtgaaggtgagcgccaccgtgagcagccccggcagcgtgcccgaggtgcaggacatccagcagaacaccgacggcagcggccaggtgagcatccccatcatcatcccccagaccatcagcgagctgcagctgagcgtgagcgccggcagcccccaccccgccatcgccagactgaccgtggccgccccccccagcggcggccccggcttcctgagcatcgagagacccgacagcagaccccccagagtgggcgacaccctgaacctgaacctgagagccgtgggcagcggcgccaccttcagccactactactacatgatcctgagcagaggccagatcgtgttcatgaacagagagcccaagagaaccctgaccagcgtgagcgtgttcgtggaccaccacctggcccccagcttctacttcgtggccttctactaccacggcgaccaccccgtggccaacagcctgagagtggacgtgcaggccggcgcctgcgagggcaagctggagctgagcgtggacggcgccaagcagtacagaaacggcgagagcgtgaagctgcacctggagaccgacagcctggccctggtggccctgggcgccctggacaccgccctgtacgccgccggcagcaagagccacaagcccctgaacatgggcaaggtgttcgaggccatgaacagctacgacctgggctgcggccccggcggcggcgacagcgccctgcaggtgttccaggccgccggcctggccttcagcgacggcgaccagtggaccctgagcagaaagagactgagctgccccaaggagaagaccaccagaaagaagagaaacgtgaacttccagaaggccatcaacgagaagctgggccagtacgccagccccaccgccaagagatgctgccaggacggcgtgaccagactgcccatgatgagaagctgcgagcagagagccgccagagtgcagcagcccgactgcagagagcccttcctgagctgctgccagttcgccgagagcctgagaaagaagagcagagacaagggccaggccggcctgcagagagccctggagatcctgcaggaggaggacctgatcgacgaggacgacatccccgtgagaagcttcttccccgagaactggctgtggagagtggagaccgtggacagattccagatcctgaccctgtggctgcccgacagcctgaccacctgggagatccacggcctgagcctgagcaagaccaagggcctgtgcgtggccacccccgtgcagctgagagtgttcagagagttccacctgcacctgagactgcccatgagcgtgagaagattcgagcagctggagctgagacccgtgctgtacaactacctggacaagaacctgaccgtgagcgtgcacgtgagccccgtggagggcctgtgcctggccggcggcggcggcctggcccagcaggtgctggtgcccgccggcagcgccagacccgtggccttcagcgtggtgcccaccgccgccgccgccgtgagcctgaaggtggtggccagaggcagcttcgagttccccgtgggcgacgccgtgagcaaggtgctgcagatcgagaaggagggcgccatccacagagaggagctggtgtacgagctgaaccccctggaccacagaggcagaaccctggagatccccggcaacagcgaccccaacatgatccccgacggcgacttcaacagctacgtgagagtgaccgccagcgaccccctggacaccctgggcagcgagggcgccctgagccccggcggcgtggccagcctgctgagactgcccagaggctgcggcgagcagaccatgatctacctggcccccaccctggccgccagcagatacctggacaagaccgagcagtggagcaccctgccccccgagaccaaggaccacgccgtggacctgatccagaagggctacatgagaatccagcagttcagaaaggccgacggcagctacgccgcctggctgagcagagacagcagcacctggctgaccgccttcgtgctgaaggtgctgagcctggcccaggagcaggtgggcggcagccccgagaagctgcaggagaccagcaactggctgctgagccagcagcaggccgacggcagcttccaggacccctgccccgtgctggacagaagcatgcagggcggcctggtgggcaacgacgagaccgtggccctgaccgccttcgtgaccatcgccctgcaccacggcctggccgtgttccaggacgagggcgccgagcccctgaagcagagagtggaggccagcatcagcaaggccagcagcttcctgggcgagaaggccagcgccggcctgctgggcgcccacgccgccgccatcaccgcctacgccctgaccctgaccaaggcccccgtggacctgctgggcgtggcccacaacaacctgatggccatggcccaggagaccggcgacaacctgtactggggcagcgtgaccggcagccagagcaacgccgtgagccccacccccgcccccagaaaccccagcgaccccatgccccaggcccccgccctgtggatcgagaccaccgcctacgccctgctgcacctgctgctgcacgagggcaaggccgagatggccgaccaggccgccgcctggctgaccagacagggcagcttccagggcggcttcagaagcacccaggacaccgtgatcgccctggacgccctgagcgcctactggatcgccagccacaccaccgaggagagaggcctgaacgtgaccctgagcagcaccggcagaaacggcttcaagagccacgccctgcagctgaacaacagacagatcagaggcctggaggaggagctgcagttcagcctgggcagcaagatcaacgtgaaggtgggcggcaacagcaagggcaccctgaaggtgctgagaacctacaacgtgctggacatgaagaacaccacctgccaggacctgcagatcgaggtgaccgtgaagggccacgtggagtacaccatggaggccaacgaggactacgaggactacgagtacgacgagctgcccgccaaggacgaccccgacgcccccctgcagcccgtgacccccctgcagctgttcgagggcagaagaaacagaagaagaagagaggcccccaaggtggtggaggagcaggagagcagagtgcactacaccgtgtgcatctggagaaacggcaaggtgggcctgagcggcatggccatcgccgacgtgaccctgctgagcggcttccacgccctgagagccgacctggagaagctgaccagcctgagcgacagatacgtgagccacttcgagaccgagggcccccacgtgctgctgtacttcgacagcgtgcccaccagcagagagtgcgtgggcttcgaggccgtgcaggaggtgcccgtgggcctggtgcagcccgccagcgccaccctgtacgactactacaaccccgagagaagatgcagcgtgttctacggcgcccccagcaagagcagactgctggccaccctgtgcagcgccgaggtgtgccagtgcgccgagggcaagtgccccagacagagaagagccctggagagaggcctgcaggacgaggacggctacagaatgaagttcgcctgctactaccccagagtggagtacggcttccaggtgaaggtgctgagagaggacagcagagccgccttcagactgttcgagaccaagatcacccaggtgctgcacttcaccaaggacgtgaaggccgccgccaaccagatgagaaacttcctggtgagagccagctgcagactgagactggagcccggcaaggagtacctgatcatgggcctggacggcgccacctacgacctggagggccacccccagtacctgctggacagcaacagctggatcgaggagatgcccagcgagagactgtgcagaagcaccagacagagagccgcctgcgcccagctgaacgacttcctgcaggagtacggcacccagggctgccaggtgtag

SEQ ID NO: 77468 - DNA, 5235 bp, synthetic construct
  misc_feature 1..5235: note = Description of Artificial Sequence: Synthetic coding sequence
  source 1..5235: mol_type = other DNA
atgagactgctgtggggcctgatctgggccagcagcttcttcaccctgagcctgcagaagcccagactgctgctgttcagccccagcgtggtgcacctgggcgtgcccctgagcgtgggcgtgcagctgcaggacgtgcccagaggccaggtggtgaagggcagcgtgttcctgagaaaccccagcagaaacaacgtgccctgcagccccaaggtggacttcaccctgagcagcgagagagacttcgccctgctgagcctgcaggtgcccctgaaggacgccaagagctgcggcctgcaccagctgctgagaggccccgaggtgcagctggtggcccacagcccctggctgaaggacagcctgagcagaaccaccaacatccagggcatcaacctgctgttcagcagcagaagaggccacctgttcctgcagaccgaccagcccatctacaaccccggccagagagtgagatacagagtgttcgccctggaccagaagatgagacccagcaccgacaccatcaccgtgatggtggagaacagccacggcctgagagtgagaaagaaggaggtgtacatgcccagcagcatcttccaggacgacttcgtgatccccgacatcagcgagcccggcacctggaagatcagcgccagattcagcgacggcctggagagcaacagcagcacccagttcgaggtgaagaagtacgtgctgcccaacttcgaggtgaagatcacccccggcaagccctacatcctgaccgtgcccggccacctggacgagatgcagctggacatccaggccagatacatctacggcaagcccgtgcagggcgtggcctacgtgagattcggcctgctggacgaggacggcaagaagaccttcttcagaggcctggagagccagaccaagctggtgaacggccagagccacatcagcctgagcaaggccgagttccaggacgccctggagaagctgaacatgggcatcaccgacctgcagggcctgagactgtacgtggccgccgccatcatcgagtaccccggcggcgagatggaggaggccgagctgaccagctggtacttcgtgagcagccccttcagcctggacctgagcaagaccaagagacacctggtgcccggcgcccccttcctgctgcaggccctggtgagagagatgagcggcagccccgccagcggcatccccgtgaaggtgagcgccaccgtgagcagccccggcagcgtgcccgaggtgcaggacatccagcagaacaccgacggcagcggccaggtgagcatccccatcatcatcccccagaccatcagcgagctgcagctgagcgtgagcgccggcagcccccaccccgccatcgccagactgaccgtggccgccccccccagcggcggccccggcttcctgagcatcgagagacccgacagcagaccccccagagtgggcgacaccctgaacctgaacctgagagccgtgggcagcggcgccaccttcagccactactactacatgatcctgagcagaggccagatcgtgttcatgaacagagagcccaagagaaccctgaccagcgtgagcgtgttcgtggaccaccacctggcccccagcttctacttcgtggccttctactaccacggcgaccaccccgtggccaacagcctgagagtggacgtgcaggccggcgcctgcgagggcaagctggagctgagcgtggacggcgccaagcagtacagaaacggcgagagcgtgaagctgcacctggagaccgacagcctggccctggtggccctgggcgccctggacaccgccctgtacgccgccggcagcaagagccacaagcccctgaacatgggcaaggtgttcgaggccatgaacagctacgacctgggctgcggccccggcggcggcgacagcgccctgcaggtgttccaggccgccggcctggccttcagcgacggcgaccagtggaccctgagcagaaagagactgagctgccccaaggagaagaccaccagaaagaagagaaacgtgaacttccagaaggccatcaacgagaagctgggccagtacgccagccccaccgccaagagatgctgccaggacggcgtgaccagactgcccatgatgagaagctgcgagcagagagccgccagagtgcagcagcccgactgcagagagcccttcctgagctgctgccagttcgccgagagcctgagaaagaagagcagagacaagggccaggccggcctgcagagagccctggagatcctgcaggaggaggacctgatcgacgaggacgacatccccgtgagaagcttcttccccgagaactggctgtggagagtggagaccgtggacagattccagatcctgaccctgtggctgcccgacagcctgaccacctgggagatccacggcctgagcctgagcaagaccaagggcctgtgcgtggccacccccgtgcagctgagagtgttcagagagttccacctgcacctgagactgcccatgagcgtgagaagattcgagcagctggagctgagacccgtgctgtacaactacctggacaagaacctgaccgtgagcgtgcacgtgagccccgtggagggcctgtgcctggccggcggcggcggcctggcccagcaggtgctggtgcccgccggcagcgccagacccgtggccttcagcgtggtgcccaccgccgccgccgccgtgagcctgaaggtggtggccagaggcagcttcgagttccccgtgggcgacgccgtgagcaaggtgctgcagatcgagaaggagggcgccatccacagagaggagctggtgtacgagctgaaccccctggaccacagaggcagaaccctggagatccccggcaacagcgaccccaacatgatccccgacggcgacttcaacagctacgtgagagtgaccgccagcgaccccctggacaccctgggcagcgagggcgccctgagccccggcggcgtggccagcctgctgagactgcccagaggctgcggcgagcagaccatgatctacctggcccccaccctggccgccagcagatacctggacaagaccgagcagtggagcaccctgccccccgagaccaaggaccacgccgtggacctgatccagaagggctacatgagaatccagcagttcagaaaggccgacggcagctacgccgcctggctgagcagagacagcagcacctggctgaccgccttcgtgctgaaggtgctgagcctggcccaggagcaggtgggcggcagccccgagaagctgcaggagaccagcaactggctgctgagccagcagcaggccgacggcagcttccaggacccctgccccgtgctggacagaagcatgcagggcggcctggtgggcaacgacgagaccgtggccctgaccgccttcgtgaccatcgccctgcaccacggcctggccgtgttccaggacgagggcgccgagcccctgaagcagagagtggaggccagcatcagcaaggccaacagcttcctgggcgagaaggccagcgccggcctgctgggcgcccacgccgccgccatcaccgcctacgccctgaccctgaccaaggcccccgtggacctgctgggcgtggcccacaacaacctgatggccatggcccaggagaccggcgacaacctgtactggggcagcgtgaccggcagccagagcaacgccgtgagccccacccccgcccccagaaaccccagcgaccccatgccccaggcccccgccctgtggatcgagaccaccgcctacgccctgctgcacctgctgctgcacgagggcaaggccgagatggccgaccaggccgccgcctggctgaccagacagggcagcttccagggcggcttcagaagcacccaggacaccgtgatcgccctggacgccctgagcgcctactggatcgccagccacaccaccgaggagagaggcctgaacgtgaccctgagcagcaccggcagaaacggcttcaagagccacgccctgcagctgaacaacagacagatcagaggcctggaggaggagctgcagttcagcctgggcagcaagatcaacgtgaaggtgggcggcaacagcaagggcaccctgaaggtgctgagaacctacaacgtgctggacatgaagaacaccacctgccaggacctgcagatcgaggtgaccgtgaagggccacgtggagtacaccatggaggccaacgaggactacgaggactacgagtacgacgagctgcccgccaaggacgaccccgacgcccccctgcagcccgtgacccccctgcagctgttcgagggcagaagaaacagaagaagaagagaggcccccaaggtggtggaggagcaggagagcagagtgcactacaccgtgtgcatctggagaaacggcaaggtgggcctgagcggcatggccatcgccgacgtgaccctgctgagcggcttccacgccctgagagccgacctggagaagctgaccagcctgagcgacagatacgtgagccacttcgagaccgagggcccccacgtgctgctgtacttcgacagcgtgcccaccagcagagagtgcgtgggcttcgaggccgtgcaggaggtgcccgtgggcctggtgcagcccgccagcgccaccctgtacgactactacaaccccgagagaagatgcagcgtgttctacggcgcccccagcaagagcagactgctggccaccctgtgcagcgccgaggtgtgccagtgcgccgagggcaagtgccccagacagagaagagccctggagagaggcctgcaggacgaggacggctacagaatgaagttcgcctgctactaccccagagtggagtacggcttccaggtgaaggtgctgagagaggacagcagagccgccttcagactgttcgagaccaagatcacccaggtgctgcacttcaccaaggacgtgaaggccgccgccaaccagatgagaaacttcctggtgagagccagctgcagactgagactggagcccggcaaggagtacctgatcatgggcctggacggcgccacctacgacctggagggccacccccagtacctgctggacagcaacagctggatcgaggagatgcccagcgagagactgtgcagaagcaccagacagagagccgcctgcgcccagctgaacgacttcctgcaggagtacggcacccagggctgccaggtgtag

SEQ ID NO: 77469 - DNA, 5235 bp, synthetic construct
  misc_feature 1..5235: note = Description of Artificial Sequence: Synthetic coding sequence
  source 1..5235: mol_type = other DNA
atgagactgctgtggggcctgatctgggccagcagcttcttcaccctgagcctgcagaagcccagactgctgctgttcagccccagcgtggtgcacctgggcgtgcccctgagcgtgggcgtgcagctgcaggacgtgcccagaggccaggtggtgaagggcagcgtgttcctgagaaaccccagcagaaacaacgtgccctgcagccccaaggtggacttcaccctgagcagcgagagagacttcgccctgctgagcctgcaggtgcccctgaaggacgccaagagctgcggcctgcaccagctgctgagaggccccgaggtgcagctggtggcccacagcccctggctgaaggacagcctgagcagaaccaccaacatccagggcatcaacctgctgttcagcagcagaagaggccacctgttcctgcagaccgaccagcccatctacaaccccggccagagagtgagatacagagtgttcgccctggaccagaagatgagacccagcaccgacaccatcaccgtgatggtggagaacagccacggcctgagagtgagaaagaaggaggtgtacatgcccagcagcatcttccaggacgacttcgtgatccccgacatcagcgagcccggcacctggaagatcagcgccagattcagcgacggcctggagagcaacagcagcacccagttcgaggtgaagaagtacgtgctgcccaacttcgaggtgaagatcacccccggcaagccctacatcctgaccgtgcccggccacctggacgagatgcagctggacatccaggccagatacatctacggcaagcccgtgcagggcgtggcctacgtgagattcggcctgctggacgaggacggcaagaagaccttcttcagaggcctggagagccagaccaagctggtgaacggccagagccacatcagcctgagcaaggccgagttccaggacgccctggagaagctgaacatgggcatcaccgacctgcagggcctgagactgtacgtggccgccgccatcatcgagagccccggcggcgagatggaggaggccgagctgaccagctggtacttcgtgagcagccccttcagcctggacctgagcaagaccaagagacacctggtgcccggcgcccccttcctgctgcaggccctggtgagagagatgagcggcagccccgccagcggcatccccgtgaaggtgagcgccaccgtgagcagccccggcagcgtgcccgaggtgcaggacatccagcagaacaccgacggcagcggccaggtgagcatccccatcatcatcccccagaccatcagcgagctgcagctgagcgtgagcgccggcagcccccaccccgccatcgccagactgaccgtggccgccccccccagcggcggccccggcttcctgagcatcgagagacccgacagcagaccccccagagtgggcgacaccctgaacctgaacctgagagccgtgggcagcggcgccaccttcagccactactactacatgatcctgagcagaggccagatcgtgttcatgaacagagagcccaagagaaccctgaccagcgtgagcgtgttcgtggaccaccacctggcccccagcttctacttcgtggccttctactaccacggcgaccaccccgtggccaacagcctgagagtggacgtgcaggccggcgcctgcgagggcaagctggagctgagcgtggacggcgccaagcagtacagaaacggcgagagcgtgaagctgcacctggagaccgacagcctggccctggtggccctgggcgccctggacaccgccctgtacgccgccggcagcaagagccacaagcccctgaacatgggcaaggtgttcgaggccatgaacagctacgacctgggctgcggccccggcggcggcgacagcgccctgcaggtgttccaggccgccggcctggccttcagcgacggcgaccagtggaccctgagcagaaagagactgagctgccccaaggagaagaccaccagaaagaagagaaacgtgaacttccagaaggccatcaacgagaagctgggccagtacgccagccccaccgccaagagatgctgccaggacggcgtgaccagactgcccatgatgagaagctgcgagcagagagccgccagagtgcagcagcccgactgcagagagcccttcctgagctgctgccagttcgccgagagcctgagaaagaagagcagagacaagggccaggccggcctgcagagagccctggagatcctgcaggaggaggacctgatcgacgaggacgacatccccgtgagaagcttcttccccgagaactggctgtggagagtggagaccgtggacagattccagatcctgaccctgtggctgcccgacagcctgaccacctgggagatccacggcctgagcctgagcaagaccaagggcctgtgcgtggccacccccgtgcagctgagagtgttcagagagttccacctgcacctgagactgcccatgagcgtgagaagattcgagcagctggagctgagacccgtgctgtacaactacctggacaagaacctgaccgtgagcgtgcacgtgagccccgtggagggcctgtgcctggccggcggcggcggcctggcccagcaggtgctggtgcccgccggcagcgccagacccgtggccttcagcgtggtgcccaccgccgccgccgccgtgagcctgaaggtggtggccagaggcagcttcgagttccccgtgggcgacgccgtgagcaaggtgctgcagatcgagaaggagggcgccatccacagagaggagctggtgtacgagctgaaccccctggaccacagaggcagaaccctggagatccccggcaacagcgaccccaacatgatccccgacggcgacttcaacagctacgtgagagtgaccgccagcgaccccctggacaccctgggcagcgagggcgccctgagccccggcggcgtggccagcctgctgagactgcccagaggctgcggcgagcagaccatgatctacctggcccccaccctggccgccagcagatacctggacaagaccgagcagtggagcaccctgccccccgagaccaaggaccacgccgtggacctgatccagaagggctacatgagaatccagcagttcagaaaggccgacggcagctacgccgcctggctgagcagagacagcagcacctggctgaccgccttcgtgctgaaggtgctgagcctggcccaggagcaggtgggcggcagccccgagaagctgcaggagaccagcaactggctgctgagccagcagcaggccgacggcagcttccaggacccctgccccgtgctggacagaagcatgcagggcggcctggtgggcaacgacgagaccgtggccctgaccgccttcgtgaccatcgccctgcaccacggcctggccgtgttccaggacgagggcgccgagcccctgaagcagagagtggaggccagcatcagcaaggccaacagcttcctgggcgagaaggccagcgccggcctgctgggcgcccacgccgccgccatcaccgcctacgccctgaccctgaccaaggcccccgtggacctgctgggcgtggcccacaacaacctgatggccatggcccaggagaccggcgacaacctgtactggggcagcgtgaccggcagccagagcaacgccgtgagccccacccccgcccccagaaaccccagcgaccccatgccccaggcccccgccctgtggatcgagaccaccgcctacgccctgctgcacctgctgctgcacgagggcaaggccgagatggccgaccaggccagcgcctggctgaccagacagggcagcttccagggcggcttcagaagcacccaggacaccgtgatcgccctggacgccctgagcgcctactggatcgccagccacaccaccgaggagagaggcctgaacgtgaccctgagcagcaccggcagaaacggcttcaagagccacgccctgcagctgaacaacagacagatcagaggcctggaggaggagctgcagttcagcctgggcagcaagatcaacgtgaaggtgggcggcaacagcaagggcaccctgaaggtgctgagaacctacaacgtgctggacatgaagaacaccacctgccaggacctgcagatcgaggtgaccgtgaagggccacgtggagtacaccatggaggccaacgaggactacgaggactacgagtacgacgagctgcccgccaaggacgaccccgacgcccccctgcagcccgtgacccccctgcagctgttcgagggcagaagaaacagaagaagaagagaggcccccaaggtggtggaggagcaggagagcagagtgcactacaccgtgtgcatctggagaaacggcaaggtgggcctgagcggcatggccatcgccgacgtgaccctgctgagcggcttccacgccctgagagccgacctggagaagctgaccagcctgagcgacagatacgtgagccacttcgagaccgagggcccccacgtgctgctgtacttcgacagcgtgcccaccagcagagagtgcgtgggcttcgaggccgtgcaggaggtgcccgtgggcctggtgcagcccgccagcgccaccctgtacgactactacaaccccgagagaagatgcagcgtgttctacggcgcccccagcaagagcagactgctggccaccctgtgcagcgccgaggtgtgccagtgcgccgagggcaagtgccccagacagagaagagccctggagagaggcctgcaggacgaggacggctacagaatgaagttcgcctgctactaccccagagtggagtacggcttccaggtgaaggtgctgagagaggacagcagagccgccttcagactgttcgagaccaagatcacccaggtgctgcacttcaccaaggacgtgaaggccgccgccaaccagatgagaaacttcctggtgagagccagctgcagactgagactggagcccggcaaggagtacctgatcatgggcctggacggcgccacctacgacctggagggccacccccagtacctgctggacagcaacagctggatcgaggagatgcccagcgagagactgtgcagaagcaccagacagagagccgcctgcgcccagctgaacgacttcctgcaggagtacggcacccagggctgccaggtgtag

SEQ ID NO: 77470 - DNA, 5097 bp, synthetic construct
  misc_feature 1..5097: note = Description of Artificial Sequence: Synthetic coding sequence
  source 1..5097: mol_type = other DNA
atgagactgctgtggggcctgatctgggccagcagcttcttcaccctgagcctgcagaagcccagactgctgctgttcagccccagcgtggtgcacctgggcgtgcccctgagcgtgggcgtgcagctgcaggacgtgcccagaggccaggtggtgaagggcagcgtgttcctgagaaaccccagcagaaacaacgtgccctgcagccccaaggtggacttcaccctgagcagcgagagagacttcgccctgctgagcctgcaggtgcccctgaaggacgccaagagctgcggcctgcaccagctgctgagaggccccgaggtgcagctggtggcccacagcccctggctgaaggacagcctgagcagaaccaccaacatccagggcatcaacctgctgttcagcagcagaagaggccacctgttcctgcagaccgaccagcccatctacaaccccggccagagagtgagatacagagtgttcgccctggaccagaagatgagacccagcaccgacaccatcaccgtgatggtggagaacagccacggcctgagagtgagaaagaaggaggtgtacatgcccagcagcatcttccaggacgacttcgtgatccccgacatcagcgagcccggcacctggaagatcagcgccagattcagcgacggcctggagagcaacagcagcacccagttcgaggtgaagaagtacgtgctgcccaacttcgaggtgaagatcacccccggcaagccctacatcctgaccgtgcccggccacctggacgagatgcagctggacatccaggccagatacatctacggcaagcccgtgcagggcgtggcctacgtgagattcggcctgctggacgaggacggcaagaagaccttcttcagaggcctggagagccagaccaagctggtgaacggccagagccacatcagcctgagcaaggccgagttccaggacgccctggagaagctgaacatgggcatcaccgacctgcagggcctgagactgtacgtggccgccgccatcatcgagagccccggcggcgagatggaggaggccgagctgaccagctggtacttcgtgagcagccccttcagcctggacctgagcaagaccaagagacacctggtgcccggcgcccccttcctgctgcaggccctggtgagagagatgagcggcagccccgccagcggcatccccgtgaaggtgagcgccaccgtgagcagccccggcagcgtgcccgaggtgcaggacatccagcagaacaccgacggcagcggccaggtgagcatccccatcatcatcccccagaccatcagcgagctgcagctgagcgtgagcgccggcagcccccaccccgccatcgccagactgaccgtggccgccccccccagcggcggccccggcttcctgagcatcgagagacccgacagcagaccccccagagtgggcgacaccctgaacctgaacctgagagccgtgggcagcggcgccaccttcagccactactactacatgatcctgagcagaggccagatcgtgttcatgaacagagagcccaagagaaccctgaccagcgtgagcgtgttcgtggaccaccacctggcccccagcttctacttcgtggccttctactaccacggcgaccaccccgtggccaacagcctgagagtggacgtgcaggccggcgcctgcgagggcaagctggagctgagcgtggacggcgccaagcagtacagaaacggcgagagcgtgaagctgcacctggagaccgacagcctggccctggtggccctgggcgccctggacaccgccctgtacgccgccggcagcaagagccacaagcccctgaacatgggcaaggtgttcgaggccatgaacagctacgacctgggctgcggccccggcggcggcgacagcgccctgcaggtgttccaggccgccggcctggccttcagcgacggcgaccagtggaccctgagcagaaagagactgagctgccccaaggagaagaccaccagaaagaagagaaacgtgaacttccagaaggccatcaacgagaagctgggccagtacgccagccccaccgccaagagatgctgccaggacggcgtgaccagactgcccatgatgagaagctgcgagcagagagccgccagagtgcagcagcccgactgcagagagcccttcctgagctgctgccagttcgccgagagcctgagaaagaagagcagagacaagggccaggccggcctgcagagagccctggagatcctgcaggaggaggacctgatcgacgaggacgacatccccgtgagaagcttcttccccgagaactggctgtggagagtggagaccgtggacagattccagatcctgaccctgtggctgcccgacagcctgaccacctgggagatccacggcctgagcctgagcaagaccaagggcctgtgcgtggccacccccgtgcagctgagagtgttcagagagttccacctgcacctgagactgcccatgagcgtgagaagattcgagcagctggagctgagacccgtgctgtacaactacctggacaagaacctgaccgtgagcgtgcacgtgagccccgtggagggcctgtgcctggccggcggcggcggcctggcccagcaggtgctggtgcccgccggcagcgccagacccgtggccttcagcgtggtgcccaccgccgccgccgccgtgagcctgaaggtggtggccagaggcagcttcgagttccccgtgggcgacgccgtgagcaaggtgctgcagatcgagaaggagggcgccatccacagagaggagctggtgtacgagctgaaccccctggaccacagaggcagaaccctggagatccccggcaacagcgaccccaacatgatccccgacggcgacttcaacagctacgtgagagtgaccgccagcgaccccctggacaccctgggcagcgagggcgccctgagccccggcggcgtggccagcctgctgagactgcccagaggctgcggcgagcagaccatgatctacctggcccccaccctggccgccagcagatacctggacaagaccgagcagtggagcaccctgccccccgagaccaaggaccacgccgtggacctgatccagaagggctacatgagaatccagcagttcagaaaggccgacggcagctacgccgcctggctgagcagagacagcagcacctggctgaccgccttcgtgctgaaggtgctgagcctggcccaggagcaggtgggcggcagccccgagaagctgcaggagaccagcaactggctgctgagccagcagcaggccgacggcagcttccaggacccctgccccgtgctggacagaagcatgcagggcggcctggtgggcaacgacgagaccgtggccctgaccgccttcgtgaccatcgccctgcaccacggcctggccgtgttccaggacgagggcgccgagcccctgaagcagagagtggaggccagcatcagcaaggccaacagcttcctgggcgagaaggccagcgccggcctgctgggcgcccacgccgccgccatcaccgcctacgccctgaccctgaccaaggcccccgtggacctgctgggcgtggcccacaacaacctgatggccatggcccaggagaccggcgacaacctgtactggggcagcgtgaccggcagccagagcaacgccgtgagccccacccccgcccccagaaaccccagcgaccccatgccccaggcccccgccctgtggatcgagaccaccgcctacgccctgctgcacctgctgctgcacgagggcaaggccgagatggccgaccaggccagcgcctggctgaccagacagggcagcttccagggcggcttcagaagcacccaggacaccgtgatcgccctggacgccctgagcgcctactggatcgccagccacaccaccgaggagagaggcctgaacgtgaccctgagcagcaccggcagaaacggcttcaagagccacgccctgcagctgaacaacagacagatcagaggcctggaggaggagctgcagttcagcctgggcagcaagatcaacgtgaaggtgggcggcaacagcaagggcaccctgaaggtgctgagaacctacaacgtgctggacatgaagaacaccacctgccaggacctgcagatcgaggtgaccgtgaagggccacgtggagtacaccatggaggccaacgaggactacgaggactacgagtacgacgagctgcccgccaaggacgaccccgacgcccccctgcagcccgtgacccccctgcagctgttcgagggcagaagaaacagaagaagaagagaggcccccaagctgaccagcctgagcgacagatacgtgagccacttcgagaccgagggcccccacgtgctgctgtacttcgacagcgtgcccaccagcagagagtgcgtgggcttcgaggccgtgcaggaggtgcccgtgggcctggtgcagcccgccagcgccaccctgtacgactactacaaccccgagagaagatgcagcgtgttctacggcgcccccagcaagagcagactgctggccaccctgtgcagcgccgaggtgtgccagtgcgccgagggcaagtgccccagacagagaagagccctggagagaggcctgcaggacgaggacggctacagaatgaagttcgcctgctactaccccagagtggagtacggcttccaggtgaaggtgctgagagaggacagcagagccgccttcagactgttcgagaccaagatcacccaggtgctgcacttcaccaaggacgtgaaggccgccgccaaccagatgagaaacttcctggtgagagccagctgcagactgagactggagcccggcaaggagtacctgatcatgggcctggacggcgccacctacgacctggagggccacccccagtacctgctggacagcaacagctggatcgaggagatgcccagcgagagactgtgcagaagcaccagacagagagccgcctgcgcccagctgaacgacttcctgcaggagtacggcacccagggctgccaggtgtag

SEQ ID NO: 77471 - DNA, 813 bp, synthetic construct
  misc_feature 1..813: note = Description of Artificial Sequence: Synthetic coding sequence
  source 1..813: mol_type = other DNA
atgtgccccgaggacagcctgcaggtgcccctgaaggacgccaagagctgcggcctgcaccagctgctgagaggccccgaggtgcagctggtggcccacagcccctggctgaaggacagcctgagcagaaccaccaacatccagggcatcaacctgctgttcagcagcagaagaggccacctgttcctgcagaccgaccagcccatctacaaccccggccagagagtgagatacagagtgttcgccctggaccagaagatgagacccagcaccgacaccatcaccgtgatggtggagaacagccacggcctgagagtgagaaagaaggaggtgtacatgcccagcagcatcttccaggacgacttcgtgatccccgacatcagcgagcccggcacctggaagatcagcgccagattcagcgacggcctggagagcaacagcagcacccagttcgaggtgaagaagtacgtgctgcccaacttcgaggtgaagatcacccccggcaagccctacatcctgaccgtgcccggccacctggacgagatgcagctggacatccaggccagatacatctacggcaagcccgtgcagggcgtggcctacgtgagattcggcctgctggacgaggacggcaagaagaccttcttcagaggcctggagagccagaccaagctggtgaacggccagagccacatcagcctgagcaaggccgagttccaggacgccctggagaagctgaacatgggcatcaccgacctgcagggcctgagactgtacgtggccgccgccatcatcgagagccccggcggctag

SEQ ID NO: 77472 - DNA, 5097 bp, synthetic construct
  misc_feature 1..5097: note = Description of Artificial Sequence: Synthetic coding sequence
  source 1..5097: mol_type = other DNA
atgagactgctgtggggcctgatctgggccagcagcttcttcaccctgagcctgcagaagcccagactgctgctgttcagccccagcgtggtgcacctgggcgtgcccctgagcgtgggcgtgcagctgcaggacgtgcccagaggccaggtggtgaagggcagcgtgttcctgagaaaccccagcagaaacaacgtgccctgcagccccaaggtggacttcaccctgagcagcgagagagacttcgccctgctgagcctgcaggtgcccctgaaggacgccaagagctgcggcctgcaccagctgctgagaggccccgaggtgcagctggtggcccacagcccctggctgaaggacagcctgagcagaaccaccaacatccagggcatcaacctgctgttcagcagcagaagaggccacctgttcctgcagaccgaccagcccatctacaaccccggccagagagtgagatacagagtgttcgccctggaccagaagatgagacccagcaccgacaccatcaccgtgatggtggagaacagccacggcctgagagtgagaaagaaggaggtgtacatgcccagcagcatcttccaggacgacttcgtgatccccgacatcagcgagcccggcacctggaagatcagcgccagattcagcgacggcctggagagcaacagcagcacccagttcgaggtgaagaagtacgtgctgcccaacttcgaggtgaagatcacccccggcaagccctacatcctgaccgtgcccggccacctggacgagatgcagctggacatccaggccagatacatctacggcaagcccgtgcagggcgtggcctacgtgagattcggcctgctggacgaggacggcaagaagaccttcttcagaggcctggagagccagaccaagctggtgaacggccagagccacatcagcctgagcaaggccgagttccaggacgccctggagaagctgaacatgggcatcaccgacctgcagggcctgagactgtacgtggccgccgccatcatcgagtaccccggcggcgagatggaggaggccgagctgaccagctggtacttcgtgagcagccccttcagcctggacctgagcaagaccaagagacacctggtgcccggcgcccccttcctgctgcaggccctggtgagagagatgagcggcagccccgccagcggcatccccgtgaaggtgagcgccaccgtgagcagccccggcagcgtgcccgaggtgcaggacatccagcagaacaccgacggcagcggccaggtgagcatccccatcatcatcccccagaccatcagcgagctgcagctgagcgtgagcgccggcagcccccaccccgccatcgccagactgaccgtggccgccccccccagcggcggccccggcttcctgagcatcgagtggcccgacagcagaccccccagagtgggcgacaccctgaacctgaacctgagagccgtgggcagcggcgccaccttcagccactactactacatgatcctgagcagaggccagatcgtgttcatgaacagagagcccaagagaaccctgaccagcgtgagcgtgttcgtggaccaccacctggcccccagcttctacttcgtggccttctactaccacggcgaccaccccgtggccaacagcctgagagtggacgtgcaggccggcgcctgcgagggcaagctggagctgagcgtggacggcgccaagcagtacagaaacggcgagagcgtgaagctgcacctggagaccgacagcctggccctggtggccctgggcgccctggacaccgccctgtacgccgccggcagcaagagccacaagcccctgaacatgggcaaggtgttcgaggccatgaacagctacgacctgggctgcggccccggcggcggcgacagcgccctgcaggtgttccaggccgccggcctggccttcagcgacggcgaccagtggaccctgagcagaaagagactgagctgccccaaggagaagaccaccagaaagaagagaaacgtgaacttccagaaggccatcaacgagaagctgggccagtacgccagccccaccgccaagagatgctgccaggacggcgtgaccagactgcccatgatgagaagctgcgagcagagagccgccagagtgcagcagcccgactgcagagagcccttcctgagctgctgccagttcgccgagagcctgagaaagaagagcagagacaagggccaggccggcctgcagagagccctggagatcctgcaggaggaggacctgatcgacgaggacgacatccccgtgagaagcttcttccccgagaactggctgtggagagtggagaccgtggacagattccagatcctgaccctgtggctgcccgacagcctgaccacctgggagatccacggcctgagcctgagcaagaccaagggcctgtgcgtggccacccccgtgcagctgagagtgttcagagagttccacctgcacctgagactgcccatgagcgtgagaagattcgagcagctggagctgagacccgtgctgtacaactacctggacaagaacctgaccgtgagcgtgcacgtgagccccgtggagggcctgtgcctggccggcggcggcggcctggcccagcaggtgctggtgcccgccggcagcgccagacccgtggccttcagcgtggtgcccaccgccgccgccgccgtgagcctgaaggtggtggccagaggcagcttcgagttccccgtgggcgacgccgtgagcaaggtgctgcagatcgagaaggagggcgccatccacagagaggagctggtgtacgagctgaaccccctggaccacagaggcagaaccctggagatccccggcaacagcgaccccaacatgatccccgacggcgacttcaacagctacgtgagagtgaccgccagcgaccccctggacaccctgggcagcgagggcgccctgagccccggcggcgtggccagcctgctgagactgcccagaggctgcggcgagcagaccatgatctacctggcccccaccctggccgccagcagatacctggacaagaccgagcagtggagcaccctgccccccgagaccaaggaccacgccgtggacctgatccagaagggctacatgagaatccagcagttcagaaaggccgacggcagctacgccgcctggctgagcagagacagcagcacctggctgaccgccttcgtgctgaaggtgctgagcctggcccaggagcaggtgggcggcagccccgagaagctgcaggagaccagcaactggctgctgagccagcagcaggccgacggcagcttccaggacccctgccccgtgctggacagaagcatgcagggcggcctggtgggcaacgacgagaccgtggccctgaccgccttcgtgaccatcgccctgcaccacggcctggccgtgttccaggacgagggcgccgagcccctgaagcagagagtggaggccagcatcagcaaggccaacagcttcctgggcgagaaggccagcgccggcctgctgggcgcccacgccgccgccatcaccgcctacgccctgaccctgaccaaggcccccgtggacctgctgggcgtggcccacaacaacctgatggccatggcccaggagaccggcgacaacctgtactggggcagcgtgaccggcagccagagcaacgccgtgagccccacccccgcccccagaaaccccagcgaccccatgccccaggcccccgccctgtggatcgagaccaccgcctacgccctgctgcacctgctgctgcacgagggcaaggccgagatggccgaccaggccgccgcctggctgaccagacagggcagcttccagggcggcttcagaagcacccaggacaccgtgatcgccctggacgccctgagcgcctactggatcgccagccacaccaccgaggagagaggcctgaacgtgaccctgagcagcaccggcagaaacggcttcaagagccacgccctgcagctgaacaacagacagatcagaggcctggaggaggagctgcagttcagcctgggcagcaagatcaacgtgaaggtgggcggcaacagcaagggcaccctgaaggtgctgagaacctacaacgtgctggacatgaagaacaccacctgccaggacctgcagatcgaggtgaccgtgaagggccacgtggagtacaccatggaggccaacgaggactacgaggactacgagtacgacgagctgcccgccaaggacgaccccgacgcccccctgcagcccgtgacccccctgcagctgttcgagggcagaagaaacagaagaagaagagaggcccccaagctgaccagcctgagcgacagatacgtgagccacttcgagaccgagggcccccacgtgctgctgtacttcgacagcgtgcccaccagcagagagtgcgtgggcttcgaggccgtgcaggaggtgcccgtgggcctggtgcagcccgccagcgccaccctgtacgactactacaaccccgagagaagatgcagcgtgttctacggcgcccccagcaagagcagactgctggccaccctgtgcagcgccgaggtgtgccagtgcgccgagggcaagtgccccagacagagaagagccctggagagaggcctgcaggacgaggacggctacagaatgaagttcgcctgctactaccccagagtggagtacggcttccaggtgaaggtgctgagagaggacagcagagccgccttcagactgttcgagaccaagatcacccaggtgctgcacttcaccaaggacgtgaaggccgccgccaaccagatgagaaacttcctggtgagagccagctgcagactgagactggagcccggcaaggagtacctgatcatgggcctggacggcgccacctacgacctggagggccacccccagtacctgctggacagcaacagctggatcgaggagatgcccagcgagagactgtgcagaagcaccagacagagagccgcctgcgcccagctgaacgacttcctgcaggagtacggcacccagggctgccaggtgtag

SEQ ID NO: 77473 - DNA, 1536 bp, synthetic construct
  misc_feature 1..1536: note = Description of Artificial Sequence: Synthetic coding sequence
  source 1..1536: mol_type = other DNA
atggccaagggcctgagcgtgcagaacgacaagcaccccggctaccagcccgccctgctgctgagccccggcgcccccctgttcgccgacggccccgcctacgccctgctgcacctgctgctgcacgagggcaaggccgagatggccgaccaggccgccgcctggctgaccagacagggcagcttccagggcggcttcagaagcacccaggacaccgtgatcgccctggacgccctgagcgcctactggatcgccagccacaccaccgaggagagaggcctgaacgtgaccctgagcagcaccggcagaaacggcttcaagagccacgccctgcagctgaacaacagacagatcagaggcctggaggaggagctgcagttcagcctgggcagcaagatcaacgtgaaggtgggcggcaacagcaagggcaccctgaaggtgctgagaacctacaacgtgctggacatgaagaacaccacctgccaggacctgcagatcgaggtgaccgtgaagggccacgtggagtacaccatggaggccaacgaggactacgaggactacgagtacgacgagctgcccgccaaggacgaccccgacgcccccctgcagcccgtgacccccctgcagctgttcgagggcagaagaaacagaagaagaagagaggcccccaaggtggtggaggagcaggagagcagagtgcactacaccgtgtgcatctggagaaacggcaaggtgggcctgagcggcatggccatcgccgacgtgaccctgctgagcggcttccacgccctgagagccgacctggagaagctgaccagcctgagcgacagatacgtgagccacttcgagaccgagggcccccacgtgctgctgtacttcgacagcgtgcccaccagcagagagtgcgtgggcttcgaggccgtgcaggaggtgcccgtgggcctggtgcagcccgccagcgccaccctgtacgactactacaaccccgagagaagatgcagcgtgttctacggcgcccccagcaagagcagactgctggccaccctgtgcagcgccgaggtgtgccagtgcgccgagggcaagtgccccagacagagaagagccctggagagaggcctgcaggacgaggacggctacagaatgaagttcgcctgctactaccccagagtggagtacggcttccaggtgaaggtgctgagagaggacagcagagccgccttcagactgttcgagaccaagatcacccaggtgctgcacttcaccaaggacgtgaaggccgccgccaaccagatgagaaacttcctggtgagagccagctgcagactgagactggagcccggcaaggagtacctgatcatgggcctggacggcgccacctacgacctggagggccacccccagtacctgctggacagcaacagctggatcgaggagatgcccagcgagagactgtgcagaagcaccagacagagagccgcctgcgcccagctgaacgacttcctgcaggagtacggcacccagggctgccaggtgtag

SEQ ID NO: 77474 - DNA, 5097 bp, synthetic construct
  misc_feature 1..5097: note = Description of Artificial Sequence: Synthetic coding sequence
  source 1..5097: mol_type = other DNA
atgagactgctgtggggcctgatctgggccagcagcttcttcaccctgagcctgcagaagcccagactgctgctgttcagccccagcgtggtgcacctgggcgtgcccctgagcgtgggcgtgcagctgcaggacgtgcccagaggccaggtggtgaagggcagcgtgttcctgagaaaccccagcagaaacaacgtgccctgcagccccaaggtggacttcaccctgagcagcgagagagacttcgccctgctgagcctgcaggtgcccctgaaggacgccaagagctgcggcctgcaccagctgctgagaggccccgaggtgcagctggtggcccacagcccctggctgaaggacagcctgagcagaaccaccaacatccagggcatcaacctgctgttcagcagcagaagaggccacctgttcctgcagaccgaccagcccatctacaaccccggccagagagtgagatacagagtgttcgccctggaccagaagatgagacccagcaccgacaccatcaccgtgatggtggagaacagccacggcctgagagtgagaaagaaggaggtgtacatgcccagcagcatcttccaggacgacttcgtgatccccgacatcagcgagcccggcacctggaagatcagcgccagattcagcgacggcctggagagcaacagcagcacccagttcgaggtgaagaagtacgtgctgcccaacttcgaggtgaagatcacccccggcaagccctacatcctgaccgtgcccggccacctggacgagatgcagctggacatccaggccagatacatctacggcaagcccgtgcagggcgtggcctacgtgagattcggcctgctggacgaggacggcaagaagaccttcttcagaggcctggagagccagaccaagctggtgaacggccagagccacatcagcctgagcaaggccgagttccaggacgccctggagaagctgaacatgggcatcaccgacctgcagggcctgagactgtacgtggccgccgccatcatcgagagccccggcggcgagatggaggaggccgagctgaccagctggtacttcgtgagcagccccttcagcctggacctgagcaagaccaagagacacctggtgcccggcgcccccttcctgctgcaggccctggtgagagagatgagcggcagccccgccagcggcatccccgtgaaggtgagcgccaccgtgagcagccccggcagcgtgcccgaggtgcaggacatccagcagaacaccgacggcagcggccaggtgagcatccccatcatcatcccccagaccatcagcgagctgcagctgagcgtgagcgccggcagcccccaccccgccatcgccagactgaccgtggccgccccccccagcggcggccccggcttcctgagcatcgagagacccgacagcagaccccccagagtgggcgacaccctgaacctgaacctgagagccgtgggcagcggcgccaccttcagccactactactacatgatcctgagcagaggccagatcgtgttcatgaacagagagcccaagagaaccctgaccagcgtgagcgtgttcgtggaccaccacctggcccccagcttctacttcgtggccttctactaccacggcgaccaccccgtggccaacagcctgagagtggacgtgcaggccggcgcctgcgagggcaagctggagctgagcgtggacggcgccaagcagtacagaaacggcgagagcgtgaagctgcacctggagaccgacagcctggccctggtggccctgggcgccctggacaccgccctgtacgccgccggcagcaagagccacaagcccctgaacatgggcaaggtgttcgaggccatgaacagctacgacctgggctgcggccccggcggcggcgacagcgccctgcaggtgttccaggccgccggcctggccttcagcgacggcgaccagtggaccctgagcagaaagagactgagctgccccaaggagaagaccaccagaaagaagagaaacgtgaacttccagaaggccatcaacgagaagctgggccagtacgccagccccaccgccaagagatgctgccaggacggcgtgaccagactgcccatgatgagaagctgcgagcagagagccgccagagtgcagcagcccgactgcagagagcccttcctgagctgctgccagttcgccgagagcctgagaaagaagagcagagacaagggccaggccggcctgcagagagccctggagatcctgcaggaggaggacctgatcgacgaggacgacatccccgtgagaagcttcttccccgagaactggctgtggagagtggagaccgtggacagattccagatcctgaccctgtggctgcccgacagcctgaccacctgggagatccacggcctgagcctgagcaagaccaagggcctgtgcgtggccacccccgtgcagctgagagtgttcagagagttccacctgcacctgagactgcccatgagcgtgagaagattcgagcagctggagctgagacccgtgctgtacaactacctggacaagaacctgaccgtgagcgtgcacgtgagccccgtggagggcctgtgcctggccggcggcggcggcctggcccagcaggtgctggtgcccgccggcagcgccagacccgtggccttcagcgtggtgcccaccgccgccgccgccgtgagcctgaaggtggtggccagaggcagcttcgagttccccgtgggcgacgccgtgagcaaggtgctgcagatcgagaaggagggcgccatccacagagaggagctggtgtacgagctgaaccccctggaccacagaggcagaaccctggagatccccggcaacagcgaccccaacatgatccccgacggcgacttcaacagctacgtgagagtgaccgccagcgaccccctggacaccctgggcagcgagggcgccctgagccccggcggcgtggccagcctgctgagactgcccagaggctgcggcgagcagaccatgatctacctggcccccaccctggccgccagcagatacctggacaagaccgagcagtggagcaccctgccccccgagaccaaggaccacgccgtggacctgatccagaagggctacatgagaatccagcagttcagaaaggccgacggcagctacgccgcctggctgagcagagacagcagcacctggctgaccgccttcgtgctgaaggtgctgagcctggcccaggagcaggtgggcggcagccccgagaagctgcaggagaccagcaactggctgctgagccagcagcaggccgacggcagcttccaggacccctgccccgtgctggacagaagcatgcagggcggcctggtgggcaacgacgagaccgtggccctgaccgccttcgtgaccatcgccctgcaccacggcctggccgtgttccaggacgagggcgccgagcccctgaagcagagagtggaggccagcatcagcaaggccagcagcttcctgggcgagaaggccagcgccggcctgctgggcgcccacgccgccgccatcaccgcctacgccctgaccctgaccaaggcccccgtggacctgctgggcgtggcccacaacaacctgatggccatggcccaggagaccggcgacaacctgtactggggcagcgtgaccggcagccagagcaacgccgtgagccccacccccgcccccagaaaccccagcgaccccatgccccaggcccccgccctgtggatcgagaccaccgcctacgccctgctgcacctgctgctgcacgagggcaaggccgagatggccgaccaggccgccgcctggctgaccagacagggcagcttccagggcggcttcagaagcacccaggacaccgtgatcgccctggacgccctgagcgcctactggatcgccagccacaccaccgaggagagaggcctgaacgtgaccctgagcagcaccggcagaaacggcttcaagagccacgccctgcagctgaacaacagacagatcagaggcctggaggaggagctgcagttcagcctgggcagcaagatcaacgtgaaggtgggcggcaacagcaagggcaccctgaaggtgctgagaacctacaacgtgctggacatgaagaacaccacctgccaggacctgcagatcgaggtgaccgtgaagggccacgtggagtacaccatggaggccaacgaggactacgaggactacgagtacgacgagctgcccgccaaggacgaccccgacgcccccctgcagcccgtgacccccctgcagctgttcgagggcagaagaaacagaagaagaagagaggcccccaagctgaccagcctgagcgacagatacgtgagccacttcgagaccgagggcccccacgtgctgctgtacttcgacagcgtgcccaccagcagagagtgcgtgggcttcgaggccgtgcaggaggtgcccgtgggcctggtgcagcccgccagcgccaccctgtacgactactacaaccccgagagaagatgcagcgtgttctacggcgcccccagcaagagcagactgctggccaccctgtgcagcgccgaggtgtgccagtgcgccgagggcaagtgccccagacagagaagagccctggagagaggcctgcaggacgaggacggctacagaatgaagttcgcctgctactaccccagagtggagtacggcttccaggtgaaggtgctgagagaggacagcagagccgccttcagactgttcgagaccaagatcacccaggtgctgcacttcaccaaggacgtgaaggccgccgccaaccagatgagaaacttcctggtgagagccagctgcagactgagactggagcccggcaaggagtacctgatcatgggcctggacggcgccacctacgacctggagggccacccccagtacctgctggacagcaacagctggatcgaggagatgcccagcgagagactgtgcagaagcaccagacagagagccgcctgcgcccagctgaacgacttcctgcaggagtacggcacccagggctgccaggtgtag

SEQ ID NO: 77475 - DNA, 5097 bp, synthetic construct
  misc_feature 1..5097: note = Description of Artificial Sequence: Synthetic coding sequence
  source 1..5097: mol_type = other DNA
atgagactgctgtggggcctgatctgggccagcagcttcttcaccctgagcctgcagaagcccagactgctgctgttcagccccagcgtggtgcacctgggcgtgcccctgagcgtgggcgtgcagctgcaggacgtgcccagaggccaggtggtgaagggcagcgtgttcctgagaaaccccagcagaaacaacgtgccctgcagccccaaggtggacttcaccctgagcagcgagagagacttcgccctgctgagcctgcaggtgcccctgaaggacgccaagagctgcggcctgcaccagctgctgagaggccccgaggtgcagctggtggcccacagcccctggctgaaggacagcctgagcagaaccaccaacatccagggcatcaacctgctgttcagcagcagaagaggccacctgttcctgcagaccgaccagcccatctacaaccccggccagagagtgagatacagagtgttcgccctggaccagaagatgagacccagcaccgacaccatcaccgtgatggtggagaacagccacggcctgagagtgagaaagaaggaggtgtacatgcccagcagcatcttccaggacgacttcgtgatccccgacatcagcgagcccggcacctggaagatcagcgccagattcagcgacggcctggagagcaacagcagcacccagttcgaggtgaagaagtacgtgctgcccaacttcgaggtgaagatcacccccggcaagccctacatcctgaccgtgcccggccacctggacgagatgcagctggacatccaggccagatacatctacggcaagcccgtgcagggcgtggcctacgtgagattcggcctgctggacgaggacggcaagaagaccttcttcagaggcctggagagccagaccaagctggtgaacggccagagccacatcagcctgagcaaggccgagttccaggacgccctggagaagctgaacatgggcatcaccgacctgcagggcctgagactgtacgtggccgccgccatcatcgagtaccccggcggcgagatggaggaggccgagctgaccagctggtacttcgtgagcagccccttcagcctggacctgagcaagaccaagagacacctggtgcccggcgcccccttcctgctgcaggccctggtgagagagatgagcggcagccccgccagcggcatccccgtgaaggtgagcgccaccgtgagcagccccggcagcgtgcccgaggtgcaggacatccagcagaacaccgacggcagcggccaggtgagcatccccatcatcatcccccagaccatcagcgagctgcagctgagcgtgagcgccggcagcccccaccccgccatcgccagactgaccgtggccgccccccccagcggcggccccggcttcctgagcatcgagagacccgacagcagaccccccagagtgggcgacaccctgaacctgaacctgagagccgtgggcagcggcgccaccttcagccactactactacatgatcctgagcagaggccagatcgtgttcatgaacagagagcccaagagaaccctgaccagcgtgagcgtgttcgtggaccaccacctggcccccagcttctacttcgtggccttctactaccacggcgaccaccccgtggccaacagcctgagagtggacgtgcaggccggcgcctgcgagggcaagctggagctgagcgtggacggcgccaagcagtacagaaacggcgagagcgtgaagctgcacctggagaccgacagcctggccctggtggccctgggcgccctggacaccgccctgtacgccgccggcagcaagagccacaagcccctgaacatgggcaaggtgttcgaggccatgaacagctacgacctgggctgcggccccggcggcggcgacagcgccctgcaggtgttccaggccgccggcctggccttcagcgacggcgaccagtggaccctgagcagaaagagactgagctgccccaaggagaagaccaccagaaagaagagaaacgtgaacttccagaaggccatcaacgagaagctgggccagtacgccagccccaccgccaagagatgctgccaggacggcgtgaccagactgcccatgatgagaagctgcgagcagagagccgccagagtgcagcagcccgactgcagagagcccttcctgagctgctgccagttcgccgagagcctgagaaagaagagcagagacaagggccaggccggcctgcagagagccctggagatcctgcaggaggaggacctgatcgacgaggacgacatccccgtgagaagcttcttccccgagaactggctgtggagagtggagaccgtggacagattccagatcctgaccctgtggctgcccgacagcctgaccacctgggagatccacggcctgagcctgagcaagaccaagggcctgtgcgtggccacccccgtgcagctgagagtgttcagagagttccacctgcacctgagactgcccatgagcgtgagaagattcgagcagctggagctgagacccgtgctgtacaactacctggacaagaacctgaccgtgagcgtgcacgtgagccccgtggagggcctgtgcctggccggcggcggcggcctggcccagcaggtgctggtgcccgccggcagcgccagacccgtggccttcagcgtggtgcccaccgccgccgccgccgtgagcctgaaggtggtggccagaggcagcttcgagttccccgtgggcgacgccgtgagcaaggtgctgcagatcgagaaggagggcgccatccacagagaggagctggtgtacgagctgaaccccctggaccacagaggcagaaccctggagatccccggcaacagcgaccccaacatgatccccgacggcgacttcaacagctacgtgagagtgaccgccagcgaccccctggacaccctgggcagcgagggcgccctgagccccggcggcgtggccagcctgctgagactgcccagaggctgcggcgagcagaccatgatctacctggcccccaccctggccgccagcagatacctggacaagaccgagcagtggagcaccctgccccccgagaccaaggaccacgccgtggacctgatccagaagggctacatgagaatccagcagttcagaaaggccgacggcagctacgccgcctggctgagcagagacagcagcacctggctgaccgccttcgtgctgaaggtgctgagcctggcccaggagcaggtgggcggcagccccgagaagctgcaggagaccagcaactggctgctgagccagcagcaggccgacggcagcttccaggacccctgccccgtgctggacagaagcatgcagggcggcctggtgggcaacgacgagaccgtggccctgaccgccttcgtgaccatcgccctgcaccacggcctggccgtgttccaggacgagggcgccgagcccctgaagcagagagtggaggccagcatcagcaaggccaacagcttcctgggcgagaaggccagcgccggcctgctgggcgcccacgccgccgccatcaccgcctacgccctgaccctgaccaaggcccccgtggacctgctgggcgtggcccacaacaacctgatggccatggcccaggagaccggcgacaacctgtactggggcagcgtgaccggcagccagagcaacgccgtgagccccacccccgcccccagaaaccccagcgaccccatgccccaggcccccgccctgtggatcgagaccaccgcctacgccctgctgcacctgctgctgcacgagggcaaggccgagatggccgaccaggccgccgcctggctgaccagacagggcagcttccagggcggcttcagaagcacccaggacaccgtgatcgccctggacgccctgagcgcctactggatcgccagccacaccaccgaggagagaggcctgaacgtgaccctgagcagcaccggcagaaacggcttcaagagccacgccctgcagctgaacaacagacagatcagaggcctggaggaggagctgcagttcagcctgggcagcaagatcaacgtgaaggtgggcggcaacagcaagggcaccctgaaggtgctgagaacctacaacgtgctggacatgaagaacaccacctgccaggacctgcagatcgaggtgaccgtgaagggccacgtggagtacaccatggaggccaacgaggactacgaggactacgagtacgacgagctgcccgccaaggacgaccccgacgcccccctgcagcccgtgacccccctgcagctgttcgagggcagaagaaacagaagaagaagagaggcccccaagctgaccagcctgagcgacagatacgtgagccacttcgagaccgagggcccccacgtgctgctgtacttcgacagcgtgcccaccagcagagagtgcgtgggcttcgaggccgtgcaggaggtgcccgtgggcctggtgcagcccgccagcgccaccctgtacgactactacaaccccgagagaagatgcagcgtgttctacggcgcccccagcaagagcagactgctggccaccctgtgcagcgccgaggtgtgccagtgcgccgagggcaagtgccccagacagagaagagccctggagagaggcctgcaggacgaggacggctacagaatgaagttcgcctgctactaccccagagtggagtacggcttccaggtgaaggtgctgagagaggacagcagagccgccttcagactgttcgagaccaagatcacccaggtgctgcacttcaccaaggacgtgaaggccgccgccaaccagatgagaaacttcctggtgagagccagctgcagactgagactggagcccggcaaggagtacctgatcatgggcctggacggcgccacctacgacctggagggccacccccagtacctgctggacagcaacagctggatcgaggagatgcccagcgagagactgtgcagaagcaccagacagagagccgcctgcgcccagctgaacgacttcctgcaggagtacggcacccagggctgccaggtgtag

SEQ ID NO: 77476 - DNA, 1536 bp, synthetic construct; identical to SEQ ID NO: 77473
  misc_feature 1..1536: note = Description of Artificial Sequence: Synthetic coding sequence
  source 1..1536: mol_type = other DNA

SEQ ID NO: 77477 - DNA, 813 bp, synthetic construct
  misc_feature 1..813: note = Description of Artificial Sequence: Synthetic coding sequence
  source 1..813: mol_type = other DNA
atgtgccccgaggacagcctgcaggtgcccctgaaggacgccaagagctgcggcctgcaccagctgctgagaggccccgaggtgcagctggtggcccacagcccctggctgaaggacagcctgagcagaaccaccaacatccagggcatcaacctgctgttcagcagcagaagaggccacctgttcctgcagaccgaccagcccatctacaaccccggccagagagtgagatacagagtgttcgccctggaccagaagatgagacccagcaccgacaccatcaccgtgatggtggagaacagccacggcctgagagtgagaaagaaggaggtgtacatgcccagcagcatcttccaggacgacttcgtgatccccgacatcagcgagcccggcacctggaagatcagcgccagattcagcgacggcctggagagcaacagcagcacccagttcgaggtgaagaagtacgtgctgcccaacttcgaggtgaagatcacccccggcaagccctacatcctgaccgtgcccggccacctggacgagatgcagctggacatccaggccagatacatctacggcaagcccgtgcagggcgtggcctacgtgagattcggcctgctggacgaggacggcaagaagaccttcttcagaggcctggagagccagaccaagctggtgaacggccagagccacatcagcctgagcaaggccgagttccaggacgccctggagaagctgaacatgggcatcaccgacctgcagggcctgagactgtacgtggccgccgccatcatcgagtaccccggcggctag

SEQ ID NO: 77478 - DNA, 5235 bp, synthetic construct
  misc_feature 1..5235: note = Description of Artificial Sequence: Synthetic coding sequence
  source 1..5235: mol_type = other DNA
atgagactgctgtggggcctgatctgggccagcagcttcttcaccctgagcctgcagaagcccagactgctgctgttcagccccagcgtggtgcacctgggcgtgcccctgagcgtgggcgtgcagctgcaggacgtgcccagaggccaggtggtgaagggcagcgtgttcctgagaaaccccagcagaaacaacgtgccctgcagccccaaggtggacttcaccctgagcagcgagagagacttcgccctgctgagcctgcaggtgcccctgaaggacgccaagagctgcggcctgcaccagctgctgagaggccccgaggtgcagctggtggcccacagcccctggctgaaggacagcctgagcagaaccaccaacatccagggcatcaacctgctgttcagcagcagaagaggccacctgttcctgcagaccgaccagcccatctacaaccccggccagagagtgagatacagagtgttcgccctggaccagaagatgagacccagcaccgacaccatcaccgtgatggtggagaacagccacggcctgagagtgagaaagaaggaggtgtacatgcccagcagcatcttccaggacgacttcgtgatccccgacatcagcgagcccggcacctggaagatcagcgccagattcagcgacggcctggagagcaacagcagcacccagttcgaggtgaagaagtacgtgctgcccaacttcgaggtgaagatcacccccggcaagccctacatcctgaccgtgcccggccacctggacgagatgcagctggacatccaggccagatacatctacggcaagcccgtgcagggcgtggcctacgtgagattcggcctgctggacgaggacggcaagaagaccttcttcagaggcctggagagccagaccaagctggtgaacggccagagccacatcagcctgagcaaggccgagttccaggacgccctggagaagctgaacatgggcatcaccgacctgcagggcctgagactgtacgtggccgccgccatcatcgagagccccggcggcgagatggaggaggccgagctgaccagctggtacttcgtgagcagccccttcagcctggacctgagcaagaccaagagacacctggtgcccggcgcccccttcctgctgcaggccctggtgagagagatgagcggcagccccgccagcggcatccccgtgaaggtgagcgccaccgtgagcagccccggcagcgtgcccgaggtgcaggacatccagcagaacaccgacggcagcggccaggtgagcatccccatcatcatcccccagaccatcagcgagctgcagctgagcgtgagcgccggcagcccccaccccgccatcgccagactgaccgtggccgccccccccagcggcggccccggcttcctgagcatcgagagacccgacagcagaccccccagagtgggcgacaccctgaacctgaacctgagagccgtgggcagcggcgccaccttcagccactactactacatgatcctgagcagaggccagatcgtgttcatgaacagagagcccaagagaaccctgaccagcgtgagcgtgttcgtggaccaccacctggcccccagcttctacttcgtggccttctactaccacggcgaccaccccgtggccaacagcctgagagtggacgtgcaggccggcgcctgcgagggcaagctggagctgagcgtggacggcgccaagcagtacagaaacggcgagagcgtgaagctgcacctggagaccgacagcctggccctggtggccctgggcgccctggacaccgccctgtacgccgccggcagcaagagccacaagcccctgaacatgggcaaggtgttcgaggccatgaacagctacgacctgggctgcggccccggcggcggcgacagcgccctgcaggtgttccaggccgccggcctggccttcagcgacggcgaccagtggaccctgagcagaaagagactgagctgccccaaggagaagaccaccagaaagaagagaaacgtgaacttccagaaggccatcaacgagaagctgggccagtacgccagccccaccgccaagagatgctgccaggacggcgtgaccagactgcccatgatgagaagctgcgagcagagagccgccagagtgcagcagcccgactgcagagagcccttcctgagctgctgccagttcgccgagagcctgagaaagaagagcagagacaagggccaggccggcctgcagagagccctggagatcctgcaggaggaggacctgatcgacgaggacgacatccccgtgagaagcttcttccccgagaactggctgtggagagtggagaccgtggacagattccagatcctgaccctgtggctgcccgacagcctgaccacctgggagatccacggcctgagcctgagcaagaccaagggcctgtgcgtggccacccccgtgcagctgagagtgttcagagagttccacctgcacctgagactgcccatgagcgtgagaagattcgagcagctggagctgagacccgtgctgtacaactacctggacaagaacctgaccgtgagcgtgcacgtgagccccgtggagggcctgtgcctggccggcggcggcggcctggcccagcaggtgctggtgcccgccggcagcgccagacccgtggccttcagcgtggtgcccaccgccgccaccgccgtgagcctgaaggtggtggccagaggcagcttcgagttccccgtgggcgacgccgtgagcaaggtgctgcagatcgagaaggagggcgccatccacagagaggagctggtgtacgagctgaaccccctggaccacagaggcagaaccctggagatccccggcaacagcgaccccaacatgatccccgacggcgacttcaacagctacgtgagagtgaccgccagcgaccccctggacaccctgggcagcgagggcgccctgagccccggcggcgtggccagcctgctgagactgcccagaggctgcggcgagcagaccatgatctacctggcccccaccctggccgccagcagatacctggacaagaccgagcagtggagcaccctgccccccgagaccaaggaccacgccgtggacctgatccagaagggctacatgagaatccagcagttcagaaaggccgacggcagctacgccgcctggctgagcagaggcagcagcacctggctgaccgccttcgtgctgaaggtgctgagcctggcccaggagcaggtgggcggcagccccgagaagctgcaggagaccagcaactggctgctgagccagcagcaggccgacggcagcttccaggacctgagccccgtgatccacagaagcatgcagggcggcctggtgggcaacgacgagaccgtggccctgaccgccttcgtgaccatcgccctgcaccacggcctggccgtgttccaggacgagggcgccgagcccctgaagcagagagtggaggccagcatcagcaaggccagcagcttcctgggcgagaaggccagcgccggcctgctgggcgcccacgccgccgccatcaccgcctacgccctgaccctgaccaaggcccccgccgacctgagaggcgtggcccacaacaacctgatggccatggcccaggagaccggcgacaacctgtactggggcagcgtgaccggcagccagagcaacgccgtgagccccacccccgcccccagaaaccccagcgaccccatgccccaggcccccgccctgtggatcgagaccaccgcctacgccctgctgcacctgctgctgcacgagggcaaggccgagatggccgaccaggccgccgcctggctgaccagacagggcagcttccagggcggcttcagaagcacccaggacaccgtgatcgccctggacgccctgagcgcctactggatcgccagccacaccaccgaggagagaggcctgaacgtgaccctgagcagcaccggcagaaacggcttcaagagccacgccctgcagctgaacaacagacagatcagaggcctggaggaggagctgcagttcagcctgggcagcaagatcaacgtgaaggtgggcggcaacagcaagggcaccctgaaggtgctgagaacctacaacgtgctggacatgaagaacaccacctgccaggacctgcagatcgaggtgaccgtgaagggccacgtggagtacaccatggaggccaacgaggactacgaggactacgagtacgacgagctgcccgccaaggacgaccccgacgcccccctgcagcccgtgacccccctgcagctgttcgagggcagaagaaacagaagaagaagagaggcccccaaggtggtggaggagcaggagagcagagtgcactacaccgtgtgcatctggagaaacggcaaggtgggcctgagcggcatggccatcgccgacgtgaccctgctgagcggcttccacgccctgagagccgacctggagaagctgaccagcctgagcgacagatacgtgagccacttcgagaccgagggcccccacgtgctgctgtacttcgacagcgtgcccaccagcagagagtgcgtgggcttcgaggccgtgcaggaggtgcccgtgggcctggtgcagcccgccagcgccaccctgtacgactactacaaccccgagagaagatgcagcgtgttctacggcgcccccagcaagagcagactgctggccaccctgtgcagcgccgaggtgtgccagtgcgccgagggcaagtgccccagacagagaagagccctggagagaggcctgcaggacgaggacggctacagaatgaagttcgcctgctactaccccagagtggagtacggcttccaggtgaaggtgctgagagaggacagcagagccgccttcagactgttcgagaccaagatcacccaggtgctgcacttcaccaaggacgtgaaggccgccgccaaccagatgagaaacttcctggtgagagccagctgcagactgagactggagcccggcaaggagtacctgatcatgggcctggacggcgccacctacgacctggagggccacccccagtacctgctggacagcaacagctggatcgaggagatgcccagcgagagactgtgcagaagcaccagacagagagccgcctgcgcccagctgaacgacttcctgcaggagtacggcacccagggctgccaggtgtag

SEQ ID NO: 77479 - DNA, 5097 bp, synthetic construct
  misc_feature 1..5097: note = Description of Artificial Sequence: Synthetic coding sequence
  source 1..5097: mol_type = other DNA
atgagactgctgtggggcctgatctgggccagcagcttcttcaccctgagcctgcagaagcccagactgctgctgttcagccccagcgtggtgcacctgggcgtgcccctgagcgtgggcgtgcagctgcaggacgtgcccagaggccaggtggtgaagggcagcgtgttcctgagaaaccccagcagaaacaacgtgccctgcagccccaaggtggacttcaccctgagcagcgagagagacttcgccctgctgagcctgcaggtgcccctgaaggacgccaagagctgcggcctgcaccagctgctgagaggccccgaggtgcagctggtggcccacagcccctggctgaaggacagcctgagcagaaccaccaacatccagggcatcaacctgctgttcagcagcagaagaggccacctgttcctgcagaccgaccagcccatctacaaccccggccagagagtgagatacagagtgttcgccctggaccagaagatgagacccagcaccgacaccatcaccgtgatggtggagaacagccacggcctgagagtgagaaagaaggaggtgtacatgcccagcagcatcttccaggacgacttcgtgatccccgacatcagcgagcccggcacctggaagatcagcgccagattcagcgacggcctggagagcaacagcagcacccagttcgaggtgaagaagtacgtgctgcccaacttcgaggtgaagatcacccccggcaagccctacatcctgaccgtgcccggccacctggacgagatgcagctggacatccaggccagatacatctacggcaagcccgtgcagggcgtggcctacgtgagattcggcctgctggacgaggacggcaagaagaccttcttcagaggcctggagagccagaccaagctggtgaacggccagagccacatcagcctgagcaaggccgagttccaggacgccctggagaagctgaacatgggcatcaccgacctgcagggcctgagactgtacgtggccgccgccatcatcgagagccccggcggcgagatggaggaggccgagctgaccagctggtacttcgtgagcagccccttcagcctggacctgagcaagaccaagagacacctggtgcccggcgcccccttcctgctgcaggccctggtgagagagatgagcggcagccccgccagcggcatccccgtgaaggtgagcgccaccgtgagcagccccggcagcgtgcccgaggtgcaggacatccagcagaacaccgacggcagcggccaggtgagcatccccatcatcatcccccagaccatcagcgagctgcagctgagcgtgagcgccggcagcccccaccccgccatcgccagactgaccgtggccgccccccccagcggcggccccggcttcctgagcatcgagagacccgacagcagaccccccagagtgggcgacaccctgaacctgaacctgagagccgtgggcagcggcgccaccttcagccactactactacatgatcctgagcagaggccagatcgtgttcatgaacagagagcccaagagaaccctgaccagcgtgagcgtgttcgtggaccaccacctggcccccagcttctacttcgtggccttctactaccacggcgaccaccccgtggccaacagcctgagagtggacgtgcaggccggcgcctgcgagggcaagctggagctgagcgtggacggcgccaagcagtacagaaacggcgagagcgtgaagctgcacctggagaccgacagcctggccctggtggccctgggcgccctggacaccgccctgtacgccgccggcagcaagagccacaagcccctgaacatgggcaaggtgttcgaggccatgaacagctacgacctgggctgcggccccggcggcggcgacagcgccctgcaggtgttccaggccgccggcctggccttcagcgacggcgaccagtggaccctgagcagaaagagactgagctgccccaaggagaagaccaccagaaagaagagaaacgtgaacttccagaaggccatcaacgagaagctgggccagtacgccagccccaccgccaagagatgctgccaggacggcgtgaccagactgcccatgatgagaagctgcgagcagagagccgccagagtgcagcagcccgactgcagagagcccttcctgagctgctgccagttcgccgagagcctgagaaagaagagcagagacaagggccaggccggcctgcagagagccctggagatcctgcaggaggaggacctgatcgacgaggacgacatccccgtgagaagcttcttccccgagaactggctgtggagagtggagaccgtggacagattccagatcctgaccctgtggctgcccgacagcctgaccacctgggagatccacggcctgagcctgagcaagaccaagggcctgtgcgtggccacccccgtgcagctgagagtgttcagagagttccacctgcacctgagactgcccatgagcgtgagaagattcgagcagctggagctgagacccgtgctgtacaactacctggacaagaacctgaccgtgagcgtgcacgtgagccccgtggagggcctgtgcctggccggcggcggcggcctggcccagcaggtgctggtgcccgccggcagcgccagacccgtggccttcagcgtggtgcccaccgccgccaccgccgtgagcctgaaggtggtggccagaggcagcttcgagttccccgtgggcgacgccgtgagcaaggtgctgcagatcgagaaggagggcgccatccacagagaggagctggtgtacgagctgaaccccctggaccacagaggcagaaccctggagatccccggcaacagcgaccccaacatgatccccgacggcgacttcaacagctacgtgagagtgaccgccagcgaccccctggacaccctgggcagcgagggcgccctgagccccggcggcgtggccagcctgctgagactgcccagaggctgcggcgagcagaccatgatctacctggcccccaccctggccgccagcagatacctggacaagaccgagcagtggagcaccctgccccccgagaccaaggaccacgccgtggacctgatccagaagggctacatgagaatccagcagttcagaaaggccgacggcagctacgccgcctggctgagcagaggcagcagcacctggctgaccgccttcgtgctgaaggtgctgagcctggcccaggagcaggtgggcggcagccccgagaagctgcaggagaccagcaactggctgctgagccagcagcaggccgacggcagcttccaggacctgagccccgtgatccacagaagcatgcagggcggcctggtgggcaacgacgagaccgtggccctgaccgccttcgtgaccatcgccctgcaccacggcctggccgtgttccaggacgagggcgccgagcccctgaagcagagagtggaggccagcatcagcaaggccagcagcttcctgggcgagaaggccagcgccggcctgctgggcgcccacgccgccgccatcaccgcctacgccctgaccctgaccaaggcccccgccgacctgagaggcgtggcccacaacaacctgatggccatggcccaggagaccggcgacaacctgtactggggcagcgtgaccggcagccagagcaacgccgtgagccccacccccgcccccagaaaccccagcgaccccatgccccaggcccccgccctgtggatcgagaccaccgcctacgccctgctgcacctgctgctgcacgagggcaaggccgagatggccgaccaggccgccgcctggctgaccagacagggcagcttccagggcggcttcagaagcacccaggacaccgtgatcgccctggacgccctgagcgcctactggatcgccagccacaccaccgaggagagaggcctgaacgtgaccctgagcagcaccggcagaaacggcttcaagagccacgccctgcagctgaacaacagacagatcagaggcctggaggaggagctgcagttcagcctgggcagcaagatcaacgtgaaggtgggcggcaacagcaagggcaccctgaaggtgctgagaacctacaacgtgctggacatgaagaacaccacctgccaggacctgcagatcgaggtgaccgtgaagggccacgtggagtacaccatggaggccaacgaggactacgaggactacgagtacgacgagctgcccgccaaggacgaccccgacgcccccctgcagcccgtgacccccctgcagctgttcgagggcagaagaaacagaagaagaagagaggcccccaagctgaccagcctgagcgacagatacgtgagccacttcgagaccgagggcccccacgtgctgctgtacttcgacagcgtgcccaccagcagagagtgcgtgggcttcgaggccgtgcaggaggtgcccgtgggcctggtgcagcccgccagcgccaccctgtacgactactacaaccccgagagaagatgcagcgtgttctacggcgcccccagcaagagcagactgctggccaccctgtgcagcgccgaggtgtgccagtgcgccgagggcaagtgccccagacagagaagagccctggagagaggcctgcaggacgaggacggctacagaatgaagttcgcctgctactaccccagagtggagtacggcttccaggtgaaggtgctgagagaggacagcagagccgccttcagactgttcgagaccaagatcacccaggtgctgcacttcaccaaggacgtgaaggccgccgccaaccagatgagaaacttcctggtgagagccagctgcagactgagactggagcccggcaaggagtacctgatcatgggcctggacggcgccacctacgacctggagggccacccccagtacctgctggacagcaacagctggatcgaggagatgcccagcgagagactgtgcagaagcaccagacagagagccgcctgcgcccagctgaacgacttcctgcaggagtacggcacccagggctgccaggtgtag

SEQ ID NO: 77480 - DNA, 5235 bp, synthetic construct; identical to SEQ ID NO: 77478
  misc_feature 1..5235: note = Description of Artificial Sequence: Synthetic coding sequence
  source 1..5235: mol_type = other DNA

SEQ ID NO: 77481 - DNA, 5235 bp, synthetic construct
  misc_feature 1..5235: note = Description of Artificial Sequence: Synthetic coding sequence
  source 1..5235: mol_type = other DNA
atgagactgctgtggggcctgatctgggccagcagcttcttcaccctgagcctgcagaagcccagactgctgctgttcagccccagcgtggtgcacctgggcgtgcccctgagcgtgggcgtgcagctgcaggacgtgcccagaggccaggtggtgaagggcagcgtgttcctgagaaaccccagcagaaacaacgtgccctgcagccccaaggtggacttcaccctgagcagcgagagagacttcgccctgctgagcctgcaggtgcccctgaaggacgccaagagctgcggcctgcaccagctgctgagaggccccgaggtgcagctggtggcccacagcccctggctgaaggacagcctgagcagaaccaccaacatccagggcatcaacctgctgttcagcagcagaagaggccacctgttcctgcagaccgaccagcccatctacaaccccggccagagagtgagatacagagtgttcgccctggaccagaagatgagacccagcaccgacaccatcaccgtgatggtggagaacagccacggcctgagagtgagaaagaaggaggtgtacatgcccagcagcatcttccaggacgacttcgtgatccccgacatcagcgagcccggcacctggaagatcagcgccagattcagcgacggcctggagagcaacagcagcacccagttcgaggtgaagaagtacgtgctgcccaacttcgaggtgaagatcacccccggcaagccctacatcctgaccgtgcccggccacctggacgagatgcagctggacatccaggccagatacatctacggcaagcccgtgcagggcgtggcctacgtgagattcggcctgctggacgaggacggcaagaagaccttcttcagaggcctggagagccagaccaagctggtgaacggccagagccacatcagcctgagcaaggccgagttccaggacgccctggagaagctgaacatgggcatcaccgacctgcagggcctgagactgtacgtggccgccgccatcatcgagagccccggcggcgagatggaggaggccgagctgaccagctggtacttcgtgagcagccccttcagcctggacctgagcaagaccaagagacacctggtgcccggcgcccccttcctgctgcaggccctggtgagagagatgagcggcagccccgccagcggcatccccgtgaaggtgagcgccaccgtgagcagccccggcagcgtgcccgaggtgcaggacatccagcagaacaccgacggcagcggccaggtgagcatccccatcatcatcccccagaccatcagcgagctgcagctgagcgtgagcgccggcagcccccaccccgccatcgccagactgaccgtggccgccccccccagcggcggccccggcttcctgagcatcgagagacccgacagcagaccccccagagtgggcgacaccctgaacctgaacctgagagccgtgggcagcggcgccaccttcagccactactactacatgatcctgagcagaggccagatcgtgttcatgaacagagagcccaagagaaccctgaccagcgtgagcgtgttcgtggaccaccacctggcccccagcttctacttcgtggccttctactaccacggcgaccaccccgtggccaacagcctgagagtggacgtgcaggccggcgcctgcgagggcaagctggagctgagcgtggacggcgccaagcagtacagaaacggcgagagcgtgaagctgcacctggagaccgacagcctggccctggtggccctgggcgccctggacaccgccctgtacgccgccggcagcaagagccacaagcccctgaacatgggcaaggtgttcgaggccatgaacagctacgacctgggctgcggccccggcggcggcgacagcgccctgcaggtgttccaggccgccggcctggccttcagcgacggcgaccagtggaccctgagcagaaagagactgagctgccccaaggagaagaccaccagaaagaagagaaacgtgaacttccagaaggccatcaacgagaagctgggccagtacgccagccccaccgccaagagatgctgccaggacggcgtgaccagactgcccatgatgagaagctgcgagcagagagccgccagagtgcagcagcccgactgcagagagcccttcctgagctgctgccagttcgccgagagcctgagaaagaagagcagagacaagggccaggccggcctgcagagagccctggagatcctgcaggaggaggacctgatcgacgaggacgacatccccgtgagaagcttcttccccgagaactggctgtggagagtggagaccgtggacagattccagatcctgaccctgtggctgcccgacagcctgaccacctgggagatccacggcctgagcctgagcaagaccaagggcctgtgcgtggccacccccgtgcagctgagagtgttcagagagttccacctgcacctgagactgcccatgagcgtgagaagattcgagcagctggagctgagacccgtgctgtacaactacctggacaagaacctgaccgtgagcgtgcacgtgagccccgtggagggcctgtgcctggccggcggcggcggcctggcccagcaggtgctggtgcccgccggcagcgccagacccgtggccttcagcgtggtgcccaccgccgccgccgccgtgagcctgaaggtggtggccagaggcagcttcgagttccccgtgggcgacgccgtgagcaaggtgctgcagatcgagaaggagggcgccatccacagagaggagctggtgtacgagctgaaccccctggaccacagaggcagaaccctggagatccccggcaacagcgaccccaacatgatccccgacggcgacttcaacagctacgtgagagtgaccgccagcgaccccctggacaccctgggcagcgagggcgccctgagccccggcggcgtggccagcctgctgagactgcccagaggctgcggcgagcagaccatgatctacctggcccccaccctggccgccagcagatacctggacaagaccgagcagtggagcaccctgccccccgagaccaaggaccacgccgtggacctgatccagaagggctacatgagaatccagcagttcagaaaggccgacggcagctacgccgcctggctgagcagaggcagcagcacctggctgaccgccttcgtgctgaaggtgctgagcctggcccaggagcaggtgggcggcagccccgagaagctgcaggagaccagcaactggctgctgagccagcagcaggccgacggcagcttccaggacctgagccccgtgatccacagaagcatgcagggcggcctggtgggcaacgacgagaccgtggccctgaccgccttcgtgaccatcgccctgcaccacggcctggccgtgttccaggacgagggcgccgagcccctgaagcagagagtggaggccagcatcagcaaggccaacagcttcctgggcgagaaggccagcgccggcctgctgggcgcccacgccgccgccatcaccgcctacgccctgaccctgaccaaggcccccgccgacctgagaggcgtggcccacaacaacctgatggccatggcccaggagaccggcgacaacctgtactggggcagcgtgaccggcagccagagcaacgccgtgagccccacccccgcccccagaaaccccagcgaccccatgccccaggcccccgccctgtggatcgagaccaccgcctacgccctgctgcacctgctgctgcacgagggcaaggccgagatggccgaccaggccgccgcctggctgaccagacagggcagcttccagggcggcttcagaagcacccaggacaccgtgatcgccctggacgccctgagcgcctactggatcgccagccacaccaccgaggagagaggcctgaacgtgaccctgagcagcaccggcagaaacggcttcaagagccacgccctgcagctgaacaacagacagatcagaggcctggaggaggagctgcagttcagcctgggcagcaagatcaacgtgaaggtgggcggcaacagcaagggcaccctgaaggtgctgagaacctacaacgtgctggacatgaagaacaccacctgccaggacctgcagatcgaggtgaccgtgaagggccacgtggagtacaccatggaggccaacgaggactacgaggactacgagtacgacgagctgcccgccaaggacgaccccgacgcccccctgcagcccgtgacccccctgcagctgttcgagggcagaagaaacagaagaagaagagaggcccccaaggtggtggaggagcaggagagcagagtgcactacaccgtgtgcatctggagaaacggcaaggtgggcctgagcggcatggccatcgccgacgtgaccctgctgagcggcttccacgccctgagagccgacctggagaagctgaccagcctgagcgacagatacgtgagccacttcgagaccgagggcccccacgtgctgctgtacttcgacagcgtgcccaccagcagagagtgcgtgggcttcgaggccgtgcaggaggtgcccgtgggcctggtgcagcccgccagcgccaccctgtacgactactacaaccccgagagaagatgcagcgtgttctacggcgcccccagcaagagcagactgctggccaccctgtgcagcgccgaggtgtgccagtgcgccgagggcaagtgccccagacagagaagagccctggagagaggcctgcaggacgaggacggctacagaatgaagttcgcctgctactaccccagagtggagtacggcttccaggtgaaggtgctgagagaggacagcagagccgccttcagactgttcgagaccaagatcacccaggtgctgcacttcaccaaggacgtgaaggccgccgccaaccagatgagaaacttcctggtgagagccagctgcagactgagactggagcccggcaaggagtacctgatcatgggcctggacggcgccacctacgacctggagggccacccccagtacctgctggacagcaacagctggatcgaggagatgcccagcgagagactgtgcagaagcaccagacagagagccgcctgcgcccagctgaacgacttcctgcaggagtacggcacccagggctgccaggtgtag

SEQ ID NO: 77482 - DNA, 807 bp, synthetic construct
  misc_feature 1..807: note = Description of Artificial Sequence: Synthetic coding sequence
  source 1..807: mol_type = other DNA
atgtgccccgaggacagcctgcaggtgcccctgaaggacgccaagagctgcggcctgcaccagctgctgagaggccccgaggtgcagctggtggcccacagcccctggctgaaggacagcctgagcagaaccaccaacatccagggcatcaacctgctgttcagcagcagaagaggccacctgttcctgcagaccgaccagcccatctacaaccccggccagagagtgagatacagagtgttcgccctggaccagaagatgagacccagcaccgacaccatcaccgtgatggtggagaacagccacggcctgagagtgagaaagaaggaggtgtacatgcccagcagcatcttccaggacgacttcgtgatccccgacatcagcgagcccggcacctggaagatcagcgccagattcagcgacggcctggagagcaacagcagcacccagttcgaggtgaagaagtacgtgctgcccaacttcgaggtgaagatcacccccggcaagccctacatcctgaccgtgcccggccacctggacgagatgcagctggacatccaggccagatacatctacggcaagcccgtgcagggcgtggcctacgtgagattcggcctgctggacgaggacggcaagaagaccttcttcagaggcctggagagccagaccaagctggtgaacggccagagccacatcagcctgagcaaggccgagttccaggacgccctggagaagctgaacatgggcatcaccgacctgcagggcctgagactgtacgtggccgccgccatcatcgagagcccctag

SEQ ID NO: 77483 - DNA, 5097 bp, synthetic construct
  misc_feature 1..5097: note = Description of Artificial Sequence: Synthetic coding sequence
  source 1..5097: mol_type = other DNA
atgagactgctgtggggcctgatctgggccagcagcttcttcaccctgagcctgcagaagcccagactgctgctgttcagccccagcgtggtgcacctgggcgtgcccctgagcgtgggcgtgcagctgcaggacgtgcccagaggccaggtggtgaagggcagcgtgttcctgagaaaccccagcagaaacaacgtgccctgcagccccaaggtggacttcaccctgagcagcgagagagacttcgccctgctgagcctgcaggtgcccctgaaggacgccaagagctgcggcctgcaccagctgctgagaggccccgaggtgcagctggtggcccacagcccctggctgaaggacagcctgagcagaaccaccaacatccagggcatcaacctgctgttcagcagcagaagaggccacctgttcctgcagaccgaccagcccatctacaaccccggccagagagtgagatacagagtgttcgccctggaccagaagatgagacccagcaccgacaccatcaccgtgatggtggagaacagccacggcctgagagtgagaaagaaggaggtgtacatgcccagcagcatcttccaggacgacttcgtgatccccgacatcagcgagcccggcacctggaagatcagcgccagattcagcgacggcctggagagcaacagcagcacccagttcgaggtgaagaagtacgtgctgcccaacttcgaggtgaagatcacccccggcaagccctacatcctgaccgtgcccggccacctggacgagatgcagctggacatccaggccagatacatctacggcaagcccgtgcagggcgtggcctacgtgagattcggcctgctggacgaggacggcaagaagaccttcttcagaggcctggagagccagaccaagctggtgaacggccagagccacatcagcctgagcaaggccgagttccaggacgccctggagaagctgaacatgggcatcaccgacctgcagggcctgagactgtacgtggccgccgccatcatcgagagccccggcggcgagatggaggaggccgagctgaccagctggtacttcgtgagcagccccttcagcctggacctgagcaagaccaagagacacctggtgcccggcgcccccttcctgctgcaggccctggtgagagagatgagcggcagccccgccagcggcatccccgtgaaggtgagcgccaccgtgagcagccccggcagcgtgcccgaggtgcaggacatccagcagaacaccgacggcagcggccaggtgagcatccccatcatcatcccccagaccatcagcgagctgcagctgagcgtgagcgccggcagcccccaccccgccatcgccagactgaccgtggccgccccccccagcggcggccccggcttcctgagcatcgagagacccgacagcagaccccccagagtgggcgacaccctgaacctgaacctgagagccgtgggcagcggcgccaccttcagccactactactacatgatcctgagcagaggccagatcgtgttcatgaacagagagcccaagagaaccctgaccagcgtgagcgtgttcgtggaccaccacctggcccccagcttctacttcgtggccttctactaccacggcgaccaccccgtggccaacagcctgagagtggacgtgcaggccggcgcctgcgagggcaagctggagctgagcgtggacggcgccaagcagtacagaaacggcgagagcgtgaagctgcacctggagaccgacagcctggccctggtggccctgggcgccctggacaccgccctgtacgccgccggcagcaagagccacaagcccctgaacatgggcaaggtgttcgaggccatgaacagctacgacctgggctgcggccccggcggcggcgacagcgccctgcaggtgttccaggccgccggcctggccttcagcgacggcgaccagtggaccctgagcagaaagagactgagctgccccaaggagaagaccaccagaaagaagagaaacgtgaacttccagaaggccatcaacgagaagctgggccagtacgccagccccaccgccaagagatgctgccaggacggcgtgaccagactgcccatgatgagaagctgcgagcagagagccgccagagtgcagcagcccgactgcagagagcccttcctgagctgctgccagttcgccgagagcctgagaaagaagagcagagacaagggccaggccggcctgcagagagccctggagatcctgcaggaggaggacctgatcgacgaggacgacatccccgtgagaagcttcttccccgagaactggctgtggagagtggagaccgtggacagattccagatcctgaccctgtggctgcccgacagcctgaccacctgggagatccacggcctgagcctgagcaagaccaagggcctgtgcgtggccacccccgtgcagctgagagtgttcagagagttccacctgcacctgagactgcccatgagcgtgagaagattcgagcagctggagctgagacccgtgctgtacaactacctggacaagaacctgaccgtgagcgtgcacgtgagccccgtggagggcctgtgcctggccggcggcggcggcctggcccagcaggtgctggtgcccgccggcagcgccagacccgtggccttcagcgtggtgcccaccgccgccgccgccgtgagcctgaaggtggtggccagaggcagcttcgagttccccgtgggcgacgccgtgagcaaggtgctgcagatcgagaaggagggcgccatccacagagaggagctggtgtacgagctgaaccccctggaccacagaggcagaaccctggagatccccggcaacagcgaccccaacatgatccccgacggcgacttcaacagctacgtgagagtgaccgccagcgaccccctggacaccctgggcagcgagggcgccctgagccccggcggcgtggccagcctgctgagactgcccagaggctgcggcgagcagaccatgatctacctggcccccaccctggccgccagcagatacctggacaagaccgagcagtggagcaccctgccccccgagaccaaggaccacgccgtggacctgatccagaagggctacatgagaatccagcagttcagaaaggccgacggcagctacgccgcctggctgagcagaggcagcagcacctggctgaccgccttcgtgctgaaggtgctgagcctggcccaggagcaggtgggcggcagccccgagaagctgcaggagaccagcaactggctgctgagccagcagcaggccgacggcagcttccaggacctgagccccgtgatccacagaagcatgcagggcggcctggtgggcaacgacgagaccgtggccctgaccgccttcgtgaccatcgccctgcaccacggcctggccgtgttccaggacgagggcgccgagcccctgaagcagagagtggaggccagcatcagcaaggccaacagcttcctgggcgagaaggccagcgccggcctgctgggcgcccacgccgccgccatcaccgcctacgccctgaccctgaccaaggcccccgccgacctgagaggcgtggcccacaacaacctgatggccatggcccaggagaccggcgacaacctgtactggggcagcgtgaccggcagccagagcaacgccgtgagccccacccccgcccccagaaaccccagcgaccccatgccccaggcccccgccctgtggatcgagaccaccgcctacgccctgctgcacctgctgctgcacgagggcaaggccgagatggccgaccaggccgccgcctggctgaccagacagggcagcttccagggcggcttcagaagcacccaggacaccgtgatcgccctggacgccctgagcgcctactggatcgccagccacaccaccgaggagagaggcctgaacgtgaccctgagcagcaccggcagaaacggcttcaagagccacgccctgcagctgaacaacagacagatcagaggcctggaggaggagctgcagttcagcctgggcagcaagatcaacgtgaaggtgggcggcaacagcaagggcaccctgaaggtgctgagaacctacaacgtgctggacatgaagaacaccacctgccaggacctgcagatcgaggtgaccgtgaagggccacgtggagtacaccatggaggccaacgaggactacgaggactacgagtacgacgagctgcccgccaaggacgaccccgacgcccccctgcagcccgtgacccccctgcagctgttcgagggcagaagaaacagaagaagaagagaggcccccaagctgaccagcctgagcgacagatacgtgagccacttcgagaccgagggcccccacgtgctgctgtacttcgacagcgtgcccaccagcagagagtgcgtgggcttcgaggccgtgcaggaggtgcccgtgggcctggtgcagcccgccagcgccaccctgtacgactactacaaccccgagagaagatgcagcgtgttctacggcgcccccagcaagagcagactgctggccaccctgtgcagcgccgaggtgtgccagtgcgccgagggcaagtgccccagacagagaagagccctggagagaggcctgcaggacgaggacggctacagaatgaagttcgcctgctactaccccagagtggagtacggcttccaggtgaaggtgctgagagaggacagcagagccgccttcagactgttcgagaccaagatcacccaggtgctgcacttcaccaaggacgtgaaggccgccgccaaccagatgagaaacttcctggtgagagccagctgcagactgagactggagcccggcaaggagtacctgatcatgggcctggacggcgccacctacgacctggagggccacccccagtacctgctggacagcaacagctggatcgaggagatgcccagcgagagactgtgcagaagcaccagacagagagccgcctgcgcccagctgaacgacttcctgcaggagtacggcacccagggctgccaggtgtag

SEQ ID NO: 77484 - DNA, 813 bp, synthetic construct; identical to SEQ ID NO: 77471
  misc_feature 1..813: note = Description of Artificial Sequence: Synthetic coding sequence
  source 1..813: mol_type = other DNA

SEQ ID NO: 77485 - DNA, 5097 bp, synthetic construct; identical to SEQ ID NO: 77479
  misc_feature 1..5097: note = Description of Artificial Sequence: Synthetic coding sequence
  source 1..5097: mol_type = other DNA

SEQ ID NO: 77486 - DNA, 1536 bp, synthetic construct; identical to SEQ ID NO: 77473
  misc_feature 1..1536: note = Description of Artificial Sequence: Synthetic coding sequence
  source 1..1536: mol_type = other DNA

SEQ ID NO: 77487 - DNA, 1953 bp, synthetic construct
  misc_feature 1..1953: note = Description of Artificial Sequence: Synthetic coding sequence
  source 1..1953: mol_type = other DNA
atgggcagccagtgcagaggctggcacatgtgcgccctgggcagccagcagcaggccgacggcagcttccaggacctgagccccgtgatccacagaagcatgcagggcggcctggtgggcaacgacgagaccgtggccctgaccgccttcgtgaccatcgccctgcaccacggcctggccgtgttccaggacgagggcgccgagcccctgaagcagagagtggaggccagcatcagcaaggccagcagcttcctgggcgagaaggccagcgccggcctgctgggcgcccacgccgccgccatcaccgcctacgccctgaccctgaccaaggcccccgccgacctgagaggcgtggcccacaacaacctgatggccatggcccaggagaccggcgacaacctgtactggggcagcgtgaccggcagccagagcaacgccgtgagccccacccccgcccccagaaaccccagcgaccccatgccccaggcccccgccctgtggatcgagaccaccgcctacgccctgctgcacctgctgctgcacgagggcaaggccgagatggccgaccaggccgccgcctggctgaccagacagggcagcttccagggcggcttcagaagcacccaggacaccgtgatcgccctggacgccctgagcgcctactggatcgccagccacaccaccgaggagagaggcctgaacgtgaccctgagcagcaccggcagaaacggcttcaagagccacgccctgcagctgaacaacagacagatcagaggcctggaggaggagctgcagttcagcctgggcagcaagatcaacgtgaaggtgggcggcaacagcaagggcaccctgaaggtgctgagaacctacaacgtgctggacatgaagaacaccacctgccaggacctgcagatcgaggtgaccgtgaagggccacgtggagtacaccatggaggccaacgaggactacgaggactacgagtacgacgagctgcccgccaaggacgaccccgacgcccccctgcagcccgtgacccccctgcagctgttcgagggcagaagaaacagaagaagaagagaggcccccaaggtggtggaggagcaggagagcagagtgcactacaccgtgtgcatctggagaaacggcaaggtgggcctgagcggcatggccatcgccgacgtgaccctgctgagcggcttccacgccctgagagccgacctggagaagctgaccagcctgagcgacagatacgtgagccacttcgagaccgagggcccccacgtgctgctgtacttcgacagcgtgcccaccagcagagagtgcgtgggcttcgaggccgtgcaggaggtgcccgtgggcctggtgcagcccgccagcgccaccctgtacgactactacaaccccgagagaagatgcagcgtgttctacggcgcccccagcaagagcagactgctggccaccctgtgcagcgccgaggtgtgccagtgcgccgagggcaagtgccccagacagagaagagccctggagagaggcctgcaggacgaggacggctacagaatgaagttcgcctgctactaccccagagtggagtacggcttccaggtgaaggtgctgagagaggacagcagagccgccttcagactgttcgagaccaagatcacccaggtgctgcacttcaccaaggacgtgaaggccgccgccaaccagatgagaaacttcctggtgagagccagctgcagactgagactggagcccggcaaggagtacctgatcatgggcctggacggcgccacctacgacctggagggccacccccagtacctgctggacagcaacagctggatcgaggagatgcccagcgagagactgtgcagaagcaccagacagagagccgcctgcgcccagctgaacgacttcctgcaggagtacggcacccagggctgccaggtgtag

SEQ ID NO: 77488 - DNA, 291 bp, synthetic construct
  misc_feature 1..291: note = Description of Artificial Sequence: Synthetic coding sequence
  source 1..291: mol_type = other DNA
atgcccggccccacccccagcggcaccaacgtgggcagcagcggcagaagccccagcaaggccgtggccgccagagccgccggcagcaccgtgagacagagaaagaacgccagctgcggcaccagaagcgccggcagaaccaccagcgccggcaccggcggcatgtggagattctacaccgaggacagccccggcctgaaggtgggccccgtgcccgtgctggtgatgagcctgctgttcatcgccagcgtgttcatgctgcacatctggggcaagtacaccagaagctag

SEQ ID NO: 77489 - DNA, 3318 bp, synthetic construct
  misc_feature 1..3318: note = Description of Artificial Sequence: Synthetic coding sequence
  source 1..3318: mol_type = other DNA
ggcagagccggcgaggtgagagccctgagcagcggcgcccagagaagaggcagccacttcgtggtgctgtgcagactgcccagaggcagagccagagtggtgggcgccagcctgagccacgcccccctgcccctgagatactgctggaagggcagaggcggcgtgagcagactgttctgcagccagagagccagaatgcccggcagcctgggcagagaggccagcggcagagccggccccaccggctgcggcgccttcgccttcggcctgagatgcagatacgtgatcagcgcccccaagatcttcagagtgggcgccagcgagaacatcgtgatccaggtgtacggctacaccgaggccttcgacgccaccatcagcatcaagagctaccccgacaagaagttcagctacagcagcggccacgtgcacctgagcagcgagaacaagttccagaacagcgccatcctgaccatccagcccaagcagctgcccggcggccagaaccccgtgagctacgtgtacctggaggtggtgagcaagcacttcagcaagagcaagagaatgcccatcacctacgacaacggcttcctgttcatccacaccgacaagcccgtgtacacccccgaccagagcgtgaaggtgagagtgtacagcctgaacgacgacctgaagcccgccaagagagagaccgtgctgaccttcatcgaccccgagggcagcgaggtggacatggtggaggagatcgaccacatcggcatcatcagcttccccgacttcaagatccccagcaaccccagatacggcatgtggaccatcaaggccaagtacaaggaggacttcagcaccaccggcaccgcctacttcgaggtgaaggagtacgtgctgccccacttcagcgtgagcatcgagcccgagtacaacttcatcggctacaagaacttcaagaacttcgagatcaccatcaaggccagatacttctacaacaaggtggtgaccgaggccgacgtgtacatcaccttcggcatcagagaggacctgaaggacgaccagaaggagatgatgcagaccgccatgcagaacaccatgctgatcaacggcatcgcccaggtgaccttcgacagcgagaccgccgtgaaggagctgagctactacagcctggaggacctgaacaacaagtacctgtacatcgccgtgaccgtgatcgagagcaccggcggcttcagcgaggaggccgagatccccggcatcaagtacgtgctgagcccctacaagctgaacctggtggccacccccctgttcctgaagcccggcatcccctaccccatcaaggtgcaggtgaaggacagcctggaccagctggtgggcggcgtgcccgtgaccctgaacgcccagaccatcgacgtgaaccaggagaccagcgacctggaccccagcaagagcgtgaccagagtggacgacggcgtggccagcttcgtgctgaacctgcccagcggcgtgaccgtgctggagttcaacgtgaagaccgacgcccccgacctgcccgaggagaaccaggccagagagggctacagagccatcgcctacagcagcctgagccagagctacctgtacatcgactggaccgacaaccacaaggccctgctggtgggcgagcacctgaacatcatcgtgacccccaagagcccctacatcgacaagatcacccactacaactacctgatcctgagcaagggcaagatcatccacttcggcaccagagagaagttcagcgacgccagctaccagagcatcaacatccccgtgacccagaacatggtgcccagcagcagactgctggtgtactacatcgtgaccggcgagcagaccgccgagctggtgagcgacagcgtgtggctgaacatcgaggagaagtgcggcaaccagctgcaggtgcacctgagccccgacgccgacgcctacagccccggccagaccgtgagcctgaacatggccaccggcatggacagctgggtggccctggccgccgtggacagcgccgtgtacggcgtgcagagaggcgccaagaagcccctggagagagtgttccagttcctggagaagagcgacctgggctgcggcgccggcggcggcctgaacaacgccaacgtgttccacctggccggcctgaccttcctgaccaacgccaacgccgacgacagccaggagaacgacgagccctgcaaggagatcctgagacccagaagaaccctgcagaagaagatcgaggagatcgccgccaagtacaagcacagcgtggtgaagaagtgctgctacgacggcgcctgcgtgaacaacgacgagacctgcgagcagagagccgccagaatcagcctgggccccagatgcatcaaggccttcaccgagtgctgcgtggtggccagccagctgagagccaacatcagccacaaggacatgcagctgggcagactgcacatgaagaccctgctgcccgtgagcaagcccgagatcagaagctacttccccgagagctggctgtgggaggtgcacctggtgcccagaagaaagcagctgcagttcgccctgcccgacagcctgaccacctgggagatccagggcgtgggcatcagcaacaccggcatctgcgtggccgacaccgtgaaggccaaggtgttcaaggacgtgttcctggagatgaacatcccctacagcgtggtgagaggcgagcagatccagctgaagggcaccgtgtacaactacagaaccagcggcatgcagttctgcgtgaagatgagcgccgtggagggcatctgcaccagcgagagccccgtgatcgaccaccagggcaccaagagcagcaagtgcgtgagacagaaggtggagggcagcagcagccacctggtgaccttcaccgtgctgcccctggagatcggcctgcacaacatcaacttcagcctggagacctggttcggcaaggagatcctggtgaagaccctgagagtggtgcccgagggcgtgaagagagagagctacagcggcgtgaccctggaccccagaggcatctacggcaccatcagcagaagaaaggagttcccctacagaatccccctggacctggtgcccaagaccgagatcaagagaatcctgagcgtgaagggcctgctggtgggcgagatcctgagcgccgtgctgagccaggagggcatcaacatcctgacccacctgcccaagggcagcgccgaggccgagctgatgagcgtggtgcccgtgttctacgtgttccccggcaacagaaagagcctggagcacttcagcttctag

SEQ ID NO: 77490 - DNA, 2805 bp, synthetic construct
  misc_feature 1..2805: note = Description of Artificial Sequence: Synthetic coding sequence
  source 1..2805: mol_type = other DNA
atggccagaagaagcgtgctgtacttcatcctgctgaacgccctgatcaacaagggccaggcctgcttctgcgaccactacgcctggacccagtggaccagctgcagcaagacctgcaacagcggcacccagagcagacacagacagatcgtggtggacaagtactaccaggagaacttctgcgagcagatctgcagcaagcaggagaccagagagtgcaactggcagagatgccccatcaactgcctgctgggcgacttcggcccctggagcgactgcgacccctgcatcgagaagcagagcaaggtgagaagcgtgctgagacccagccagttcggcggccagccctgcaccgcccccctggtggccttccagccctgcatccccagcaagctgtgcaagatcgaggaggccgactgcaagaacaagttcagatgcgacagcggcagatgcatcgccagaaagctggagtgcaacggcgagaacgactgcggcgacaacagcgacgagagagactgcggcagaaccaaggccgtgtgcaccagaaagtacaaccccatccccagcgtgcagctgatgggcaacggcttccacttcctggccggcgagcccagaggcgaggtgctggacaacagcttcaccggcggcatctgcaagaccgtgaagagcagcagaaccagcaacccctacagagtgcccgccaacctggagaacgtgggcttcgaggtgcagaccgccgaggacgacctgaagaccgacttctacaaggacctgaccagcctgggccacaacgagaaccagcagggcagcttcagcagccagggcggcagcagcttcagcgtgcccatcttctacagcagcaagagaagcgagaacatcaaccacaacagcgccttcaagcaggccatccaggccagccacaagaaggacagcagcttcatcagaatccacaaggtgatgaaggtgctgaacttcaccaccaaggccaaggacctgcacctgagcgacgtgttcctgaaggccctgaaccacctgcccctggagtacaacagcgccctgtacagcagaatcttcgacgacttcggcacccactacttcaccagcggcagcctgggcggcgtgtacgacctgctgtaccagttcagcagcgaggagctgaagaacagcggcctgaccgaggaggaggccaagcactgcgtgagaatcgagaccaagaagagagtgctgttcgccaagaagaccaaggtggagcacagatgcaccaccaacaagctgagcgagaagcacgagggcagcttcatccagggcgccgagaagagcatcagcctgatcagaggcggcagaagcgagtacggcgccgccctggcctgggagaagggcagcagcggcctggaggagaagaccttcagcgagtggctggagagcgtgaaggagaaccccgccgtgatcgacttcgagctggcccccatcgtggacctggtgagaaacatcccctgcgccgtgaccaagagaaacaacctgagaaaggccctgcaggagtacgccgccaagttcgacccctgccagtgcgccccctgccccaacaacggcagacccaccctgagcggcaccgagtgcctgtgcgtgtgccagagcggcacctacggcgagaactgcgagaagcagagccccgactacaagagcaacgccgtggacggccagtggggctgctggagcagctggagcacctgcgacgccacctacaagagaagcagaaccagagagtgcaacaaccccgccccccagagaggcggcaagagatgcgagggcgagaagagacaggaggaggactgcaccttcagcatcatggagaacaacggccagccctgcatcaacgacgacgaggagatgaaggaggtggacctgcccgagatcgaggccgacagcggctgcccccagcccgtgccccccgagaacggcttcatcagaaacgagaagcagctgtacctggtgggcgaggacgtggagatcagctgcctgaccggcttcgagaccgtgggctaccagtacttcagatgcctgcccgacggcacctggagacagggcgacgtggagtgccagagaaccgagtgcatcaagcccgtggtgcaggaggtgctgaccatcacccccttccagagactgtacagaatcggcgagagcatcgagctgacctgccccaagggcttcgtggtggccggccccagcagatacacctgccagggcaacagctggaccccccccatcagcaacagcctgacctgcgagaaggacaccctgaccaagctgaagggccactgccagctgggccagaagcagagcggcagcgagtgcatctgcatgagccccgaggaggactgcagccaccacagcgaggacctgtgcgtgttcgacaccgacagcaacgactacttcaccagccccgcctgcaagttcctggccgagaagtgcctgaacaaccagcagctgcacttcctgcacatcggcagctgccaggacggcagacagctggagtggggcctggagagaaccagactgagcagcaacagcaccaagaaggagagctgcggctacgacacctgctacgactgggagaagtgcagcgccagcaccagcaagtgcgtgtgcctgctgcccccccagtgcttcaagggcggcaaccagctgtactgcgtgaagatgggcagcagcaccagcgagaagaccctgaacatctgcgaggtgggcaccatcagatgcgccaacagaaagatggagatcctgcaccccggcaagtgcctggcctag

SEQ ID NO: 77491 - DNA, 2805 bp, synthetic construct; identical to SEQ ID NO: 77490
  misc_feature 1..2805: note = Description of Artificial Sequence: Synthetic coding sequence
  source 1..2805: mol_type = other DNA

SEQ ID NO: 77492 - DNA, 2532 bp, synthetic construct
  misc_feature 1..2532: note = Description of Artificial Sequence: Synthetic coding sequence
  source 1..2532: mol_type = other DNA
atgaaggtgatcagcctgttcatcctggtgggcttcatcggcgagttccagagcttcagcagcgccagcagccccgtgaactgccagtgggacttctacgccccctggagcgagtgcaacggctgcaccaagacccagaccagaagaagaagcgtggccgtgtacggccagtacggcggccagccctgcgtgggcaacgccttcgagacccagagctgcgagcccaccagaggctgccccaccgaggagggctgcggcgagagattcagatgcttcagcggccagtgcatcagcaagagcctggtgtgcaacggcgacagcgactgcgacgaggacagcgccgacgaggacagatgcgaggacagcgagagaagacccagctgcgacatcgacaagcccccccccaacatcgagctgaccggcaacggctacaacgagctgaccggccagttcagaaacagagtgatcaacaccaagagcttcggcggccagtgcagaaaggtgttcagcggcgacggcaaggacttctacagactgagcggcaacgtgctgagctacaccttccaggtgaagatcaacaacgacttcaactacgagttctacaacagcacctggagctacgtgaagcacaccagcaccgagcacaccagcagcagcagaaagagaagcttcttcagaagcagcagcagcagcagcagaagctacaccagccacaccaacgagatccacaagggcaagagctaccagctgctggtggtggagaacaccgtggaggtggcccagttcatcaacaacaaccccgagttcctgcagctggccgagcccttctggaaggagctgagccacctgcccagcctgtacgactacagcgcctacagaagactgatcgaccagtacggcacccactacctgcagagcggcagcctgggcggcgagtacagagtgctgttctacgtggacagcgagaagctgaagcagaacgacttcaacagcgtggaggagaagaagtgcaagagcagcggctggcacttcgtggtgaagttcagcagccacggctgcaaggagctggagaacgccctgaaggccgccagcggcacccagaacaacgtgctgagaggcgagcccttcatcagaggcggcggcgccggcttcatcagcggcctgagctacctggagctggacaaccccgccggcaacaagagaagatacagcgcctgggccgagagcgtgaccaacctgccccaggtgatcaagcagaagctgacccccctgtacgagctggtgaaggaggtgccctgcgccagcgtgaagaagctgtacctgaagtgggccctggaggagtacctggacgagttcgacccctgccactgcagaccctgccagaacggcggcctggccaccgtggagggcacccactgcctgtgccactgcaagccctacaccttcggcgccgcctgcgagcagggcgtgctggtgggcaaccaggccggcggcgtggacggcggctggagctgctggagcagctggagcccctgcgtgcagggcaagaagaccagaagcagagagtgcaacaaccccccccccagcggcggcggcagaagctgcgtgggcgagaccaccgagagcacccagtgcgaggacgaggagctggagcacctgagactgctggagccccactgcttccccctgagcctggtgcccaccgagttctgccccagcccccccgccctgaaggacggcttcgtgcaggacgagggcaccatgttccccgtgggcaagaacgtggtgtacacctgcaacgagggctacagcctgatcggcaaccccgtggccagatgcggcgaggacctgagatggctggtgggcgagatgcactgccagaagatcgcctgcgtgctgcccgtgctgatggacggcatccagagccacccccagaagcccttctacaccgtgggcgagaaggtgaccgtgagctgcagcggcggcatgagcctggagggccccagcgccttcctgtgcggcagcagcctgaagtggagccccgagatgaagaacgccagatgcgtgcagaaggagaaccccctgacccaggccgtgcccaagtgccagagatgggagaagctgcagaacagcagatgcgtgtgcaagatgccctacgagtgcggccccagcctggacgtgtgcgcccaggacgagagaagcaagagaatcctgcccctgaccgtgtgcaagatgcacgtgctgcactgccagggcagaaactacaccctgaccggcagagacagctgcaccctgcccgccagcgccgagaaggcctgcggcgcctgccccctgtggggcaagtgcgacgccgagagcagcaagtgcgtgtgcagagaggccagcgagtgcgaggaggagggcttcagcatctgcgtggaggtgaacggcaaggagcagaccatgagcgagtgcgaggccggcgccctgagatgcagaggccagagcatcagcgtgaccagcatcagaccctgcgccgccgagacccagtag

SEQ ID NO: 77493 - DNA, 1461 bp, synthetic construct
  misc_feature 1..1461: note = Description of Artificial Sequence: Synthetic coding sequence
  source 1..1461: mol_type = other DNA
atgaaggtgatcagcctgttcatcctggtgggcttcatcggcgagttccagagcttcagcagcgccagcagccccgtgaactgccagtgggacttctacgccccctggagcgagtgcaacggctgcaccaagacccagaccagaagaagaagcgtggccgtgtacggccagtacggcggccagccctgcgtgggcaacgccttcgagacccagagctgcgagcccaccagaggctgccccaccgaggagggctgcggcgagagattcagatgcttcagcggccagtgcatcagcaagagcctggtgtgcaacggcgacagcgactgcgacgaggacagcgccgacgaggacagatgcgaggacagcgagagaagacccagctgcgacatcgacaagcccccccccaacatcgagctgaccggcaacggctacaacgagctgaccggccagttcagaaacagagtgctgttctacgtggacagcgagaagctgaagcagaacgacttcaacagcgtggaggagaagaagtgcaagagcagcggctggcacttcgtggtgaagttcagcagccacggctgcaaggagctggagaacgccctgaaggccgccagcggcacccagaacaacgtgctgagaggcgagcccttcatcagaggcggcggcgccggcttcatcagcggcctgagctacctggagctggacaaccccgccggcaacaagagaagatacagcgcctgggccgagagcgtgaccaacctgccccaggtgatcaagcagaagctgacccccctgtacgagctggtgaaggaggtgccctgcgccagcgtgaagaagctgtacctgaagtgggccctggaggagtacctggacgagttcgacccctgccactgcagaccctgccagaacggcggcctggccaccgtggagggcacccactgcctgtgccactgcaagccctacaccttcggcgccgcctgcgagcagggcgtgctggtgggcaaccaggccggcggcgtggacggcggctggagctgctggagcagctggagcccctgcgtgcagggcaagaagaccagaagcagagagtgcaacaaccccccccccagcggcggcggcagaagctgcgtgggcgagaccaccgagagcacccagtgcgaggacgaggagctggagcacctgagactgctggagccccactgcttccccctgagcctggtgcccaccgagttctgccccagcccccccgccctgaaggacggcttcgtgcaggacgagggcaccatgttccccgtgggcaagaacgtggtgtacacctgcaacgagggctacagcctgatcggcaaccccgtggccagatgcggcgaggacctgagatggctggtgggcgagatgcactgccagaacggcaagatcagcaactggatgaaggtgaacgagaccctgctggtggagcaccactag

SEQ ID NO: 77494 - DNA, 1032 bp, synthetic construct
  misc_feature 1..1032: note = Description of Artificial Sequence: Synthetic coding sequence
  source 1..1032: mol_type = other DNA
atgaaggtgatcagcctgttcatcctggtgggcttcatcggcgagttccagagcttcagcagcgccagcagccccgtgaactgccagtgggacttctacgccccctggagcgagtgcaacggctgcaccaagacccagaccagaagaagaagcgtggccgtgtacggccagtacggcggccagccctgcgtgggcaacgccttcgagacccagagctgcgagcccaccagaggctgccccaccgaggagggctgcggcgagagattcagatgcttcagcggccagtgcatcagcaagagcctggtgtgcaacggcgacagcgactgcgacgaggacagcgccgacgaggacagatgcgaggacagcgagagaagacccagctgcgacatcgacaagcccccccccaacatcgagctgaccggcaacggctacaacgagctgaccggccagttcagaaacagagtgatcaacaccaagagcttcggcggccagtgcagaaaggtgttcagcggcgacggcaaggacttctacagactgagcggcaacgtgctgagctacaccttccaggtgaagatcaacaacgacttcaactacgagttctacaacagcacctggagctacgtgaagcacaccagcaccgagcacaccagcagcagcagaaagagaagcttcttcagaagcagcagcagcagcagcagaagctacaccagccacaccaacgagatccacaagggcaagagctaccagctgctggtggtggagaacaccgtggaggtggcccagttcatcaacaacaaccccgagttcctgcagctggccgagcccttctggaaggagctgagccacctgcccagcctgtacgactacagcgcctacagaagactgatcgaccagtacggcacccactacctgcagagcggcagcctgggcggcgagtacagagtgctgttctacgtggacagcgagaagctgaagcagaacgacttcaacagcgtggagaagaagaagaagaagaagaagaagaagaagtag

SEQ ID NO: 77495 - DNA, 1755 bp, synthetic construct
  misc_feature 1..1755: note = Description of Artificial Sequence: Synthetic coding sequence
  source 1..1755: mol_type = other DNA
atgttcgccgtggtgttcttcatcctgagcctgatgacctgccagcccggcgtgaccgcccaggagaaggtgaaccagagagtgagaagagccgccacccccgccgccgtgacctgccagctgagcaactggagcgagtggaccgactgcttcccctgccaggacaagaagtacagacacagaagcctgctgcagcccaacaagttcggcggcaccatctgcagcggcgacatctgggaccaggccagctgcagcagcagcaccacctgcgtgagacaggcccagtgcggccaggacttccagtgcaaggagaccggcagatgcctgaagagacacctggtgtgcaacggcgaccaggactgcctggacggcagcgacgaggacgactgcgaggacgtgagagccatcgacgaggactgcagccagtacgagcccatccccggcagccagaaggccgccctgggctacaacatcctgacccaggaggacgcccagagcgtgtacgacgccagctactacggcggccagtgcgagaccgtgtacaacggcgagtggagagagctgagatacgacagcacctgcgagagactgtactacggcgacgacgagaagtacttcagaaagccctacaacttcctgaagtaccacttcgaggccctggccgacaccggcatcagcagcgagttctacgacaacgccaacgacctgctgagcaaggtgaagaaggacaagagcgacagcttcggcgtgaccatcggcatcggccccgccggcagccccctgctggtgggcgtgggcgtgagccacagccaggacaccagcttcctgaacgagctgaacaagtacaacgagaagaagttcatcttcaccagaatcttcaccaaggtgcagaccgcccacttcaagatgagaaaggacgacatcatgctggacgagggcatgctgcagagcctgatggagctgcccgaccagtacaactacggcatgtacgccaagttcatcaacgactacggcacccactacatcaccagcggcagcatgggcggcatctacgagtacatcctggtgatcgacaaggccaagatggagagcctgggcatcaccagcagagacatcaccacctgcttcggcggcagcctgggcatccagtacgaggacaagatcaacgtgggcggcggcctgagcggcgaccactgcaagaagttcggcggcggcaagaccgagagagccagaaaggccatggccgtggaggacatcatcagcagagtgagaggcggcagcagcggctggagcggcggcctggcccagaacagaagcaccatcacctacagaagctggggcagaagcctgaagtacaaccccgtggtgatcgacttcgagatgcagcccatccacgaggtgctgagacacaccagcctgggccccctggaggccaagagacagaacctgagaagagccctggaccagtacctgatggagttcaacgcctgcagatgcggcccctgcttcaacaacggcgtgcccatcctggagggcaccagctgcagatgccagtgcagactgggcagcctgggcgccgcctgcgagcagacccagaccgagggcgccaaggccgacggcagctggagctgctggagcagctggagcgtgtgcagagccggcatccaggagagaagaagagagtgcgacaaccccgccccccagaacggcggcgccagctgccccggcagaaaggtgcagacccaggcctgctag

SEQ ID NO: 77496 - DNA, 1776 bp, synthetic construct
  misc_feature 1..1776: note = Description of Artificial Sequence: Synthetic coding sequence
  source 1..1776: mol_type = other DNA
atgaagaacagcagaacctgggcctggagagcccccgtggagctgttcctgctgtgcgccgccctgggctgcctgagcctgcccggcagcagaggcgagagaccccacagcttcggcagcaacgccgtgaacaagagcttcgccaagagcagacagatgagaagcgtggacgtgaccctgatgcccatcgactgcgagctgagcagctggagcagctggaccacctgcgacccctgccagaagaagagatacagatacgcctacctgctgcagcccagccagttccacggcgagccctgcaacttcagcgacaaggaggtggaggactgcgtgaccaacagaccctgcggcagccaggtgagatgcgagggcttcgtgtgcgcccagaccggcagatgcgtgaacagaagactgctgtgcaacggcgacaacgactgcggcgaccagagcgacgaggccaactgcagaagaatctacaagaagtgccagcacgagatggaccagtactggggcatcggcagcctggccagcggcatcaacctgttcaccaacagcttcgagggccccgtgctggaccacagatactacgccggcggctgcagcccccactacatcctgaacaccagattcagaaagccctacaacgtggagagctacaccccccagacccagggcaagtacgagttcatcctgaaggagtacgagagctacagcgacttcgagagaaacgtgaccgagaagatggccagcaagagcggcttcagcttcggcttcaagatccccggcatcttcgagctgggcatcagcagccagagcgacagaggcaagcactacatcagaagaaccaagagattcagccacaccaagagcgtgttcctgcacgccagaagcgacctggaggtggcccactacaagctgaagcccagaagcctgatgctgcactacgagttcctgcagagagtgaagagactgcccctggagtacagctacggcgagtacagagacctgttcagagacttcggcacccactacatcaccgaggccgtgctgggcggcatctacgagtacaccctggtgatgaacaaggaggccatggagagaggcgactacaccctgaacaacgtgcacgcctgcgccaagaacgacttcaagatcggcggcgccatcgaggaggtgtacgtgagcctgggcgtgagcgtgggcaagtgcagaggcatcctgaacgagatcaaggacagaaacaagagagacaccatggtggaggacctggtggtgctggtgagaggcggcgccagcgagcacatcaccaccctggcctaccaggagctgcccaccgccgacctgatgcaggagtggggcgacgccgtgcagtacaaccccgccatcatcaaggtgaaggtggagcccctgtacgagctggtgaccgccaccgacttcgcctacagcagcaccgtgagacagaacatgaagcaggccctggaggagttccagaaggaggtgagcagctgccactgcgccccctgccagggcaacggcgtgcccgtgctgaagggcagcagatgcgactgcatctgccccgtgggcagccagggcctggcctgcgaggtgagctacagaaagaacacccccatcgacggcaagtggaactgctggagcaactggagcagctgcagcggcagaagaaagaccagacagagacagtgcaacaacccccccccccagaacggcggcagcccctgcagcggccccgccagcgagaccctggactgcagctag

SEQ ID NO: 77497 - DNA, 1590 bp, synthetic construct
  misc_feature 1..1590: note = Description of Artificial Sequence: Synthetic coding sequence
  source 1..1590: mol_type = other DNA
atggacacctgcatgaccctggccttcaccctgagcggcagattcttcatgctgctgagccagtacagatacgcctacctgctgcagcccagccagttccacggcgagccctgcaacttcagcgacaaggaggtggaggactgcgtgaccaacagaccctgcggcagccaggtgagatgcgagggcttcgtgtgcgcccagaccggcagatgcgtgaacagaagactgctgtgcaacggcgacaacgactgcggcgaccagagcgacgaggccaactgcagaagaatctacaagaagtgccagcacgagatggaccagtactggggcatcggcagcctggccagcggcatcaacctgttcaccaacagcttcgagggccccgtgctggaccacagatactacgccggcggctgcagcccccactacatcctgaacaccagattcagaaagccctacaacgtggagagctacaccccccagacccagggcaagtacgagttcatcctgaaggagtacgagagctacagcgacttcgagagaaacgtgaccgagaagatggccagcaagagcggcttcagcttcggcttcaagatccccggcatcttcgagctgggcatcagcagccagagcgacagaggcaagcactacatcagaagaaccaagagattcagccacaccaagagcgtgttcctgcacgccagaagcgacctggaggtggcccactacaagctgaagcccagaagcctgatgctgcactacgagttcctgcagagagtgaagagactgcccctggagtacagctacggcgagtacagagacctgttcagagacttcggcacccactacatcaccgaggccgtgctgggcggcatctacgagtacaccctggtgatgaacaaggaggccatggagagaggcgactacaccctgaacaacgtgcacgcctgcgccaagaacgacttcaagatcggcggcgccatcgaggaggtgtacgtgagcctgggcgtgagcgtgggcaagtgcagaggcatcctgaacgagatcaaggacagaaacaagagagacaccatggtggaggacctggtggtgctggtgagaggcggcgccagcgagcacatcaccaccctggcctaccaggagctgcccaccgccgacctgatgcaggagtggggcgacgccgtgcagtacaaccccgccatcatcaaggtgaaggtggagcccctgtacgagctggtgaccgccaccgacttcgcctacagcagcaccgtgagacagaacatgaagcaggccctggaggagttccagaaggaggtgagcagctgccactgcgccccctgccagggcaacggcgtgcccgtgctgaagggcagcagatgcgactgcatctgccccgtgggcagccagggcctggcctgcgaggtgagctacagaaagaacacccccatcgacggcaagtggaactgctggagcaactggagcagctgcagcggcagaagaaagaccagacagagacagtgcaacaacccccccccccagaacggcggcagcccctgcagcggccccgccagcgagaccctggactgcagctag

SEQ ID NO: 77498 - DNA, 1620 bp, synthetic construct
  misc_feature 1..1620: note = Description of Artificial Sequence: Synthetic coding sequence
  source 1..1620: mol_type = other DNA
atgagaagcgtggacgtgaccctgatgcccatcgactgcgagctgagcagctggagcagctggaccacctgcgacccctgccagaagaagagatacagatacgcctacctgctgcagcccagccagttccacggcgagccctgcaacttcagcgacaaggaggtggaggactgcgtgaccaacagaccctgcggcagccaggtgagatgcgagggcttcgtgtgcgcccagaccggcagatgcgtgaacagaagactgctgtgcaacggcgacaacgactgcggcgaccagagcgacgaggccaactgcagaagaatctacaagaagtgccagcacgagatggaccagtactggggcatcggcagcctggccagcggcatcaacctgttcaccaacagcttcgagggccccgtgctggaccacagatactacgccggcggctgcagcccccactacatcctgaacaccagattcagaaagccctacaacgtggagagctacaccccccagacccagggcaagtacgagttcatcctgaaggagtacgagagctacagcgacttcgagagaaacgtgaccgagaagatggccagcaagagcggcttcagcttcggcttcaagatccccggcatcttcgagctgggcatcagcagccagagcgacagaggcaagcactacatcagaagaaccaagagattcagccacaccaagagcgtgttcctgcacgccagaagcgacctggaggtggcccactacaagctgaagcccagaagcctgatgctgcactacgagttcctgcagagagtgaagagactgcccctggagtacagctacggcgagtacagagacctgttcagagacttcggcacccactacatcaccgaggccgtgctgggcggcatctacgagtacaccctggtgatgaacaaggaggccatggagagaggcgactacaccctgaacaacgtgcacgcctgcgccaagaacgacttcaagatcggcggcgccatcgaggaggtgtacgtgagcctgggcgtgagcgtgggcaagtgcagaggcatcctgaacgagatcaaggacagaaacaagagagacaccatggtggaggacctggtggtgctggtgagaggcggcgccagcgagcacatcaccaccctggcctaccaggagctgcccaccgccgacctgatgcaggagtggggcgacgccgtgcagtacaaccccgccatcatcaaggtgaaggtggagcccctgtacgagctggtgaccgccaccgacttcgcctacagcagcaccgtgagacagaacatgaagcaggccctggaggagttccagaaggaggtgagcagctgccactgcgccccctgccagggcaacggcgtgcccgtgctgaagggcagcagatgcgactgcatctgccccgtgggcagccagggcctggcctgcgaggtgagctacagaaagaacacccccatcgacggcaagtggaactgctggagcaactggagcagctgcagcggcagaagaaagaccagacagagacagtgcaacaacccccccccccagaacggcggcagcccctgcagcggccccgccagcgagaccctggactgcagctag

SEQ ID NO: 77499 - DNA, 675 bp, synthetic construct
  misc_feature 1..675: note = Description of Artificial Sequence: Synthetic coding sequence
  source 1..675: mol_type = other DNA
atggccacccaccacaccctgtggatgggcctggccctgctgggcgtgctgggcgacctgcaggccgcccccgaggcccaggtgagcgtgcagcccaacttccagcaggacaagttcctgggcagatggttcagcgccggcctggccagcaacagcagctggctgagagagaagaaggccgccctgagcatgtgcaagagcgtggtggcccccgccaccgacggcggcctgaacctgaccagcaccttcctgagaaagaaccagtgcgagaccagaaccatgctgctgcagcccgccggcagcctgggcagctacagctacagaagccccagagagtggggcctgcacagaccccccggccccagcctgggcgccaccctggccggcaccaccctgggccagccccccgccgccgagatccacggcgtgggcgactggggcagcacctacagcgtgagcgtggtggagaccgactacgaccagtacgccctgctgtacagccagggcagcaagggccccggcgaggacttcagaatggccaccctgtacagcagaacccagacccccagagccgagctgaaggagaagttcaccgccttctgcaaggcccagggcttcaccgaggacaccatcgtgttcctgccccagaccgacaagtgcatgaccgagcagtag

SEQ ID NO: 77500 - DNA, 495 bp, synthetic construct
  misc_feature 1..495: note = Description of Artificial Sequence: Synthetic coding sequence
  source 1..495: mol_type = other DNA
atgctgccccccggcaccgccaccctgctgaccctgctgctggccgccggcagcctgggccagaagccccagagacccagaagacccgccagccccatcagcaccatccagcccaaggccaacttcgacgcccagcagttcgccggcacctggctgctggtggccgtgggcagcgcctgcagattcctgcaggagcagggccacagagccgaggccaccaccctgcacgtggccccccagggcaccgccatggccgtgagcaccttcagaaagctggacggcatctgctggcaggtgagacagctgtacggcgacaccggcgtgctgggcagattcctgctgcaggccagagacgccagaggcgccgtgcacgtggtggtggccgagaccgactaccagagcttcgccgtgctgtacctggagagagccggccagctgagcgtgaagctgtacggcgcccagggcgtggtgaccgacagacccggcgtgggctag

SEQ ID NO: 77501 - DNA, 1680 bp, synthetic construct
  misc_feature 1..1680: note = Description of Artificial Sequence: Synthetic coding sequence
  source 1..1680: mol_type = other DNA
atgagcgcctgcagaagcttcgccgtggccatctgcatcctggagatcagcatcctgaccgcccagtacaccaccagctacgaccccgagctgaccgagagcagcggcagcgccagccacatcgactgcagaatgagcccctggagcgagtggagccagtgcgacccctgcctgagacagatgttcagaagcagaagcatcgaggtgttcggccagttcaacggcaagagatgcaccgacgccgtgggcgacagaagacagtgcgtgcccaccgagccctgcgaggacgccgaggacgactgcggcaacgacttccagtgcagcaccggcagatgcatcaagatgagactgagatgcaacggcgacaacgactgcggcgacttcagcgacgaggacgactgcgagagcgagcccagacccccctgcagagacagagtggtggaggagagcgagctggccagaaccgccggctacggcatcaacatcctgggcatggaccccctgagcacccccttcgacaacgagttctacaacggcctgtgcaacagagacagagacggcaacaccctgacctactacagaagaccctggaacgtggccagcctgatctacgagaccaagggcgagaagaacttcagaaccgagcactacgaggagcagatcgaggccttcaagagcatcatccaggagaagaccagcaacttcaacgccgccatcagcctgaagttcacccccaccgagaccaacaaggccgagcagtgctgcgaggagaccgccagcagcatcagcctgcacggcaagggcagcttcagattcagctacagcaagaacgagacctaccagctgttcctgagctacagcagcaagaaggagaagatgttcctgcacgtgaagggcgagatccacctgggcagattcgtgatgagaaacagagacgtggtgctgaccaccaccttcgtggacgacatcaaggccctgcccaccacctacgagaagggcgagtacttcgccttcctggagacctacggcacccactacagcagcagcggcagcctgggcggcctgtacgagctgatctacgtgctggacaaggccagcatgaagagaaagggcgtggagctgaaggacatcaagagatgcctgggctaccacctggacgtgagcctggccttcagcgagatcagcgtgggcgccgagttcaacaaggacgactgcgtgaagagaggcgagggcagagccgtgaacatcaccagcgagaacctgatcgacgacgtggtgagcctgatcagaggcggcaccagaaagtacgccttcgagctgaaggagaagctgctgagaggcaccgtgatcgacgtgaccgacttcgtgaactgggccagcagcatcaacgacgcccccgtgctgatcagccagaagctgagccccatctacaacctggtgcccgtgaagatgaagaacgcccacctgaagaagcagaacctggagagagccatcgaggactacatcaacgagttcagcgtgagaaagtgccacacctgccagaacggcggcaccgtgatcctgatggacggcaagtgcctgtgcgcctgccccttcaagttcgagggcatcgcctgcgagatcagcaagcagaagatcagcgagggcctgcccgccctggagttccccaacgagaagtag

SEQ ID NO: 77502 - DNA, 1770 bp, synthetic construct
  misc_feature 1..1770: note = Description of Artificial Sequence: Synthetic coding sequence
  source 1..1770: mol_type = other DNA
atgggcagcaacctgagcccccagctgtgcctgatgcccttcatcctgggcctgctgagcggcggcgtgaccaccaccccctggagcctggcccagccccagggcagctgcagcctggagggcgtggagatcaagggcggcagcttcagactgctgcaggagggccaggccctggagtacgtgtgccccagcggcttctacccctaccccgtgcagaccagaacctgcagaagcaccggcagctggagcaccctgaagacccaggaccagaagaccgtgagaaaggccgagtgcagagccatccactgccccagaccccacgacttcgagaacggcgagtactggcccagaagcccctactacaacgtgagcgacgagatcagcttccactgctacgacggctacaccctgagaggcagcgccaacagaacctgccaggtgaacggcagatggagcggccagaccgccatctgcgacaacggcgccggctactgcagcaaccccggcatccccatcggcaccagaaaggtgggcagccagtacagactggaggacagcgtgacctaccactgcagcagaggcctgaccctgagaggcagccagagaagaacctgccaggagggcggcagctggagcggcaccgagcccagctgccaggacagcttcatgtacgacaccccccaggaggtggccgaggccttcctgagcagcctgaccgagaccatcgagggcgtggacgccgaggacggccacggccccggcgagcagcagaagagaaagatcgtgctggaccccagcggcagcatgaacatctacctggtgctggacggcagcgacagcatcggcgccagcaacttcaccggcgccaagaagtgcctggtgaacctgatcgagaaggtggccagctacggcgtgaagcccagatacggcctggtgacctacgccacctaccccaagatctgggtgaaggtgagcgaggccgacagcagcaacgccgactgggtgaccaagcagctgaacgagatcaactacgaggaccacaagctgaagagcggcaccaacaccaagaaggccctgcaggccgtgtacagcatgatgagctggcccgacgacgtgccccccgagggctggaacagaaccagacacgtgatcatcctgatgaccgacggcctgcacaacatgggcggcgaccccatcaccgtgatcgacgagatcagagacctgctgtacatcggcaaggacagaaagaaccccagagaggactacctggacgtgtacgtgttcggcgtgggccccctggtgaaccaggtgaacatcaacgccctggccagcaagaaggacaacgagcagcacgtgttcaaggtgaaggacatggagaacctggaggacgtgttctaccagatgatcgacgagagccagagcctgagcctgtgcggcatggtgtgggagcacagaaagggcaccgactaccacaagcagccctggcaggccaagatcagcgtgatcagacccagcaagggccacgagagctgcatgggcgccgtggtgagcgagtacttcgtgctgaccgccgcccactgcttcaccgtggacgacaaggagcacagcatcaaggtgagcgtgggcggcgagaagagagacctggagatcgaggtggtgctgttccaccccaactacaacatcaacggcaagaaggaggccggcatccccgagttctacgactacgacgtggccctgatcaagctgaagaacaagctgaagtacggctag

SEQ ID NO: 77503 - DNA, 1770 bp, synthetic construct; identical to SEQ ID NO: 77502
  misc_feature 1..1770: note = Description of Artificial Sequence: Synthetic coding sequence
  source 1..1770: mol_type = other DNA

SEQ ID NO: 77504 - DNA, 2295 bp, synthetic construct
  misc_feature 1..2295: note = Description of Artificial Sequence: Synthetic coding sequence
  source 1..2295: mol_type = other DNA
atgggcagcaacctgagcccccagctgtgcctgatgcccttcatcctgggcctgctgagcggcggcgtgaccaccaccccctggagcctggccagaccccagggcagctgcagcctggagggcgtggagatcaagggcggcagcttcagactgctgcaggagggccaggccctggagtacgtgtgccccagcggcttctacccctaccccgtgcagaccagaacctgcagaagcaccggcagctggagcaccctgaagacccaggaccagaagaccgtgagaaaggccgagtgcagagccatccactgccccagaccccacgacttcgagaacggcgagtactggcccagaagcccctactacaacgtgagcgacgagatcagcttccactgctacgacggctacaccctgagaggcagcgccaacagaacctgccaggtgaacggcagatggagcggccagaccgccatctgcgacaacggcgccggctactgcagcaaccccggcatccccatcggcaccagaaaggtgggcagccagtacagactggaggacagcgtgacctaccactgcagcagaggcctgaccctgagaggcagccagagaagaacctgccaggagggcggcagctggagcggcaccgagcccagctgccaggacagcttcatgtacgacaccccccaggaggtggccgaggccttcctgagcagcctgaccgagaccatcgagggcgtggacgccgaggacggccacggccccggcgagcagcagaagagaaagatcgtgctggaccccagcggcagcatgaacatctacctggtgctggacggcagcgacagcatcggcgccagcaacttcaccggcgccaagaagtgcctggtgaacctgatcgagaaggtggccagctacggcgtgaagcccagatacggcctggtgacctacgccacctaccccaagatctgggtgaaggtgagcgaggccgacagcagcaacgccgactgggtgaccaagcagctgaacgagatcaactacgaggaccacaagctgaagagcggcaccaacaccaagaaggccctgcaggccgtgtacagcatgatgagctggcccgacgacgtgccccccgagggctggaacagaaccagacacgtgatcatcctgatgaccgacggcctgcacaacatgggcggcgaccccatcaccgtgatcgacgagatcagagacctgctgtacatcggcaaggacagaaagaaccccagagaggactacctggacgtgtacgtgttcggcgtgggccccctggtgaaccaggtgaacatcaacgccctggccagcaagaaggacaacgagcagcacgtgttcaaggtgaaggacatggagaacctggaggacgtgttctaccagatgatcgacgagagccagagcctgagcctgtgcggcatggtgtgggagcacagaaagggcaccgactaccacaagcagccctggcaggccaagatcagcgtgatcagacccagcaagggccacgagagctgcatgggcgccgtggtgagcgagtacttcgtgctgaccgccgcccactgcttcaccgtggacgacaaggagcacagcatcaaggtgagcgtgggcggcgagaagagagacctggagatcgaggtggtgctgttccaccccaactacaacatcaacggcaaggaggaggccggcatccccgagttctacgactacgacgtggccctgatcaagctgaagaacaagctgaagtacggccagaccatcagacccatctgcctgccctgcaccgagggcaccaccagagccctgagactgccccccaccaccacctgccagcagcagaaggaggagctgctgcccgcccaggacatcaaggccctgttcgtgagcgaggaggagaagaagctgaccagaaaggaggtgtacatcaagaacggcgacaagaagggcagctgcgagagagacgcccagtacgcccccggctacgacaaggtgaaggacatcagcgaggtggtgacccccagattcctgtgcaccggcggcgtgagcccctacgccgaccccaacacctgcagaggcgacagcggcggccccctgatcgtgcacaagagaagcagattcatccaggtgggcgtgatcagctggggcgtggtggacgtgtgcaagaaccagaagagacagaagcaggtgcccgcccacgccagagacttccacatcaacctgttccaggtgctgccctggctgaaggagaagctgcaggacgaggacctgggcttcctgtag

SEQ ID NO: 77505 - DNA, 2295 bp, synthetic construct
  misc_feature 1..2295: note = Description of Artificial Sequence: Synthetic coding sequence
  source 1..2295: mol_type = other DNA
atgggcagcaacctgagcccccagctgtgcctgatgcccttcatcctgggcctgctgagcggcggcgtgaccaccaccccctggagcctggccagaccccagggcagctgcagcctggagggcgtggagatcaagggcggcagcttcagactgctgcaggagggccaggccctggagtacgtgtgccccagcggcttctacccctaccccgtgcagaccagaacctgcagaagcaccggcagctggagcaccctgaagacccaggaccagaagaccgtgagaaaggccgagtgcagagccatccactgccccagaccccacgacttcgagaacggcgagtactggcccagaagcccctactacaacgtgagcgacgagatcagcttccactgctacgacggctacaccctgagaggcagcgccaacagaacctgccaggtgaacggcagatggagcggccagaccgccatctgcgacaacggcgccggctactgcagcaaccccggcatccccatcggcaccagaaaggtgggcagccagtacagactggaggacagcgtgacctaccactgcagcagaggcctgaccctgagaggcagccagagaagaacctgccaggagggcggcagctggagcggcaccgagcccagctgccaggacagcttcatgtacgacaccccccaggaggtggccgaggccttcctgagcagcctgaccgagaccatcgagggcgtggacgccgaggacggccacggccccggcgagcagcagaagagaaagatcgtgctggaccccagcggcagcatgaacatctacctggtgctggacggcagcgacagcatcggcgccagcaacttcaccggcgccaagaagtgcctggtgaacctgatcgagaaggtggccagctacggcgtgaagcccagatacggcctggtgacctacgccacctaccccaagatctgggtgaaggtgagcgaggccgacagcagcaacgccgactgggtgaccaagcagctgaacgagatcaactacgaggaccacaagctgaagagcggcaccaacaccaagaaggccctgcaggccgtgtacagcatgatgagctggcccgacgacgtgccccccgagggctggaacagaaccagacacgtgatcatcctgatgaccgacggcctgcacaacatgggcggcgaccccatcaccgtgatcgacgagatcagagacctgctgtacatcggcaaggacagaaagaaccccagagaggactacctggacgtgtacgtgttcggcgtgggccccctggtgaaccaggtgaacatcaacgccctggccagcaagaaggacaacgagcagcacgtgttcaaggtgaaggacatggagaacctggaggacgtgttctaccagatgatcgacgagagccagagcctgagcctgtgcggcatggtgtgggagcacagaaagggcaccgactaccacaagcagccctggcaggccaagatcagcgtgatcagacccagcaagggccacgagagctgcatgggcgccgtggtgagcgagtacttcgtgctgaccgccgcccactgcttcaccgtggacgacaaggagcacagcatcaaggtgagcgtgggcggcgagaagagagacctggagatcgaggtggtgctgttccaccccaactacaacatcaacggcaagaaggaggccggcatccccgagttctacgactacgacgtggccctgatcaagctgaagaacaagctgaagtacggccagaccatcagacccatctgcctgccctgcaccgagggcaccaccagagccctgagactgccccccaccaccacctgccagcagcagaaggaggagctgctgcccgcccaggacatcaaggccctgttcgtgagcgaggaggagaagaagctgaccagaaaggaggtgtacatcaagaacggcgacaagaagggcagctgcgagagagacgcccagtacgcccccggctacgacaaggtgaaggacatcagcgaggtggtgacccccagattcctgtgcaccggcggcgtgagcccctacgccgaccccaacacctgcagaggcgacagcggcggccccctgatcgtgcacaagagaagcagattcatccaggtgggcgtgatcagctggggcgtggtggacgtgtgcaagaaccagaagagacagaagcaggtgcccgcccacgccagagacttccacatcaacctgttccaggtgctgccctggctgaaggagaagctgcaggacgaggacctgggcttcctgtag

SEQ ID NO: 77506 - DNA, 2295 bp, synthetic construct; identical to SEQ ID NO: 77505
  misc_feature 1..2295: note = Description of Artificial Sequence: Synthetic coding sequence
  source 1..2295: mol_type = other DNA

SEQ ID NO: 77507 - DNA, 2295 bp, synthetic construct; identical to SEQ ID NO: 77504
  misc_feature 1..2295: note = Description of Artificial Sequence: Synthetic coding sequence
  source 1..2295: mol_type = other DNA

SEQ ID NO: 77508 - DNA, 2295 bp, synthetic construct; identical to SEQ ID NO: 77505
  misc_feature 1..2295: note = Description of Artificial Sequence: Synthetic coding sequence
  source 1..2295: mol_type = other DNA

SEQ ID NO: 77509 - DNA, 2295 bp, synthetic construct; identical to SEQ ID NO: 77505
  misc_feature 1..2295: note = Description of Artificial Sequence: Synthetic coding sequence
  source 1..2295: mol_type = other DNA

SEQ ID NO: 77510 - DNA, 2295 bp, synthetic construct; identical to SEQ ID NO: 77505
  misc_feature 1..2295: note = Description of Artificial Sequence: Synthetic coding sequence
  source 1..2295: mol_type = other DNA

SEQ ID NO: 77511 - DNA, 2295 bp, synthetic construct; identical to SEQ ID NO: 77505
  misc_feature 1..2295: note = Description of Artificial Sequence: Synthetic coding sequence
  source 1..2295: mol_type = other DNA

SEQ ID NO: 77512 - DNA, 2295 bp, synthetic construct; identical to SEQ ID NO: 77505
  misc_feature 1..2295: note = Description of Artificial Sequence: Synthetic coding sequence
  source 1..2295: mol_type = other DNA

SEQ ID NO: 77513 - DNA, 2295 bp, synthetic construct; identical to SEQ ID NO: 77505
  misc_feature 1..2295: note = Description of Artificial Sequence: Synthetic coding sequence
  source 1..2295: mol_type = other DNA

SEQ ID NO: 77514 - DNA, 2295 bp, synthetic construct; identical to SEQ ID NO: 77505
  misc_feature 1..2295: note = Description of Artificial Sequence: Synthetic coding sequence
  source 1..2295: mol_type = other DNA

SEQ ID NO: 77515 - DNA, 435 bp, synthetic construct
  misc_feature 1..435: note = Description of Artificial Sequence: Synthetic coding sequence
  source 1..435: mol_type = other DNA
atgggcagcaacctgagcccccagctgtgcctgatgcccttcatcctgggcctgctgagcggcggcgtgaccaccaccccctggagcctggccagaccccagggcagctgcagcctggagggcgtggagatcaagggcggcagcttcagactgctgcaggagggccaggccctggagtacgtgtgccccagcggcttctacccctaccccgtgcagaccagaacctgcagaagcaccggcagctggagcaccctgaagacccaggaccagaagaccgtgagaaaggccgagtgcagagccatccactgccccagaccccacgacttcgagaacggcgagtactggcccagaagcccctactacaacgtgagcgacgagatcagcttccactgctacgacggctacaccctgagaggcagcgccaacagaacctag

SEQ ID NO: 77516 - DNA, 3801 bp, synthetic construct
  misc_feature 1..3801: note = Description of Artificial Sequence: Synthetic coding sequence
  source 1..3801: mol_type = other DNA
atgggccccctgatggtgctgttctgcctgctgttcctgtaccccggcctggccgacagcgcccccagctgcccccagaacgtgaacatcagcggcggcaccttcaccctgagccacggctgggcccccggcagcctgctgacctacagctgcccccagggcctgtaccccagccccgccagcagactgtgcaagagcagcggccagtggcagacccccggcgccaccagaagcctgagcaaggccgtgtgcaagcccggccactgccccaaccccggcatcagcctgggcgccgtgagaaccggcttcagattcggccacggcgacaaggtgagatacagatgcagcagcaacctggtgctgaccggcagcagcgagagagagtgccagggcaacggcgtgtggagcggcaccgagcccatctgcagacagccctacagctacgacttccccgaggacgtggcccccgccctgggcaccagcttcagccacatgctgggcgccaccaaccccacccagaagaccaaggaccacgagaacggcaccggcaccaacacctacgccgccctgaacagcgtgtacctgatgatgaacaaccagatgagactgctgggcatggagaccatggcctggcaggagatcagacacgccatcatcctgctgaccgacggcaagagcaacatgggcggcagccccaagaccgccgtggaccacatcagagagatcctgaacatcaaccagaagagaaacgactacctggacatctacgccatcggcgtgggcaagctggacgtggactggagagagctgaacgagctgggcagcaagaaggacggcgagagacacgccttcatcctgcaggacaccaaggccctgcaccaggtgttcgagcacatgctggacgtgagcaagctgaccgacaccatctgcggcgtgggcaacatgagcgccaacgccagcgaccaggagagaaccccctggcacgtgaccatcaagcccaagagccaggagacctgcagaggcgccctgatcagcgaccagtgggtgctgaccgccgcccactgcttcagagacggcaacgaccacagcctgtggagagtgaacgtgggcgaccccaagagccagtggggcaaggagttcctgatcgagaaggccgtgatcagccccggcttcgacgtgttcgccaagaagaaccagggcatcctggagttctacggcgacgacatcgccctgctgaagctggcccagaaggtgaagatgagcacccacgccagacccatctgcctgccctgcaccatggaggccaacctggccctgagaagaccccagggcagcacctgcagagaccacgagaacgagctgctgaacaagcagagcgtgcccgcccacttcgtggccctgaacggcagcaagctgaacatcaacctgaagatgggcgtggagtggaccagctgcgccgaggtggtgagccaggagaagaccatgttccccaacctgaccgacgtgagagaggtggtgaccgaccagttcctgtgcagcggcacccaggaggacgagagcccctgcaagggcgtgaccaccaccccctggagcctggccagaccccagggcagctgcagcctggagggcgtggagatcaagggcggcagcttcagactgctgcaggagggccaggccctggagtacgtgtgccccagcggcttctacccctaccccgtgcagaccagaacctgcagaagcaccggcagctggagcaccctgaagacccaggaccagaagaccgtgagaaaggccgagtgcagagccatccactgccccagaccccacgacttcgagaacggcgagtactggcccagaagcccctactacaacgtgagcgacgagatcagcttccactgctacgacggctacaccctgagaggcagcgccaacagaacctgccaggtgaacggcagatggagcggccagaccgccatctgcgacaacggcgccggctactgcagcaaccccggcatccccatcggcaccagaaaggtgggcagccagtacagactggaggacagcgtgacctaccactgcagcagaggcctgaccctgagaggcagccagagaagaacctgccaggagggcggcagctggagcggcaccgagcccagctgccaggacagcttcatgtacgacaccccccaggaggtggccgaggccttcctgagcagcctgaccgagaccatcgagggcgtggacgccgaggacggccacggccccggcgagcagcagaagagaaagatcgtgctggaccccagcggcagcatgaacatctacctggtgctggacggcagcgacagcatcggcgccagcaacttcaccggcgccaagaagtgcctggtgaacctgatcgagaaggtggccagctacggcgtgaagcccagatacggcctggtgacctacgccacctaccccaagatctgggtgaaggtgagcgaggccgacagcagcaacgccgactgggtgaccaagcagctgaacgagatcaactacgaggaccacaagctgaagagcggcaccaacaccaagaaggccctgcaggccgtgtacagcatgatgagctggcccgacgacgtgccccccgagggctggaacagaaccagacacgtgatcatcctgatgaccgacggcctgcacaacatgggcggcgaccccatcaccgtgatcgacgagatcagagacctgctgtacatcggcaaggacagaaagaaccccagagaggactacctggacgtgtacgtgttcggcgtgggccccctggtgaaccaggtgaacatcaacgccctggccagcaagaaggacaacgagcagcacgtgttcaaggtgaaggacatggagaacctggaggacgtgttctaccagatgatcgacgagagccagagcctgagcctgtgcggcatggtgtgggagcacagaaagggcaccgactaccacaagcagccctggcaggccaagatcagcgtgatcagacccagcaagggccacgagagctgcatgggcgccgtggtgagcgagtacttcgtgctgaccgccgcccactgcttcaccgtggacgacaaggagcacagcatcaaggtgagcgtgggcggcgagaagagagacctggagatcgaggtggtgctgttccaccccaactacaacatcaacggcaagaaggaggccggcatccccgagttctacgactacgacgtggccctgatcaagctgaagaacaagctgaagtacggccagaccatcagacccatctgcctgccctgcaccgagggcaccaccagagccctgagactgccccccaccaccacctgccagcagcagaaggaggagctgctgcccgcccaggacatcaaggccctgttcgtgagcgaggaggagaagaagctgaccagaaaggaggtgtacatcaagaacggcgacaagaagggcagctgcgagagagacgcccagtacgcccccggctacgacaaggtgaaggacatcagcgaggtggtgacccccagattcctgtgcaccggcggcgtgagcccctacgccgaccccaacacctgcagaggcgacagcggcggccccctgatcgtgcacaagagaagcagattcatccaggtgggcgtgatcagctggggcgtggtggacgtgtgcaagaaccagaagagacagaagcaggtgcccgcccacgccagagacttccacatcaacctgttccaggtgctgccctggctgaaggagaagctgcaggacgaggacctgggcttcctgtag

SEQ ID NO: 77517 - DNA, 3801 bp, synthetic construct
  misc_feature 1..3801: note = Description of Artificial Sequence: Synthetic coding sequence
  source 1..3801: mol_type = other DNA
atgggccccctgatggtgctgttctgcctgctgttcctgtaccccggcctggccgacagcgcccccagctgcccccagaacgtgaacatcagcggcggcaccttcaccctgagccacggctgggcccccggcagcctgctgacctacagctgcccccagggcctgtaccccagccccgccagcagactgtgcaagagcagcggccagtggcagacccccggcgccaccagaagcctgagcaaggccgtgtgcaagcccggccactgccccaaccccggcatcagcctgggcgccgtgagaaccggcttcagattcggccacggcgacaaggtgagatacagatgcagcagcaacctggtgctgaccggcagcagcgagagagagtgccagggcaacggcgtgtggagcggcaccgagcccatctgcagacagccctacagctacgacttccccgaggacgtggcccccgccctgggcaccagcttcagccacatgctgggcgccaccaaccccacccagaagaccaaggaccacgagaacggcaccggcaccaacacctacgccgccctgaacagcgtgtacctgatgatgaacaaccagatgagactgctgggcatggagaccatggcctggcaggagatcagacacgccatcatcctgctgaccgacggcaagagcaacatgggcggcagccccaagaccgccgtggaccacatcagagagatcctgaacatcaaccagaagagaaacgactacctggacatctacgccatcggcgtgggcaagctggacgtggactggagagagctgaacgagctgggcagcaagaaggacggcgagagacacgccttcatcctgcaggacaccaaggccctgcaccaggtgttcgagcacatgctggacgtgagcaagctgaccgacaccatctgcggcgtgggcaacatgagcgccaacgccagcgaccaggagagaaccccctggcacgtgaccatcaagcccaagagccaggagacctgcagaggcgccctgatcagcgaccagtgggtgctgaccgccgcccactgcttcagagacggcaacgaccacagcctgtggagagtgaacgtgggcgaccccaagagccagtggggcaaggagttcctgatcgagaaggccgtgatcagccccggcttcgacgtgttcgccaagaagaaccagggcatcctggagttctacggcgacgacatcgccctgctgaagctggcccagaaggtgaagatgagcacccacgccagacccatctgcctgccctgcaccatggaggccaacctggccctgagaagaccccagggcagcacctgcagagaccacgagaacgagctgctgaacaagcagagcgtgcccgcccacttcgtggccctgaacggcagcaagctgaacatcaacctgaagatgggcgtggagtggaccagctgcgccgaggtggtgagccaggagaagaccatgttccccaacctgaccgacgtgagagaggtggtgaccgaccagttcctgtgcagcggcacccaggaggacgagagcccctgcaagggcgtgaccaccaccccctggagcctggccagaccccagggcagctgcagcctggagggcgtggagatcaagggcggcagcttcagactgctgcaggagggccaggccctggagtacgtgtgccccagcggcttctacccctaccccgtgcagaccagaacctgcagaagcaccggcagctggagcaccctgaagacccaggaccagaagaccgtgagaaaggccgagtgcagagccatccactgccccagaccccacgacttcgagaacggcgagtactggcccagaagcccctactacaacgtgagcgacgagatcagcttccactgctacgacggctacaccctgagaggcagcgccaacagaacctgccaggtgaacggcagatggagcggccagaccgccatctgcgacaacggcgccggctactgcagcaaccccggcatccccatcggcaccagaaaggtgggcagccagtacagactggaggacagcgtgacctaccactgcagcagaggcctgaccctgagaggcagccagagaagaacctgccaggagggcggcagctggagcggcaccgagcccagctgccaggacagcttcatgtacgacaccccccaggaggtggccgaggccttcctgagcagcctgaccgagaccatcgagggcgtggacgccgaggacggccacggccccggcgagcagcagaagagaaagatcgtgctggaccccagcggcagcatgaacatctacctggtgctggacggcagcgacagcatcggcgccagcaacttcaccggcgccaagaagtgcctggtgaacctgatcgagaaggtggccagctacggcgtgaagcccagatacggcctggtgacctacgccacctaccccaagatctgggtgaaggtgagcgaggccgacagcagcaacgccgactgggtgaccaagcagctgaacgagatcaactacgaggaccacaagctgaagagcggcaccaacaccaagaaggccctgcaggccgtgtacagcatgatgagctggcccgacgacgtgccccccgagggctggaacagaaccagacacgtgatcatcctgatgaccgacggcctgcacaacatgggcggcgaccccatcaccgtgatcgacgagatcagagacctgctgtacatcggcaaggacagaaagaaccccagagaggactacctggacgtgtacgtgttcggcgtgggccccctggtgaaccaggtgaacatcaacgccctggccagcaagaaggacaacgagcagcacgtgttcaaggtgaaggacatggagaacctggaggacgtgttctaccagatgatcgacgagagccagagcctgagcctgtgcggcatggtgtgggagcacagaaagggcaccgactaccacaagcagccctggcaggccaagatcagcgtgatcagacccagcaagggccacgagagctgcatgggcgccgtggtgagcgagtacttcgtgctgaccgccgcccactgcttcaccgtggacgacaaggagcacagcatcaaggtgagcgtgggcggcgagaagagagacctggagatcgaggtggtgctgttccaccccaactacaacatcaacggcaaggaggaggccggcatccccgagttctacgactacgacgtggccctgatcaagctgaagaacaagctgaagtacggccagaccatcagacccatctgcctgccctgcaccgagggcaccaccagagccctgagactgccccccaccaccacctgccagcagcagaaggaggagctgctgcccgcccaggacatcaaggccctgttcgtgagcgaggaggagaagaagctgaccagaaaggaggtgtacatcaagaacggcgacaagaagggcagctgcgagagagacgcccagtacgcccccggctacgacaaggtgaaggacatcagcgaggtggtgacccccagattcctgtgcaccggcggcgtgagcccctacgccgaccccaacacctgcagaggcgacagcggcggccccctgatcgtgcacaagagaagcagattcatccaggtgggcgtgatcagctggggcgtggtggacgtgtgcaagaaccagaagagacagaagcaggtgcccgcccacgccagagacttccacatcaacctgttccaggtgctgccctggctgaaggagaagctgcaggacgaggacctgggcttcctgtag

SEQ ID NO: 77518 - DNA, 3801 bp, synthetic construct; identical to SEQ ID NO: 77516
  misc_feature 1..3801: note = Description of Artificial Sequence: Synthetic coding sequence
  source 1..3801: mol_type = other DNA

SEQ ID NO: 77519 - DNA, 3801 bp, synthetic construct; identical to SEQ ID NO: 77516
  misc_feature 1..3801: note = Description of Artificial Sequence: Synthetic coding sequence
  source 1..3801: mol_type = other DNA

SEQ ID NO: 77520 - DNA, 3801 bp, synthetic construct; identical to SEQ ID NO: 77516
  misc_feature 1..3801: note = Description of Artificial Sequence: Synthetic coding sequence
  source 1..3801: mol_type = other DNA

SEQ ID NO: 77521 - DNA, 3801 bp, synthetic construct; identical to SEQ ID NO: 77516
  misc_feature 1..3801: note = Description of Artificial Sequence: Synthetic coding sequence
  source 1..3801: mol_type = other DNA

SEQ ID NO: 77522 - DNA, 762 bp, synthetic construct
  misc_feature 1..762: note = Description of Artificial Sequence: Synthetic coding sequence
  source 1..762: mol_type = other DNA
atgcacagctgggagagactggccgtgctggtgctgctgggcgccgccgcctgcgccgccccccccagaggcagaatcctgggcggcagagaggccgaggcccacgccagaccctacatggccagcgtgcagctgaacggcgcccacctgtgcggcggcgtgctggtggccgagcagtgggtgctgagcgccgcccactgcctggaggacgccgccgacggcaaggtgcaggtgctgctgggcgcccacagcctgagccagcccgagcccagcaagagactgtacgacgtgctgagagccgtgccccaccccgacagccagcccgacaccatcgaccacgacctgctgctgctgcagctgagcgagaaggccaccctgggccccgccgtgagacccctgccctggcagagagtggacagagacgtggcccccggcaccctgtgcgacgtggccggctggggcatcgtgaaccacgccggcagaagacccgacagcctgcagcacgtgctgctgcccgtgctggacagagccacctgcaacagaagaacccaccacgacggcgccatcaccgagagactgatgtgcgccgagagcaacagaagagacagctgcaagggcgacagcggcggccccctggtgtgcggcggcgtgctggagggcgtggtgaccagcggcagcagagtgtgcggcaacagaaagaagcccggcatctacaccagagtggccagctacgccgcctggatcgacagcgtgctggcctag

SEQ ID NO: 77523 - DNA, 993 bp, synthetic construct
  misc_feature 1..993: note = Description of Artificial Sequence: Synthetic coding sequence
  source 1..993: mol_type = other DNA
atgtggctgctggtgagcgtgatcctgatcagcagaatcagcagcgtgggcggcgaggccaccttctgcgacttccccaagatcaaccacggcatcctgtacgacgaggagaagtacaagcccttcagccaggtgcccaccggcgaggtgttctactacagctgcgagtacaacttcgtgagccccagcaagagcttctggaccagaatcacctgcaccgaggagggctggagccccacccccaagtgcctgagactgtgcttcttccccttcgtggagaacggccacagcgagagcagcggccagacccacctggagggcgacaccgtgcagatcatctgcaacaccggctacagactgcagaacaacgagaacaacatcagctgcgtggagagaggctggagcaccccccccaagtgcagaagcaccgacaccagctgcgtgaacccccccaccgtgcagaacgcccacatcctgagcagacagatgagcaagtaccccagcggcgagagagtgagatacgagtgcagaagcccctacgagatgttcggcgacgaggaggtgatgtgcctgaacggcaactggaccgagcccccccagtgcaaggacagcaccggcaagtgcggcccccccccccccatcgacaacggcgacatcaccagcttccccctgagcgtgtacgcccccgccagcagcgtggagtaccagtgccagaacctgtaccagctggagggcaacaagagaatcacctgcagaaacggccagtggagcgagccccccaagtgcctgcacccctgcgtgatcagcagagagatcatggagaactacaacatcgccctgagatggaccgccaagcagaagctgtacctgagaaccggcgagagcgccgagttcgtgtgcaagagaggctacagactgagcagcagaagccacaccctgagaaccacctgctgggacggcaagctggagtaccccacctgcgccaagagatag

SEQ ID NO: 77524 - DNA, 813 bp, synthetic construct
  misc_feature 1..813: note = Description of Artificial Sequence: Synthetic coding sequence
  source 1..813: mol_type = other DNA
atgtggctgctggtgagcgtgatcctgatcagcagaatcagcagcgtgggcggcgaggccatgttctgcgacttccccaagatcaaccacggcatcctgtacgacgaggagaagtacaagcccttcagccaggtgcccaccggcgaggtgttctactacagctgcgagtacaacttcgtgagccccagcaagagcttctggaccagaatcacctgcgccgaggagggctggagccccacccccaagtgcctgagactgtgcttcttccccttcgtggagaacggccacagcgagagcagcggccagacccacctggagggcgacaccgtgcagatcatctgcaacaccggctacagactgcagaacaacgagaacaacatcagctgcgtggagagaggctggagcaccccccccaagtgcagaagcaccatcagcgccgagaagtgcggcccccccccccccatcgacaacggcgacatcaccagcttcctgctgagcgtgtacgcccccggcagcagcgtggagtaccagtgccagaacctgtaccagctggagggcaacaaccagatcacctgcagaaacggccagtggagcgagccccccaagtgcctggacccctgcgtgatcagccaggagatcatggagaagtacaacatcaagctgaagtggaccaaccagcagaagctgtacagcagaaccggcgacatcgtggagttcgtgtgcaagagcggctaccaccccaccaagagccacagcttcagagccatgtgccagaacggcaagctggtgtaccccagctgcgaggagaagtag

SEQ ID NO: 77525 - DNA, 813 bp, synthetic construct; identical to SEQ ID NO: 77524
  misc_feature 1..813: note = Description of Artificial Sequence: Synthetic coding sequence
  source 1..813: mol_type = other DNA

SEQ ID NO: 77526 - DNA, 993 bp, synthetic construct
  misc_feature 1..993: note = Description of Artificial Sequence: Synthetic coding sequence
  source 1..993: mol_type = other DNA
atgctgctgctgatcaacgtgatcctgaccctgtgggtgagctgcgccaacggccaggtgaagccctgcgacttccccgacatcaagcacggcggcctgttccacgagaacatgagaagaccctacttccccgtggccgtgggcaagtactacagctactactgcgacgagcacttcgagacccccagcggcagctactgggactacatccactgcacccagaacggctggagccccgccgtgccctgcctgagaaagtgctacttcccctacctggagaacggctacaaccagaactacggcagaaagttcgtgcagggcaacagcaccgaggtggcctgccaccccggctacggcctgcccaaggcccagaccaccgtgacctgcaccgagaagggctggagccccacccccagatgcatcagagtgagaacctgcagcaagagcgacatcgagatcgagaacggcttcatcagcgagagcagcagcatctacatcctgaacaaggagatccagtacaagtgcaagcccggctacgccaccgccgacggcaacagcagcggcagcatcacctgcctgcagaacggctggagcgcccagcccatctgcatcaacagcagcgagaagtgcggcccccccccccccatcagcaacggcgacaccaccagcttcctgctgaaggtgtacgtgccccagagcagagtggagtaccagtgccagccctactacgagctgcagggcagcaactacgtgacctgcagcaacggcgagtggagcgagccccccagatgcatccacccctgcatcatcaccgaggagaacatgaacaagaacaacatcaagctgaagggcagaagcgacagaaagtactacgccaagaccggcgacaccatcgagttcatgtgcaagctgggctacaacgccaacaccagcatcctgagcttccaggccgtgtgcagagagggcatcgtggagtaccccagatgcgagtag

SEQ ID NO: 77527 - DNA, 588 bp, synthetic construct
  misc_feature 1..588: note = Description of Artificial Sequence: Synthetic coding sequence
  source 1..588: mol_type = other DNA
atgctgctgctgatcaacgtgatcctgaccctgtgggtgagctgcgccaacggccaggtgaagccctgcgacttccccgacatcaagcacggcggcctgttccacgagaacatgagaagaccctacttccccgtggccgtgggcaagtactacagctactactgcgacgagcacttcgagacccccagcggcagctactgggactacatccactgcacccagaacggctggagccccgccgtgccctgcctgagaaagtgctacttcccctacctggagaacggctacaaccagaactacggcagaaagttcgtgcagggcaacagcaccgaggtggcctgccaccccggctacggcctgcccaaggcccagaccaccgtgacctgcaccgagaagggctggagccccacccccagatgcatcagagtgagaacctgcagcaagagcgacatcgagatcgagaacggcttcatcagcgagagcagcagcatctacatcctgaacaaggagatccagtacaagtgcaagcccggctacgccaccgccgacggcaacagcagcgacatggtgttctgcatcagctactag

SEQ ID NO: 77528 - DNA, 810 bp, synthetic construct
  misc_feature 1..810: note = Description of Artificial Sequence: Synthetic coding sequence
  source 1..810: mol_type = other DNA
atgctgctgctgatcaacgtgatcctgaccctgtgggtgagctgcgccaacggccaggtgaagccctgcgacttccccgacatcaagcacggcggcctgttccacgagaacatgagaagaccctacttccccgtggccgtgggcaagtactacagctactactgcgacgagcacttcgagacccccagcggcagctactgggactacatccactgcacccagaacggctggagccccgccgtgccctgcctgagaaagtgctacttcccctacctggagaacggctacaaccagaactacggcagaaagttcgtgcagggcaacagcaccgaggtggcctgccaccccggctacggcctgcccaaggcccagaccaccgtgacctgcaccgagaagggctggagccccacccccagatgcatcagagtgaacagcagcgagaagtgcggcccccccccccccatcagcaacggcgacaccaccagcttcctgctgaaggtgtacgtgccccagagcagagtggagtaccagtgccagccctactacgagctgcagggcagcaactacgtgacctgcagcaacggcgagtggagcgagccccccagatgcatccacccctgcatcatcaccgaggagaacatgaacaagaacaacatcaagctgaagggcagaagcgacagaaagtactacgccaagaccggcgacaccatcgagttcatgtgcaagctgggctacaacgccaacaccagcatcctgagcttccaggccgtgtgcagagagggcatcgtggagtaccccagatgcgagtag

SEQ ID NO: 77529 - DNA, 996 bp, synthetic construct
  misc_feature 1..996: note = Description of Artificial Sequence: Synthetic coding sequence
  source 1..996: mol_type = other DNA
atgctgctgctgatcaacgtgatcctgaccctgtgggtgagctgcgccaacggccaggaggtgaagccctgcgacttccccgagatccagcacggcggcctgtactacaagagcctgagaagactgtacttccccgccgccgccggccagagctacagctactactgcgaccagaacttcgtgacccccagcggcagctactgggactacatccactgcacccaggacggctggagccccaccgtgccctgcctgagaacctgcagcaagagcgacatcgagatcgagaacggcttcatcagcgagagcagcagcatctacatcctgaacaaggagatccagtacaagtgcaagcccggctacgccaccgccgacggcaacagcagcggcagcatcacctgcctgcagaacggctggagcgcccagcccatctgcatcaagttctgcgacatgcccgtgttcgagaacagcagagccaagagcaacggcatgagattcaagctgcacgacaccctggactacgagtgctacgacggctacgagatcagctacggcaacaccaccggcagcatcgtgtgcggcgaggacggctggagccacttccccacctgctacaacagcagcgagaagtgcggcccccccccccccatcagcaacggcgacaccaccagcttcctgctgaaggtgtacgtgccccagagcagagtggagtaccagtgccagagctactacgagctgcagggcagcaactacgtgacctgcagcaacggcgagtggagcgagccccccagatgcatccacccctgcatcatcaccgaggagaacatgaacaagaacaacatccagctgaagggcaagagcgacatcaagtactacgccaagaccggcgacaccatcgagttcatgtgcaagctgggctacaacgccaacaccagcgtgctgagcttccaggccgtgtgcagagagggcatcgtggagtaccccagatgcgagtag

SEQ ID NO: 77530 - DNA, 1734 bp, synthetic construct
  misc_feature 1..1734: note = Description of Artificial Sequence: Synthetic coding sequence
  source 1..1734: mol_type = other DNA
atgctgctgctgatcaacgtgatcctgaccctgtgggtgagctgcgccaacggccaggtgaagccctgcgacttccccgagatccagcacggcggcctgtactacaagagcctgagaagactgtacttccccgccgccgccggccagagctacagctactactgcgaccagaacttcgtgacccccagcggcagctactgggactacatccactgcacccaggacggctggagccccaccgtgccctgcctgagaacctgcagcaagagcgacgtggagatcgagaacggcttcatcagcgagagcagcagcatctacatcctgaacgaggagacccagtacaactgcaagcccggctacgccaccgccgagggcaacagcagcggcagcatcacctgcctgcagaacggctggagcacccagcccatctgcatcaagttctgcgacatgcccgtgttcgagaacagcagagccaagagcaacggcatgtggttcaagctgcacgacaccctggactacgagtgctacgacggctacgagagcagctacggcaacaccaccgacagcatcgtgtgcggcgaggacggctggagccacctgcccacctgctacaacagcagcgagaactgcggcccccccccccccatcagcaacggcgacaccaccagcttcccccagaaggtgtacctgccctggagcagagtggagtaccagtgccagagctactacgagctgcagggcagcaagtacgtgacctgcagcaacggcgactggagcgagccccccagatgcatcagcatgaagccctgcgagttccccgagatccagcacggccacctgtactacgagaacaccagaagaccctacttccccgtggccaccggccagagctacagctactactgcgaccagaacttcgtgacccccagcggcagctactgggactacatccactgcacccaggacggctggctgcccaccgtgccctgcctgagaacctgcagcaagagcgacatcgagatcgagaacggcttcatcagcgagagcagcagcatctacatcctgaacaaggagatccagtacaagtgcaagcccggctacgccaccgccgacggcaacagcagcggcagcatcacctgcctgcagaacggctggagcgcccagcccatctgcatcaagttctgcgacatgcccgtgttcgagaacagcagagccaagagcaacggcatgagattcaagctgcacgacaccctggactacgagtgctacgacggctacgagatcagctacggcaacaccaccggcagcatcgtgtgcggcgaggacggctggagccacttccccacctgctacaacagcagcgagaagtgcggcccccccccccccatcagcaacggcgacaccaccagcttcctgctgaaggtgtacgtgccccagagcagagtggagtaccagtgccagagctactacgagctgcagggcagcaactacgtgacctgcagcaacggcgagtggagcgagccccccagatgcatccacccctgcatcatcaccgaggagaacatgaacaagaacaacatccagctgaagggcaagagcgacatcaagtactacgccaagaccggcgacaccatcgagttcatgtgcaagctgggctacaacgccaacaccagcgtgctgagcttccaggccgtgtgcagagagggcatcgtggagtaccccagatgcgagtag

SEQ ID NO: 77531 - DNA, 996 bp, synthetic construct
  misc_feature 1..996: note = Description of Artificial Sequence: Synthetic coding sequence
  source 1..996: mol_type = other DNA
atgctgctgctgatcaacgtgatcctgaccctgtgggtgagctgcgccaacggccaggccatgaagccctgcgagttccccgagatccagcacggccacctgtactacgagaacaccagaagaccctacttccccgtggccaccggccagagctacagctactactgcgaccagaacttcgtgacccccagcggcagctactgggactacatccactgcacccaggacggctggctgcccaccgtgccctgcctgagaacctgcagcaagagcgacatcgagatcgagaacggcttcatcagcgagagcagcagcatctacatcctgaacaaggagatccagtacaagtgcaagcccggctacgccaccgccgacggcaacagcagcggcagcatcacctgcctgcagaacggctggagcgcccagcccatctgcatcaagttctgcgacatgcccgtgttcgagaacagcagagccaagagcaacggcatgagattcaagctgcacgacaccctggactacgagtgctacgacggctacgagatcagctacggcaacaccaccggcagcatcgtgtgcggcgaggacggctggagccacttccccacctgctacaacagcagcgagaagtgcggcccccccccccccatcagcaacggcgacaccaccagcttcctgctgaaggtgtacgtgccccagagcagagtggagtaccagtgccagagctactacgagctgcagggcagcaactacgtgacctgcagcaacggcgagtggagcgagccccccagatgcatccacccctgcatcatcaccgaggagaacatgaacaagaacaacatccagctgaagggcaagagcgacatcaagtactacgccaagaccggcgacaccatcgagttcatgtgcaagctgggctacaacgccaacaccagcgtgctgagcttccaggccgtgtgcagagagggcatcgtggagtaccccagatgcgagtag

SEQ ID NO: 77532 - DNA, 996 bp, synthetic construct
  misc_feature 1..996: note = Description of Artificial Sequence: Synthetic coding sequence
  source 1..996: mol_type = other DNA
atgctgctgctgatcaacgtgatcctgaccctgtgggtgagctgcgccaacggccaggaggtgaagccctgcgacttccccgagatccagcacggcggcctgtactacaagagcctgagaagactgtacttccccgccgccgccggccagagctacagctactactgcgaccagaacttcgtgacccccagcggcagctactgggactacatccactgcacccaggacggctggctgcccaccgtgccctgcctgagaacctgcagcaagagcgacatcgagatcgagaacggcttcatcagcgagagcagcagcatctacatcctgaacaaggagatccagtacaagtgcaagcccggctacgccaccgccgacggcaacagcagcggcagcatcacctgcctgcagaacggctggagcgcccagcccatctgcatcaagttctgcgacatgcccgtgttcgagaacagcagagccaagagcaacggcatgagattcaagctgcacgacaccctggactacgagtgctacgacggctacgagatcagctacggcaacaccaccggcagcatcgtgtgcggcgaggacggctggagccacttccccacctgctacaacagcagcgagaagtgcggcccccccccccccatcagcaacggcgacaccaccagcttcctgctgaaggtgtacgtgccccagagcagagtggagtaccagtgccagagctactacgagctgcagggcagcaactacgtgacctgcagcaacggcgagtggagcgagccccccagatgcatccacccctgcatcatcaccgaggagaacatgaacaagaacaacatccagctgaagggcaagagcgacatcaagtactacgccaagaccggcgacaccatcgagttcatgtgcaagctgggctacaacgccaacaccagcgtgctgagcttccaggccgtgtgcagagagggcatcgtggagtaccccagatgcgagtag

SEQ ID NO: 77533 - DNA, 1752 bp, synthetic construct
  misc_feature 1..1752: note = Description of Artificial Sequence: Synthetic coding sequence
  source 1..1752: mol_type = other DNA
atgaagctgctgcacgtgttcctgctgttcctgtgcttccacctgagattctgcaaggtgacctacaccagccaggaggacctggtggagaagaagtgcctggccaagaagtacacccacctgagctgcgacaaggtgttctgccagccctggcagagatgcatcgagggcacctgcgtgtgcaagctgccctaccagtgccccaagaacggcaccgccgtgtgcgccaccaacagaagaagcttccccacctactgccagcagaagagcctggagtgcctgcaccccggcaccaagttcctgaacaacggcacctgcaccgccgagggcaagttcagcgtgagcctgaagcacggcaacaccgacagcgagggcatcgtggaggtgaagctggtggaccaggacaagaccatgttcatctgcaagagcagctggagcatgagagaggccaacgtggcctgcctggacctgggcttccagcagggcgccgacacccagagaagattcaagctgagcgacctgagcatcaacagcaccgagtgcctgcacgtgcactgcagaggcctggagaccagcctggccgagtgcaccttcaccaagagaagaaccatgggctaccaggacttcgccgacgtggtgtgctacacccagaaggccgacagccccatggacgacttcttccagtgcgtgaacggcaagtacatcagccagatgaaggcctgcgacggcatcaacgactgcggcgaccagagcgacgagctgtgctgcaaggcctgccagggcaagggcttccactgcaagagcggcgtgtgcatccccagccagtaccagtgcaacggcgaggtggactgcatcaccggcgaggacgaggtgggctgcgccggcttcgccagcgtgacccaggaggagaccgagatcctgaccgccgacatggacgccgagagaagaagaatcaagagcctgctgcccaagctgagctgcggcgtgaagaacagaatgcacatcagaagaaagagaatcgtgggcggcaagagagcccagctgggcgacctgccctggcaggtggccatcaaggacgccagcggcatcacctgcggcggcatctacatcggcggctgctggatcctgaccgccgcccactgcctgagagccagcaagacccacagataccagatctggaccaccgtggtggactggatccaccccgacctgaagagaatcgtgatcgagtacgtggacagaatcatcttccacgagaactacaacgccggcacctaccagaacgacatcgccctgatcgagatgaagaaggacggcaacaagaaggactgcgagctgcccagaagcatccccgcctgcgtgccctggagcccctacctgttccagcccaacgacacctgcatcgtgagcggctggggcagagagaaggacaacgagagagtgttcagcctgcagtggggcgaggtgaagctgatcagcaactgcagcaagttctacggcaacagattctacgagaaggagatggagtgcgccggcacctacgacggcagcatcgacgcctgcaagggcgacagcggcggccccctggtgtgcatggacgccaacaacgtgacctacgtgtggggcgtggtgagctggggcgagaactgcggcaagcccgagttccccggcgtgtacaccaaggtggccaactacttcgactggatcagctaccacgtgggcagacccttcatcagccagtacaacgtgtag

SEQ ID NO: 77534 - DNA, 1776 bp, synthetic construct
  misc_feature 1..1776: note = Description of Artificial Sequence: Synthetic coding sequence
  source 1..1776: mol_type = other DNA
atgaagctgctgcacgtgttcctgctgttcctgtgcttccacctgagattctgcaaggtgacctacaccagccaggaggacctggtggagaagaagtgcctggccaagaagtacacccacctgagctgcgacaaggtgttctgccagccctggcagagatgcatcgagggcacctgcgtgtgcaagctgccctaccagtgccccaagaacggcaccgccgtgtgcgccaccaacagaagaagcttccccacctactgccagcagaagagcctggagtgcctgcaccccggcaccaagttcctgaacaacggcacctgcaccgccgagggcaagttcagcgtgagcctgaagcacggcaacaccgacagcgagggcatcgtggaggtgaagctggtggaccaggacaagaccatgttcatctgcaagagcagctggagcatgagagaggccaacgtggcctgcctggacctgggcttccagcagggcgccgacacccagagaagattcaagctgagcgacctgagcatcaacagcaccgagtgcctgcacgtgcactgcagaggcctggagaccagcctggccgagtgcaccttcaccaagagaagaaccatgggctaccaggacttcgccgacgtggtgtgctacacccagaaggccgacagccccatggacgacttcttccagtgcgtgaacggcaagtacatcagccagatgaaggcctgcgacggcatcaacgactgcggcgaccagagcgacgagctgtgctgcaaggcctgccagggcaagggcttccactgcaagagcggcgtgtgcatccccagccagtaccagtgcaacggcgaggtggactgcatcaccggcgaggacgaggtgggctgcgccgccgccagacaccccaccatccagggcttcgccagcgtgacccaggaggagaccgagatcctgaccgccgacatggacgccgagagaagaagaatcaagagcctgctgcccaagctgagctgcggcgtgaagaacagaatgcacatcagaagaaagagaatcgtgggcggcaagagagcccagctgggcgacctgccctggcaggtggccatcaaggacgccagcggcatcacctgcggcggcatctacatcggcggctgctggatcctgaccgccgcccactgcctgagagccagcaagacccacagataccagatctggaccaccgtggtggactggatccaccccgacctgaagagaatcgtgatcgagtacgtggacagaatcatcttccacgagaactacaacgccggcacctaccagaacgacatcgccctgatcgagatgaagaaggacggcaacaagaaggactgcgagctgcccagaagcatccccgcctgcgtgccctggagcccctacctgttccagcccaacgacacctgcatcgtgagcggctggggcagagagaaggacaacgagagagtgttcagcctgcagtggggcgaggtgaagctgatcagcaactgcagcaagttctacggcaacagattctacgagaaggagatggagtgcgccggcacctacgacggcagcatcgacgcctgcaagggcgacagcggcggccccctggtgtgcatggacgccaacaacgtgacctacgtgtggggcgtggtgagctggggcgagaactgcggcaagcccgagttccccggcgtgtacaccaaggtggccaactacttcgactggatcagctaccacgtgggcagacccttcatcagccagtacaacgtgtag

SEQ ID NO: 77535 - DNA, 1731 bp, synthetic construct
  misc_feature 1..1731: note = Description of Artificial Sequence: Synthetic coding sequence
  source 1..1731: mol_type = other DNA
atgaagctgctgcacgtgttcctgctgttcctgtgcttccacctgagattctgcaaggtgacctacaccagccaggaggacctggtggagaagaagtgcctggccaagaagtacacccacctgagctgcgacaaggtgttctgccagccctggcagagatgcatcgagggcacctgcgtgtgcaagctgccctaccagtgccccaagaacggcaccgccgtgtgcgccaccaacagaagaagcttccccacctactgccagcagaagagcctggagtgcctgcaccccggcaccaagttcctgaacaacggcacctgcaccgccgagggcaagttcagcgtgagcctgaagcacggcaacaccgacagcgagggcatcgtggaggtgaagctggtggaccaggacaagaccatgttcatctgcaagagcagctggagcatgagagaggccaacgtggcctgcctggacctgggcttccagcagggcgccgacacccagagaagattcaagctgagcgacctgagcatcaacagcaccgagtgcctgcacgtgcactgcagaggcctggagaccagcctggccgagtgcaccttcaccaagagaagaaccatgggctaccaggacttcgccgacgtggtgtgctacacccagaaggccgacagccccatggacgacttcttccagtgcgtgaacggcaagtacatcagccagatgaaggcctgcgacggcatcaacgactgcggcgaccagagcgacgagctgtgctgcaaggcctgccagggcaagggcttccactgcaagagcggcgtgtgcatccccagccagtaccagtgcaacggcgaggtggactgcatcaccggcgaggacgaggtgggctgcgccgaggagaccgagatcctgaccgccgacatggacgccgagagaagaagaatcaagagcctgctgcccaagctgagctgcggcgtgaagaacagaatgcacatcagaagaaagagaatcgtgggcggcaagagagcccagctgggcgacctgccctggcaggtggccatcaaggacgccagcggcatcacctgcggcggcatctacatcggcggctgctggatcctgaccgccgcccactgcctgagagccagcaagacccacagataccagatctggaccaccgtggtggactggatccaccccgacctgaagagaatcgtgatcgagtacgtggacagaatcatcttccacgagaactacaacgccggcacctaccagaacgacatcgccctgatcgagatgaagaaggacggcaacaagaaggactgcgagctgcccagaagcatccccgcctgcgtgccctggagcccctacctgttccagcccaacgacacctgcatcgtgagcggctggggcagagagaaggacaacgagagagtgttcagcctgcagtggggcgaggtgaagctgatcagcaactgcagcaagttctacggcaacagattctacgagaaggagatggagtgcgccggcacctacgacggcagcatcgacgcctgcaagggcgacagcggcggccccctggtgtgcatggacgccaacaacgtgacctacgtgtggggcgtggtgagctggggcgagaactgcggcaagcccgagttccccggcgtgtacaccaaggtggccaactacttcgactggatcagctaccacgtgggcagacccttcatcagccagtacaacgtgtag

SEQ ID NO: 77536 - DNA, 966 bp, synthetic construct
  misc_feature 1..966: note = Description of Artificial Sequence: Synthetic coding sequence
  source 1..966: mol_type = other DNA
caggtgacctacaccagccaggaggacctggtggagaagaagtgcctggccaagaagtacacccacctgagctgcgacaaggtgttctgccagccctggcagagatgcatcgagggcacctgcgtgtgcaagctgccctaccagtgccccaagaacggcaccgccgtgtgcgccaccaacagaagaagcttccccacctactgccagcagaagagcctggagtgcctgcaccccggcaccaagttcctgaacaacggcacctgcaccgccgagggcaagttcagcgtgagcctgaagcacggcaacaccgacagcgagggcatcgtggaggtgaagctggtggaccaggacaagaccatgttcatctgcaagagcagctggagcatgagagaggccaacgtggcctgcctggacctgggcttccagcagggcgccgacacccagagaagattcaagctgagcgacctgagcatcaacagcaccgagtgcctgcacgtgcactgcagaggcctggagaccagcctggccgagtgcaccttcaccaagagaagaaccatgggctaccaggacttcgccgacgtggtgtgctacacccagaaggccgacagccccatggacgacttcttccagtgcgtgaacggcaagtacatcagccagatgaaggcctgcgacggcatcaacgactgcggcgaccagagcgacgagctgtgctgcaaggcctgccagggcaagggcttccactgcaagagcggcgtgtgcatccccagccagtaccagtgcaacggcgaggtggactgcatcaccggcgaggacgaggtgggctgcgccgccttcgccgagctgtgcatcgaggagaccgagatcctgaccgccgacatggacgccgagagaagaagaatcaagagcctgctgcccaagctgagctgcggcgtgaagaacagaatgcacatcagaagaaagagatag

SEQ ID NO: 77537 - DNA, 1134 bp, synthetic construct
  misc_feature 1..1134: note = Description of Artificial Sequence: Synthetic coding sequence
  source 1..1134: mol_type = other DNA
atgaagctgctgcacgtgttcctgctgttcctgtgcttccacctgagattctgcaaggtgacctacaccagccaggaggacctggtggagaagaagtgcctggccaagaagtacacccacctgagctgcgacaaggtgttctgccagccctggcagagatgcatcgagggcacctgcgtgtgcaagctgccctaccagtgccccaagaacggcaccgccgtgtgcgccaccaacagaagaagcttccccacctactgccagcagaagagcctggagtgcctgcaccccggcaccaagttcctgaacaacggcacctgcaccgccgagggcaagttcagcgtgagcctgaagcacggcaacaccgacagcgagggcatcgtggaggtgaagctggtggaccaggacaagaccatgttcatctgcaagagcagctggagcatgagagaggccaacgtggcctgcctggacctgggcttccagcagggcgccgacacccagagaagattcaagctgagcgacctgagcatcaacagcaccgagtgcctgcacgtgcactgcagaggcctggagaccagcctggccgagtgcaccttcaccaagagaagaaccatgggctaccaggacttcgccgacgtggtgtgctacacccagaaggccgacagccccatggacgacttcttccagtgcgtgaacggcaagtacatcagccagatgaaggcctgcgacggcatcaacgactgcggcgaccagagcgacgagctgtgctgcaaggcctgccagggcaagggcttccactgcaagagcggcgtgtgcatccccagccagtaccagtgcaacggcgaggtggactgcatcaccggcgaggacgaggtgggctgcgccggcttcgccagcgtgacccaggaggagaccgagatcctgaccgccgacatggacgccgagagaagaagaatcaagagcctgctgcccaagctgagctgcggcgtgaagaacagaatgcacatcagaagaaagagaatcgtgggcggcaagagagcccagctgggcaagatgaagcagatcagcctggacatcttcaagggcctgcacagagtgtacgccatcctggagttctgctgcatcatcctgaagtag

SEQ ID NO: 77538 - DNA, 405 bp, synthetic construct
  misc_feature 1..405: note = Description of Artificial Sequence: Synthetic coding sequence
  source 1..405: mol_type = other DNA
atggagttcgtgatgaagcaggccctgggcggcgccaccaaggacatgggcaagatgctgggcggcgacgaggagaaggaccccgacgccgccaagaaggaggaggagagacaggaggccctgagacaggccgaggaggagagaaaggccaagtacgccaagatggaggccgagagagaggccgtgagacagggcatcagagacaagtacggcatcaagaagaaggaggagagagaggccgaggcccaggccgccatggaggccaacagcgagggcagcctgaccagacccaagaaggccatcccccccggctgcggcgacgaggtggaggaggaggacgagagcatcctggacaccgtgatcaagtacctgcccggccccctgcaggacatgctgaagaagtag

SEQ ID NO: 77539 - DNA, 405 bp, synthetic construct
  misc_feature 1..405: note = Description of Artificial Sequence: Synthetic coding sequence
  source 1..405: mol_type = other DNA
atggacttcgtgatgaagcaggccctgggcggcgccaccaaggacatgggcaagatgctgggcggcgaggaggagaaggaccccgacgcccagaagaaggaggaggagagacaggaggccctgagacagcaggaggaggagagaaaggccaagcacgccagaatggaggccgagagagagaaggtgagacagcagatcagagacaagtacggcctgaagaagaaggaggagaaggaggccgaggagaaggccgccctggagcagccctgcgagggcagcctgaccagacccaagaaggccatccccgccggctgcggcgacgaggaggaggaggaggaggagagcatcctggacaccgtgctgaagtacctgcccggccccctgcaggacatgttcaagaagtag

SEQ ID NO: 77540 - DNA, 405 bp, synthetic construct; identical to SEQ ID NO: 77539
  misc_feature 1..405: note = Description of Artificial Sequence: Synthetic coding sequence
  source 1..405: mol_type = other DNA

SEQ ID NO: 77541 - DNA, 555 bp, synthetic construct
  misc_feature 1..555: note = Description of Artificial Sequence: Synthetic coding sequence
  source 1..555: mol_type = other DNA
atggacttcgtgatgaagcaggccctgggcggcgccaccaaggacatgggcaagatgctgggcggcgaggaggagaaggaccccgacgcccagaagaaggaggaggagagacaggaggccctgagacagcaggaggaggagagaaaggccaagcacgccagaatggaggccgagagagagaaggtgagacagcagatcagagacaagtacggcctgaagaagaaggaggagaaggaggccgaggagaaggccgccctgagaggcagaggcggcggcggcagaggcgagcaccccggccacggcgcccagatccccgccagagccgccgccggccacgtgcaggaggtgaccagaccccccgcccccgcctacagcacctgctactacttcttcctggtgctgagcttcctgttcatcagactgagcctgaacagcgagggcgagaacctgagctggcccctgcccctgttccccggccagggcctgctgcccctgagcagccccagccacctgcccagcagccagggcatccacctgcaccccacccccaagtag

SEQ ID NO: 77542 - DNA, 234 bp, synthetic construct
  misc_feature 1..234: note = Description of Artificial Sequence: Synthetic coding sequence
  source 1..234: mol_type = other DNA
atggacttcgtgatgaagcaggccctgggcggcgccaccaaggacatgggcaagatgctgggcggcgaggaggagaaggaccccgacgcccagaagaaggaggaggagagacaggaggccctgagacagcaggaggaggagagaaaggccaagcacgccagaatggaggccgagagagagaaggtgagacagcagatcagagacaagtacggcctgaagaagaaggaggagtag

SEQ ID NO: 77543 - DNA, 336 bp, synthetic construct
  misc_feature 1..336: note = Description of Artificial Sequence: Synthetic coding sequence
  source 1..336: mol_type = other DNA
atggacttcgtgatgaagcaggccctgggcggcgccaccaaggacatgggcaagatgctgggcggcgaggaggagaaggaccccgacgcccagaagaaggaggaggagagacaggaggccctgagacagcaggaggaggagagaaaggccaagcacgccagaatggaggccgagagagagaaggtgagacagcagatcagagacaagtacggcctgaagaagaaggaggagaaggaggccgaggagaaggccgccctggagcagccctgcgagggcagcctgaccagacccaagaaggccatccccgccggctgcggcgacgaggaggaggagtag

SEQ ID NO: 77544 - DNA, 360 bp, synthetic construct
  misc_feature 1..360: note = Description of Artificial Sequence: Synthetic coding sequence
  source 1..360: mol_type = other DNA
atggacttcgtgatgaagcaggccctgggcggcgccaccaaggacatgggcaagatgctgggcggcgaggaggagaaggaccccgacgcccagaagaaggaggaggagagacaggaggccctgagacagcaggaggaggagagaaaggccaagcacgccagaatggaggccgagagagagaaggtgagacagcagatcagagacaagtacggcctgaagaagaaggaggagaaggaggccgaggagaaggccgccctggagcagccctgcgagggcagcctgaccagacccaagaaggccatccccgccggctgcggcgacgaggaggaggaggaggaggagagcatcctggacacctag

SEQ ID NO: 77545 - DNA, 114 bp, synthetic construct
  misc_feature 1..114: note = Description of Artificial Sequence: Synthetic coding sequence
  source 1..114: mol_type = other DNA
atggacttcgtgatgaagcaggccctgggcggcgccaccaaggacatgggcaagatgctgggcggcgaggaggagaaggaccccgacgcccagaagaaggaggaggagagatag

SEQ ID NO: 77546 - DNA, 405 bp, synthetic construct; identical to SEQ ID NO: 77539
  misc_feature 1..405: note = Description of Artificial Sequence: Synthetic coding sequence
  source 1..405: mol_type = other DNA

SEQ ID NO: 77547 - DNA, 21 bp, synthetic construct
  misc_feature 1..21: note = Description of Artificial Sequence: Synthetic coding sequence
  source 1..21: mol_type = other DNA
atggacttcgtgatgaagtag

SEQ ID NO: 77548 - DNA, 2943 bp, synthetic construct
  misc_feature 1..2943: note = Description of Artificial Sequence: Synthetic coding sequence
  source 1..2943: mol_type = other DNA
atggccaccgccgccaccagccccgccctgaagagactggacctgagagaccccgccgccctgttcgagacccacggcgccgaggagatcagaggcctggagagacaggtgagagccgagatcgagcacaagaaggaggagctgagacagatggtgggcgagagatacagagacctgatcgaggccgccgacaccatcggccagatgagaagatgcgccgtgggcctggtggacgccgtgaaggccaccgaccagtactgcgccagactgagacaggccggcagcgccgcccccagaccccccagagcccagcagccccagcagcccagccaggagaagttctacagcatggccgcccagatcaagctgctgctggagatccccgagaagatctggagcagcatggaggccagccagtgcctgcacgccacccagctgtacctgctgtgctgccacctgcacagcctgctgcagctggacagcagcagcagcagatacagccccgtgctgagcagattccccatcctgatcagacaggtggccgccgccagccacttcagaagcaccatcctgcacgagagcaagatgctgctgaagtgccagggcgtgagcgaccaggccgtggccgaggccctgtgcagcatcatgctgctggaggagagcagccccagacaggccctgaccgacttcctgctggccagaaaggccaccatccagaagctgctgaaccagccccaccacggcgccggcatcaaggcccagatctgcagcctggtggagctgctggccaccaccctgaagcaggcccacgccctgttctacaccctgcccgagggcctgctgcccgaccccgccctgccctgcggcctgctgttcagcaccctggagaccatcaccggccagcaccccgccggcaagggcaccggcgtgctgcaggaggagatgaagctgtgcagctggttcaagcacctgcccgccagcatcgtggagttccagcccaccctgagaaccctggcccaccccatcagccaggagtacctgaaggacaccctgcagaagtggatccacatgtgcaacgaggacatcaagaacggcatcaccaacctgctgatgtacgtgaagagcatgaagggcctggccggcatcagagacgccatgtgggagctgctgaccaacgagagcaccaaccacagctgggacgtgctgtgcagaagactgctggagaagcccctgctgttctgggaggacatgatgcagcagctgttcctggacagactgcagaccctgaccaaggagggcttcgacagcatcagcagcagcagcaaggagctgctggtgagcgccctgcaggagctggagagcagcaccagcaacagccccagcaacaagcacatccacttcgagtacaacatgagcctgttcctgtggagcgagagccccaacgacctgcccagcgacgccgcctgggtgagcgtggccaacagaggccagttcgccagcagcggcctgagcatgaaggcccaggccatcagcccctgcgtgcagaacttctgcagcgccctggacagcaagctgaaggtgaagctggacgacctgctggcctacctgcccagcgacgacagcagcctgcccaaggacgtgagccccacccaggccaagagcagcgccttcgacagatacgccgacgccggcaccgtgcaggagatgctgagaacccagagcgtggcctgcatcaagcacatcgtggactgcatcagagccgagctgcagagcatcgaggagggcgtgcagggccagcaggacgccctgaacagcgccaagctgcacagcgtgctgttcatggccagactgtgccagagcctgggcgagctgtgcccccacctgaagcagtgcatcctgggcaagagcgagagcagcgagaagcccgccagagagttcagagccctgagaaagcagggcaaggtgaagacccaggagatcatccccacccaggccaagtggcaggaggtgaaggaggtgctgctgcagcagagcgtgatgggctaccaggtgtggagcagcgccgtggtgaaggtgctgatccacggcttcacccagagcctgctgctggacgacgccggcagcgtgctggccaccgccaccagctgggacgagctggagatccaggaggaggccgagagcggcagcagcgtgaccagcaagatcagactgcccgcccagcccagctggtacgtgcagagcttcctgttcagcctgtgccaggagatcaacagagtgggcggccacgccctgcccaaggtgaccctgcaggagatgctgaagagctgcatggtgcaggtggtggccgcctacgagaagctgagcgaggagaagcagatcaagaaggagggcgccttccccgtgacccagaacagagccctgcagctgctgtacgacctgagatacctgaacatcgtgctgaccgccaagggcgacgaggtgaagagcggcagaagcaagcccgacagcagaatcgagaaggtgaccgaccacctggaggccctgatcgaccccttcgacctggacgtgttcaccccccacctgaacagcaacctgcacagactggtgcagagaaccagcgtgctgttcggcctggtgaccggcaccgagaaccagctggcccccagaagcagcaccttcaacagccaggagccccacaacatcctgcccctggccagcagccagatcagattcggcctgctgcccctgagcatgaccagcaccagaaaggccaagagcaccagaaacatcgagaccaaggcccaggtggtgccccccgccagaagcaccgccggcgaccccaccgtgcccggcagcctgttcagacagctggtgagcgaggaggacaacaccagcgcccccagcctgttcaagctgggctggctgagcagcatgaccaagtag

SEQ ID NO: 77549 - DNA, 2823 bp, synthetic construct
  misc_feature 1..2823: note = Description of Artificial Sequence: Synthetic coding sequence
  source 1..2823: mol_type = other DNA
atggccaccgccgccaccagccccgccctgaagagactggacctgagagaccccgccgccctgttcgagacccacggcgccgaggagatcagaggcctggagagacaggtgagagccgagatcgagcacaagaaggaggagctgagacagatggtgggcgagagatacagagacctgatcgaggccgccgacaccatcggccagatgagaagatgcgccgtgggcctggtggacgccgtgaaggccaccgaccagtactgcgccagactgagacaggccggcagcgccgcccccagaccccccagagcccagcagccccagcagcccagccaggagaagttctacagcatggccgcccagatcaagctgctgctggagatccccgagaagatctggagcagcatggaggccagccagtgcctgcacgccacccagctgtacctgctgtgctgccacctgcacagcctgctgcagctggacagcagcagcagcagatacagccccgtgctgagcagattccccatcctgatcagacaggtggccgccgccagccacttcagaagcaccatcctgcacgagagcaagatgctgctgaagtgccagggcgtgagcgaccaggccgtggccgaggccctgtgcagcatcatgctgctggaggagagcagccccagacaggccctgaccgacttcctgctggccagaaaggccaccatccagaagctgctgaaccagccccaccacggcgccggcatcaaggcccagatctgcagcctggtggagctgctggccaccaccctgaagcaggcccacgccctgttctacaccctgcccgagggcctgctgcccgaccccgccctgccctgcggcctgctgttcagcaccctggagaccatcaccggccagcaccccgccggcaagggcaccggcgtgctgcaggaggagatgaagctgtgcagctggttcaagcacctgcccgccagcatcgtggagttccagcccaccctgagaaccctggcccaccccatcagccaggagtacctgaaggacaccctgcagaagtggatccacatgtgcaacgaggacatcaagaacggcatcaccaacctgctgatgtacgtgaagagcatgaagggcctggccggcatcagagacgccatgtgggagctgctgaccaacgagagcaccaaccacagctgggacgtgctgtgcagaagactgctggagaagcccctgctgttctgggaggacatgatgcagcagctgttcctggacagactgcagaccctgaccaaggagggcttcgacagcatcagcagcagcagcaaggagctgctggtgagcgccctgcaggagctggagagcagcaccagcaacagccccagcaacaagcacatccacttcgagtacaacatgagcctgttcctgtggagcgagagccccaacgacctgcccagcgacgccgcctgggtgagcgtggccaacagaggccagttcgccagcagcggcctgagcatgaaggcccaggccatcagcccctgcgtgcagaacttctgcagcgccctggacagcaagctgaaggtgaagctggacgacctgctggcctacctgcccagcgacgacagcagcctgcccaaggacgtgagccccacccaggccaagagcagcgccttcgacagatacgccgacgccggcaccgtgcaggagatgctgagaacccagagcgtggcctgcatcaagcacatcgtggactgcatcagagccgagctgcagagcatcgaggagggcgtgcagggccagcaggacgccctgaacagcgccaagctgcacagcgtgctgttcatggccagactgtgccagagcctgggcgagctgtgcccccacctgaagcagtgcatcctgggcaagagcgagagcagcgagaagcccgccagagagttcagagccctgagaaagcagggcaaggtgaagacccaggagatcatccccacccaggccaagtggcaggaggtgaaggaggtgctgctgcagcagagcgtgatgggctaccaggtgtggagcagcgccgtggtgaaggtgctgatccacggcttcacccagagcctgctgctggacgacgccggcagcgtgctggccaccgccaccagctgggacgagctggagatccaggaggaggccgagagcggcagcagcgtgaccagcaagatcagactgcccgcccagcccagctggtacgtgcagagcttcctgttcagcctgtgccaggagatcaacagagtgggcggccacgccctgcccaaggtgaccctgcaggagatgctgaagagctgcatggtgcaggtggtggccgcctacgagaagctgagcgaggagaagcagatcaagaaggagggcgccttccccgtgacccagaacagagccctgcagctgctgtacgacctgagatacctgaacatcgtgctgaccgccaagggcgacgaggtgaagagcggcagaagcaagcccgacagcagaatcgagaaggtgaccgaccacctggaggccctgatcgaccccttcgacctggacgtgttcaccccccacctgaacagcaacctgcacagactggtgcagagaaccagcgtgctgttcggcctggtgaccggcaccgagaaccagctggcccccagaagcagcaccttcaacagccaggagccccacaacatcctgcccctggccagcagccagatcagattcggcctgctgcccctgagcatgaccagcaccagaaaggccaagagcaccagaaacatcgagaccaaggcccagtacgacgccaactgctag

SEQ ID NO: 77550 - DNA, 2214 bp, synthetic construct
  misc_feature 1..2214: note = Description of Artificial Sequence: Synthetic coding sequence
  source 1..2214: mol_type = other DNA
atggagaagagcagaatgaacctgcccaagggccccgacaccctgtgcttcgacaaggacgagttcatgaaggaggacttcgacgtggaccacttcgtgagcgactgcagaaagagagtgcagctggaggagctgagagacgacctggagctgtactacaagctgctgaagaccgccatggtggagctgatcaacaaggactacgccgacttcgtgaacctgagcaccaacctggtgggcatggacaaggccctgaaccagctgagcgtgcccctgggccagctgagagaggaggtgctgagcctgagaagcagcgtgagcgagggcatcagagccgtggacgagagaatgagcaagcaggaggacatcagaaagaagaagatgtgcgtgctgagactgatccaggtgatcagaagcgtggagaagatcgagaagatcctgaacagccagagcagcaaggagaccagcgccctggaggccagcagccccctgctgaccggccagatcctggagagaatcgccaccgagttcaaccagctgcagttccacgccgtgcagagcaagggcatgcccctgctggacaaggtgagacccagaatcgccggcatcaccgccatgctgcagcagagcctggagggcctgctgctggagggcctgcagaccagcgacgtggacatcatcagacactgcctgagaacctacgccaccatcgacaagaccagagacgccgaggccctggtgggccaggtgctggtgaagccctacatcgacgaggtgatcatcgagcagttcgtggagagccaccccaacggcctgcaggtgatgtacaacaagctgctggagttcgtgccccaccactgcagactgctgagagaggtgaccggcggcgccatcagcagcgagaagggcaacaccgtgcccggctacgacttcctggtgaacagcgtgtggccccagatcgtgcagggcctggaggagaagctgcccagcctgttcaaccccggcaaccccgacgccttccacgagaagtacaccatcagcatggacttcgtgagaagactggagagacagtgcggcagccaggccagcgtgaagagactgagagcccaccccgcctaccacagcttcaacaagaagtggaacctgcccgtgtacttccagatcagattcagagagatcgccggcagcctggaggccgccctgaccgacgtgctggaggacgcccccgccgagagcccctactgcctgctggccagccacagaacctggagcagcctgagaagatgctggagcgacgagatgttcctgcccctgctggtgcacagactgtggagactgaccctgcagatcctggccagatacagcgtgttcgtgaacgagctgagcctgagacccatcagcaacgagagccccaaggagatcaagaagcccctggtgaccggcagcaaggagcccagcatcacccagggcaacaccgaggaccagggcagcggccccagcgagaccaagcccgtggtgagcatcagcagaacccagctggtgtacgtggtggccgacctggacaagctgcaggagcagctgcccgagctgctggagatcatcaagcccaagctggagatgatcggcttcaagaacttcagcagcatcagcgccctggaggacagccagagcagcttcagcgcctgcgtgcccagcctgagcagcaagatcatccaggacctgagcgacagctgcttcggcttcctgaagagcgccctggaggtgcccagactgtacagaagaaccaacaaggaggtgcccaccaccgccagcagctacgtggacagcgccctgaagcccctgttccagctgcagagcggccacaaggacaagctgaagcaggccatcatccagcagtggctggagggcaccctgagcgagagcacccacaagtactacgagaccgtgagcgacgtgctgaacagcgtgaagaagatggaggagagcctgaagagactgaagcaggccagaaagaccacccccgccaaccccgtgggccccagcggcggcatgagcgacgacgacaagatcagactgcagctggccctggacgtggagtacctgggcgagcagatccagaagctgggcctgcaggccagcgacatcaagagcttcagcgccctggccgagctggtggccgccgccaaggaccaggccaccgccgagcagccctag

SEQ ID NO: 77551 - DNA, 2217 bp, synthetic construct
  misc_feature 1..2217: note = Description of Artificial Sequence: Synthetic coding sequence
  source 1..2217: mol_type = other DNA
atggagaagagcagaatgaacctgcccaagggccccgacaccctgtgcttcgacaaggacgagttcatgaaggaggacttcgacgtggaccacttcgtgagcgactgcagaaagagagtgcagctggaggagctgagagacgacctggagctgtactacaagctgctgaagaccgccatggtggagctgatcaacaaggactacgccgacttcgtgaacctgagcaccaacctggtgggcatggacaaggccctgaaccagctgagcgtgcccctgggccagctgagagaggaggtgctgagcctgagaagcagcgtgagcgagggcatcagagccgtggacgagagaatgagcaagcaggaggacatcagaaagaagaagatgtgcgtgctgagactgatccaggtgatcagaagcgtggagaagatcgagaagatcctgaacagccagagcagcaaggagaccagcgccctggaggccagcagccccctgctgaccggccagatcctggagagaatcgccaccgagttcaaccagctgcagttccacgccgtgcagagcaagggcatgcccctgctggacaaggtgagacccagaatcgccggcatcaccgccatgctgcagcagagcctggagggcctgctgctggagggcctgcagaccagcgacgtggacatcatcagacactgcctgagaacctacgccaccatcgacaagaccagagacgccgaggccctggtgggccaggtgctggtgaagccctacatcgacgaggtgatcatcgagcagttcgtggagagccaccccaacggcctgcaggtgatgtacaacaagctgctggagttcgtgccccaccactgcagactgctgagagaggtgaccggcggcgccatcagcagcgagaagggcaacaccgtgcccggctacgacttcctggtgaacagcgtgtggccccagatcgtgcagggcctggaggagaagctgcccagcctgttcaaccccggcaaccccgacgccttccacgagaagtacaccatcagcatggacttcgtgagaagactggagagacagtgcggcagccaggccagcgtgaagagactgagagcccaccccgcctaccacagcttcaacaagaagtggaacctgcccgtgtacttccagatcagattcagagagatcgccggcagcctggaggccgccctgaccgacgtgctggaggacgcccccgccgagagcccctactgcctgctggccagccacagaacctggagcagcctgagaagatgctggagcgacgagatgttcctgcccctgctggtgcacagactgtggagactgaccctgcagatcctggccagatacagcgtgttcgtgaacgagctgagcctgagacccatcagcaacgagagccccaaggagatcaagaagcccctggtgaccggcagcaaggagcccagcatcacccagggcaacaccgaggaccagggcagcggccccagcgagaccaagcccgtggtgagcatcagcagaacccagctggtgtacgtggtggccgacctggacaagctgcaggagcagctgcccgagctgctggagatcatcaagcccaagctggagatgatcggcttcaagaacttcagcagcatcagcgccgccctggaggacagccagagcagcttcagcgcctgcgtgcccagcctgagcagcaagatcatccaggacctgagcgacagctgcttcggcttcctgaagagcgccctggaggtgcccagactgtacagaagaaccaacaaggaggtgcccaccaccgccagcagctacgtggacagcgccctgaagcccctgttccagctgcagagcggccacaaggacaagctgaagcaggccatcatccagcagtggctggagggcaccctgagcgagagcacccacaagtactacgagaccgtgagcgacgtgctgaacagcgtgaagaagatggaggagagcctgaagagactgaagcaggccagaaagaccacccccgccaaccccgtgggccccagcggcggcatgagcgacgacgacaagatcagactgcagctggccctggacgtggagtacctgggcgagcagatccagaagctgggcctgcaggccagcgacatcaagagcttcagcgccctggccgagctggtggccgccgccaaggaccaggccaccgccgagcagccctag

SEQ ID NO: 77552 - DNA, 2040 bp, synthetic construct
  misc_feature 1..2040: note = Description of Artificial Sequence: Synthetic coding sequence
  source 1..2040: mol_type = other DNA
atggtggagctgatcaacaaggactacgccgacttcgtgaacctgagcaccaacctggtgggcatggacaaggccctgaaccagctgagcgtgcccctgggccagctgagagaggaggtgctgagcctgagaagcagcgtgagcgagggcatcagagccgtggacgagagaatgagcaagcaggaggacatcagaaagaagaagatgtgcgtgctgagactgatccaggtgatcagaagcgtggagaagatcgagaagatcctgaacagccagagcagcaaggagaccagcgccctggaggccagcagccccctgctgaccggccagatcctggagagaatcgccaccgagttcaaccagctgcagttccacgccgtgcagagcaagggcatgcccctgctggacaaggtgagacccagaatcgccggcatcaccgccatgctgcagcagagcctggagggcctgctgctggagggcctgcagaccagcgacgtggacatcatcagacactgcctgagaacctacgccaccatcgacaagaccagagacgccgaggccctggtgggccaggtgctggtgaagccctacatcgacgaggtgatcatcgagcagttcgtggagagccaccccaacggcctgcaggtgatgtacaacaagctgctggagttcgtgccccaccactgcagactgctgagagaggtgaccggcggcgccatcagcagcgagaagggcaacaccgtgcccggctacgacttcctggtgaacagcgtgtggccccagatcgtgcagggcctggaggagaagctgcccagcctgttcaaccccggcaaccccgacgccttccacgagaagtacaccatcagcatggacttcgtgagaagactggagagacagtgcggcagccaggccagcgtgaagagactgagagcccaccccgcctaccacagcttcaacaagaagtggaacctgcccgtgtacttccagatcagattcagagagatcgccggcagcctggaggccgccctgaccgacgtgctggaggacgcccccgccgagagcccctactgcctgctggccagccacagaacctggagcagcctgagaagatgctggagcgacgagatgttcctgcccctgctggtgcacagactgtggagactgaccctgcagatcctggccagatacagcgtgttcgtgaacgagctgagcctgagacccatcagcaacgagagccccaaggagatcaagaagcccctggtgaccggcagcaaggagcccagcatcacccagggcaacaccgaggaccagggcagcggccccagcgagaccaagcccgtggtgagcatcagcagaacccagctggtgtacgtggtggccgacctggacaagctgcaggagcagctgcccgagctgctggagatcatcaagcccaagctggagatgatcggcttcaagaacttcagcagcatcagcgccgccctggaggacagccagagcagcttcagcgcctgcgtgcccagcctgagcagcaagatcatccaggacctgagcgacagctgcttcggcttcctgaagagcgccctggaggtgcccagactgtacagaagaaccaacaaggaggtgcccaccaccgccagcagctacgtggacagcgccctgaagcccctgttccagctgcagagcggccacaaggacaagctgaagcaggccatcatccagcagtggctggagggcaccctgagcgagagcacccacaagtactacgagaccgtgagcgacgtgctgaacagcgtgaagaagatggaggagagcctgaagagactgaagcaggccagaaagaccacccccgccaaccccgtgggccccagcggcggcatgagcgacgacgacaagatcagactgcagctggccctggacgtggagtacctgggcgagcagatccagaagctgggcctgcaggccagcgacatcaagagcttcagcgccctggccgagctggtggccgccgccaaggaccaggccaccgccgagcagccctag

SEQ ID NO: 77553 - DNA, 1869 bp, synthetic construct
  misc_feature 1..1869: note = Description of Artificial Sequence: Synthetic coding sequence
  source 1..1869: mol_type = other DNA
atgagcaagcaggaggacatcagaaagaagaagatgtgcgtgctgagactgatccaggtgatcagaagcgtggagaagatcgagaagatcctgaacagccagagcagcaaggagaccagcgccctggaggccagcagccccctgctgaccggccagatcctggagagaatcgccaccgagttcaaccagctgcagttccacgccgtgcagagcaagggcatgcccctgctggacaaggtgagacccagaatcgccggcatcaccgccatgctgcagcagagcctggagggcctgctgctggagggcctgcagaccagcgacgtggacatcatcagacactgcctgagaacctacgccaccatcgacaagaccagagacgccgaggccctggtgggccaggtgctggtgaagccctacatcgacgaggtgatcatcgagcagttcgtggagagccaccccaacggcctgcaggtgatgtacaacaagctgctggagttcgtgccccaccactgcagactgctgagagaggtgaccggcggcgccatcagcagcgagaagggcaacaccgtgcccggctacgacttcctggtgaacagcgtgtggccccagatcgtgcagggcctggaggagaagctgcccagcctgttcaaccccggcaaccccgacgccttccacgagaagtacaccatcagcatggacttcgtgagaagactggagagacagtgcggcagccaggccagcgtgaagagactgagagcccaccccgcctaccacagcttcaacaagaagtggaacctgcccgtgtacttccagatcagattcagagagatcgccggcagcctggaggccgccctgaccgacgtgctggaggacgcccccgccgagagcccctactgcctgctggccagccacagaacctggagcagcctgagaagatgctggagcgacgagatgttcctgcccctgctggtgcacagactgtggagactgaccctgcagatcctggccagatacagcgtgttcgtgaacgagctgagcctgagacccatcagcaacgagagccccaaggagatcaagaagcccctggtgaccggcagcaaggagcccagcatcacccagggcaacaccgaggaccagggcagcggccccagcgagaccaagcccgtggtgagcatcagcagaacccagctggtgtacgtggtggccgacctggacaagctgcaggagcagctgcccgagctgctggagatcatcaagcccaagctggagatgatcggcttcaagaacttcagcagcatcagcgccgccctggaggacagccagagcagcttcagcgcctgcgtgcccagcctgagcagcaagatcatccaggacctgagcgacagctgcttcggcttcctgaagagcgccctggaggtgcccagactgtacagaagaaccaacaaggaggtgcccaccaccgccagcagctacgtggacagcgccctgaagcccctgttccagctgcagagcggccacaaggacaagctgaagcaggccatcatccagcagtggctggagggcaccctgagcgagagcacccacaagtactacgagaccgtgagcgacgtgctgaacagcgtgaagaagatggaggagagcctgaagagactgaagcaggccagaaagaccacccccgccaaccccgtgggccccagcggcggcatgagcgacgacgacaagatcagactgcagctggccctggacgtggagtacctgggcgagcagatccagaagctgggcctgcaggccagcgacatcaagagcttcagcgccctggccgagctggtggccgccgccaaggaccaggccaccgccgagcagccctag

SEQ ID NO: 77554 - DNA, 1284 bp, synthetic construct
  misc_feature 1..1284: note = Description of Artificial Sequence: Synthetic coding sequence
  source 1..1284: mol_type = other DNA
atgggcttcgccatggaggacaccgaggacatcagccagaaccacttcggccacctgtgcatcttcaagtggggccactggaagaaggacctgaagtacaccatcagcatggacttcgtgagaagactggagagacagtgcggcagccaggccagcgtgaagagactgagagcccaccccgcctaccacagcttcaacaagaagtggaacctgcccgtgtacttccagatcagattcagagagatcgccggcagcctggaggccgccctgaccgacgtgctggaggacgcccccgccgagagcccctactgcctgctggccagccacagaacctggagcagcctgagaagatgctggagcgacgagatgttcctgcccctgctggtgcacagactgtggagactgaccctgcagatcctggccagatacagcgtgttcgtgaacgagctgagcctgagacccatcagcaacgagagccccaaggagatcaagaagcccctggtgaccggcagcaaggagcccagcatcacccagggcaacaccgaggaccagggcagcggccccagcgagaccaagcccgtggtgagcatcagcagaacccagctggtgtacgtggtggccgacctggacaagctgcaggagcagctgcccgagctgctggagatcatcaagcccaagctggagatgatcggcttcaagaacttcagcagcatcagcgccgccctggaggacagccagagcagcttcagcgcctgcgtgcccagcctgagcagcaagatcatccaggacctgagcgacagctgcttcggcttcctgaagagcgccctggaggtgcccagactgtacagaagaaccaacaaggaggtgcccaccaccgccagcagctacgtggacagcgccctgaagcccctgttccagctgcagagcggccacaaggacaagctgaagcaggccatcatccagcagtggctggagggcaccctgagcgagagcacccacaagtactacgagaccgtgagcgacgtgctgaacagcgtgaagaagatggaggagagcctgaagagactgaagcaggccagaaagaccacccccgccaaccccgtgggccccagcggcggcatgagcgacgacgacaagatcagactgcagctggccctggacgtggagtacctgggcgagcagatccagaagctgggcctgcaggccagcgacatcaagagcttcagcgccctggccgagctggtggccgccgccaaggaccaggccaccgccgagcagccctag

SEQ ID NO: 77555 - DNA, 2487 bp, synthetic construct
  misc_feature 1..2487: note = Description of Artificial Sequence: Synthetic coding sequence
  source 1..2487: mol_type = other DNA
atggccgaggccgccctgctgctgctgcccgaggccgccgccgagagagacgccagagagaagctggccctgtgggacagaagacccgacaccaccgcccccctgaccgacagacagaccgacagcgtgctggagctgaaggccgccgccgagaacctgcccgtgcccgccgagctgcccatcgaggacctgtgcagcctgaccagccagagcctgcccatcgagctgaccagcgtggtgcccgagagcaccgaggacatcctgctgaagggcttcaccagcctgggcatggaggaggagagaatcgagaccgcccagcagttcttcagctggttcgccaagctgcagacccagatggaccaggacgagggcaccaagtacagacagatgagagactacctgagcggcttccaggagcagtgcgacgccatcctgaacgacgtgaacagcgccctgcagcacctggagagcctgcagaagcagtacctgttcgtgagcaacaagaccggcaccctgcacgaggcctgcgagcagctgctgaaggagcagagcgagctggtggacctggccgagaacatccagcagaagctgagctacttcaacgagctggagaccatcaacaccaagctgaacagccccaccctgagcgtgaacagcgacggcttcatccccatgctggccaagctggacgactgcatcacctacatcagcagccaccccaacttcaaggactaccccatctacctgctgaagttcaagcagtgcctgagcaaggccctgcacctgatgaagacctacaccgtgaacaccctgcagaccctgaccagccagctgctgaagagagaccccagcagcgtgcccaacgccgacaacgccttcaccctgttctacgtgaagttcagagccgccgcccccaaggtgagaaccctgatcgagcagatcgagctgagaagcgagaagatccccgagtaccagcagctgctgaacgacatccaccagtgctacctggaccagagagagctgctgctgggccccagcatcgcctgcaccgtggccgagctgaccagccagaacaacagagaccactgcgccctggtgagaagcggctgcgccttcatggtgcacgtgtgccaggacgagcaccagctgtacaacgagttcttcaccaagcccaccagcaagctggacgagctgctggagaagctgtgcgtgagcctgtacgacgtgttcagacccctgatcatccacgtgatccacctggagaccctgagcgagctgtgcggcatcctgaagaacgaggtgctggaggaccacgtgcagaacaacgccgagcagctgggcgccttcgccgccggcgtgaagcagatgctggaggacgtgcaggagagactggtgtacagaacccacatctacatccagaccgacatcaccggctacaagcccgcccccggcgacctggcctaccccgacaagctggtgatgatggagcagatcgcccagagcctgaaggacgagcagaagaaggtgcccagcgaggccagcttcagcgacgtgcacctggaggagggcgagagcaacagcctgaccaagagcggcagcaccgagagcctgaaccccagaccccagaccaccatcagccccgccgacctgcacggcatgtggtaccccaccgtgagaagaaccctggtgtgcctgagcaagctgtacagatgcatcgacagagccgtgttccagggcctgagccaggaggccctgagcgcctgcatccagagcctgctgggcgccagcgagagcatcagcaagaacaagacccagatcgacggccagctgttcctgatcaagcacctgctgatcctgagagagcagatcgcccccttccacaccgagttcaccatcaaggagatcagcctggacctgaagaagaccagagacgccgccttcaagatcctgaaccccatgaccgtgcccagattcttcagactgaacagcaacaacgccctgatcgagttcctgctggagggcacccccgagatcagagagcactacctggacagcaagaaggacgtggacagacacctgaagagcgcctgcgagcagttcatccagcagcagaccaagctgttcgtggagcagctggaggagttcatgaccaaggtgagcgccctgaagaccatggccagccagggcggccccaagtacaccctgagccagcagccctgggcccagcccgccaaggtgaacgacctggccgccaccgcctacaagaccatcaagaccaagctgcccgtgaccctgagaagcatgagcctgtacctgagcaacaaggacaccgagttcatcctgttcaagcccgtgagaaacaacatccagcaggtgttccagaagttccacgccctgctgaaggaggagttcagccccgaggacatccagatcatcgcctgccccagcatggagcagctgagcctgctgctgctggtgagcaagtag

SEQ ID NO: 77556 - DNA, 2370 bp, synthetic construct
  misc_feature 1..2370: note = Description of Artificial Sequence: Synthetic coding sequence
  source 1..2370: mol_type = other DNA
atgggcaccaagatggccgacctggacagcccccccaagctgagcggcgtgcagcagcccagcgagggcgtgggcggcggcagatgcagcgagatcagcgccgagctgatcagaagcctgaccgagctgcaggagctggaggccgtgtacgagagactgtgcggcgaggagaaggtggtggagagagagctggacgccctgctggagcagcagaacaccatcgagagcaagatggtgaccctgcacagaatgggccccaacctgcagctgatcgagggcgacgccaagcagctggccggcatgatcaccttcacctgcaacctggccgagaacgtgagcagcaaggtgagacagctggacctggccaagaacagactgtaccaggccatccagagagccgacgacatcctggacctgaagttctgcatggacggcgtgcagaccgccctgagaagcgaggactacgagcaggccgccgcccacacccacagatacctgtgcctggacaagagcgtgatcgagctgagcagacagggcaaggagggcagcatgatcgacgccaacctgaagctgctgcaggaggccgagcagagactgaaggccatcgtggccgagaagttcgccatcgccaccaaggagggcgacctgccccaggtggagagattcttcaagatcttccccctgctgggcctgcacgaggagggcctgagaaagttcagcgagtacctgtgcaagcaggtggccagcaaggccgaggagaacctgctgatggtgctgggcaccgacatgagcgacagaagagccgccgtgatcttcgccgacaccctgaccctgctgttcgagggcatcgccagaatcgtggagacccaccagcccatcgtggagacctactacggccccggcagactgtacaccctgatcaagtacctgcaggtggagtgcgacagacaggtggagaaggtggtggacaagttcatcaagcagagagactaccaccagcagttcagacacgtgcagaacaacctgatgagaaacagcaccaccgagaagatcgagcccagagagctggaccccatcctgaccgaggtgaccctgatgaacgccagaagcgagctgtacctgagattcctgaagaagagaatcagcagcgacttcgaggtgggcgacagcatggccagcgaggaggtgaagcaggagcaccagaagtgcctggacaagctgctgaacaactgcctgctgagctgcaccatgcaggagctgatcggcctgtacgtgaccatggaggagtacttcatgagagagaccgtgaacaaggccgtggccctggacacctacgagaagggccagctgaccagcagcatggtggacgacgtgttctacatcgtgaagaagtgcatcggcagagccctgagcagcagcagcatcgactgcctgtgcgccatgatcaacctggccaccaccgagctggagagcgacttcagagacgtgctgtgcaacaagctgagaatgggcttccccgccaccaccttccaggacatccagagaggcgtgaccagcgccgtgaacatcatgcacagcagcctgcagcagggcaagttcgacaccaagggcatcgagagcaccgacgaggccaagatgagcttcctggtgaccctgaacaacgtggaggtgtgcagcgagaacatcagcaccctgaagaagaccctggagagcgactgcaccaagctgttcagccagggcatcggcggcgagcaggcccaggccaagttcgacagctgcctgagcgacctggccgccgtgagcaacaagttcagagacctgctgcaggagggcctgaccgagctgaacagcaccgccatcaagccccaggtgcagccctggatcaacagcttcttcagcgtgagccacaacatcgaggaggaggagttcaacgactacgaggccaacgacccctgggtgcagcagttcatcctgaacctggagcagcagatggccgagttcaaggccagcctgagccccgtgatctacgacagcctgaccggcctgatgaccagcctggtggccgtggagctggagaaggtggtgctgaagagcaccttcaacagactgggcggcctgcagttcgacaaggagctgagaagcctgatcgcctacctgaccaccgtgaccacctggaccatcagagacaagttcgccagactgagccagatggccaccatcctgaacctggagagagtgaccgagatcctggactactggggccccaacagcggccccctgacctggagactgacccccgccgaggtgagacaggtgctggccctgagaatcgacttcagaagcgaggacatcaagagactgagactgtag

SEQ ID NO: 77557 - DNA, 2295 bp, synthetic construct
  misc_feature 1..2295: note = Description of Artificial Sequence: Synthetic coding sequence
  source 1..2295: mol_type = other DNA
atggccgacctggacagcccccccaagctgagcggcgtgcagcagcccagcgagggcgtgggcggcggcagatgcagcgagatcagcgccgagctgatcagaagcctgaccgagctgcaggagctggaggccgtgtacgagagactgtgcggcgaggagaaggtggtggagagagagctggacgccctgctggagcagcagaacaccatcgagagcaagatggtgaccctgcacagaatgggccccaacctgcagctgatcgagggcgacgccaagcagctggccggcatgatcaccttcacctgcaacctggccgagaacgtgagcagcaaggtgagacagctggacctggccaagaacagactgtaccaggccatccagagagccgacgacatcctggacctgaagttctgcatggacggcgtgcagaccgccctgagaagcgaggactacgagcaggccgccgcccacacccacagatacctgtgcctggacaagagcgtgatcgagctgagcagacagggcaaggagggcagcatgatcgacgccaacctgaagctgctgcaggaggccgagcagagactgaaggccatcgtggccgagaagttcgccatcgccaccaaggagggcgacctgccccaggtggagagattcttcaagatcttccccctgctgggcctgcacgaggagggcctgagaaagttcagcgagtacctgtgcaagcaggtggccagcaaggccgaggagaacctgctgatggtgctgggcaccgacatgagcgacagaagagccgccgtgatcttcgccgacaccctgaccctgctgttcgagggcatcgccagaatcgtggagacccaccagcccatcgtggagacctactacggccccggcagactgtacaccctgatcaagtacctgcaggtggagtgcgacagacaggtggagaaggtggtggacaagttcatcaagcagagagactaccaccagcagttcagacacgtgcagaacaacctgatgagaaacagcaccaccgagaagatcgagcccagagagctggaccccatcctgaccgaggtgaccctgatgaacgccagaagcgagctgtacctgagattcctgaagaagagaatcagcagcgacttcgaggtgggcgacagcatggccagcgaggaggtgaagcaggagcaccagaagtgcctggacaagctgctgaacaactgcctgctgagctgcaccatgcaggagctgatcggcctgtacgtgaccatggaggagtacttcatgagagagaccgtgaacaaggccgtggccctggacacctacgagaagggccagctgaccagcagcatggtggacgacgtgttctacatcgtgaagaagtgcatcggcagagccctgagcagcagcagcatcgactgcctgtgcgccatgatcaacctggccaccaccgagctggagagcgacttcagagacgtgctgtgcaacaagctgagaatgggcttccccgccaccaccttccaggacatccagagaggcgtgaccagcgccgtgaacatcatgcacagcagcctgcagcagggcaagttcgacaccaagggcatcgagagcaccgacgaggccaagatgagcttcctgagcgactgcaccaagctgttcagccagggcatcggcggcgagcaggcccaggccaagttcgacagctgcctgagcgacctggccgccgtgagcaacaagttcagagacctgctgcaggagggcctgaccgagctgaacagcaccgccatcaagccccaggtgcagccctggatcaacagcttcttcagcgtgagccacaacatcgaggaggaggagttcaacgactacgaggccaacgacccctgggtgcagcagttcatcctgaacctggagcagcagatggccgagttcaaggccagcctgagccccgtgatctacgacagcctgaccggcctgatgaccagcctggtggccgtggagctggagaaggtggtgctgaagagcaccttcaacagactgggcggcctgcagttcgacaaggagctgagaagcctgatcgcctacctgaccaccgtgaccacctggaccatcagagacaagttcgccagactgagccagatggccaccatcctgaacctggagagagtgaccgagatcctggactactggggccccaacagcggccccctgacctggagactgacccccgccgaggtgagacaggtgctggccctgagaatcgacttcagaagcgaggacatcaagagactgagactgtag

SEQ ID NO: 77558 - DNA, 1014 bp, synthetic construct
  misc_feature 1..1014: note = Description of Artificial Sequence: Synthetic coding sequence
  source 1..1014: mol_type = other DNA
atggccgacctggacagcccccccaagctgagcggcgtgcagcagcccagcgagggcgtgggcggcggcagatgcagcgagatcagcgccgagctgatcagaagcctgaccgagctgcaggagctggaggccgtgtacgagagactgtgcggcgaggagaaggtggtggagagagagctggacgccctgctggagcagcagaacaccatcgagagcaagatggtgaccctgcacagaatgggccccaacctgcagctgatcgagggcgacgccaagcagctggccggcatgatcaccttcacctgcaacctggccgagaacgtgagcagcaaggtgagacagctggacctggccaagaacagactgtaccaggccatccagagagccgacgacatcctggacctgaagttctgcatggacggcgtgcagaccgccctgagaagcgaggactacgagcaggccgccgcccacacccacagatacctgtgcctggacaagagcgtgatcgagctgagcagacagggcaaggagggcagcatgatcgacgccaacctgaagctgctgcaggaggccgagcagagactgaaggccatcgtggccgagaagttcgccatcgccaccaaggagggcgacctgccccaggtggagagattcttcaagatcttccccctgctgggcctgcacgaggagggcctgagaaagttcagcgagtacctgtgcaagcaggtggccagcaaggccgaggagaacctgctgatggtgctgggcaccgacatgagcgacagaagagccgccgtgatcttcgccgacaccctgaccctgctgttcgagggcatcgccagaatcgtggagacccaccagcccatcgtggagacctactacggccccggcagactgtacaccctgatcaagtacctgcaggtggagtgcgacagacaggtggagaaggtggtggacaagttcatcaagcagagagactaccaccagcagaacttcgtgttcagcttcttctag

SEQ ID NO: 77559 - DNA, 1344 bp, synthetic construct
  misc_feature 1..1344: note = Description of Artificial Sequence: Synthetic coding sequence
  source 1..1344: mol_type = other DNA
atgagaaacagcaccaccgagaagatcgagcccagagagctggaccccatcctgaccgaggtgaccctgatgaacgccagaagcgagctgtacctgagattcctgaagaagagaatcagcagcgacttcgaggtgggcgacagcatggccagcgaggaggtgaagcaggagcaccagaagtgcctggacaagctgctgaacaactgcctgctgagctgcaccatgcaggagctgatcggcctgtacgtgaccatggaggagtacttcatgagagagaccgtgaacaaggccgtggccctggacacctacgagaagggccagctgaccagcagcatggtggacgacgtgttctacatcgtgaagaagtgcatcggcagagccctgagcagcagcagcatcgactgcctgtgcgccatgatcaacctggccaccaccgagctggagagcgacttcagagacgtgctgtgcaacaagctgagaatgggcttccccgccaccaccttccaggacatccagagaggcgtgaccagcgccgtgaacatcatgcacagcagcctgcagcagggcaagttcgacaccaagggcatcgagagcaccgacgaggccaagatgagcttcctggtgaccctgaacaacgtggaggtgtgcagcgagaacatcagcaccctgaagaagaccctggagagcgactgcaccaagctgttcagccagggcatcggcggcgagcaggcccaggccaagttcgacagctgcctgagcgacctggccgccgtgagcaacaagttcagagacctgctgcaggagggcctgaccgagctgaacagcaccgccatcaagccccaggtgcagccctggatcaacagcttcttcagcgtgagccacaacatcgaggaggaggagttcaacgactacgaggccaacgacccctgggtgcagcagttcatcctgaacctggagcagcagatggccgagttcaaggccagcctgagccccgtgatctacgacagcctgaccggcctgatgaccagcctggtggccgtggagctggagaaggtggtgctgaagagcaccttcaacagactgggcggcctgcagttcgacaaggagctgagaagcctgatcgcctacctgaccaccgtgaccacctggaccatcagagacaagttcgccagactgagccagatggccaccatcctgaacctggagagagtgaccgagatcctggactactggggccccaacagcggccccctgacctggagactgacccccgccgaggtgagacaggtgctggccctgagaatcgacttcagaagcgaggacatcaagagactgagactgtag

SEQ ID NO: 77560 - DNA, 2583 bp, synthetic construct
  misc_feature 1..2583: note = Description of Artificial Sequence: Synthetic coding sequence
  source 1..2583: mol_type = other DNA
atgggctgggtgggcggcagaagaagagacagcgccagcccccccggcagaagcagaagcgccgccgacgacatcaaccccgcccccgccaacatggagggcggcggcggcagcgtggccgtggccggcctgggcgccagaggcagcggcgccgccgccgccaccgtgagagagctgctgcaggacggctgctacagcgacttcctgaacgaggacttcgacgtgaagacctacaccagccagagcatccaccaggccgtgatcgccgagcagctggccaagctggcccagggcatcagccagctggacagagagctgcacctgcaggtggtggccagacacgaggacctgctggcccaggccaccggcatcgagagcctggagggcgtgctgcagatgatgcagaccagaatcggcgccctgcagggcgccgtggacagaatcaaggccaagatcgtggagccctacaacaagatcgtggccagaaccgcccagctggccagactgcaggtggcctgcgacctgctgagaagaatcatcagaatcctgaacctgagcaagagactgcagggccagctgcagggcggcagcagagagatcaccaaggccgcccagagcctgaacgagctggactacctgagccagggcatcgacctgagcggcatcgaggtgatcgagaacgacctgctgttcatcgccagagccagactggaggtggagaaccaggccaagagactgctggagcagggcctggagacccagaaccccacccaggtgggcaccgccctgcaggtgttctacaacctgggcaccctgaaggacaccatcaccagcgtggtggacggctactgcgccaccctggaggagaacatcaacagcgccctggacatcaaggtgctgacccagcccagccagagcgccgtgagaggcggccccggcagaagcaccatgcccacccccggcaacaccgccgccctgagagccagcttctggaccaacatggagaagctgatggaccacatctacgccgtgtgcggccaggtgcagcacctgcagaaggtgctggccaagaagagagaccccgtgagccacatctgcttcatcgaggagatcgtgaaggacggccagcccgagatcttctacaccttctggaacagcgtgacccaggccctgagcagccagttccacatggccaccaacagcagcatgttcctgaagcaggccttcgagggcgagtaccccaagctgctgagactgtacaacgacctgtggaagagactgcagcagtacagccagcacatccagggcaacttcaacgccagcggcaccaccgacctgtacgtggacctgcagcacatggaggacgacgcccaggacatcttcatccccaagaagcccgactacgaccccgagaaggccctgaaggacagcctgcagccctacgaggccgcctacctgagcaagagcctgagcagactgttcgaccccatcaacctggtgttcccccccggcggcagaaacccccccagcagcgacgagctggacggcatcatcaagaccatcgccagcgagctgaacgtggccgccgtggacaccaacctgaccctggccgtgagcaagaacgtggccaagaccatccagctgtacagcgtgaagagcgagcagctgctgagcacccagggcgacgccagccaggtgatcggccccctgaccgagggccagagaagaaacgtggccgtggtgaacagcctgtacaagctgcaccagagcgtgaccaaggtggtgagcagccagagcagcttccccctggccgccgagcagaccatcatcagcgccctgaaggccatccacgccctgatggagaacgccgtgcagcccctgctgaccagcgtgggcgacgccatcgaggccatcatcatcaccatgcaccaggaggacttcagcggcagcctgagcagcagcggcaagcccgacgtgccctgcagcctgtacatgaaggagctgcagggcttcatcgccagagtgatgagcgactacttcaagcacttcgagtgcctggacttcgtgttcgacaacaccgaggccatcgcccagagagccgtggagctgttcatcagacacgccagcctgatcagacccctgggcgagggcggcaagatgagactggccgccgacttcgcccagatggagctggccgtgggccccttctgcagaagagtgagcgacctgggcaagagctacagaatgctgagaagcttcagacccctgctgttccaggccagcgagcacgtggccagcagccccgccctgggcgacgtgatccccttcagcatcatcatccagttcctgttcaccagagcccccgccgagctgaagagccccttccagagagccgagtggagccacaccagattcagccagtggctggacgaccaccccagcgagaaggacagactgctgctgatcagaggcgccctggaggcctacgtgcagagcgtgagaagcagagagggcaaggagttcgcccccgtgtaccccatcatggtgcagctgctgcagaaggccatgagcgccctgcagtag

SEQ ID NO: 77561 - DNA, 2520 bp, synthetic construct
  misc_feature 1..2520: note = Description of Artificial Sequence: Synthetic coding sequence
  source 1..2520: mol_type = other DNA
atgggctgggtgggcggcagaagaagagacagcgccagcccccccggcagaagcagaagcgccgccgacgacatcaaccccgcccccgccaacatggagggcggcggcggcagcgtggccgtggccggcctgggcgccagaggcagcggcgccgccgccgccaccgtgagagagctgctgcaggacggctgctacagcgacttcctgaacgaggacttcgacgtgaagacctacaccagccagagcatccaccaggccgtgatcgccgagcagctggccaagctggcccagggcatcagccagctggacagagagctgcacctgcaggtggtggccagacacgaggacctgctggcccaggccaccggcatcgagagcctggagggcgtgctgcagatgatgcagaccagaatcggcgccctgcagggcgccgtggacagaatcaaggccaagatcgtggagccctacaacaagatcgtggccagaaccgcccagctggccagactgcaggtggcctgcgacctgctgagaagaatcatcagaatcctgaacctgagcaagagactgcagggccagctgcagggcggcagcagagagatcaccaaggccgcccagagcctgaacgagctggactacctgagccagggcatcgacctgagcggcatcgaggtgatcgagaacgacctgctgttcatcgccagagccagactggaggtggagaaccaggccaagagactgctggagcagggcctggagacccagaaccccacccaggtgggcaccgccctgcaggtgttctacaacctgggcaccctgaaggacaccatcaccagcgtggtggacggctactgcgccaccctggaggagaacatcaacagcgccctggacatcaaggtgctgacccagcccagccagagcgccgtgagaggcggccccggcagaagcaccatgcccacccccggcaacaccgccgccctgagagccagcttctggaccaacatggagaagctgatggaccacatctacgccgtgtgcggccaggtgcagcacctgcagaaggtgctggccaagaagagagaccccgtgagccacatctgcttcatcgaggagatcgtgaaggacggccagcccgagatcttctacaccttctggaacagcgtgacccaggccctgagcagccagttccacatggccaccaacagcagcatgttcctgaagcaggccttcgagggcgagtaccccaagctgctgagactgtacaacgacctgtggaagagactgcagcagtacagccagcacatccagggcaacttcaacgccagcggcaccaccgacctgtacgtggacctgcagcacatggaggacgacgcccaggacatcttcatccccaagaagcccgactacgaccccgagaaggccctgaaggacagcctgcagccctacgaggccgcctacctgagcaagagcctgagcagactgttcgaccccatcaacctggtgttcccccccggcggcagaaacccccccagcagcgacgagctggacggcatcatcaagaccatcgccagcgagctgaacgtggccgccgtggacaccaacctgaccctggccgtgagcaagaacgtggccaagaccatccagctgtacagcgtgaagagcgagcagctgctgagcacccagggcgacgccagccaggtgatcggccccctgaccgagggccagagaagaaacgtggccgtggtgaacagcctgtacaagctgcaccagagcgtgaccaaggccatccacgccctgatggagaacgccgtgcagcccctgctgaccagcgtgggcgacgccatcgaggccatcatcatcaccatgcaccaggaggacttcagcggcagcctgagcagcagcggcaagcccgacgtgccctgcagcctgtacatgaaggagctgcagggcttcatcgccagagtgatgagcgactacttcaagcacttcgagtgcctggacttcgtgttcgacaacaccgaggccatcgcccagagagccgtggagctgttcatcagacacgccagcctgatcagacccctgggcgagggcggcaagatgagactggccgccgacttcgcccagatggagctggccgtgggccccttctgcagaagagtgagcgacctgggcaagagctacagaatgctgagaagcttcagacccctgctgttccaggccagcgagcacgtggccagcagccccgccctgggcgacgtgatccccttcagcatcatcatccagttcctgttcaccagagcccccgccgagctgaagagccccttccagagagccgagtggagccacaccagattcagccagtggctggacgaccaccccagcgagaaggacagactgctgctgatcagaggcgccctggaggcctacgtgcagagcgtgagaagcagagagggcaaggagttcgcccccgtgtaccccatcatggtgcagctgctgcagaaggccatgagcgccctgcagtag

SEQ ID NO: 77562 - DNA, 2472 bp, synthetic construct
  misc_feature 1..2472: note = Description of Artificial Sequence: Synthetic coding sequence
  source 1..2472: mol_type = other DNA
atgggctgggtgggcggcagaagaagagacagcgccagcccccccggcagaagcagaagcgccgccgacgacatcaaccccgcccccgccaacatggagggcggcggcggcagcgtggccgtggccggcctgggcgccagaggcagcggcgccgccgccgccaccgtgagagagctgctgcaggacggctgctacagcgacttcctgaacgaggacttcgacgtgaagacctacaccagccagagcatccaccaggccgtgatcgccgagcagctggccaagctggcccagggcatcagccagctggacagagagctgcacctgcaggtggtggccagacacgaggacctgctggcccaggccaccggcatcgagagcctggagggcgtgctgcagatgatgcagaccagaatcggcgccctgcagggcgccgtggacagaatcaaggccaagatcgtggagccctacaacaagatcgtggccagaaccgcccagctggccagactgcaggtggcctgcgacctgctgagaagaatcatcagaatcctgaacctgagcaagagactgcagggccagctgcagggcggcagcagagagatcaccaaggccgcccagagcctgaacgagctggactacctgagccagggcatcgacctgagcggcatcgaggtgatcgagaacgacctgctgttcatcgccagagccagactggaggtggagaaccaggccaagagactgctggagcagggcctggagacccagaaccccacccaggtgggcaccgccctgcaggtgttctacaacctgggcaccctgaaggacaccatcaccagcgtggtggacggctactgcgccaccctggaggagaacatcaacagcgccctggacatcaaggtgctgacccagcccagccagagcgccgtgagaggcggccccggcagaagcaccatgcccacccccggcaacaccgccgccctgagagccagcttctggaccaacatggagaagctgatggaccacatctacgccgtgtgcggccaggtgcagcacctgcagaaggtgctggccaagaagagagaccccgtgagccacatctgcttcatcgaggagatcgtgaaggacggccagcccgagatcttctacaccttctggaacagcgtgacccaggccctgagcagccagttccacatggccaccaacagcagcatgttcctgaagcaggccttcgagggcgagtaccccaagctgctgagactgtacaacgacctgtggaagagactgcagcagtacagccagcacatccagggcaacttcaacgccagcggcaccaccgacctgtacgtggacctgcagcacatggaggacgacgcccaggacatcttcatccccaagaagcccgactacgaccccgagaaggccctgaaggacagcctgcagccctacgaggccgcctacctgagcaagagcctgagcagactgttcgaccccatcaacctggtgttcccccccggcggcagaaacccccccagcagcgacgagctggacggcatcatcaagaccatcgccagcgagctgaacgtggccgccgtggacaccaacctgaccctggccgtgagcaagaacgtggccaagaccatccagctgtacagcgtgaagagcgagcagctgctgagcacccagggcgacgccagccaggtgatcggccccctgaccgagggccagagaagaaacgtggccgtggtgaacagcctgtacaagctgcaccagagcgtgaccaaggtggtgagcagccagagcagcttccccctggccgccgagcagaccatcatcagcgccctgaaggccatccacgccctgatggagaacgccgtgcagcccctgctgaccagcgtgggcgacgccatcgaggccatcatcatcaccatgcaccaggaggacttcagcggcagcctgagcagcagcggcaagcccgacgtgccctgcagcctgtacatgaaggagctgcagggcttcatcgccagagtgatgagcgactacttcaagcacttcgagtgcctggacttcgtgttcgacaacaccgaggccatcgcccagagagccgtggagctgttcatcagacacgccagcctgatcagacccctgggcgagggcggcaagatgagactggccgccgacttcgcccagatggagctggccgtgggccccttctgcagaagagtgagcgacctgggcaagagctacagaatgctgagaagcttcagacccctgctgttccaggccagcgagcacgtggccagcagccccgccctgggcgacgtgatccccttcagcatcatcatccagttcctgttcaccagagcccccgccgagctgaagagccccttccagagagccgagtggagccacaccagattcagccagtggctggacgaccaccccagcgagaaggacagactgctgctgatcagatag

SEQ ID NO: 77563 - DNA, 2067 bp, synthetic construct
  misc_feature 1..2067: note = Description of Artificial Sequence: Synthetic coding sequence
  source 1..2067: mol_type = other DNA
atgagaggcagattcgcccacgcccagtacagcagatgcctgagaggcccctgcctggccgaggtggccgccggcggcggcaccagaagcgccatggccgagggcagcggcgaggtggtggccgtgagcgccaccggcgccgccaacggcctgaacaacggcgccggcggcaccagcgccaccacctgcaaccccctgagcagaaagctgcacaagatcctggagaccagactggacaacgacaaggagatgctggaggccctgaaggccctgagcaccttcttcgtggagaacagcctgagaaccagaagaaacctgagaggcgacatcgagagaaagagcctggccatcaacgaggagttcgtgagcatcttcaaggaggtgaaggaggagctggagagcatcagcgaggacgtgcaggccatgagcaactgctgccaggacatgaccagcagactgcaggccgccaaggagcagacccaggacctgatcgtgaagaccaccaagctgcagagcgagagccagaagctggagatcagagcccaggtggccgacgccttcctgagcaagttccagctgaccagcgacgagatgagcctgctgagaggcaccagagagggccccatcaccgaggacttcttcaaggccctgggcagagtgaagcagatccacaacgacgtgaaggtgctgctgagaaccaaccagcagaccgccggcctggagatcatggagcagatggccctgctgcaggagaccgcctacgagagactgtacagatgggcccagagcgagtgcagaaccctgacccaggagagctgcgacgtgagccccgtgctgacccaggccatggaggccctgcaggacagacccgtgctgtacaagtacaccctggacgagttcggcaccgccagaagaagcaccgtggtgagaggcttcatcgacgccctgaccagaggcggccccggcggcacccccagacccatcgagatgcacagccacgaccccctgagatacgtgggcgacatgctggcctggctgcaccaggccaccgccagcgagaaggagcacctggaggccctgctgaagcacgtgaccacccagggcgtggaggagaacatccaggaggtggtgggccacatcaccgagggcgtgtgcagacccctgaaggtgagaatcgagcaggtgatcgtggccgagcccggcgccgtgctgctgtacaagatcagcaacctgctgaagttctaccaccacaccatcagcggcatcgtgggcaacagcgccaccgccctgctgaccaccatcgaggagatgcacctgctgagcaagaagatcttcttcaacagcctgagcctgcacgccagcaagctgatggacaaggtggagctgcccccccccgacctgggccccagcagcgccctgaaccagaccctgatgctgctgagagaggtgctggccagccacgacagcagcgtggtgcccctggacgccagacaggccgacttcgtgcaggtgctgagctgcgtgctggaccccctgctgcagatgtgcaccgtgagcgccagcaacctgggcaccgccgacatggccaccttcatggtgaacagcctgtacatgatgaagaccaccctggccctgttcgagttcaccgacagaagactggagatgctgcagttccagatcgaggcccacctggacaccctgatcaacgagcaggccagctacgtgctgaccagagtgggcctgagctacatctacaacaccgtgcagcagcacaagcccgagcagggcagcctggccaacatgcccaacctggacagcgtgaccctgaaggccgccatggtgcagttcgacagatacctgagcgcccccgacaacctgctgatcccccagctgaacttcctgctgagcgccaccgtgaaggagcagatcgtgaagcagagcaccgagctggtgtgcagagcctacggcgaggtgtacgccgccgtgatgaaccccatcaacgagtacaaggaccccgagaacatcctgcacagaagcccccagcaggtgcagaccctgctgagctag

SEQ ID NO: 77564 - DNA, 1848 bp, synthetic construct
  misc_feature 1..1848: note = Description of Artificial Sequence: Synthetic coding sequence
  source 1..1848: mol_type = other DNA
atggccgagggcagcggcgaggtggtggccgtgagcgccaccggcgccgccaacggcctgaacaacggcgccggcggcaccagcgccaccacctgcaaccccctgagcagaaagctgcacaagatcctggagaccagactggacaacgacaaggagatgctggaggccctgaaggccctgagcaccttcttcgtggagaacagcctgagaaccagaagaaacctgagaggcgacatcgagagaaagagcctggccatcaacgaggagttcgtgagcatcttcaaggaggtgaaggaggagctggagagcatcagcgaggacgtgcaggccatgagcaactgctgccaggacatgaccagcagactgcaggccgccaaggagcagacccaggacctgatcgtgaagaccaccaagctgcagagcgagagccagaagctggagatcagagcccaggtggccgacgccttcctgagcaagttccagctgaccagcgacgagatgagcctgctgagaggcaccagagagggccccatcaccgaggacttcttcaaggccctgggcagagtgaagcagatccacaacgacgtgaaggtgctgctgagaaccaaccagcagaccgccggcctggagatcatggagcagatggccctgctgcaggagaccgcctacgagagactgtacagatgggcccagagcgagtgcagaaccctgacccaggagagctgcgacgtgagccccgtgctgacccaggccatggaggccctgcaggacagacccgtgctgtacaagtacaccctggacgagttcggcaccgccagaagaagcaccgtggtgagaggcttcatcgacgccctgaccagaggcggccccggcggcacccccagacccatcgagatgcacagccacgaccccctgagatacgtgggcgacatgctggcctggctgcaccaggccaccgccagcgagaaggagcacctggaggccctgctgaagcacgtgaccacccagggcgtggaggagaacatccaggaggtggtgggccacatcaccgagggcgtgtgcagacccctgaaggtgagaatcgagcaggtgatcgtggccgagcccggcgccgtgctgctgtacaagatcagcaacctgctgaagttctaccaccacaccatcagcggcatcgtgggcaacagcgccaccgccctgctgaccaccatcgaggagatgcacctgctgagcaagaagatcttcttcaacagcctgagcctgcacgccagcaagctgatggacaaggtggagctgcccccccccgacctgggccccagcagcgccctgaaccagaccctgatgctgctgagagaggtgctggccagccacgacagcagcgtggtgcccctggacgccagacaggccgacttcgtgcaggtgctgagctgcgtgctggaccccctgctgcagatgtgcaccgtgagcgccagcaacctgggcaccgccgacatggccaccttcatggtgaacagcctgtacatgatgaagaccaccctggccctgttcgagttcaccgacagaagactggagatgctgcagttccagatcgaggcccacctggacaccctgatcaacgagcaggccagctacgtgctgaccagagtgggcctgagctacatctacaacaccgtgcagcagcacaagcccgagcagggcagcctggccaacatgcccaacctggacagcgtgaccctgaaggccgccatggtgcagttcgacagatacctgagcgcccccgacaacctgctgatcccccagctgaacttcctgctgagcgccaccgtgaagagaccccccaacggcccctag

SEQ ID NO: 77565 - DNA, 1974 bp, synthetic construct
  misc_feature 1..1974: note = Description of Artificial Sequence: Synthetic coding sequence
  source 1..1974: mol_type = other DNA
atggccgagggcagcggcgaggtggtggccgtgagcgccaccggcgccgccaacggcctgaacaacggcgccggcggcaccagcgccaccacctgcaaccccctgagcagaaagctgcacaagatcctggagaccagactggacaacgacaaggagatgctggaggccctgaaggccctgagcaccttcttcgtggagaacagcctgagaaccagaagaaacctgagaggcgacatcgagagaaagagcctggccatcaacgaggagttcgtgagcatcttcaaggaggtgaaggaggagctggagagcatcagcgaggacgtgcaggccatgagcaactgctgccaggacatgaccagcagactgcaggccgccaaggagcagacccaggacctgatcgtgaagaccaccaagctgcagagcgagagccagaagctggagatcagagcccaggtggccgacgccttcctgagcaagttccagctgaccagcgacgagatgagcctgctgagaggcaccagagagggccccatcaccgaggacttcttcaaggccctgggcagagtgaagcagatccacaacgacgtgaaggtgctgctgagaaccaaccagcagaccgccggcctggagatcatggagcagatggccctgctgcaggagaccgcctacgagagactgtacagatgggcccagagcgagtgcagaaccctgacccaggagagctgcgacgtgagccccgtgctgacccaggccatggaggccctgcaggacagacccgtgctgtacaagtacaccctggacgagttcggcaccgccagaagaagcaccgtggtgagaggcttcatcgacgccctgaccagaggcggccccggcggcacccccagacccatcgagatgcacagccacgaccccctgagatacgtgggcgacatgctggcctggctgcaccaggccaccgccagcgagaaggagcacctggaggccctgctgaagcacgtgaccacccagggcgtggaggagaacatccaggaggtggtgggccacatcaccgagggcgtgtgcagacccctgaaggtgagaatcgagcaggtgatcgtggccgagcccggcgccgtgctgctgtacaagatcagcaacctgctgaagttctaccaccacaccatcagcggcatcgtgggcaacagcgccaccgccctgctgaccaccatcgaggagatgcacctgctgagcaagaagatcttcttcaacagcctgagcctgcacgccagcaagctgatggacaaggtggagctgcccccccccgacctgggccccagcagcgccctgaaccagaccctgatgctgctgagagaggtgctggccagccacgacagcagcgtggtgcccctggacgccagacaggccgacttcgtgcaggtgctgagctgcgtgctggaccccctgctgcagatgtgcaccgtgagcgccagcaacctgggcaccgccgacatggccaccttcatggtgaacagcctgtacatgatgaagaccaccctggccctgttcgagttcaccgacagaagactggagatgctgcagttccagatcgaggcccacctggacaccctgatcaacgagcaggccagctacgtgctgaccagagtgggcctgagctacatctacaacaccgtgcagcagcacaagcccgagcagggcagcctggccaacatgcccaacctggacagcgtgaccctgaaggccgccatggtgcagttcgacagatacctgagcgcccccgacaacctgctgatcccccagctgaacttcctgctgagcgccaccgtgaaggagcagatcgtgaagcagagcaccgagctggtgtgcagagcctacggcgaggtgtacgccgccgtgatgaaccccatcaacgagtacaaggaccccgagaacatcctgcacagaagcccccagcaggtgcagaccctgctgagctag

SEQ ID NO: 77566 - DNA, 2313 bp, synthetic construct
  misc_feature 1..2313: note = Description of Artificial Sequence: Synthetic coding sequence
  source 1..2313: mol_type = other DNA
atggacttcagcaagttcctggccgacgacttcgacgtgaaggagtggatcaacgccgccttcagagccggcagcaaggaggccgccagcggcaaggccgacggccacgccgccaccctggtgatgaagctgcagctgttcatccaggaggtgaaccacgccgtggaggagaccagccaccaggccctgcagaacatgcccaaggtgctgagagacgtggaggccctgaagcaggaggccagcttcctgaaggagcagatgatcctggtgaaggaggacatcaagaagttcgagcaggacaccagccagagcatgcaggtgctggtggagatcgaccaggtgaagagcagaatgcagctggccgccgagagcctgcaggaggccgacaagtggagcaccctgagcgccgacatcgaggagaccttcaagacccaggacatcgccgtgatcagcgccaagctgaccggcatgcagaacagcctgatgatgctggtggacacccccgactacagcgagaagtgcgtgcacctggaggccctgaagaacagactggaggccctggccagcccccagatcgtggccgccttcaccagccaggccgtggaccagagcaaggtgttcgtgaaggtgttcaccgagatcgacagaatgccccagctgctggcctactactacaagtgccacaaggtgcagctgctggccgcctggcaggagctgtgccagagcgacctgagcctggacagacagctgaccggcctgtacgacgccctgctgggcgcctggcacacccagatccagtgggccacccaggtgttccagaagccccacgaggtggtgatggtgctgctgatccagaccctgggcgccctgatgcccagcctgcccagctgcctgagcaacggcgtggagagagccggccccgagcaggagctgaccagactgctggagttctacgacgccaccgcccacttcgccaagggcctggagatggccctgctgccccacctgcacgagcacaacctggtgaaggtgaccgagctggtggacgccgtgtacgacccctacaagccctaccagctgaagtacggcgacatggaggagagcaacctgctgatccagatgagcgccgtgcccctggagcacggcgaggtgatcgactgcgtgcaggagctgagccacagcgtgaacaagctgttcggcctggccagcgccgccgtggacagatgcgtgagattcaccaacggcctgggcacctgcggcctgctgagcgccctgaagagcctgttcgccaagtacgtgagcgacttcaccagcaccctgcagagcatcagaaagaagtgcaagctggaccacatcccccccaacagcctgttccaggaggactggaccgccttccagaacagcatcagaatcatcgccacctgcggcgagctgctgagacactgcggcgacttcgagcagcagctggccaacagaatcctgagcaccgccggcaagtacctgagcgacagctgcagccccagaagcctggccggcttccaggagagcatcctgaccgacaagaagaacagcgccaagaacccctggcaggagtacaactacctgcagaaggacaaccccgccgagtacgccagcctgatggagatcctgtacaccctgaaggagaagggcagcagcaaccacaacctgctggccgcccccagagccgccctgaccagactgaaccagcaggcccaccagctggccttcgacagcgtgttcctgagaatcaagcagcagctgctgctgatcagcaagatggacagctggaacaccgccggcatcggcgagaccctgaccgacgagctgcccgccttcagcctgacccccctggagtacatcagcaacatcggccagtacatcatgagcctgcccctgaacctggagcccttcgtgacccaggaggacagcgccctggagctggccctgcacgccggcaagctgcccttcccccccgagcagggcgacgagctgcccgagctggacaacatggccgacaactggctgggcagcatcgccagagccaccatgcagacctactgcgacgccatcctgcagatccccgagctgagcccccacagcgccaagcagctggccaccgacatcgactacctgatcaacgtgatggacgccctgggcctgcagcccagcagaaccctgcagcacatcgtgaccctgctgaagaccagacccgaggactacagacaggtgagcaagggcctgcccagaagactggccaccaccgtggccaccatgagaagcgtgaactactag

SEQ ID NO: 77567 - DNA, 1839 bp, synthetic construct
  misc_feature 1..1839: note = Description of Artificial Sequence: Synthetic coding sequence
  source 1..1839: mol_type = other DNA
atggccaccgccgccaccatccccagcgtggccaccgccaccgccgccgccctgggcgaggtggaggacgagggcctgctggccagcctgttcagagacagattccccgaggcccagtggagagagagacccgacgtgggcagatacctgagagagctgagcggcagcggcctggagagactgagaagagagcccgagagactggccgaggagagagcccagctgctgcagcagaccagagacctggccttcgccaactacaagaccttcatcagaggcgccgagtgcaccgagagaatccacagactgttcggcgacgtggaggccagcctgggcagactgctggacagactgcccagcttccagcagagctgcagaaacttcgtgaaggaggccgaggagatcagcagcaacagaagaatgaacagcctgaccctgaacagacacaccgagatcctggagatcctggagatcccccagctgatggacacctgcgtgagaaacagctactacgaggaggccctggagctggccgcctacgtgagaagactggagagaaagtacagcagcatccccgtgatccagggcatcgtgaacgaggtgagacagagcatgcagctgatgctgagccagctgatccagcagctgagaaccaacatccagctgcccgcctgcctgagagtgatcggctacctgagaagaatggacgtgttcaccgaggccgagctgagagtgaagttcctgcaggccagagacgcctggctgagaagcatcctgaccgccatccccaacgacgacccctacttccacatcaccaagaccatcgaggccagcagagtgcacctgttcgacatcatcacccagtacagagccatcttcagcgacgaggaccccctgctgccccccgccatgggcgagcacaccgtgaacgagagcgccatcttccacggctgggtgctgcagaaggtgagccagttcctgcaggtgctggagaccgacctgtacagaggcatcggcggccacctggacagcctgctgggccagtgcatgtacttcggcctgagcttcagcagagtgggcgccgacttcagaggccagctggcccccgtgttccagagagtggccatcagcaccttccagaaggccatccaggagaccgtggagaagttccaggaggagatgaacagctacatgctgatcagcgcccccgccatcctgggcaccagcaacatgcccgccgccgtgcccgccacccagcccggcaccctgcagccccccatggtgctgctggacttcccccccctggcctgcttcctgaacaacatcctggtggccttcaacgacctgagactgtgctgccccgtggccctggcccaggacgtgaccggcgccctggaggacgccctggccaaggtgaccaagatcatcctggccttccacagagccgaggaggccgccttcagcagcggcgagcaggagctgttcgtgcagttctgcaccgtgttcctggaggacctggtgccctacctgaacagatgcctgcaggtgctgttcccccccgcccagatcgcccagaccctgggcatcccccccacccagctgagcaagtacggcaacctgggccacgtgaacatcggcgccatccaggagcccctggccttcatcctgcccaagagagagaccctgttcaccctggacgaccaggccctgggccccgagctgaccgcccccgcccccgagccccccgccgaggagcccagactggagcccgccggccccgcctgccccgagggcggcagagccgagacccaggccgagccccccagcgtgggcccctag

SEQ ID NO: 77568 - DNA, 2109 bp, synthetic construct
  misc_feature 1..2109: note = Description of Artificial Sequence: Synthetic coding sequence
  source 1..2109: mol_type = other DNA
atggagagccccagcgcccccccccacagatggtgcatcccctggcagagactgctgctgaccgccagcctgctgaccttctggaacccccccaccaccgccaagctgaccatcgagagcacccccttcaacgtggccgagggcaaggaggtgctgctgctggtgcacaacctgccccagcacctgttcggctacagctggtacaagggcgagagagtggacggcaacagacagatcatcggctacgtgatcggcacccagcaggccacccccggccccgcctacagcggcagagagatcatctaccccaacgccagcctgctgatccagaacatcatccagaacgacaccggcttctacaccctgcacgtgatcaagagcgacctggtgaacgaggaggccaccggccagttcagagtgtaccccgagctgcccaagcccagcatcagcagcaacaacagcaagcccgtggaggacaaggacgccgtggccttcacctgcgagcccgagacccaggacgccacctacctgtggtgggtgaacaaccagagcctgcccgtgagccccagactgcagctgagcaacggcaacagaaccctgaccctgttcaacgtgaccagaaacgacaccgccagctacaagtgcgagacccagaaccccgtgagcgccagaagaagcgacagcgtgatcctgaacgtgctgtacggccccgacgcccccaccatcagccccctgaacaccagctacagaagcggcgagaacctgaacctgagctgccacgccgccagcaacccccccgcccagtacagctggttcgtgaacggcaccttccagcagagcacccaggagctgttcatccccaacatcaccgtgaacaacagcggcagctacacctgccaggcccacaacagcgacaccggcctgaacagaaccaccgtgaccaccatcaccgtgtacgccgagccccccaagcccttcatcaccagcaacaacagcaaccccgtggaggacgaggacgccgtggccctgacctgcgagcccgagatccagaacaccacctacctgtggtgggtgaacaaccagagcctgcccgtgagccccagactgcagctgagcaacgacaacagaaccctgaccctgctgagcgtgaccagaaacgacgtgggcccctacgagtgcggcatccagaacaagctgagcgtggaccacagcgaccccgtgatcctgaacgtgctgtacggccccgacgaccccaccatcagccccagctacacctactacagacccggcgtgaacctgagcctgagctgccacgccgccagcaacccccccgcccagtacagctggctgatcgacggcaacatccagcagcacacccaggagctgttcatcagcaacatcaccgagaagaacagcggcctgtacacctgccaggccaacaacagcgccagcggccacagcagaaccaccgtgaagaccatcaccgtgagcgccgagctgcccaagcccagcatcagcagcaacaacagcaagcccgtggaggacaaggacgccgtggccttcacctgcgagcccgaggcccagaacaccacctacctgtggtgggtgaacggccagagcctgcccgtgagccccagactgcagctgagcaacggcaacagaaccctgaccctgttcaacgtgaccagaaacgacgccagagcctacgtgtgcggcatccagaacagcgtgagcgccaacagaagcgaccccgtgaccctggacgtgctgtacggccccgacacccccatcatcagcccccccgacagcagctacctgagcggcgccaacctgaacctgagctgccacagcgccagcaaccccagcccccagtacagctggagaatcaacggcatcccccagcagcacacccaggtgctgttcatcgccaagatcacccccaacaacaacggcacctacgcctgcttcgtgagcaacctggccaccggcagaaacaacagcatcgtgaagagcatcaccgtgagcgccagcggcaccagccccggcctgagcgccggcgccaccgtgggcatcatgatcggcgtgctggtgggcgtggccctgatctag

SEQ ID NO: 77569 - DNA, 981 bp, synthetic construct
  misc_feature 1..981: note = Description of Artificial Sequence: Synthetic coding sequence
  source 1..981: mol_type = other DNA
atgatggcctacatgaaccccggcccccactacagcgtgaacgccctggccctgagcggccccagcgtggacctgatgcaccaggccgtgccctaccccagcccccccctggccctggacccccccagaagacagagacaggagagaaccgtgtacaccgagagccagcagaaggtgctggagttctacttccagaaggaccagtaccccaactacgaccagagactgaacctggccgagatgctgagcctgagagagcagcagctgcaggtgtggttcaagaacagaagagccaagctggccagagagagaagactgcagcagcagccccagagagtgcccggccagagaggcagaggcgccagagccgcccccctggtgcccgtggccgccgccagcttccccggcggccccgagttcccccagggcagaggcagctggatcagcccccagcccggcccctggggcgtgctgcccgccgccgagcccaagatctacagcctgcccagaacctggggcggccccgagtgcggcacccaggagggcctgaaggccgtgcccgcccccggccccggccccatccccgcccccatccccggccccgcccagatccccggccccgtgcccggccccgcccccaacctgggccccatgagcggccccctgagcgtgagcatccccggccccatccccgcccccatcagctgccccggccccatccccgaccccgtgctgggcagaaccctgatgcccggccccggcagcctgcccacccccgcccccggcgccctgtggccccagagcccctacgccagcaacctgagccccgacacccagctgtaccccgacttcaccaagctgctgcccctgctggacagattcgaggagagcagcctgagcaccaccaccagccagtacaaggaggaggacggcttcgtggacaagaaccacagcgtgcccagaagcctgctggacctgtag

SEQ ID NO: 77570 - DNA, 900 bp, synthetic construct
  misc_feature 1..900: note = Description of Artificial Sequence: Synthetic coding sequence
  source 1..900: mol_type = other DNA
atgatggcctacatgaaccccggcccccactacagcgtgaacgccctggccctgagcggccccagcgtggacctgatgcaccaggccgtgccctaccccagcgcccccagaaagcagagaagagagagaaccaccttcaccagaagccagctggaggagctggaggccctgttcgccaagacccagtaccccgacgtgtacgccagagaggaggtggccctgaagatcaacctgcccgagagcagagtgcaggtgtggttcaagaacagaagagccaagtgcagacagcagagacagcagcagaagcagcagcagcagccccccggcggccaggccaaggccagacccgccaagagaaaggccggcaccagccccagacccagcaccgacgtgtgccccgaccccctgggcatcagcgacagctacagcccccccctgcccggccccagcggcagccccaccaccgccgtggccaccgtgagcatctggagccccgccagcgagagccccctgcccgaggcccagagagccggcctggtggccagcggccccagcctgaccagcgccccctacgccatgacctacgcccccgccagcgccttctgcagcagccccagcgcctacggcagccccagcagctacttcagcggcctggacccctacctgagccccatggtgccccagctgggcggccccgccctgagccccctgagcggccccagcgtgggccccagcctggcccagagccccaccagcctgagcggccagagctacggcgcctacagccccgtggacagcctggagttcaaggaccccaccggcacctggaagttcacctacaaccccatggaccccctggactacaaggaccagagcgcctggaagttccagatcctgtag

SEQ ID NO: 77571 - DNA, 900 bp, synthetic construct; identical to SEQ ID NO: 77570
  misc_feature 1..900: note = Description of Artificial Sequence: Synthetic coding sequence
  source 1..900: mol_type = other DNA

SEQ ID NO: 77572 - DNA, 900 bp, synthetic construct; identical to SEQ ID NO: 77570
  misc_feature 1..900: note = Description of Artificial Sequence: Synthetic coding sequence
  source 1..900: mol_type = other DNA

SEQ ID NO: 77573 - DNA, 3678 bp, synthetic construct
  misc_feature 1..3678: note = Description of Artificial Sequence: Synthetic coding sequence
  source 1..3678: mol_type = other DNA
atggccgccgtgctggagagcctgctgagagaggaggtgagcgtggccgccgtggtgagatggatcgccagaagcacccagggcagcgaggacaacgccggcgaggccgccgccctgagcagcctgagagccctgagaaaggagttcgtgcccttcctgctgaacttcctgagagagcagagcagcagagtgctgccccagggcccccccacccccgccaagacccccggcgccagcgccgccctgcccggcagacccggcggcccccccagaggcagcagaggcgccagaagccagctgttcccccccaccgaggcccagagcaccgccgccgaggcccccctggccagaagaggcggcagaagaagaggccccggccccgccagagagagaggcggcagaggcctggaggagggcgtgagcggcgagagcctgcccggcgccggcggcagaagactgagaggcagcggcagccccagcagacccagcctgaccctgagcgacccccccaacctgagcaacctggaggagttcccccccgtgggcagcgtgccccccggccccaccgagacccagctgagctgcagaagatgggtgcccagaagactgtggggcgtgagccacagcagcagcgccctgagaagcggcgcccccggctgcagaaccaagcccagcagaagaatcaaccccacccccgtgagcgaggagagaagcctgagcaagcccaagacctgcttcaccagcccccccatcagctgcgtgcccagcagcaagcagctgcagcagagccccacccccacctgccccacccccgagctgggcagccccctgcccagcagaaccggcagcctgaccgacgagcccgccgaccccgccagagtgagcagcagacagagactggagctggtggccctggtgtacagcagctgcatcgccgagaacctggtgcccaacctgttcctggagctgttcttcgtgttccagctgctgaccgccagaagaatggtgaccgccaaggacagcgaccccgagctgagccccgccgtgctggacagcctggagagccccctgttccagagcatccacgactgcgtgttcttcgccgtgcaggtgctggagtgccacttccaggtgctgagcaacctggacaagggcaccctgaagctgctggccgagaacgagagactgctgtgcttcagccccgccctgcagggcagactgagagccgcctacgagggcagcgtggccaaggtgagcctggtgatgccccccagcacccaggccgtgagcttccagcccgagaccgacaacagagccaacttcagcagcgacagagccttccacaccttcaagaagcagagagacgtgttctacgaggtgctgagagagtgggaggaccaccacgaggagcccggctgggacttcgagaagggcctgggcagcagaatcagagccatgatgggccagctgagcgccgcctgcagccacagccacttcgtgagactgttccagaagcagctgctgcagatgtgccagagccccggcggcgccggcggcaccgtgctgggcgaggcccccgacgtgctgagcatgctgggcgccgacaagctgggcagactgtggagactgcaggagagactgatggccccccagagcagcggcggcccctgccccccccccaccttccccggctgccagggcttcttcagagacttcatcctgagcgccagcagcttccagttcaaccagcacctgatggacagcctgagcctgaagatccaggagctgaacggcctggccctgccccagcacgagcccaacgacgaggacggcgagagcgacgtggactggcagggcgagagaaagcagttcgccgtggtgctgctgagcctgagactgctggccaagttcctgggcttcgtggccttcctgccctacagaggccccgagcccccccccaccggcgagctgcaggacagcatcctggccctgagaagccaggtgccccccgtgctggacgtgagaaccctgctgcagagaggcctgcaggccagaagagccgtgctgaccgtgccctggctggtggagttcctgagcttcgccgaccacgtggtgcccctgctggagtactacagagacatcttcaccctgctgctgagactgcacagaagcctggtgctgagccaggagagcgagggcaagatgtgcttcctgaacaagctgctgctgctggccgtgctgggctggctgttccagatccccaccgtgcccgaggacctgttcttcctggaggagggccccagctacgccttcgaggtggacaccgtggcccccgagcacggcctggacaacgcccccgtggtggaccagcagctgctgtacacctgctgcccctacatcggcgagctgagaaagctgctggccagctgggtgagcggcagcagcggcagaagcggcggcttcatgagaaagatcacccccaccaccaccaccagcctgggcgcccagcccagccagaccagccagggcctgcaggcccagctggcccaggccttcttccacaaccagccccccagcctgagaagaaccgtggagttcgtggccgagagaatcggcagcaactgcgtgaagcacatcaaggccaccctggtggccgacctggtgagacaggccgagagcctgctgcaggagcagctggtgacccagggcgaggagggcggcgaccccgcccagctgctggagatcctgtgcagccagctgtgcccccacggcgcccaggccctggccctgggcagagagttctgccagagaaagagccccggcgccgtgagagccctgctgcccgaggagacccccgccgccgtgctgagcagcgccgagaacatcgccgtgggcctggccaccgagaaggcctgcgcctggctgagcgccaacatcaccgccctgatcagaagagaggtgaaggccgccgtgagcagaaccctgagagcccagggccccgagcccgccgccagaggcgagagaagaggctgcagcagagcctgcgagcaccacgcccccctgcccagccacctgatcagcgagatcaaggacgtgctgagcctggccgtgggccccagagaccccgacgagggcgtgagccccgagcacctggagcagctgctgggccagctgggccagaccctgagatgcagacagttcctgtgcccccccgccgagcagcacctggccaagtgcagcgtggagctggccagcctgctggtggccgaccagatccccatcctgggcccccccgcccagtacagactggagagaggccaggccagaagactgctgcacatgctgctgagcctgtggaaggaggacttccagggccccgtgcccctgcagctgctgctgagccccagaaacgtgggcctgctggccgacaccagacccagagagtgggacctgctgctgttcctgctgagagagctggtggagaagggcctgatgggcagaatggagatcgaggcctgcctgggcagcctgcaccaggcccagtggcccggcgacttcgccgaggagctggccaccctgagcaacctgttcctggccgagccccacctgcccgagccccagctgagagcctgcgagctggtgcagcccaacagaggcaccgtgctggcccagagctag

SEQ ID NO: 77574 - DNA, 3684 bp, synthetic construct
  misc_feature 1..3684: note = Description of Artificial Sequence: Synthetic coding sequence
  source 1..3684: mol_type = other DNA
atggccgccgtgctggagagcctgctgagagaggaggtgagcgtggccgccgtggtgagatggatcgccagaagcacccagggcagcgaggacaacgccggcgaggccgccgccctgagcagcctgagagccctgagaaaggagttcgtgcccttcctgctgaacttcctgagagagcagagcagcagagtgctgccccagggcccccccacccccgccaagacccccggcgccagcgccgccctgcccggcagacccggcggcccccccagaggcagcagaggcgccagaagccagctgttcccccccaccgaggcccagagcaccgccgccgaggcccccctggccagaagaggcggcagaagaagaggccccggccccgccagagagagaggcggcagaggcctggaggagggcgtgagcggcgagagcctgcccggcgccggcggcagaagactgagaggcagcggcagccccagcagacccagcctgaccctgagcgacccccccaacctgagcaacctggaggagttcccccccgtgggcagcgtgccccccggccccaccggcaccaagcccagcagaagaatcaaccccacccccgtgagcgaggagagaagcctgagcaagcccaagacctgcttcaccagcccccccatcagctgcgtgcccagcagccagcccagcgccctggacaccagcccctggggcctgggcctgccccccggctgcagaagcctgcaggaggagagagagatgctgagaaaggagagaagcaagcagctgcagcagagccccacccccacctgccccacccccgagctgggcagccccctgcccagcagaaccggcagcctgaccgacgagcccgccgaccccgccagagtgagcagcagacagagactggagctggtggccctggtgtacagcagctgcatcgccgagaacctggtgcccaacctgttcctggagctgttcttcgtgttccagctgctgaccgccagaagaatggtgaccgccaaggacagcgaccccgagctgagccccgccgtgctggacagcctggagagccccctgttccagagcatccacgactgcgtgttcttcgccgtgcaggtgctggagtgccacttccaggtgctgagcaacctggacaagggcaccctgaagctgctggccgagaacgagagactgctgtgcttcagccccgccctgcagggcagactgagagccgcctacgagggcagcgtggccaaggtgagcctggtgatgccccccagcacccaggccgtgagcttccagcccgagaccgacaacagagccaacttcagcagcgacagagccttccacaccttcaagaagcagagagacgtgttctacgaggtgctgagagagtgggaggaccaccacgaggagcccggctgggacttcgagaagggcctgggcagcagaatcagagccatgatgggccagctgagcgccgcctgcagccacagccacttcgtgagactgttccagaagcagctgctgcagatgtgccagagccccggcggcgccggcggcaccgtgctgggcgaggcccccgacgtgctgagcatgctgggcgccgacaagctgggcagactgtggagactgcaggagagactgatggccccccagagcagcggcggcccctgccccccccccaccttccccggctgccagggcttcttcagagacttcatcctgagcgccagcagcttccagttcaaccagcacctgatggacagcctgagcctgaagatccaggagctgaacggcctggccctgccccagcacgagcccaacgacgaggacggcgagagcgacgtggactggcagggcgagagaaagcagttcgccgtggtgctgctgagcctgagactgctggccaagttcctgggcttcgtggccttcctgccctacagaggccccgagcccccccccaccggcgagctgcaggacagcatcctggccctgagaagccaggtgccccccgtgctggacgtgagaaccctgctgcagagaggcctgcaggccagaagagccgtgctgaccgtgccctggctggtggagttcctgagcttcgccgaccacgtggtgcccctgctggagtactacagagacatcttcaccctgctgctgagactgcacagaagcctggtgctgagccaggagagcgagggcaagatgtgcttcctgaacaagctgctgctgctggccgtgctgggctggctgttccagatccccaccgtgcccgaggacctgttcttcctggaggagggccccagctacgccttcgaggtggacaccgtggcccccgagcacggcctggacaacgcccccgtggtggaccagcagctgctgtacacctgctgcccctacatcggcgagctgagaaagctgctggccagctgggtgagcggcagcagcggcagaagcggcggcttcatgagaaagatcacccccaccaccaccaccagcctgggcgcccagcccagccagaccagccagggcctgcaggcccagctggcccaggccttcttccacaaccagccccccagcctgagaagaaccgtggagttcgtggccgagagaatcggcagcaactgcgtgaagcacatcaaggccaccctggtggccgacctggtgagacaggccgagagcctgctgcaggagcagctggtgacccagggcgaggagggcggcgaccccgcccagctgctggagatcctgtgcagccagctgtgcccccacggcgcccaggccctggccctgggcagagagttctgccagagaaagagccccggcgccgtgagagccctgctgcccgaggagacccccgccgccgtgctgagcagcgccgagaacatcgccgtgggcctggccaccgagaaggcctgcgcctggctgagcgccaacatcaccgccctgatcagaagagaggtgaaggccgccgtgagcagaaccctgagagcccagggccccgagcccgccgccagaggcgagagaagaggctgcagcagagcctgcgagcaccacgcccccctgcccagccacctgatcagcgagatcaaggacgtgctgagcctggccgtgggccccagagaccccgacgagggcgtgagccccgagcacctggagcagctgctgggccagctgggccagaccctgagatgcagacagttcctgtgcccccccgccgagcagcacctggccaagtgcagcgtggagctggccagcctgctggtggccgaccagatccccatcctgggcccccccgcccagtacagactggagagaggccaggccagaagactgctgcacatgctgctgagcctgtggaaggaggacttccagggccccgtgcccctgcagctgctgctgagccccagaaacgtgggcctgctggccgacaccagacccagagagtgggacctgctgctgttcctgctgagagagctggtggagaagggcctgatgggcagaatggagatcgaggcctgcctgggcagcctgcaccaggcccagtggcccggcgacttcgccgaggagctggccaccctgagcaacctgttcctggccgagccccacctgcccgagccccagctgagagcctgcgagctggtgcagcccaacagaggcaccgtgctggcccagagctag

SEQ ID NO: 77575 - DNA, 2697 bp, synthetic construct
  misc_feature 1..2697: note = Description of Artificial Sequence: Synthetic coding sequence
  source 1..2697: mol_type = other DNA
atggccctgatcatggagcccgtgagcaagtggagccccagccaggtggtggactggatgaagggcctggacgactgcctgcagcagtacatcaagaacttcgagagagagaagatcagcggcgaccagctgctgagaatcacccaccaggagctggaggacctgggcgtgagcagaatcggccaccaggagctgatcctggaggccgtggacctgctgtgcgccctgaactacggcctggagaccgagaacctgaagaccctgagccacaagctgaacgccagcgccaagaacctgcagaacttcatcaccggcagaagaagaagcggccactacgacggcagaaccagcagaaagctgcccaacgacttcctgaccagcgtggtggacctgatcggcgccgccaagagcctgctggcctggctggacagaagccccttcgccgccgtgaccgactacagcgtgaccagaaacaacgtgatccagctgtgcctggagctgaccaccatcgtgcagcaggactgcaccgtgtacgagaccgagaacaagatcctgcacgtgtgcaagaccctgagcggcgtgtgcgaccacatcatcagcctgagcagcgaccccctggtgagccagagcgcccacctggaggtgatccagctggccaacatcaagcccagcgagggcctgggcatgtacatcaagagcacctacgacggcctgcacgtgatcaccggcaccaccgagaacagccccgccgacagatgcaagaagatccacgccggcgacgaggtgatccaggtgaaccaccagaccgtggtgggctggcagctgaagaacctggtgaacgccctgagagaggaccccagcggcgtgatcctgaccctgaagaagagaccccagagcatgctgaccagcgcccccgccctgctgaagaacatgagatggaagcccctggccctgcagcccctgatccccagaagccccaccagcagcgtggccacccccagcagcaccatcagcacccccaccaagagagacagcagcgccctgcaggacctgtacatcccccccccccccgccgagccctacatccccagagacgagaagggcaacctgccctgcgaggacctgagaggccacatggtgggcaagcccgtgcacaagggcagcgagagccccaacagcttcctggaccaggagtacagaaagagattcaacatcgtggaggaggacaccgtgctgtactgctacgagtacgagaagggcagaagcagcagccagggcagaagagagagcacccccacctacggcaagctgagacccatcagcatgcccgtggagtacaactgggtgggcgactacgaggaccccaacaagatgaagagagacagcagaagagagaacagcctgctgagatacatgagcaacgagaagatcgcccaggaggagtacatgttccagagaaacagcaagaaggacaccggcaagaagagcaagaagaagggcgacaagagcaacagccccacccactacagcctgctgcccagcctgcagatggacgccctgagacaggacatcatgggcacccccgtgcccgagaccaccctgtaccacaccttccagcagagcagcctgcagcacaagagcaagaagaagaacaagggccccatcgccggcaagagcaagagaagaatcagctgcaaggacctgggcagaggcgactgcgagggctggctgtggaagaagaaggacgccaagagctacttcagccagaagtggaagaagtactggttcgtgctgaaggacgccagcctgtactggtacatcaacgaggaggacgagaaggccgagggcttcatcagcctgcccgagttcaagatcgacagagccagcgagtgcagaaagaagtacgccttcaaggcctgccaccccaagatcaagagcttctacttcgccgccgagcacctggacgacatgaacagatggctgaacagaatcaacatgctgaccgccggctacgccgagagagagagaatcaagcaggagcaggactactggagcgagagcgacaaggaggaggccgacacccccagcacccccaagcaggacagccccccccccccctacgacacctaccccagaccccccagcatgagctgcgccagcccctacgtggaggccaagcacagcagactgagcagcaccgagaccagccagagccagagcagccacgaggagttcagacaggaggtgaccggcagcagcgccgtgagccccatcagaaagaccgccagccagagaagaagctggcaggacctgatcgagacccccctgaccagcagcggcctgcactacctgcagaccctgcccctggaggacagcgtgttcagcgacagcgccgccatcagccccgagcacagaagacagagcaccctgcccacccagaagtgccacctgcaggaccactacggcccctaccccctggccgagagcgagagaatgcaggtgctgaacggcaacggcggcaagcccagaagcttcaccctgcccagagacagcggcttcaaccactgctgcctgaacgcccccgtgagcgcctgcgacccccaggacgacgtgcagccccccgaggtggaggaggaggaggaggaggaggaggaggagggcgaggccgccggcgagaacatcggcgagaagagctag

SEQ ID NO: 77576 - DNA, 3105 bp, synthetic construct
  misc_feature 1..3105: note = Description of Artificial Sequence: Synthetic coding sequence
  source 1..3105: mol_type = other DNA
atggccctgatcatggagcccgtgagcaagtggagccccagccaggtggtggactggatgaagggcctggacgactgcctgcagcagtacatcaagaacttcgagagagagaagatcagcggcgaccagctgctgagaatcacccaccaggagctggaggacctgggcgtgagcagaatcggccaccaggagctgatcctggaggccgtggacctgctgtgcgccctgaactacggcctggagaccgagaacctgaagaccctgagccacaagctgaacgccagcgccaagaacctgcagaacttcatcaccggcagaagaagaagcggccactacgacggcagaaccagcagaaagctgcccaacgacttcctgaccagcgtggtggacctgatcggcgccgccaagagcctgctggcctggctggacagaagccccttcgccgccgtgaccgactacagcgtgaccagaaacaacgtgatccagctgtgcctggagctgaccaccatcgtgcagcaggactgcaccgtgtacgagaccgagaacaagatcctgcacgtgtgcaagaccctgagcggcgtgtgcgaccacatcatcagcctgagcagcgaccccctggtgagccagagcgcccacctggaggtgatccagctggccaacatcaagcccagcgagggcctgggcatgtacatcaagagcacctacgacggcctgcacgtgatcaccggcaccaccgagaacagccccgccgacagatgcaagaagatccacgccggcgacgaggtgatccaggtgaaccaccagaccgtggtgggctggcagctgaagaacctggtgaacgccctgagagaggaccccagcggcgtgatcctgaccctgaagaagagaccccagagcatgctgaccagcgcccccgccctgctgaagaacatgagatggaagcccctggccctgcagcccctgatccccagaagccccaccagcagcgtggccacccccagcagcaccatcagcacccccaccaagagagacagcagcgccctgcaggacctgtacatcccccccccccccgccgagccctacatccccagagacgagaagggcaacctgccctgcgaggacctgagaggccacatggtgggcaagcccgtgcacaagggcagcgagagccccaacagcttcctggaccaggagtacagaaagagattcaacatcgtggaggaggacaccgtgctgtactgctacgagtacgagaagggcagaagcagcagccagggcagaagagagagcacccccacctacggcaagctgagacccatcagcatgcccgtggagtacaactgggtgggcgactacgaggaccccaacaagatgaagagagacagcagaagagagaacagcctgctgagatacatgagcaacgagaagatcgcccaggaggagtacatgttccagagaaacagcaagaaggacaccggcaagaagagcaagaagaagggcgacaagagcaacagccccacccactacagcctgctgcccagcctgcagatggacgccctgagacaggacatcatgggcacccccgtgcccgagaccaccctgtaccacaccttccagcagagcagcctgcagcacaagagcaagaagaagaacaagggccccatcgccggcaagagcaagagaagaatcagctgcaaggacctgggcagaggcgactgcgagggctggctgtggaagaagaaggacgccaagagctacttcagccagaagtggaagaagtactggttcgtgctgaaggacgccagcctgtactggtacatcaacgaggaggacgagaaggccgagggcttcatcagcctgcccgagttcaagatcgacagagccagcgagtgcagaaagaagtacgccttcaaggcctgccaccccaagatcaagagcttctacttcgccgccgagcacctggacgacatgaacagatggctgaacagaatcaacatgctgaccgccggctacgccgagagagagagaatcaagcaggagcaggactactggagcgagagcgacaaggaggaggccgacacccccagcacccccaagcaggacagccccccccccccctacgacacctaccccagaccccccagcatgagctgcgccagcccctacgtggaggccaagcacagcagactgagcagcaccgagaccagccagagccagagcagccacgaggagttcagacaggaggtgaccggcagcagcgccgtgagccccatcagaaagaccgccagccagagaagaagctggcaggacctgatcgagacccccctgaccagcagcggcctgcactacctgcagaccctgcccctggaggacagcgtgttcagcgacagcgccgccatcagccccgagcacagaagacagagcaccctgcccacccagaagtgccacctgcaggaccactacggcccctaccccctggccgagagcgagagaatgcaggtgctgaacggcaacggcggcaagcccagaagcttcaccctgcccagagacagcggcttcaaccactgctgcctgaacgcccccgtgagcgcctgcgacccccaggacgacgtgcagccccccgaggtggaggaggaggaggaggaggaggaggaggagggcgaggccgccggcgagaacatcggcgagaagagcgagagcagagaggagaagctgggcgacagcctgcaggacctgtacagagccctggagcaggccagcctgagccccctgggcgagcacagaatcagcaccaagatggagtacaagctgagcttcatcaagagatgcaacgaccccgtgatgaacgagaagctgcacagactgagaatcctgaagagcaccctgaaggccagagagggcgaggtggccatcatcgacaaggtgctggacaaccccgacctgaccagcaaggagttccagcagtggaagcagatgtacctggacctgttcctggacatctgccagaacaccaccagcaacgaccccctgagcatcagcagcgaggtggacgtgatcaccagcagcctggcccacacccacagctacatcgagacccacgtgtag

SEQ ID NO: 77577 - DNA, 3015 bp, synthetic construct
  misc_feature 1..3015: note = Description of Artificial Sequence: Synthetic coding sequence
  source 1..3015: mol_type = other DNA
atggccctgatcatggagcccgtgagcaagtggagccccagccaggtggtggactggatgaagggcctggacgactgcctgcagcagtacatcaagaacttcgagagagagaagatcagcggcgaccagctgctgagaatcacccaccaggagctggaggacctgggcgtgagcagaatcggccaccaggagctgatcctggaggccgtggacctgctgtgcgccctgaactacggcctggagaccgagaacctgaagaccctgagccacaagctgaacgccagcgccaagaacctgcagaacttcatcaccggcagaagaagaagcggccactacgacggcagaaccagcagaaagctgcccaacgacttcctgaccagcgtggtggacctgatcggcgccgccaagagcctgctggcctggctggacagaagccccttcgccgccgtgaccgactacagcgtgaccagaaacaacgtgatccagctgtgcctggagctgaccaccatcgtgcagcaggactgcaccgtgtacgagaccgagaacaagatcctgcacgtgtgcaagaccctgagcggcgtgtgcgaccacatcatcagcctgagcagcgaccccctggtgagccagagcgcccacctggaggtgatccagctggccaacatcaagcccagcgagggcctgggcatgtacatcaagagcacctacgacggcctgcacgtgatcaccggcaccaccgagaacagccccgccgacagatgcaagaagatccacgccggcgacgaggtgatccaggtgaaccaccagaccgtggtgggctggcagctgaagaacctggtgaacgccctgagagaggaccccagcggcgtgatcctgaccctgaagaagagaccccagagcatgctgaccagcgcccccgccctgctgaagaacatgagatggaagcccctggccctgcagcccctgatccccagaagccccaccagcagcgtggccacccccagcagcaccatcagcacccccaccaagagagacagcagcgccctgcaggacctgtacatcccccccccccccgccgagccctacatccccagagacgagaagggcaacctgccctgcgaggacctgagaggccacatggtgggcaagcccgtgcacaagggcagcgagagccccaacagcttcctggaccaggagtacagaaagagattcaacatcgtggaggaggacaccgtgctgtactgctacgagtacgagaagggcagaagcagcagccagggcagaagagagagcacccccacctacgagaacagcctgctgagatacatgagcaacgagaagatcgcccaggaggagtacatgttccagagaaacagcaagaaggacaccggcaagaagagcaagaagaagggcgacaagagcaacagccccacccactacagcctgctgcccagcctgcagatggacgccctgagacaggacatcatgggcacccccgtgcccgagaccaccctgtaccacaccttccagcagagcagcctgcagcacaagagcaagaagaagaacaagggccccatcgccggcaagagcaagagaagaatcagctgcaaggacctgggcagaggcgactgcgagggctggctgtggaagaagaaggacgccaagagctacttcagccagaagtggaagaagtactggttcgtgctgaaggacgccagcctgtactggtacatcaacgaggaggacgagaaggccgagggcttcatcagcctgcccgagttcaagatcgacagagccagcgagtgcagaaagaagtacgccttcaaggcctgccaccccaagatcaagagcttctacttcgccgccgagcacctggacgacatgaacagatggctgaacagaatcaacatgctgaccgccggctacgccgagagagagagaatcaagcaggagcaggactactggagcgagagcgacaaggaggaggccgacacccccagcacccccaagcaggacagccccccccccccctacgacacctaccccagaccccccagcatgagctgcgccagcccctacgtggaggccaagcacagcagactgagcagcaccgagaccagccagagccagagcagccacgaggagttcagacaggaggtgaccggcagcagcgccgtgagccccatcagaaagaccgccagccagagaagaagctggcaggacctgatcgagacccccctgaccagcagcggcctgcactacctgcagaccctgcccctggaggacagcgtgttcagcgacagcgccgccatcagccccgagcacagaagacagagcaccctgcccacccagaagtgccacctgcaggaccactacggcccctaccccctggccgagagcgagagaatgcaggtgctgaacggcaacggcggcaagcccagaagcttcaccctgcccagagacagcggcttcaaccactgctgcctgaacgcccccgtgagcgcctgcgacccccaggacgacgtgcagccccccgaggtggaggaggaggaggaggaggaggaggaggagggcgaggccgccggcgagaacatcggcgagaagagcgagagcagagaggagaagctgggcgacagcctgcaggacctgtacagagccctggagcaggccagcctgagccccctgggcgagcacagaatcagcaccaagatggagtacaagctgagcttcatcaagagatgcaacgaccccgtgatgaacgagaagctgcacagactgagaatcctgaagagcaccctgaaggccagagagggcgaggtggccatcatcgacaaggtgctggacaaccccgacctgaccagcaaggagttccagcagtggaagcagatgtacctggacctgttcctggacatctgccagaacaccaccagcaacgaccccctgagcatcagcagcgaggtggacgtgatcaccagcagcctggcccacacccacagctacatcgagacccacgtgtag

SEQ ID NO: 77578 - DNA, 2550 bp, synthetic construct
  misc_feature 1..2550: note = Description of Artificial Sequence: Synthetic coding sequence
  source 1..2550: mol_type = other DNA
atggccctgatcatggagcccgtgagcaagtggagccccagccaggtggtggactggatgaagggcctggacgactgcctgcagcagtacatcaagaacttcgagagagagaagatcagcggcgaccagctgctgagaatcacccaccaggagctggaggacctgggcgtgagcagaatcggccaccaggagctgatcctggaggccgtggacctgctgtgcgccctgaactacggcctggagaccgagaacctgaagaccctgagccacaagctgaacgccagcgccaagaacctgcagaacttcatcaccggcagaagaagaagcggccactacgacggcagaaccagcagaaagctgcccaacgacttcctgaccagcgtggtggacctgatcggcgccgccaagagcctgctggcctggctggacagaagccccttcgccgccgtgaccgactacagcgtgaccagaaacaacgtgatccagctgtgcctggagctgaccaccatcgtgcagcaggactgcaccgtgtacgagaccgagaacaagatcctgcacgtgtgcaagaccctgagcggcgtgtgcgaccacatcatcagcctgagcagcgaccccctggtgagccagagcgcccacctggaggtgatccagctggccaacatcaagcccagcgagggcctgggcatgtacatcaagagcacctacgacggcctgcacgtgatcaccggcaccaccgagaacagccccgccgacagatgcaagaagatccacgccggcgacgaggtgatccaggtgaaccaccagaccgtgcccctgatccccagaagccccaccagcagcgtggccacccccagcagcaccatcagcacccccaccaagagagacagcagcgccctgcaggacctgtacatcccccccccccccgccgagccctacatccccagagacgagaagggcaacctgccctgcgaggacctgagaggccacatggtgggcaagcccgtgcacaagggcagcgagagccccaacagcttcctggaccaggagtacagaaagagattcaacatcgtggaggaggacaccgtgctgtactgctacgagtacgagaagggcagaagcagcagccagggcagaagagagagcacccccacctacggcaagctgagacccatcagcatgcccgtggagtacaactgggtgggcgactacgaggaccccaacaagatgaagagagacagcagaagagagaacagcctgctgagatacatgagcaacgagaagatcgcccaggaggagtacatgttccagagaaacagcaagaaggacaccggcaagaagagcaagaagaagggcgacaagagcaacagccccacccactacagcctgctgcccagcctgcagatggacgccctgagacaggacatcatgggcacccccgtgcccgagaccaccctgtaccacaccttccagcagagcagcctgcagcacaagagcaagaagaagaacaagggccccatcgccggcaagagcaagagaagaatcagctgcaaggacctgggcagaggcgactgcgagggctggctgtggaagaagaaggacgccaagagctacttcagccagaagtggaagaagtactggttcgtgctgaaggacgccagcctgtactggtacatcaacgaggaggacgagaaggccgagggcttcatcagcctgcccgagttcaagatcgacagagccagcgagtgcagaaagaagtacgccttcaaggcctgccaccccaagatcaagagcttctacttcgccgccgagcacctggacgacatgaacagatggctgaacagaatcaacatgctgaccgccggctacgccgagagagagagaatcaagcaggagcaggactactggagcgagagcgacaaggaggaggccgacacccccagcacccccaagcaggacagccccccccccccctacgacacctaccccagaccccccagcatgagctgcgccagcccctacgtggaggccaagcacagcagactgagcagcaccgagaccagccagagccagagcagccacgaggagttcagacaggaggtgaccggcagcagcgccgtgagccccatcagaaagaccgccagccagagaagaagctggcaggacctgatcgagacccccctgaccagcagcggcctgcactacctgcagaccctgcccctggaggacagcgtgttcagcgacagcgccgccatcagccccgagcacagaagacagagcaccctgcccacccagaagtgccacctgcaggaccactacggcccctaccccctggccgagagcgagagaatgcaggtgctgaacggcaacggcggcaagcccagaagcttcaccctgcccagagacagcggcttcaaccactgctgcctgaacgcccccgtgagcgcctgcgacccccaggacgacgtgcagccccccgaggtggaggaggaggaggaggaggaggaggaggagggcgaggccgccggcgagaacatcggcgagaagagctag

SEQ ID NO: 77579 - DNA, 414 bp, synthetic construct
  misc_feature 1..414: note = Description of Artificial Sequence: Synthetic coding sequence
  source 1..414: mol_type = other DNA
atggacgacagcgacacccccacctactacctgcagatcgagccccaggacggctgccaccccggcgacagcgtggagagaagcgtgacctgcctgcccagcgccagcgacgagaacgagaaccagctggacggcgacggccacgagcacctgaccagcagcgacagcgccatgggcaagccccaggtgagcgagcaggacagcctgaacaacaacgagagctgcaccctgagctgcgaggtggccgccggcgagaacctgcagaacaccctgtgcgaggccagcagagacgagcaggccttcctgggcaaggacaagaagatccccggcaagagaagccccagaagcaagaagggcaccgccaagaagatcccccccgacagcagaatcctgttccccggcggcggcctgtag

SEQ ID NO: 77580 - DNA, 1851 bp, synthetic construct
  misc_feature 1..1851: note = Description of Artificial Sequence: Synthetic coding sequence
  source 1..1851: mol_type = other DNA
atggacgacagcgacacccccacctactacctgcagatcgagccccaggacggctgccaccccggcgacagcgtggagagaagcgtgacctgcctgcccagcgccagcgacgagaacgagaaccagctggacggcgacggccacgagcacctgaccagcagcgacagcgccatgggcaagccccaggtgagcgagcaggacagcctgaacaacaacgagagctgcaccctgagctgcgaggtggccgccggcgagaacctgcagaacaccctgtgcgaggccagcagagacgagcaggccttcctgggcaaggacaagaagatccccggcaagagaagccccagaagcaagaagggcaccgccaagaagatcccccccggcctgttcagcggcgacatcgcccccctgatgcaggagaaggtgctgagcgccgtgacctacgccgtggacgacgaggaggccgccgaggtgaacgccaacgagcagcccgaggcccccaagctggtgctgcagagcctgttcagcctgatcagaggcgaggtggagcagctggacagcagagccctgcccctgtgcctgcaccagatcgccgagagctacttccaggaggaggactacgagaaggccatgaagttcatccagctggagagactgtaccacgagcagctgctggccaacctgagcgccatccaggagcagtgggagaccaagtggaagaccgtgcagccccacaccgtgaccgccctgagaaacagcgagaagggcttcaacggcgaggacttcgagagactgaccaagatctgcgccacccaccaggaccccctgctgagcaagcacaagatcgccgccgtggagaagagccaggagagaaagtgcagcacccagctgctggtgagcgaggaccccaaggagggcggcgccaccaccaaggagagcgagagcaagacctgcctgggcaccgagagcagcaaggagagccagcacaccgtggagcccctgggcagcagcccctgctgccaccagatggacgtgcagaccgacagccccagcctgagcgtgaccgccggcaaggaccacatggaggagctgctgtgcagcgccgaggccaccctggccctgcacacccagagcagcgagaccgccggcagccccagcggccccgacagcagcgaggacgcctgcgaggacgacagcagactgcagctggcccagaccgaggcctgccaggacgtggccagaatcgagggcatcgccgaggaccccaaggtgttcctgagcagcaagagcaagaccgagcccctgatcagccccggctgcgacagaatcccccccgccctgatcagcgagggcaagtacagccaggcccagagaaaggagctgagactgcccctgagagacgccagcgaggccctgcccaccgaccagctggagaacaacgagctgaacgagctgcagcagcccgacctgaccgacagcgacggcaagagcccccaggcccaggccgacagcgacggcagcgagaacgtgctgtgcggcaacaaccagatcagcgacctgggcatcctgctgcccgaggtgtgcatggcccccgaggagaagggcgacaaggacgaccagctgaacaaggagaccgaggactacctgaacagcctgctggagggctgcctgaaggacaccgaggacagcctgagctacgaggacaaccaggacgacgacagcgacctgctgcaggacctgagccccgaggaggccagctacagcctgcaggagaacctgcccagcgacgagagctgcctgagcctggacgacctggccaagagaatcgagatcgccgaggtgaaccagagatag

SEQ ID NO: 77581 - DNA, 2178 bp, synthetic construct
  misc_feature 1..2178: note = Description of Artificial Sequence: Synthetic coding sequence
  source 1..2178: mol_type = other DNA
atggacgacagcgacacccccacctactacctgcagatcgagccccaggacggctgccaccccggcgacagcgtggagagaagcgtgacctgcctgcccagcgccagcgacgagaacgagaaccagctggacggcgacggccacgagcacctgaccagcagcgacagcgccatgggcaagccccaggtgagcgagcaggacagcctgaacaacaacgagagctgcaccctgagctgcgaggtggccgccggcgagaacctgcagaacaccctgtgcgaggccagcagagacgagcaggccttcctgggcaaggacaagaagatccccggcaagagaagccccagaagcaagaagggcaccgccaagaagatcccccccggcctgttcagcggcgacatcgcccccctgatgcaggagaaggtgctgagcgccgtgacctacgccgtggacgacgaggaggccgccgaggtgaacgccaacgagcagcccgaggcccccaagctggtgctgcagagcctgttcagcctgatcagaggcgaggtggagcagctggacagcagagccctgcccctgtgcctgcaccagatcgccgagagctacttccaggaggaggactacgagaaggccatgaagttcatccagctggagagactgtaccacgagcagctgctggccaacctgagcgccatccaggagcagtgggagaccaagtggaagaccgtgcagccccacaccgtgaccgccctgagaaacagcgagaagggcttcaacggcgaggacttcgagagactgaccaagatctgcgccacccaccaggaccccctgctgagcaagcacaagatcgccgccgtggagaagagccaggagagaaagtgcagcacccagctgctggtgagcgaggaccccaaggagggcggcgccaccaccaaggagagcgagagcaagacctgcctgggcaccgagagcagcaaggagagccagcacaccgtggagcccctgggcagcagcccctgctgccaccagatggacgtgcagaccgacagccccagcctgagcgtgaccgccggcaaggaccacatggaggagctgctgtgcagcgccgaggccaccctggccctgcacacccagagcagcgagaccgccggcagccccagcggccccgacagcagcgaggacgcctgcgaggacgacagcagactgcagctggcccagaccgaggcctgccaggacgtggccagaatcgagggcatcgccgaggaccccaaggtgttcctgagcagcaagagcaagaccgagcccctgatcagccccggctgcgacagaatcccccccgccctgatcagcgagggcaagtacagccaggcccagagaaaggagctgagactgcccctgagagacgccagcgaggccctgcccaccgaccagctggagaacaacgagctgaacgagctgcagcagcccgacctgaccgacagcgacggcaagagcccccaggcccaggccgacagcgacggcagcgagaacgtgctgtgcggcaacaaccagatcagcgacctgggcatcctgctgcccgaggtgtgcatggcccccgaggagaagggcgacaaggacgaccagctgaacaaggagaccgaggactacctgaacagcctgctggagggctgcctgaaggacaccgaggacagcctgagctacgaggacaaccaggacgacgacagcgacctgctgcaggacctgagccccgaggaggccagctacagcctgcaggagaacctgcccagcgacgagagctgcctgagcctggacgacctggccaagagaatcgagatcgccgaggtggtgcccaccgagggcctggtgagcatcctgaagaagagaaacgacaccgtgggcgaccaccccgcccagatgcagcacaagcccagcaagagaagagtgagattccaggagatcgacgacagcctggaccaggacgaggtgggcggcggcagctgcatcctgctggtgctgctgtgcatcgccaccgtgttcctgagcgtgggcggcaccgccctgtactgcaccttcggcgacatggagagccccgtgtgcaccgacttcgccgacaacatggacttctactacaccaagctgctgcagggcgtggccgagctgaagcactggatctacctgagctag

SEQ ID NO: 77582 - DNA, 3057 bp, synthetic construct
  misc_feature 1..3057: note = Description of Artificial Sequence: Synthetic coding sequence
  source 1..3057: mol_type = other DNA
atgaagatgtggctgctggtgagccacctggtgatcatcagcatcaccacctgcctggccgagttcacctggtacagaagatacggccacggcgtgagcgaggaggacaagggcttcggccccatcttcgaggagcagcccatcaacaccatctaccccgaggagagcctggagggcaaggtgagcctgaactgcagagccagagccagccccttccccgtgtacaagtggagaatgaacaacggcgacgtggacctgaccagcgacagatacagcatggtgggcggcaacctggtgatcaacaaccccgacaagcagaaggacgccggcatctactactgcctggccagcaacaactacggcatggtgagaagcaccgaggccaccctgagcttcggctacctggaccccttcccccccgaggagagacccgaggtgagagtgaaggagggcaagggcatggtgctgctgtgcgaccccccctaccacttccccgacgacctgagctacagatggctgctgaacgagttccccgtgttcatcaccatggacaagagaagattcgtgagccagaccaacggcaacctgtacatcgccaacgtggaggccagcgacaagggcaactacagctgcttcgtgagcagccccagcatcaccaagagcgtgttcagcaagttcatccccctgatccccatccccgagagaaccaccaagccctaccccgccgacatcgtggtgcagttcaaggacgtgtacgccctgatgggccagaacgtgaccctggagtgcttcgccctgggcaaccccgtgcccgacatcagatggagaaaggtgctggagcccatgcccagcaccgccgagatcagcaccagcggcgccgtgctgaagatcttcaacatccagctggaggacgagggcatctacgagtgcgaggccgagaacatcagaggcaaggacaagcaccaggccagaatctacgtgcaggccttccccgagtgggtggagcacatcaacgacaccgaggtggacatcggcagcgacctgtactggccctgcgtggccaccggcaagcccatccccaccatcagatggctgaagaacggctacgcctaccacaagggcgagctgagactgtacgacgtgaccttcgagaacgccggcatgtaccagtgcatcgccgagaacacctacggcgccatctacgccaacgccgagctgaagatcctggccctggcccccaccttcgagatgaaccccatgaagaagaagatcctggccgccaagggcggcagagtgatcatcgagtgcaagcccaaggccgcccccaagcccaagttcagctggagcaagggcaccgagtggctggtgaacagcagcagaatcctgatctgggaggacggcagcctggagatcaacaacatcaccagaaacgacggcggcatctacacctgcttcgccgagaacaacagaggcaaggccaacagcaccggcaccctggtgatcaccgaccccaccagaatcatcctggcccccatcaacgccgacatcaccgtgggcgagaacgccaccatgcagtgcgccgccagcttcgaccccgccctggacctgaccttcgtgtggagcttcaacggctacgtgatcgacttcaacaaggagaacatccactaccagagaaacttcatgctggacagcaacggcgagctgctgatcagaaacgcccagctgaagcacgccggcagatacacctgcaccgcccagaccatcgtggacaacagcagcgccagcgccgacctggtggtgagaggcccccccggcccccccggcggcctgagaatcgaggacatcagagccaccagcgtggccctgacctggagcagaggcagcgacaaccacagccccatcagcaagtacaccatccagaccaagaccatcctgagcgacgactggaaggacgccaagaccgacccccccatcatcgagggcaacatggaggccgccagagccgtggacctgatcccctggatggagtacgagttcagagtggtggccaccaacaccctgggcagaggcgagcccagcatccccagcaacagaatcaagaccgacggcgccgcccccaacgtggcccccagcgacgtgggcggcggcggcggcagaaacagagagctgaccatcacctgggcccccctgagcagagagtaccactacggcaacaacttcggctacatcgtggccttcaagcccttcgacggcgaggagtggaagaaggtgaccgtgaccaaccccgacaccggcagatacgtgcacaaggacgagaccatgagccccagcaccgccttccaggtgaaggtgaaggccttcaacaacaagggcgacggcccctacagcctggtggccgtgatcaacagcgcccaggacgcccccagcgaggcccccaccgaggtgggcgtgaaggtgctgagcagcagcgagatcagcgtgcactgggagcacgtgctggagaagatcgtggagagctaccagatcagatactgggccgcccacgacaaggaggaggccgccaacagagtgcaggtgaccagccaggagtacagcgccagactggagaacctgctgcccgacacccagtacttcatcgaggtgggcgcctgcaacagcgccggctgcggcccccccagcgacatgatcgaggccttcaccaagaaggccccccccagccagccccccagaatcatcagcagcgtgagaagcggcagcagatacatcatcacctgggaccacgtggtggccctgagcaacgagagcaccgtgaccggctacaaggtgctgtacagacccgacggccagcacgacggcaagctgtacagcacccacaagcacagcatcgaggtgcccatccccagagacggcgagtacgtggtggaggtgagagcccacagcgacggcggcgacggcgtggtgagccaggtgaagatcagcggcgcccccaccctgagccccagcctgctgggcctgctgctgcccgccttcggcatcctggtgtacctggagttctag

SEQ ID NO: 77583 - DNA, 3024 bp, synthetic construct
  misc_feature 1..3024: note = Description of Artificial Sequence: Synthetic coding sequence
  source 1..3024: mol_type = other DNA
atgaagatgtggctgctggtgagccacctggtgatcatcagcatcaccacctgcctggccgtgagcgaggaggacaagggcttcggccccatcttcgaggagcagcccatcaacaccatctaccccgaggagagcctggagggcaaggtgagcctgaactgcagagccagagccagccccttccccgtgtacaagtggagaatgaacaacggcgacgtggacctgaccagcgacagatacagcatggtgggcggcaacctggtgatcaacaaccccgacaagcagaaggacgccggcatctactactgcctggccagcaacaactacggcatggtgagaagcaccgaggccaccctgagcttcggctacctggaccccttcccccccgaggagagacccgaggtgagagtgaaggagggcaagggcatggtgctgctgtgcgaccccccctaccacttccccgacgacctgagctacagatggctgctgaacgagttccccgtgttcatcaccatggacaagagaagattcgtgagccagaccaacggcaacctgtacatcgccaacgtggaggccagcgacaagggcaactacagctgcttcgtgagcagccccagcatcaccaagagcgtgttcagcaagttcatccccctgatccccatccccgagagaaccaccaagccctaccccgccgacatcgtggtgcagttcaaggacgtgtacgccctgatgggccagaacgtgaccctggagtgcttcgccctgggcaaccccgtgcccgacatcagatggagaaaggtgctggagcccatgcccagcaccgccgagatcagcaccagcggcgccgtgctgaagatcttcaacatccagctggaggacgagggcatctacgagtgcgaggccgagaacatcagaggcaaggacaagcaccaggccagaatctacgtgcaggccttccccgagtgggtggagcacatcaacgacaccgaggtggacatcggcagcgacctgtactggccctgcgtggccaccggcaagcccatccccaccatcagatggctgaagaacggctacgcctaccacaagggcgagctgagactgtacgacgtgaccttcgagaacgccggcatgtaccagtgcatcgccgagaacacctacggcgccatctacgccaacgccgagctgaagatcctggccctggcccccaccttcgagatgaaccccatgaagaagaagatcctggccgccaagggcggcagagtgatcatcgagtgcaagcccaaggccgcccccaagcccaagttcagctggagcaagggcaccgagtggctggtgaacagcagcagaatcctgatctgggaggacggcagcctggagatcaacaacatcaccagaaacgacggcggcatctacacctgcttcgccgagaacaacagaggcaaggccaacagcaccggcaccctggtgatcaccgaccccaccagaatcatcctggcccccatcaacgccgacatcaccgtgggcgagaacgccaccatgcagtgcgccgccagcttcgaccccgccctggacctgaccttcgtgtggagcttcaacggctacgtgatcgacttcaacaaggagaacatccactaccagagaaacttcatgctggacagcaacggcgagctgctgatcagaaacgcccagctgaagcacgccggcagatacacctgcaccgcccagaccatcgtggacaacagcagcgccagcgccgacctggtggtgagaggcccccccggcccccccggcggcctgagaatcgaggacatcagagccaccagcgtggccctgacctggagcagaggcagcgacaaccacagccccatcagcaagtacaccatccagaccaagaccatcctgagcgacgactggaaggacgccaagaccgacccccccatcatcgagggcaacatggaggccgccagagccgtggacctgatcccctggatggagtacgagttcagagtggtggccaccaacaccctgggcagaggcgagcccagcatccccagcaacagaatcaagaccgacggcgccgcccccaacgtggcccccagcgacgtgggcggcggcggcggcagaaacagagagctgaccatcacctgggcccccctgagcagagagtaccactacggcaacaacttcggctacatcgtggccttcaagcccttcgacggcgaggagtggaagaaggtgaccgtgaccaaccccgacaccggcagatacgtgcacaaggacgagaccatgagccccagcaccgccttccaggtgaaggtgaaggccttcaacaacaagggcgacggcccctacagcctggtggccgtgatcaacagcgcccaggacgcccccagcgaggcccccaccgaggtgggcgtgaaggtgctgagcagcagcgagatcagcgtgcactgggagcacgtgctggagaagatcgtggagagctaccagatcagatactgggccgcccacgacaaggaggaggccgccaacagagtgcaggtgaccagccaggagtacagcgccagactggagaacctgctgcccgacacccagtacttcatcgaggtgggcgcctgcaacagcgccggctgcggcccccccagcgacatgatcgaggccttcaccaagaaggccccccccagccagccccccagaatcatcagcagcgtgagaagcggcagcagatacatcatcacctgggaccacgtggtggccctgagcaacgagagcaccgtgaccggctacaaggtgctgtacagacccgacggccagcacgacggcaagctgtacagcacccacaagcacagcatcgaggtgcccatccccagagacggcgagtacgtggtggaggtgagagcccacagcgacggcggcgacggcgtggtgagccaggtgaagatcagcggcgcccccaccctgagccccagcctgctgggcctgctgctgcccgccttcggcatcctggtgtacctggagttctag

SEQ ID NO: 77584 - DNA, 1884 bp, synthetic construct
  misc_feature 1..1884: note = Description of Artificial Sequence: Synthetic coding sequence
  source 1..1884: mol_type = other DNA
atgaagatgtggctgctggtgagccacctggtgatcatcagcatcaccacctgcctggccgagttcacctggtacagaagatacggccacggcgtgagcgaggaggacaagggcttcggccccatcttcgaggagcagcccatcaacaccatctaccccgaggagagcctggagggcaaggtgagcctgaactgcagagccagagccagccccttccccgtgtacaagtggagaatgaacaacggcgacgtggacctgaccagcgacagatacagcatggtgggcggcaacctggtgatcaacaaccccgacaagcagaaggacgccggcatctactactgcctggccagcaacaactacggcatggtgagaagcaccgaggccaccctgagcttcggctacctggaccccttcccccccgaggagagacccgaggtgagagtgaaggagggcaagggcatggtgctgctgtgcgaccccccctaccacttccccgacgacctgagctacagatggctgctgaacgagttccccgtgttcatcaccatggacaagagaagattcgtgagccagaccaacggcaacctgtacatcgccaacgtggaggccagcgacaagggcaactacagctgcttcgtgagcagccccagcatcaccaagagcgtgttcagcaagttcatccccctgatccccatccccgagagaaccaccaagccctaccccgccgacatcgtggtgcagttcaaggacgtgtacgccctgatgggccagaacgtgaccctggagtgcttcgccctgggcaaccccgtgcccgacatcagatggagaaaggtgctggagcccatgcccagcaccgccgagatcagcaccagcggcgccgtgctgaagatcttcaacatccagctggaggacgagggcatctacgagtgcgaggccgagaacatcagaggcaaggacaagcaccaggccagaatctacgtgcaggccttccccgagtgggtggagcacatcaacgacaccgaggtggacatcggcagcgacctgtactggccctgcgtggccaccggcaagcccatccccaccatcagatggctgaagaacggctacgcctaccacaagggcgagctgagactgtacgacgtgaccttcgagaacgccggcatgtaccagtgcatcgccgagaacacctacggcgccatctacgccaacgccgagctgaagatcctggccctggcccccaccttcgagatgaaccccatgaagaagaagatcctggccgccaagggcggcagagtgatcatcgagtgcaagcccaaggccgcccccaagcccaagttcagctggagcaagggcaccgagtggctggtgaacagcagcagaatcctgatctgggaggacggcagcctggagatcaacaacatcaccagaaacgacggcggcatctacacctgcttcgccgagaacaacagaggcaaggccaacagcaccggcaccctggtgatcaccgaccccaccagaatcatcctggcccccatcaacgccgacatcaccgtgggcgagaacgccaccatgcagtgcgccgccagcttcgaccccgccctggacctgaccttcgtgtggagcttcaacggctacgtgatcgacttcaacaaggagaacatccactaccagagaaacttcatgctggacagcaacggcgagctgctgatcagaaacgcccagctgaagcacgccggcagatacacctgcaccgcccagaccatcgtggacaacagcagcgccagcgccgacctggtggtgagaggcaagaacagaaagggcggcgagaagaacatggtggacagcttcctgcccgtgtgcgccagcctgccccccacctggtag

SEQ ID NO: 77585 - DNA, 1884 bp, synthetic construct; identical to SEQ ID NO: 77584
  misc_feature 1..1884: note = Description of Artificial Sequence: Synthetic coding sequence
  source 1..1884: mol_type = other DNA

SEQ ID NO: 77586 - DNA, 1884 bp, synthetic construct; identical to SEQ ID NO: 77584
  misc_feature 1..1884: note = Description of Artificial Sequence: Synthetic coding sequence
  source 1..1884: mol_type = other DNA

SEQ ID NO: 77587 - DNA, 258 bp, synthetic construct
  misc_feature 1..258: note = Description of Artificial Sequence: Synthetic coding sequence
  source 1..258: mol_type = other DNA
atgaagatgtggctgctggtgagccacctggtgatcatcagcatcaccacctgcctggccgagttcacctggtacagaagatacggccacggcgtgagcgaggaggacaagggcttcggccccatcttcgaggagcagcccatcaacaccatctaccccgaggagagcctggagggcaaggtgagcctgaactgcagagccagagccagccccttccccgtgtacaagtggagaatgaacaacggcgacgtggactag

SEQ ID NO: 77588 - DNA, 3057 bp, synthetic construct; identical to SEQ ID NO: 77582
  misc_feature 1..3057: note = Description of Artificial Sequence: Synthetic coding sequence
  source 1..3057: mol_type = other DNA

SEQ ID NO: 77589 - DNA, 192 bp, synthetic construct
  misc_feature 1..192: note = Description of Artificial Sequence: Synthetic coding sequence
  source 1..192: mol_type = other DNA
atgaagatgtggctgctggtgagccacctggtgatcatcagcatcaccacctgcctggccgagttcacctggtacagaagatacggccacggcgtgagcgaggaggacaagggcttcggccccatcttcgaggagcagcccatcaacaccatctaccccgaggagagcctggagggcaaggtgagcctgtag

SEQ ID NO: 77590 - DNA, 273 bp, synthetic construct
  misc_feature 1..273: note = Description of Artificial Sequence: Synthetic coding sequence
  source 1..273: mol_type = other DNA
atgaagatgtggctgctggtgagccacctggtgatcatcagcatcaccacctgcctggccgagttcacctggtacagaagatacggccacggcgtgagcgaggaggacaagggcttcggccccatcttcgaggagcagcccatcaacaccatctaccccgaggagagcctggagggcaaggtgagcctgaactgcagagccagagccagccccttccccgtgtacaagtggagaatgaacaacggcgacgtggacctgaccagcgacagatag

SEQ ID NO: 77591 - DNA, 222 bp, synthetic construct
  misc_feature 1..222: note = Description of Artificial Sequence: Synthetic coding sequence
  source 1..222: mol_type = other DNA
atgaagatgtggctgctggtgagccacctggtgatcatcagcatcaccacctgcctggccgagttcacctggtacagaagatacggccacggcgtgagcgaggaggacaagggcttcggccccatcttcgaggagcagcccatcaacaccatctaccccgaggagagcctggagggcaaggtgagcctgaactgcagagccagagccagccccttcccctag

SEQ ID NO: 77592 - DNA, 3123 bp, synthetic construct
  misc_feature 1..3123: note = Description of Artificial Sequence: Synthetic coding sequence
  source 1..3123: mol_type = other DNA
atgggcaccgccaccagaagaaagccccacctgctgctggtggccgccgtggccctggtgagcagcagcgcctggagcagcgccctgggcagccagaccaccttcggccccgtgttcgaggaccagcccctgagcgtgctgttccccgaggagagcaccgaggagcaggtgctgctggcctgcagagccagagccagcccccccgccacctacagatggaagatgaacggcaccgagatgaagctggagcccggcagcagacaccagctggtgggcggcaacctggtgatcatgaaccccaccaaggcccaggacgccggcgtgtaccagtgcctggccagcaaccccgtgggcaccgtggtgagcagagaggccatcctgagattcggcttcctgcaggagttcagcaaggaggagagagaccccgtgaaggcccacgagggctggggcgtgatgctgccctgcaacccccccgcccactaccccggcctgagctacagatggctgctgaacgagttccccaacttcatccccaccgacggcagacacttcgtgagccagaccaccggcaacctgtacatcgccagaaccaacgccagcgacctgggcaactacagctgcctggccaccagccacatggacttcagcaccaagagcgtgttcagcaagttcgcccagctgaacctggccgccgaggacaccagactgttcgcccccagcatcaaggccagattccccgccgagacctacgccctggtgggccagcaggtgaccctggagtgcttcgccttcggcaaccccgtgcccagaatcaagtggagaaaggtggacggcagcctgagcccccagtggaccaccgccgagcccaccctgcagatccccagcgtgagcttcgaggacgagggcacctacgagtgcgaggccgagaacagcaagggcagagacaccgtgcagggcagaatcatcgtgcaggcccagcccgagtggctgaaggtgatcagcgacaccgaggccgacatcggcagcaacctgagatggggctgcgccgccgccggcaagcccagacccaccgtgagatggctgagaaacggcgagcccctggccagccagaacagagtggaggtgctggccggcgacctgagattcagcaagctgagcctggaggacagcggcatgtaccagtgcgtggccgagaacaagcacggcaccatctacgccagcgccgagctggccgtgcaggccctggcccccgacttcagactgaaccccgtgagaagactgatccccgccgccagaggcggcgagatcctgatcccctgccagcccagagccgcccccaaggccgtggtgctgtggagcaagggcaccgagatcctggtgaacagcagcagagtgaccgtgacccccgacggcaccctgatcatcagaaacatcagcagaagcgacgagggcaagtacacctgcttcgccgagaacttcatgggcaaggccaacagcaccggcatcctgagcgtgagagacgccaccaagatcaccctggcccccagcagcgccgacatcaacctgggcgacaacctgaccctgcagtgccacgccagccacgaccccaccatggacctgaccttcacctggaccctggacgacttccccatcgacttcgacaagcccggcggccactacagaagaaccaacgtgaaggagaccatcggcgacctgaccatcctgaacgcccagctgagacacggcggcaagtacacctgcatggcccagaccgtggtggacagcgccagcaaggaggccaccgtgctggtgagaggcccccccggcccccccggcggcgtggtggtgagagacatcggcgacaccaccatccagctgagctggagcagaggcttcgacaaccacagccccatcgccaagtacaccctgcaggccagaaccccccccgccggcaagtggaagcaggtgagaaccaaccccgccaacatcgagggcaacgccgagaccgcccaggtgctgggcctgaccccctggatggactacgagttcagagtgatcgccagcaacatcctgggcaccggcgagcccagcggccccagcagcaagatcagaaccagagaggccgcccccagcgtggcccccagcggcctgagcggcggcggcggcgcccccggcgagctgatcgtgaactggacccccatgagcagagagtaccagaacggcgacggcttcggctacctgctgagcttcagaagacagggcagcacccactggcagaccgccagagtgcccggcgccgacgcccagtacttcgtgtacagcaacgagagcgtgagaccctacacccccttcgaggtgaagatcagaagctacaacagaagaggcgacggccccgagagcctgaccgccctggtgtacagcgccgaggaggagcccagagtggcccccaccaaggtgtgggccaagggcgtgagcagcagcgagatgaacgtgacctgggagcccgtgcagcaggacatgaacggcatcctgctgggctacgagatcagatactggaaggccggcgacaaggaggccgccgccgacagagtgagaaccgccggcctggacaccagcgccagagtgagcggcctgcaccccaacaccaagtaccacgtgaccgtgagagcctacaacagagccggcaccggccccgccagccccagcgccaacgccaccaccatgaagcccccccccagaagaccccccggcaacatcagctggaccttcagcagcagcagcctgagcatcaagtgggaccccgtggtgcccttcagaaacgagagcgccgtgaccggctacaagatgctgtaccagaacgacctgcacctgacccccaccctgcacctgaccggcaagaactggatcgagatccccgtgcccgaggacatcggccacgccctggtgcagatcagaaccaccggccccggcggcgacggcatccccgccgaggtgcacatcgtgagaaacggcggcaccagcatgatggtggagaacatggccgtgagacccgccccccaccccggcaccgtgatcagccacagcgtggccatgctgatcctgatcggcagcctggagctgtag

SEQ ID NO: 77593 - DNA, 3087 bp, synthetic construct
  misc_feature 1..3087: note = Description of Artificial Sequence: Synthetic coding sequence
  source 1..3087: mol_type = other DNA
atgatgttcccctggaagcagctgatcctgctgagcttcatcggctgcctgggcggcgagctgctgctgcagggccccgtgttcatcaaggagcccagcaacagcatcttccccgtgggcagcgaggacaagaagatcaccctgcactgcgaggccagaggcaaccccagcccccactacagatggcagctgaacggcagcgacatcgacatgagcatggagcacagatacaagctgaacggcggcaacctggtggtgatcaaccccaacagaaactgggacaccggcacctaccagtgcttcgccaccaacagcctgggcaccatcgtgagcagagaggccaagctgcagttcgcctacctggagaacttcaagaccaagatgagaagcaccgtgagcgtgagagagggccagggcgtggtgctgctgtgcggcccccccccccacagcggcgagctgagctacgcctggatcttcaacgagtaccccagcttcgtggaggaggacagcagaagattcgtgagccaggagaccggccacctgtacatcagcaaggtggagcccagcgacgtgggcaactacacctgcgtggtgaccagcatggtgaccaacgccagagtgctgggcagccccacccccctggtgctgagaagcgacggcgtgatgggcgagtacgagcccaagatcgaggtgcagttccccgagaccctgcccgccgccaagggcagcaccgtgaagctggagtgcttcgccctgggcaaccccatcccccagatcaactggagaagaagcgacggcctgcccttcagcagcaagatcaagctgagaaagttcagcggcgtgctggagatccccaacttccagcaggaggacgccggcagctacgagtgcatcgccgagaacagcagaggcaagaacgtggccagaggcagactgacctactacgccaagccccactgggtgcagctgatcaaggacgtggagatcgccgtggaggacagcctgtactgggagtgcagagccagcggcaagcccaagcccagctacagatggctgaagaacggcgccgccctggtgctggaggagagaacccagatcgagaacggcgccctgaccatcagcaacctgagcgtgaccgacagcggcatgttccagtgcatcgccgagaacaagcacggcctggtgtacagcagcgccgagctgaaggtggtggccagcgcccccgacttcagcaagaaccccatgaagaagctggtgcaggtgcaggtgggcagcctggtgagcctggactgcaagcccagagccagccccagagccctgagcagctggaagaagggcgacgtgagcgtgcaggagcacgagagaatcagcctgctgaacgacggcggcctgaagatcgccaacgtgaccaaggccgacgccggcacctacacctgcatggccgagaaccagttcggcaaggccaacggcaccacccacctggtggtgaccgagcccaccagaatcaccctggcccccagcaacatggacgtgagcgtgggcgagagcgtgatcctgccctgccaggtgcagcacgaccccctgctggacatcatcttcacctggtacttcaacggcgccctggccgacttcaagaaggacggcagccacttcgagaaggtgggcggcagcagcagcggcgacctgatgatcagaaacatccagctgaagcacagcggcaagtacgtgtgcatggtgcagaccggcgtggacagcgtgagcagcgccgccgacctgatcgtgagaggcagccccggcccccccgagaacgtgaaggtggacgagatcaccgacaccaccgcccagctgagctggaaggagggcaaggacaaccacagccccgtgatcagctacagcatccaggccagaacccccttcagcgtgggctggcagaccgtgaccaccgtgcccgaggtgatcgacggcaagacccacaccgccaccgtggtggagctgaacccctgggtggagtacgagttcagagtggtggccagcaacaagatcggcggcggcgagcccagcctgcccagcgagaaggtgagaaccgaggaggccgtgcccgaggtgccccccagcgaggtgaacggcggcggcggcagcagaagcgagctggtgatcacctgggaccccgtgcccgaggagctgcagaacggcgagggcttcggctacgtggtggccttcagacccctgggcgtgaccacctggatccagaccgtggtgaccagccccgacacccccagatacgtgttcagaaacgagagcatcgtgccctacagcccctacgaggtgaaggtgggcgtgtacaacaacaagggcgagggccccttcagccccgtgaccaccgtgttcagcgccgaggaggagcccaccgtggcccccagccaggtgagcgccaacagcctgagcagcagcgagatcgaggtgagctggaacaccatcccctggaagctgagcaacggccacctgctgggctacgaggtgagatactggaacggcggcggcaaggaggagagcagcagcaagatgaaggtggccggcaacgagaccagcgccagactgagaggcctgaagagcaacctggcctactacaccgccgtgagagcctacaacagcgccggcgccggccccttcagcgccaccgtgaacgtgaccaccaagaagaccccccccagccagccccccggcaacgtggtgtggaacgccaccgacaccaaggtgctgctgaactgggagcaggtgaaggccatggagaacgagagcgaggtgaccggctacaaggtgttctacagaaccagcagccagaacaacgtgcaggtgctgaacaccaacaagaccagcgccgagctggtgctgcccatcaaggaggactacatcatcgaggtgaaggccaccaccgacggcggcgacggcaccagcagcgagcagatcagaatccccagaatcaccagcatggacgccagaggcagcaccagcgccatcagcaacgtgcaccccatgagcagctacatgcccatcgtgctgttcctgatcgtgtacgtgctgtggtag

SEQ ID NO: 77594 - DNA, 2424 bp, synthetic construct
  misc_feature 1..2424: note = Description of Artificial Sequence: Synthetic coding sequence
  source 1..2424: mol_type = other DNA
atgggcgagtacgagcccaagatcgaggtgcagttccccgagaccgtgcccaccgccaagggcgccaccgtgaagctggagtgcttcgccctgggcaaccccgtgcccaccatcatctggagaagagccgacggcaagcccatcgccagaaaggccagaagacacaagagcaacggcatcctggagatccccaacttccagcaggaggacgccggcctgtacgagtgcgtggccgagaacagcagaggcaagaacgtggccagaggccagctgaccttctacgcccagcccaactggatccagaagatcaacgacatccacgtggccatggaggagaacgtgttctgggagtgcaaggccaacggcagacccaagcccacctacaagtggctgaagaacggcgagcccctgctgaccagagacagaatccagatcgagcagggcaccctgaacatcaccatcgtgaacctgagcgacgccggcatgtaccagtgcctggccgagaacaagcacggcgtgatcttcagcaacgccgagctgagcgtgatcgccgtgggccccgacttcagcagaaccctgctgaagagagtgaccctggtgaaggtgggcggcgaggtggtgatcgagtgcaagcccaaggccagccccaagcccgtgtacacctggaagaagggcagagacatcctgaaggagaacgagagaatcaccatcagcgaggacggcaacctgagaatcatcaacgtgaccaagagcgacgccggcagctacacctgcatcgccaccaaccacttcggcaccgccagcagcaccggcaacctggtggtgaaggaccccaccagagtgatggtgccccccagcagcatggacgtgaccgtgggcgagagcatcgtgctgccctgccaggtgacccacgaccacagcctggacatcgtgttcacctggagcttcaacggccacctgatcgacttcgacagagacggcgaccacttcgagagagtgggcggccaggacagcgccggcgacctgatgatcagaaacatccagctgaagcacgccggcaagtacgtgtgcatggtgcagaccagcgtggacagactgagcgccgccgccgacctgatcgtgagaggcccccccggcccccccgaggccgtgaccatcgacgagatcaccgacaccaccgcccagctgagctggagacccggccccgacaaccacagccccatcaccatgtacgtgatccaggccagaacccccttcagcgtgggctggcaggccgtgagcaccgtgcccgagctgatcgacggcaagaccttcaccgccaccgtggtgggcctgaacccctgggtggagtacgagttcagaaccgtggccgccaacgtgatcggcatcggcgagcccagcagacccagcgagaagagaagaaccgaggaggccctgcccgaggtgacccccgccaacgtgagcggcggcggcggcagcaagagcgagctggtgatcacctgggagaccgtgcccgaggagctgcagaacggcagaggcttcggctacgtggtggccttcagaccctacggcaagatgatctggatgctgaccgtgctggccagcgccgacgccagcagatacgtgttcagaaacgagagcgtgcaccccttcagccccttcgaggtgaaggtgggcgtgttcaacaacaagggcgagggccccttcagccccaccaccgtggtgtacagcgccgaggaggagcccaccaagccccccgccagcatcttcgccagaagcctgagcgccaccgacatcgaggtgttctgggccagccccctggagaagaacagaggcagaatccagggctacgaggtgaagtactggagacacgaggacaaggaggagaacgccagaaagatcagaaccgtgggcaaccagaccagcaccaagatcaccaacctgaagggcagcgtgctgtaccacctggccgtgaaggcctacaacagcgccggcaccggccccagcagcgccaccgtgaacgtgaccaccagaaagcccccccccagccagccccccggcaacatcatctggaacagcagcgacagcaagatcatcctgaactgggaccaggtgaaggccctggacaacgagagcgaggtgaagggctacaaggtgctgtacagatggaacagacagagcagcaccagcgtgatcgagaccaacaagaccagcgtggagctgagcctgcccttcgacgaggactacatcatcgagatcaagcccttcagcgacggcggcgacggcagcagcagcgagcagatcagaatccccaagatcagcaacgcctacgccagaggcagcggcgccagcaccagcaacgcctgcaccctgagcgccatcagcaccatcatgatcagcctgaccgccagaagcagcctgtag

SEQ ID NO: 77595 - DNA, 2097 bp, synthetic construct
  misc_feature 1..2097: note = Description of Artificial Sequence: Synthetic coding sequence
  source 1..2097: mol_type = other DNA
atggaggagaacgtgttctgggagtgcaaggccaacggcagacccaagcccacctacaagtggctgaagaacggcgagcccctgctgaccagagacagaatccagatcgagcagggcaccctgaacatcaccatcgtgaacctgagcgacgccggcatgtaccagtgcctggccgagaacaagcacggcgtgatcttcagcaacgccgagctgagcgtgatcgccgtgggccccgacttcagcagaaccctgctgaagagagtgaccctggtgaaggtgggcggcgaggtggtgatcgagtgcaagcccaaggccagccccaagcccgtgtacacctggaagaagggcagagacatcctgaaggagaacgagagaatcaccatcagcgaggacggcaacctgagaatcatcaacgtgaccaagagcgacgccggcagctacacctgcatcgccaccaaccacttcggcaccgccagcagcaccggcaacctggtggtgaaggaccccaccagagtgatggtgccccccagcagcatggacgtgaccgtgggcgagagcatcgtgctgccctgccaggtgacccacgaccacagcctggacatcgtgttcacctggagcttcaacggccacctgatcgacttcgacagagacggcgaccacttcgagagagtgggcggccaggacagcgccggcgacctgatgatcagaaacatccagctgaagcacgccggcaagtacgtgtgcatggtgcagaccagcgtggacagactgagcgccgccgccgacctgatcgtgagaggcccccccggcccccccgaggccgtgaccatcgacgagatcaccgacaccaccgcccagctgagctggagacccggccccgacaaccacagccccatcaccatgtacgtgatccaggccagaacccccttcagcgtgggctggcaggccgtgagcaccgtgcccgagctgatcgacggcaagaccttcaccgccaccgtggtgggcctgaacccctgggtggagtacgagttcagaaccgtggccgccaacgtgatcggcatcggcgagcccagcagacccagcgagaagagaagaaccgaggaggccctgcccgaggtgacccccgccaacgtgagcggcggcggcggcagcaagagcgagctggtgatcacctgggagaccgtgcccgaggagctgcagaacggcagaggcttcggctacgtggtggccttcagaccctacggcaagatgatctggatgctgaccgtgctggccagcgccgacgccagcagatacgtgttcagaaacgagagcgtgcaccccttcagccccttcgaggtgaaggtgggcgtgttcaacaacaagggcgagggccccttcagccccaccaccgtggtgtacagcgccgaggaggagcccaccaagccccccgccagcatcttcgccagaagcctgagcgccaccgacatcgaggtgttctgggccagccccctggagaagaacagaggcagaatccagggctacgaggtgaagtactggagacacgaggacaaggaggagaacgccagaaagatcagaaccgtgggcaaccagaccagcaccaagatcaccaacctgaagggcagcgtgctgtaccacctggccgtgaaggcctacaacagcgccggcaccggccccagcagcgccaccgtgaacgtgaccaccagaaagcccccccccagccagccccccggcaacatcatctggaacagcagcgacagcaagatcatcctgaactgggaccaggtgaaggccctggacaacgagagcgaggtgaagggctacaaggtgctgtacagatggaacagacagagcagcaccagcgtgatcgagaccaacaagaccagcgtggagctgagcctgcccttcgacgaggactacatcatcgagatcaagcccttcagcgacggcggcgacggcagcagcagcgagcagatcagaatccccaagatcagcaacgcctacgccagaggcagcggcgccagcaccagcaacgcctgcaccctgagcgccatcagcaccatcatgatcagcctgaccgccagaagcagcctgtag

SEQ ID NO: 77596 - DNA, 3081 bp, synthetic construct
  misc_feature 1..3081: note = Description of Artificial Sequence: Synthetic coding sequence
  source 1..3081: mol_type = other DNA
atgagactgccctgggagctgctggtgctgcagagcttcatcctgtgcctggccgacgacagcaccctgcacggccccatcttcatccaggagcccagccccgtgatgttccccctggacagcgaggagaagaaggtgaagctgaactgcgaggtgaagggcaaccccaagccccacatcagatggaagctgaacggcaccgacgtggacaccggcatggacttcagatacagcgtggtggagggcagcctgctgatcaacaaccccaacaagacccaggacgccggcacctaccagtgcaccgccaccaacagcttcggcaccatcgtgagcagagaggccaagctgcagttcgcctacctggacaacttcaagaccagaaccagaagcaccgtgagcgtgagaagaggccagggcatggtgctgctgtgcggcccccccccccacagcggcgagctgagctacgcctggatcttcaacgagtaccccagctaccaggacaacagaagattcgtgagccaggagaccggcaacctgtacatcgccaaggtggagaagagcgacgtgggcaactacacctgcgtggtgaccaacaccgtgaccaaccacaaggtgctgggcccccccacccccctgatcctgagaaacgacggcgtgatgggcgagtacgagcccaagatcgaggtgcagttccccgagaccgtgcccaccgccaagggcgccaccgtgaagctggagtgcttcgccctgggcaaccccgtgcccaccatcatctggagaagagccgacggcaagcccatcgccagaaaggccagaagacacaagagcaacggcatcctggagatccccaacttccagcaggaggacgccggcctgtacgagtgcgtggccgagaacagcagaggcaagaacgtggccagaggccagctgaccttctacgcccagcccaactggatccagaagatcaacgacatccacgtggccatggaggagaacgtgttctgggagtgcaaggccaacggcagacccaagcccacctacaagtggctgaagaacggcgagcccctgctgaccagagacagaatccagatcgagcagggcaccctgaacatcaccatcgtgaacctgagcgacgccggcatgtaccagtgcctggccgagaacaagcacggcgtgatcttcagcaacgccgagctgagcgtgatcgccgtgggccccgacttcagcagaaccctgctgaagagagtgaccctggtgaaggtgggcggcgaggtggtgatcgagtgcaagcccaaggccagccccaagcccgtgtacacctggaagaagggcagagacatcctgaaggagaacgagagaatcaccatcagcgaggacggcaacctgagaatcatcaacgtgaccaagagcgacgccggcagctacacctgcatcgccaccaaccacttcggcaccgccagcagcaccggcaacctggtggtgaaggaccccaccagagtgatggtgccccccagcagcatggacgtgaccgtgggcgagagcatcgtgctgccctgccaggtgacccacgaccacagcctggacatcgtgttcacctggagcttcaacggccacctgatcgacttcgacagagacggcgaccacttcgagagagtgggcggccaggacagcgccggcgacctgatgatcagaaacatccagctgaagcacgccggcaagtacgtgtgcatggtgcagaccagcgtggacagactgagcgccgccgccgacctgatcgtgagaggcccccccggcccccccgaggccgtgaccatcgacgagatcaccgacaccaccgcccagctgagctggagacccggccccgacaaccacagccccatcaccatgtacgtgatccaggccagaacccccttcagcgtgggctggcaggccgtgagcaccgtgcccgagctgatcgacggcaagaccttcaccgccaccgtggtgggcctgaacccctgggtggagtacgagttcagaaccgtggccgccaacgtgatcggcatcggcgagcccagcagacccagcgagaagagaagaaccgaggaggccctgcccgaggtgacccccgccaacgtgagcggcggcggcggcagcaagagcgagctggtgatcacctgggagaccgtgcccgaggagctgcagaacggcagaggcttcggctacgtggtggccttcagaccctacggcaagatgatctggatgctgaccgtgctggccagcgccgacgccagcagatacgtgttcagaaacgagagcgtgcaccccttcagccccttcgaggtgaaggtgggcgtgttcaacaacaagggcgagggccccttcagccccaccaccgtggtgtacagcgccgaggaggagcccaccaagccccccgccagcatcttcgccagaagcctgagcgccaccgacatcgaggtgttctgggccagccccctggagaagaacagaggcagaatccagggctacgaggtgaagtactggagacacgaggacaaggaggagaacgccagaaagatcagaaccgtgggcaaccagaccagcaccaagatcaccaacctgaagggcagcgtgctgtaccacctggccgtgaaggcctacaacagcgccggcaccggccccagcagcgccaccgtgaacgtgaccaccagaaagcccccccccagccagccccccggcaacatcatctggaacagcagcgacagcaagatcatcctgaactgggaccaggtgaaggccctggacaacgagagcgaggtgaagggctacaaggtgctgtacagatggaacagacagagcagcaccagcgtgatcgagaccaacaagaccagcgtggagctgagcctgcccttcgacgaggactacatcatcgagatcaagcccttcagcgacggcggcgacggcagcagcagcgagcagatcagaatccccaagatcagcaacgcctacgccagaggcagcggcgccagcaccagcaacgcctgcaccctgagcgccatcagcaccatcatgatcagcctgaccgccagaagcagcctgtag

SEQ ID NO: 77597 - DNA, 3081 bp, synthetic construct; identical to SEQ ID NO: 77596
  misc_feature 1..3081: note = Description of Artificial Sequence: Synthetic coding sequence
  source 1..3081: mol_type = other DNA

SEQ ID NO: 77598 - DNA, 351 bp, synthetic construct
  misc_feature 1..351: note = Description of Artificial Sequence: Synthetic coding sequence
  source 1..351: mol_type = other DNA
atgagactgccctgggagctgctggtgctgcagagcttcatcctgtgcctggccgacgacagcaccctgcacggccccatcttcatccaggagcccagccccgtgatgttccccctggacagcgaggagaagaaggtgaagctgaactgcgaggtgaagggcaaccccaagccccacatcagatggaagctgaacggcaccgacgtggacaccggcatggacttcagatacagcgtggtggagggcagcctgctgatcaacaaccccaacaagacccaggacgccggcacctaccagtgcaccgccaccaacagcttcggcaccatcgtgagcagagaggccaagctgtag

SEQ ID NO: 77599 - DNA, 3081 bp, synthetic construct; identical to SEQ ID NO: 77596
  misc_feature 1..3081: note = Description of Artificial Sequence: Synthetic coding sequence
  source 1..3081: mol_type = other DNA

SEQ ID NO: 77600 - DNA, 2097 bp, synthetic construct; identical to SEQ ID NO: 77595
  misc_feature 1..2097: note = Description of Artificial Sequence: Synthetic coding sequence
  source 1..2097: mol_type = other DNA

SEQ ID NO: 77601 - DNA, 165 bp, synthetic construct
  misc_feature 1..165: note = Description of Artificial Sequence: Synthetic coding sequence
  source 1..165: mol_type = other DNA
atgagactgccctgggagctgctggtgctgcagagcttcatcctgtgcctggccgacgacagcaccctgcacggccccatcttcatccaggagcccagccccgtgatgttccccctggacagcgaggagaagaaggtgaagctgaactgcgaggtgaagggctag

SEQ ID NO: 77602 - DNA, 3303 bp, synthetic construct
  misc_feature 1..3303: note = Description of Artificial Sequence: Synthetic coding sequence
  source 1..3303: mol_type = other DNA
atggccagcagctggaagctgatgctgttcctgagcgtgaccatgtgcctgagcgagtacagcaagagcctgcccggcctgagcaccagctacgccgccctgctgagaatcaagaagagcagcagcagcagcctgttcggcagcaagaccagacccagatacagcagccccagcctgggcaccctgagcgccagcagccccagctggctgggcgccgcccagaactactacagccccatcaacctgtaccacagcagcgacgccttcaagcaggacgagagcgtggactacggccccgtgttcgtgcaggagcccgacgacatcatcttccccaccgacagcgacgagaagaaggtggccctgaactgcgaggtgagaggcaaccccgtgcccagctacagatggctgagaaacggcaccgagatcgacctggagagcgactacagatacagcctgatcgacggcaccttcatcatcagcaaccccagcgaggccaaggacagcggccactaccagtgcctggccaccaacaccgtgggcagcatcctgagcagagaggccaccctgcagttcgcctacctgggcaacttcagcggcagaaccagaagcgccgtgagcgtgagagagggccagggcgtggtgctgatgtgcagcccccccccccacagccccgagatcatctacagctgggtgttcaacgagttccccagcttcgtggccgaggacagcagaagattcatcagccaggagaccggcaacctgtacatcagcaaggtgcagaccagcgacgtgggcagctacatctgcctggtgaagaacaccgtgaccaacgccagagtgctgagcccccccacccccctgaccctgagaaacgacggcgtgatgggcgagtacgagcccaagatcgaggtgcacttccccttcaccgtgaccgccgccaagggcaccaccgtgaagatggagtgcttcgccctgggcaaccccgtgcccaccatcacctggatgaaggtgaacggctacatccccagcaaggccagactgagaaagagccaggccgtgctggagatccccaacgtgcagctggacgacgccggcatctacgagtgcagagccgagaacagcagaggcaagaacagcttcagaggccagctgcaggtgtacacctacccccactgggtggagaagctgaacgacacccagctggacagcggcagccccctgagatgggagtgcaaggccaccggcaagcccagacccacctacagatggctgaagaacggcgtgcccctgagcccccagagcagagtggagatggtgaacggcgtgctgatgatccacaacgtgaaccagagcgacgccggcatgtaccagtgcctggccgagaacaagtacggcgccatctacgccagcgccgagctgaagatcctggccagcgcccccaccttcgccctgaaccagctgaagaagaccatcatcgtgaccaaggaccaggaggtggtgatcgagtgcaagccccagggcagccccaagcccaccatcagctggaagaagggcgacagagccgtgagagagaacaagagaatcgccatcctgcccgacggcagcctgagaatcctgaacgccagcaagagcgacgagggcaagtacgtgtgcagaggcgagaacgtgttcggcagcgccgagatcatcgccagcctgagcgtgaaggagcccaccagaatcgagctgacccccaagagaaccgagctgaccgtgggcgagagcatcgtgctgaactgcaaggccatccacgacgccagcctggacgtgaccttctactggaccctgaagggccagcccatcgacttcgaggaggagggcggccacttcgagagcatcagagcccaggccagcagcgccgacctgatgatcagaaacatcctgctgatgcacgccggcagatacggctgcagagtgcagaccaccgccgacagcgtgagcgacgaggccgagctgctggtgagaggcccccccggcccccccggcatcgtgatcgtggaggagatcaccgagagcaccgccaccctgagctggagccccgccgccgacaaccacagccccatcagcagctacaacctgcaggccagaagccccttcagcctgggctggcagaccgtgaagaccgtgcccgagatcatcaccggcgacatggagagcgccatggccgtggacctgaacccctgggtggagtacgagttcagagtggtggccaccaaccccatcggcaccggcgaccccagcacccccagcagaatgatcagaaccaacgaggccgtgcccaagaccgcccccaccaacgtgagcggcagaagcggcagaagacacgagctggtgatcgcctgggagcccgtgagcgaggagttccagaacggcgagggcttcggctacatcgtggccttcagacccaacggcaccagaggctggaaggagaagatggtgaccagcagcgaggccagcaagttcatctacagagacgagagcgtgccccccctgacccccttcgaggtgaaggtgggcgtgtacaacaacaagggcgacggccccttcagccagatcgtggtgatctgcagcgccgagggcgagcccagcgccgcccccaccgacgtgaaggccaccagcgtgagcgtgagcgagatcctggtggcctggaagcacatcaaggagagcctgggcagaccccagggcttcgaggtgggctactggaaggacatggagcaggaggacaccgccgagaccgtgaagaccagaggcaacgagagcttcgtgatcctgaccggcctggagggcaacaccctgtaccacttcaccgtgagagcctacaacggcgccggctacggcccccccagcagcgaggtgagcgccaccaccaagaagagcccccccagccaggcccccagcaacctgagatgggagcagcagggcagccaggtgagcctgggctgggagcccgtgatccccctggccaacgagagcgaggtggtgggctacaaggtgttctacagacaggagggccacagcaacagccaggtgatcgagacccagaagctgcaggccgtggtgcccctgcccgacgccggcgtgtacatcatcgaggtgagagcctacagcgagggcggcgacggcaccgccagcagccagatcagagtgcccagctacagcggcggcaagatcaccagcgcccagagcaccctgcacagcctgagcaccagcagcagcagcgtgaccctgctgctggccctgatgatccccagcaccagctggtag

SEQ ID NO: 77603 - DNA, 3081 bp, synthetic construct
  misc_feature 1..3081: note = Description of Artificial Sequence: Synthetic coding sequence
  source 1..3081: mol_type = other DNA
atggccagcagctggaagctgatgctgttcctgagcgtgaccatgtgcctgagcgagagcgtggactacggccccgtgttcgtgcaggagcccgacgacatcatcttccccaccgacagcgacgagaagaaggtggccctgaactgcgaggtgagaggcaaccccgtgcccagctacagatggctgagaaacggcaccgagatcgacctggagagcgactacagatacagcctgatcgacggcaccttcatcatcagcaaccccagcgaggccaaggacagcggccactaccagtgcctggccaccaacaccgtgggcagcatcctgagcagagaggccaccctgcagttcgcctacctgggcaacttcagcggcagaaccagaagcgccgtgagcgtgagagagggccagggcgtggtgctgatgtgcagcccccccccccacagccccgagatcatctacagctgggtgttcaacgagttccccagcttcgtggccgaggacagcagaagattcatcagccaggagaccggcaacctgtacatcagcaaggtgcagaccagcgacgtgggcagctacatctgcctggtgaagaacaccgtgaccaacgccagagtgctgagcccccccacccccctgaccctgagaaacgacggcgtgatgggcgagtacgagcccaagatcgaggtgcacttccccttcaccgtgaccgccgccaagggcaccaccgtgaagatggagtgcttcgccctgggcaaccccgtgcccaccatcacctggatgaaggtgaacggctacatccccagcaaggccagactgagaaagagccaggccgtgctggagatccccaacgtgcagctggacgacgccggcatctacgagtgcagagccgagaacagcagaggcaagaacagcttcagaggccagctgcaggtgtacacctacccccactgggtggagaagctgaacgacacccagctggacagcggcagccccctgagatgggagtgcaaggccaccggcaagcccagacccacctacagatggctgaagaacggcgtgcccctgagcccccagagcagagtggagatggtgaacggcgtgctgatgatccacaacgtgaaccagagcgacgccggcatgtaccagtgcctggccgagaacaagtacggcgccatctacgccagcgccgagctgaagatcctggccagcgcccccaccttcgccctgaaccagctgaagaagaccatcatcgtgaccaaggaccaggaggtggtgatcgagtgcaagccccagggcagccccaagcccaccatcagctggaagaagggcgacagagccgtgagagagaacaagagaatcgccatcctgcccgacggcagcctgagaatcctgaacgccagcaagagcgacgagggcaagtacgtgtgcagaggcgagaacgtgttcggcagcgccgagatcatcgccagcctgagcgtgaaggagcccaccagaatcgagctgacccccaagagaaccgagctgaccgtgggcgagagcatcgtgctgaactgcaaggccatccacgacgccagcctggacgtgaccttctactggaccctgaagggccagcccatcgacttcgaggaggagggcggccacttcgagagcatcagagcccaggccagcagcgccgacctgatgatcagaaacatcctgctgatgcacgccggcagatacggctgcagagtgcagaccaccgccgacagcgtgagcgacgaggccgagctgctggtgagaggcccccccggcccccccggcatcgtgatcgtggaggagatcaccgagagcaccgccaccctgagctggagccccgccgccgacaaccacagccccatcagcagctacaacctgcaggccagaagccccttcagcctgggctggcagaccgtgaagaccgtgcccgagatcatcaccggcgacatggagagcgccatggccgtggacctgaacccctgggtggagtacgagttcagagtggtggccaccaaccccatcggcaccggcgaccccagcacccccagcagaatgatcagaaccaacgaggccgtgcccaagaccgcccccaccaacgtgagcggcagaagcggcagaagacacgagctggtgatcgcctgggagcccgtgagcgaggagttccagaacggcgagggcttcggctacatcgtggccttcagacccaacggcaccagaggctggaaggagaagatggtgaccagcagcgaggccagcaagttcatctacagagacgagagcgtgccccccctgacccccttcgaggtgaaggtgggcgtgtacaacaacaagggcgacggccccttcagccagatcgtggtgatctgcagcgccgagggcgagcccagcgccgcccccaccgacgtgaaggccaccagcgtgagcgtgagcgagatcctggtggcctggaagcacatcaaggagagcctgggcagaccccagggcttcgaggtgggctactggaaggacatggagcaggaggacaccgccgagaccgtgaagaccagaggcaacgagagcttcgtgatcctgaccggcctggagggcaacaccctgtaccacttcaccgtgagagcctacaacggcgccggctacggcccccccagcagcgaggtgagcgccaccaccaagaagagcccccccagccaggcccccagcaacctgagatgggagcagcagggcagccaggtgagcctgggctgggagcccgtgatccccctggccaacgagagcgaggtggtgggctacaaggtgttctacagacaggagggccacagcaacagccaggtgatcgagacccagaagctgcaggccgtggtgcccctgcccgacgccggcgtgtacatcatcgaggtgagagcctacagcgagggcggcgacggcaccgccagcagccagatcagagtgcccagctacagcggcggcaagatcaccagcgcccagagcaccctgcacagcctgagcaccagcagcagcagcgtgaccctgctgctggccctgatgatccccagcaccagctggtag

SEQ ID NO: 77604 - DNA, 3303 bp, synthetic construct; identical to SEQ ID NO: 77602
  misc_feature 1..3303: note = Description of Artificial Sequence: Synthetic coding sequence
  source 1..3303: mol_type = other DNA

SEQ ID NO: 77605 - DNA, 3303 bp, synthetic construct; identical to SEQ ID NO: 77602
  misc_feature 1..3303: note = Description of Artificial Sequence: Synthetic coding sequence
  source 1..3303: mol_type = other DNA

SEQ ID NO: 77606 - DNA, 2736 bp, synthetic construct
  misc_feature 1..2736: note = Description of Artificial Sequence: Synthetic coding sequence
  source 1..2736: mol_type = other DNA
atggccagcagctggaagctgatgctgttcctgagcgtgaccatgtgcctgagcgagtacagcaagagcctgcccggcctgagcaccagctacgccgccctgctgagaatcaagaagagcagcagcagcagcctgttcggcagcaagaccagacccagatacagcagccccagcctgggcaccctgagcgccagcagccccagctggctgggcgccgcccagaactactacagccccatcaacctgtaccacagcagcgacgccttcaagcaggacgagagcgtggactacggccccgtgttcgtgcaggagcccgacgacatcatcttccccaccgacagcgacgagaagaaggtggccctgaactgcgaggtgagaggcaaccccgtgcccagctacagatggctgagaaacggcaccgagatcgacctggagagcgactacagatacagcctgatcgacggcaccttcatcatcagcaaccccagcgaggccaaggacagcggccactaccagtgcctggccaccaacaccgtgggcagcatcctgagcagagaggccaccctgcagttcgcctacctgggcaacttcagcggcagaaccagaagcgccgtgagcgtgagagagggccagggcgtggtgctgatgtgcagcccccccccccacagccccgagatcatctacagctgggtgttcaacgagttccccagcttcgtggccgaggacagcagaagattcatcagccaggagaccggcaacctgtacatcagcaaggtgcagaccagcgacgtgggcagctacatctgcctggtgaagaacaccgtgaccaacgccagagtgctgagcccccccacccccctgaccctgagaaacgacggcgtgatgggcgagtacgagcccaagatcgaggtgcacttccccttcaccgtgaccgccgccaagggcaccaccgtgaagatggagtgcttcgccctgggcaaccccgtgcccaccatcacctggatgaaggtgaacggctacatccccagcaaggccagactgagaaagagccaggccgtgctggagatccccaacgtgcagctggacgacgccggcatctacgagtgcagagccgagaacagcagaggcaagaacagcttcagaggccagctgcaggtgtacacctacccccactgggtggagaagctgaacgacacccagctggacagcggcagccccctgagatgggagtgcaaggccaccggcaagcccagacccacctacagatggctgaagaacggcgtgcccctgagcccccagagcagagtggagatggtgaacggcgtgctgatgatccacaacgtgaaccagagcgacgccggcatgtaccagtgcctggccgagaacaagtacggcgccatctacgccagcgccgagctgaagatcctggccagcgcccccaccttcgccctgaaccagctgaagaagaccatcatcgtgaccaaggaccaggaggtggtgatcgagtgcaagccccagggcagccccaagcccaccatcagctggaagaagggcgacagagccgtgagagagaacaagagaatcgccatcctgcccgacggcagcctgagaatcctgaacgccagcaagagcgacgagggcaagtacgtgtgcagaggcgagaacgtgttcggcagcgccgagatcatcgccagcctgagcgtgaaggagcccaccagaatcgagctgacccccaagagaaccgagctgaccgtgggcgagagcatcgtgctgaactgcaaggccatccacgacgccagcctggacgtgaccttctactggaccctgaagggccagcccatcgacttcgaggaggagggcggccacttcgagagcatcagagcccaggccagcagcgccgacctgatgatcagaaacatcctgctgatgcacgccggcagatacggctgcagagtgcagaccaccgccgacagcgtgagcgacgaggccgagctgctggtgagaggcccccccggcccccccggcatcgtgatcgtggaggagatcaccgagagcaccgccaccctgagctggagccccgccgccgacaaccacagccccatcagcagctacaacctgcaggccagaagccccttcagcctgggctggcagaccgtgaagaccgtgcccgagatcatcaccggcgacatggagagcgccatggccgtggacctgaacccctgggtggagtacgagttcagagtggtggccaccaaccccatcggcaccggcgaccccagcacccccagcagaatgatcagaaccaacgaggccgtgcccaagaccgcccccaccaacgtgagcggcagaagcggcagaagacacgagctggtgatcgcctgggagcccgtgagcgaggagttccagaacggcgagggcttcggctacatcgtggccttcagacccaacggcaccagaggctggaaggagaagatggtgaccagcagcgaggccagcaagttcatctacagagacgagagcgtgccccccctgacccccttcgaggtgaaggtgggcgtgtacaacaacaagggcgacggccccttcagccagatcgtggtgatctgcagcgccgagggcgagcccagcgccgcccccaccgacgtgaaggccaccagcgtgagcgtgagcgagatcctggtggcctggaagcacatcaaggagagcctgggcagaccccagggcttcgaggtgtag

SEQ ID NO: 77607 - DNA, 3087 bp, synthetic construct
  misc_feature 1..3087: note = Description of Artificial Sequence: Synthetic coding sequence
  source 1..3087: mol_type = other DNA
atgagactgctgtggaagctggtgatcctgctgcccctgatcaacagcagcgccggcgacggcctgctgagcagacccatcttcacccaggagccccacgacgtgatcttccccctggacctgagcaagagcgaggtgatcctgaactgcgccgccaacggctaccccagcccccactacagatggaagcagaacggcaccgacatcgacttcaccatgagctaccactacagactggacggcggcagcctggccatcaacagcccccacaccgaccaggacatcggcatgtaccagtgcctggccaccaacctgctgggcaccatcctgagcagaaaggccaagctgcagttcgcctacatcgaggacttcgagaccaagaccagaagcaccgtgagcgtgagagagggccagggcgtggtgctgctgtgcggcccccccccccacttcggcgacctgagctacgcctggaccttcaacgacaaccccctgtacgtgcaggaggacaacagaagattcgtgagccaggagaccggcaacctgtacatcgccaaggtggagcccagcgacgtgggcaactacacctgcttcatcaccaacaaggaggcccagagaagcgtgcagggcccccccacccccctggtgcagagaaccgacggcgtgatgggcgagtacgagcccaagatcgaggtgagattccccgagaccatccaggccgccaaggacagcagcgtgaagctggagtgcttcgccctgggcaaccccgtgcccgacatcagctggagaagactggacggcagccccctgcccggcaaggtgaagtacagcaagagccaggccatcctggagatccccaacttccagcaggaggacgagggcttctacgagtgcatcgccagcaacctgagaggcagaaacctggccaagggccagctgatcttctacgccccccccgagtgggagcagaagatccagaacacccacctgagcatctacgacaacctgctgtgggagtgcaaggccagcggcaagcccaacccctggtacacctggctgaagaacggcgagagactgaaccccgaggagagaatccagatcgagaacggcaccctgatcatcaccatgctgaacgtgagcgacagcggcgtgtaccagtgcgccgccgagaacaagtaccagatcatctacgccaacgccgagctgagagtgctggccagcgcccccgacttcagcaagagccccgtgaagaagaagagcttcgtgcaggtgggcggcgacatcgtgatcggctgcaagcccaacgccttccccagagccgccatcagctggaagagaggcaccgagaccctgagacagagcaagagaatcttcctgctggaggacggcagcctgaagatctacaacatcaccagaagcgacgccggcagctacacctgcatcgccaccaaccagttcggcaccgccaagaacaccggcagcctgatcgtgaaggagagaaccgtgatcaccgtgccccccagcaagatggacgtgaccgtgggcgagagcatcgtgctgccctgccaggtgagccacgaccccagcatcgaggtggtgttcgtgtggttcttcaacggcgacgtgatcgacctgaagaagggcgtggcccacttcgagagaatcggcggcgagagcgtgggcgacctgatgatcagaaacatccagctgcaccacagcggcaagtacctgtgcaccgtgcagaccaccctggagagcctgagcgccgtggccgacatcatcgtgagaggcccccccggcccccccgaggacgtgcaggtggaggacatcagcagcaccaccagccagctgagctggagagccggccccgacaacaacagccccatccagatcttcaccatccagaccagaacccccttcagcgtgggctggcaggccgtggccaccgtgcccgagatcctgaacggcaagacctacaacgccaccgtggtgggcctgagcccctgggtggagtacgagttcagagtggtggccggcaacagcatcggcatcggcgagcccagcgagcccagcgagctgctgagaaccaaggccagcgtgcccgtggtggcccccgtgaacatccacggcggcggcggcagcagaagcgagctggtgatcacctgggagagcatccccgaggagctgcagaacggcgagggcttcggctacatcatcatgttcagacccgtgggcagcaccacctggagcaaggagaaggtgagcagcgtggagagcagcagattcgtgtacagaaacgagagcatcatccccctgagccccttcgaggtgaaggtgggcgtgtacaacaacgagggcgagggcagcctgagcaccgtgaccatcgtgtacagcggcgaggacgagccccagctggcccccagaggcaccagcctgcagagcttcagcgccagcgagatggaggtgagctggaacgccatcgcctggaacagaaacaccggcagagtgctgggctacgaggtgctgtactggaccgacgacagcaaggagagcatgatcggcaagatcagagtgagcggcaacgtgaccaccaagaacatcaccggcctgaaggccaacaccatctacttcgccagcgtgagagcctacaacaccgccggcaccggccccagcagcccccccgtgaacgtgaccaccaagaagagcccccccagccagccccccgccaacatcgcctggaagctgaccaacagcaagctgtgcctgaactgggagcacgtgaagaccatggagaacgagagcgaggtgctgggctacaagatcctgtacagacagaacagacagagcaagacccacatcctggagaccaacaacaccagcgccgagctgctggtgcccttcgaggaggactacctgatcgagatcagaaccgtgagcgacggcggcgacggcagcagcagcgaggagatcagaatccccaagatgagcagcctgagcagcagaggcatccagttcctggagcccagcacccacttcctgagcatcgtgatcgtgatcttccactgcttcgccatccagcccctgatctag

SEQ ID NO: 77608 - DNA, 3087 bp, synthetic construct; identical to SEQ ID NO: 77607
  misc_feature 1..3087: note = Description of Artificial Sequence: Synthetic coding sequence
  source 1..3087: mol_type = other DNA

SEQ ID NO: 77609 - DNA, 2871 bp, synthetic construct
  misc_feature 1..2871: note = Description of Artificial Sequence: Synthetic coding sequence
  source 1..2871: mol_type = other DNA
atgagctaccactacagactggacggcggcagcctggccatcaacagcccccacaccgaccaggacatcggcatgtaccagtgcctggccaccaacctgctgggcaccatcctgagcagaaaggccaagctgcagttcgcctacatcgaggacttcgagaccaagaccagaagcaccgtgagcgtgagagagggccagggcgtggtgctgctgtgcggcccccccccccacttcggcgacctgagctacgcctggaccttcaacgacaaccccctgtacgtgcaggaggacaacagaagattcgtgagccaggagaccggcaacctgtacatcgccaaggtggagcccagcgacgtgggcaactacacctgcttcatcaccaacaaggaggcccagagaagcgtgcagggcccccccacccccctggtgcagagaaccgacggcgtgatgggcgagtacgagcccaagatcgaggtgagattccccgagaccatccaggccgccaaggacagcagcgtgaagctggagtgcttcgccctgggcaaccccgtgcccgacatcagctggagaagactggacggcagccccctgcccggcaaggtgaagtacagcaagagccaggccatcctggagatccccaacttccagcaggaggacgagggcttctacgagtgcatcgccagcaacctgagaggcagaaacctggccaagggccagctgatcttctacgccccccccgagtgggagcagaagatccagaacacccacctgagcatctacgacaacctgctgtgggagtgcaaggccagcggcaagcccaacccctggtacacctggctgaagaacggcgagagactgaaccccgaggagagaatccagatcgagaacggcaccctgatcatcaccatgctgaacgtgagcgacagcggcgtgtaccagtgcgccgccgagaacaagtaccagatcatctacgccaacgccgagctgagagtgctggccagcgcccccgacttcagcaagagccccgtgaagaagaagagcttcgtgcaggtgggcggcgacatcgtgatcggctgcaagcccaacgccttccccagagccgccatcagctggaagagaggcaccgagaccctgagacagagcaagagaatcttcctgctggaggacggcagcctgaagatctacaacatcaccagaagcgacgccggcagctacacctgcatcgccaccaaccagttcggcaccgccaagaacaccggcagcctgatcgtgaaggagagaaccgtgatcaccgtgccccccagcaagatggacgtgaccgtgggcgagagcatcgtgctgccctgccaggtgagccacgaccccagcatcgaggtggtgttcgtgtggttcttcaacggcgacgtgatcgacctgaagaagggcgtggcccacttcgagagaatcggcggcgagagcgtgggcgacctgatgatcagaaacatccagctgcaccacagcggcaagtacctgtgcaccgtgcagaccaccctggagagcctgagcgccgtggccgacatcatcgtgagaggcccccccggcccccccgaggacgtgcaggtggaggacatcagcagcaccaccagccagctgagctggagagccggccccgacaacaacagccccatccagatcttcaccatccagaccagaacccccttcagcgtgggctggcaggccgtggccaccgtgcccgagatcctgaacggcaagacctacaacgccaccgtggtgggcctgagcccctgggtggagtacgagttcagagtggtggccggcaacagcatcggcatcggcgagcccagcgagcccagcgagctgctgagaaccaaggccagcgtgcccgtggtggcccccgtgaacatccacggcggcggcggcagcagaagcgagctggtgatcacctgggagagcatccccgaggagctgcagaacggcgagggcttcggctacatcatcatgttcagacccgtgggcagcaccacctggagcaaggagaaggtgagcagcgtggagagcagcagattcgtgtacagaaacgagagcatcatccccctgagccccttcgaggtgaaggtgggcgtgtacaacaacgagggcgagggcagcctgagcaccgtgaccatcgtgtacagcggcgaggacgagccccagctggcccccagaggcaccagcctgcagagcttcagcgccagcgagatggaggtgagctggaacgccatcgcctggaacagaaacaccggcagagtgctgggctacgaggtgctgtactggaccgacgacagcaaggagagcatgatcggcaagatcagagtgagcggcaacgtgaccaccaagaacatcaccggcctgaaggccaacaccatctacttcgccagcgtgagagcctacaacaccgccggcaccggccccagcagcccccccgtgaacgtgaccaccaagaagagcccccccagccagccccccgccaacatcgcctggaagctgaccaacagcaagctgtgcctgaactgggagcacgtgaagaccatggagaacgagagcgaggtgctgggctacaagatcctgtacagacagaacagacagagcaagacccacatcctggagaccaacaacaccagcgccgagctgctggtgcccttcgaggaggactacctgatcgagatcagaaccgtgagcgacggcggcgacggcagcagcagcgaggagatcagaatccccaagatgagcagcctgagcagcagaggcatccagttcctggagcccagcacccacttcctgagcatcgtgatcgtgatcttccactgcttcgccatccagcccctgatctag

SEQ ID NO: 77610 - DNA, 3996 bp, synthetic construct
  misc_feature 1..3996: note = Description of Artificial Sequence: Synthetic coding sequence
  source 1..3996: mol_type = other DNA
atgcaggccgcccccagagccggctgcggcgccgccctgctgctgtggatcgtgagcagctgcctgtgcagagcctggaccgcccccagcaccagccagaagtgcgacgagcccctggtgagcggcctgccccacgtggccttcagcagcagcagcagcatcagcggcagctacagccccggctacgccaagatcaacaagagaggcggcgccggcggctggagccccagcgacagcgaccactaccagtggctgcaggtggacttcggcaacagaaagcagatcagcgccatcgccacccagggcagatacagcagcagcgactgggtgacccagtacagaatgctgtacagcgacaccggcagaaactggaagccctaccaccaggacggcaacatctgggccttccccggcaacatcaacagcgacggcgtggtgagacacgagctgcagcaccccatcatcgccagatacgtgagaatcgtgcccctggactggaacggcgagggcagaatcggcctgagaatcgaggtgtacggctgcagctactgggccgacgtgatcaacttcgacggccacgtggtgctgccctacagattcagaaacaagaagatgaagaccctgaaggacgtgatcgccctgaacttcaagaccagcgagagcgagggcgtgatcctgcacggcgagggccagcagggcgactacatcaccctggagctgaagaaggccaagctggtgctgagcctgaacctgggcagcaaccagctgggccccatctacggccacaccagcgtgatgaccggcagcctgctggacgaccaccactggcacagcgtggtgatcgagagacagggcagaagcatcaacctgaccctggacagaagcatgcagcacttcagaaccaacggcgagttcgactacctggacctggactacgagatcaccttcggcggcatccccttcagcggcaagcccagcagcagcagcagaaagaacttcaagggctgcatggagagcatcaactacaacggcgtgaacatcaccgacctggccagaagaaagaagctggagcccagcaacgtgggcaacctgagcttcagctgcgtggagccctacaccgtgcccgtgttcttcaacgccaccagctacctggaggtgcccggcagactgaaccaggacctgttcagcgtgagcttccagttcagaacctggaaccccaacggcctgctggtgttcagccacttcgccgacaacctgggcaacgtggagatcgacctgaccgagagcaaggtgggcgtgcacatcaacatcacccagaccaagatgagccagatcgacatcagcagcggcagcggcctgaacgacggccagtggcacgaggtgagattcctggccaaggagaacttcgccatcctgaccatcgacggcgacgaggccagcgccgtgagaaccaacagccccctgcaggtgaagaccggcgagaagtacttcttcggcggcttcctgaaccagatgaacaacagcagccacagcgtgctgcagcccagcttccagggctgcatgcagctgatccaggtggacgaccagctggtgaacctgtacgaggtggcccagagaaagcccggcagcttcgccaacgtgagcatcgacatgtgcgccatcatcgacagatgcgtgcccaaccactgcgagcacggcggcaagtgcagccagacctgggacagcttcaagtgcacctgcgacgagaccggctacagcggcgccacctgccacaacagcatctacgagcccagctgcgaggcctacaagcacctgggccagaccagcaactactactggatcgaccccgacggcagcggccccctgggccccctgaaggtgtactgcaacatgaccgaggacaaggtgtggaccatcgtgagccacgacctgcagatgcagacccccgtggtgggctacaaccccgagaagtacagcgtgacccagctggtgtacagcgccagcatggaccagatcagcgccatcaccgacagcgccgagtactgcgagcagtacgtgagctacttctgcaagatgagcagactgctgaacacccccgacggcagcccctacacctggtgggtgggcaaggccaacgagaagcactactactggggcggcagcggccccggcatccagaagtgcgcctgcggcatcgagagaaactgcaccgaccccaagtactactgcaactgcgacgccgactacaagcagtggagaaaggacgccggcttcctgagctacaaggaccacctgcccgtgagccaggtggtggtgggcgacaccgacagacagggcagcgaggccaagctgagcgtgggccccctgagatgccagggcgacagaaactactggaacgccgccagcttccccaaccccagcagctacctgcacttcagcaccttccagggcgagaccagcgccgacatcagcttctacttcaagaccctgaccccctggggcgtgttcctggagaacatgggcaaggaggacttcatcaagctggagctgaagagcgccaccgaggtgagcttcagcttcgacgtgggcaacggccccgtggagatcgtggtgagaagccccacccccctgaacgacgaccagtggcacagagtgaccgccgagagaaacgtgaagcaggccagcctgcaggtggacagactgccccagcagatcagaaaggcccccaccgagggccacaccagactggagctgtacagccagctgttcgtgggcggcgccggcggccagcagggcttcctgggctgcatcagaagcctgagaatgaacggcgtgaccctggacctggaggagagagccaaggtgaccagcggcttcatcagcggctgcagcggccactgcaccagctacggcaccaactgcgagaacggcggcaagtgcctggagagataccacggctacagctgcgactgcagcaacaccgcctacgacggcaccttctgcaacaaggacgtgggcgccttcttcgaggagggcatgtggctgagatacaacttccaggcccccgccaccaacgccagagacagcagcagcagagtggacaacgcccccgaccagcagaacagccaccccgacctggcccaggaggagatcagattcagcttcagcaccaccaaggccccctgcatcctgctgtacatcagcagcttcaccaccgacttcctggccgtgctggtgaagcccaccggcagcctgcagatcagatacaacctgggcggcaccagagagccctacaacatcgacgtggaccacagaaacatggccaacggccagccccacagcgtgaacatcaccagacacgagaagaccatcttcctgaagctggaccactaccccagcgtgagctaccacctgcccagcagcagcgacaccctgttcaacagccccaagagcctgttcctgggcaaggtgatcgagaccggcaagatcgaccaggagatccacaagtacaacacccccggcttcaccggctgcctgagcagagtgcagttcaaccagatcgcccccctgaaggccgccctgagacagaccaacgccagcgcccacgtgcacatccagggcgagctggtggagagcaactgcggcgccagccccctgaccctgagccccatgagcagcgccaccgacccctggcacctggaccacctggacagcgccagcgccgacttcccctacaaccccggccagggccaggccatcagaaacggcgtgaacagaaacagcgccatcatcggcggcgtgatcgccgtggtgatcttcaccatcctgtgcaccctggtgttcctgatcagatacatgttcagacacaagggcacctaccacaccaacgaggccaagggcgccgagagcgccgagagcgccgacgccgccatcatgaacaacgaccccaacttcaccgagaccatcgacgagagcaagaaggagtggctgatctag

SEQ ID NO: 77611 - DNA, 1173 bp, synthetic construct
  misc_feature 1..1173: note = Description of Artificial Sequence: Synthetic coding sequence
  source 1..1173: mol_type = other DNA
atgaacggcgtgaccctggacctggaggagagagccaaggtgaccagcggcttcatcagcggctgcagcggccactgcaccagctacggcaccaactgcgagaacggcggcaagtgcctggagagataccacggctacagctgcgactgcagcaacaccgcctacgacggcaccttctgcaacaaggacgtgggcgccttcttcgaggagggcatgtggctgagatacaacttccaggcccccgccaccaacgccagagacagcagcagcagagtggacaacgcccccgaccagcagaacagccaccccgacctggcccaggaggagatcagattcagcttcagcaccaccaaggccccctgcatcctgctgtacatcagcagcttcaccaccgacttcctggccgtgctggtgaagcccaccggcagcctgcagatcagatacaacctgggcggcaccagagagccctacaacatcgacgtggaccacagaaacatggccaacggccagccccacagcgtgaacatcaccagacacgagaagaccatcttcctgaagctggaccactaccccagcgtgagctaccacctgcccagcagcagcgacaccctgttcaacagccccaagagcctgttcctgggcaaggtgatcgagaccggcaagatcgaccaggagatccacaagtacaacacccccggcttcaccggctgcctgagcagagtgcagttcaaccagatcgcccccctgaaggccgccctgagacagaccaacgccagcgcccacgtgcacatccagggcgagctggtggagagcaactgcggcgccagccccctgaccctgagccccatgagcagcgccaccgacccctggcacctggaccacctggacagcgccagcgccgacttcccctacaaccccggccagggccaggccatcagaaacggcgtgaacagaaacagcgccatcatcggcggcgtgatcgccgtggtgatcttcaccatcctgtgcaccctggtgttcctgatcagatacatgttcagacacaagggcacctaccacaccaacgaggccaagggcgccgagagcgccgagagcgccgacgccgccatcatgaacaacgaccccaacttcaccgagaccatcgacgagagcaagaaggagtggctgatctag

SEQ ID NO: 77612 - DNA, 1353 bp, synthetic construct
  misc_feature 1..1353: note = Description of Artificial Sequence: Synthetic coding sequence
  source 1..1353: mol_type = other DNA
atgagcgacatggaggacgacttcatgtgcgacgacgaggaggactacgacctggagtacagcgaggacagcaacagcgagcccaacgtggacctggagaaccagtactacaacagcaaggccctgaaggaggacgaccccaaggccgccctgagcagcttccagaaggtgctggagctggagggcgagaagggcgagtggggcttcaaggccctgaagcagatgatcaagatcaacttcaagctgaccaacttccccgagatgatgaacagatacaagcagctgctgacctacatcagaagcgccgtgaccagaaactacagcgagaagagcatcaacagcatcctggactacatcagcaccagcaagcagaacagcgacttcctgtgccagatggacctgctgcaggagttctacgagaccaccctggaggccctgaaggacgccaagaacgacagactgtggttcaagaccaacaccaagctgggcaagctgtacctggagagagaggagtacggcaagctgcagaagatcctgagacagctgcaccagagctgccagaccgacgacggcgaggacgacctgaagaagggcacccagctgctggagatctacgccctggagatccagatgtacaccgcccagaagaacaacaagaagctgaaggccctgtacgagcagagcctgcacatcaagagcgccatcccccaccccctgatcatgggcgtgatcagagagtgcggcggcaagatgcacctgagagagggcgagttcgagaaggcccacaccgacttcttcgaggccttcaagaactacgacgagagcggcagccccagaagaaccacctgcctgaagtacctggtgctggccaacatgctgatgaagagcggcatcaaccccttcgacagccaggaggccaagccctacaagaacgaccccgagatcctggccatgaccaacctggtgagcgcctaccagaacaacgacatcaccgagttcgagaagatcctgaagaccaaccacagcaacatcatggacgaccccttcatcagagagcacatcgaggagctgctgagaaacatcagaacccaggtgctgatcaagctgatcaagccctacaccagaatccacatccccttcatcagcaaggagctgaacatcgacgtggccgacgtggagagcctgctggtgcagtgcatcctggacaacaccatccacggcagaatcgaccaggtgaaccagctgctggagctggaccaccagaagagaggcggcgccagatacaccgccctggacaagtggaccaaccagctgaacagcctgaaccaggccgtggtgagcaagctggcctag

SEQ ID NO: 77613 - DNA, 1332 bp, synthetic construct
  misc_feature 1..1332: note = Description of Artificial Sequence: Synthetic coding sequence
  source 1..1332: mol_type = other DNA
atgagcgacatggaggacgacttcatgtgcgacgacgaggaggactacgacctggagtacagcgaggacagcaacagcgagcccaacgtggacctggagaaccagtactacaacagcaaggccctgaaggaggacgaccccaaggccgccctgagcagcttccagaaggtgctggagctggagggcgagaagggcgagtggggcttcaaggccctgaagcagatgatcaagatcaacttcaagctgaccaacttccccgagatgatgaacagatacaagcagctgctgacctacatcagaagcgccgtgaccagaaactacagcgagaagagcatcaacagcatcctggactacatcagcaccagcaagcagatggacctgctgcaggagttctacgagaccaccctggaggccctgaaggacgccaagaacgacagactgtggttcaagaccaacaccaagctgggcaagctgtacctggagagagaggagtacggcaagctgcagaagatcctgagacagctgcaccagagctgccagaccgacgacggcgaggacgacctgaagaagggcacccagctgctggagatctacgccctggagatccagatgtacaccgcccagaagaacaacaagaagctgaaggccctgtacgagcagagcctgcacatcaagagcgccatcccccaccccctgatcatgggcgtgatcagagagtgcggcggcaagatgcacctgagagagggcgagttcgagaaggcccacaccgacttcttcgaggccttcaagaactacgacgagagcggcagccccagaagaaccacctgcctgaagtacctggtgctggccaacatgctgatgaagagcggcatcaaccccttcgacagccaggaggccaagccctacaagaacgaccccgagatcctggccatgaccaacctggtgagcgcctaccagaacaacgacatcaccgagttcgagaagatcctgaagaccaaccacagcaacatcatggacgaccccttcatcagagagcacatcgaggagctgctgagaaacatcagaacccaggtgctgatcaagctgatcaagccctacaccagaatccacatccccttcatcagcaaggagctgaacatcgacgtggccgacgtggagagcctgctggtgcagtgcatcctggacaacaccatccacggcagaatcgaccaggtgaaccagctgctggagctggaccaccagaagagaggcggcgccagatacaccgccctggacaagtggaccaaccagctgaacagcctgaaccaggccgtggtgagcaagctggcctag

SEQ ID NO: 77614 - DNA, 1272 bp, synthetic construct
  misc_feature 1..1272: note = Description of Artificial Sequence: Synthetic coding sequence
  source 1..1272: mol_type = other DNA
atggccagcgccctggagcagttcgtgaacagcgtgagacagctgagcgcccagggccagatgacccagctgtgcgagctgatcaacaagagcggcgagctgctggccaagaacctgagccacctggacaccgtgctgggcgccctggacgtgcaggagcacagcctgggcgtgctggccgtgctgttcgtgaagttcagcatgcccagcgtgcccgacttcgagaccctgttcagccaggtgcagctgttcatcagcacctgcaacggcgagcacatcagatacgccaccgacaccttcgccggcctgtgccaccagctgaccaacgccctggtggagagaaagcagcccctgagaggcatcggcatcctgaagcaggccatcgacaagatgcagatgaacaccaaccagctgaccagcatccacgccgacctgtgccagctgtgcctgctggccaagtgcttcaagcccgccctgccctacctggacgtggacatgatggacatctgcaaggagaacggcgcctacgacgccaagcacttcctgtgctactactactacggcggcatgatctacaccggcctgaagaacttcgagagagccctgtacttctacgagcaggccatcaccacccccgccatggccgtgagccacatcatgctggagagctacaagaagtacatcctggtgagcctgatcctgctgggcaaggtgcagcagctgcccaagtacaccagccagatcgtgggcagattcatcaagcccctgagcaacgcctaccacgagctggcccaggtgtacagcaccaacaaccccagcgagctgagaaacctggtgaacaagcacagcgagaccttcaccagagacaacaacatgggcctggtgaagcagtgcctgagcagcctgtacaagaagaacatccagagactgaccaagaccttcctgaccctgagcctgcaggacatggccagcagagtgcagctgagcggcccccaggaggccgagaagtacgtgctgcacatgatcgaggacggcgagatcttcgccagcatcaaccagaaggacggcatggtgagcttccacgacaaccccgagaagtacaacaaccccgccatgctgcacaacatcgaccaggagatgctgaagtgcatcgagctggacgagagactgaaggccatggaccaggagatcaccgtgaacccccagttcgtgcagaagagcatgggcagccaggaggacgacagcggcaacaagcccagcagctacagctag

SEQ ID NO: 77615 - DNA, 960 bp, synthetic construct
  misc_feature 1..960: note = Description of Artificial Sequence: Synthetic coding sequence
  source 1..960: mol_type = other DNA
atggccagcgccctggagcagttcgtgaacagcgtgagacagctgagcgcccagggccagatgacccagctgtgcgagctgatcaacaagagcggcgagctgctggccaagaacctgagccacctggacaccgtgctgggcgccctggacgtgcaggagcacagcctgggcgtgctggccgtgctgttcgtgaagttcagcatgcccagcgtgcccgacttcgagaccctgttcagccaggtgcagctgttcatcagcacctgcaacggcgagcacatcagatacgccaccgacaccttcgccggcctgtgccaccagctgaccaacgccctggtggagagaaagcagcccctgagaggcatcggcatcctgaagcaggccatcgacaagatgcagatgaacaccaaccagctgaccagcatccacgccgacctgtgccagctgtgcctgctggccaagtgcttcaagcccgccctgccctacctggacgtggacatgatggacatctgcaaggagaacggcgcctacgacgccaagcacttcctgtgctactactactacggcggcatgatctacaccggcctgaagaacttcgagagagccctgtacttctacgagcaggccatcaccacccccgccatggccgtgagccacatcatgctggagagctacaagaagtacatcctggtgagcctgatcctgctgggcaaggtgcagcagctgcccaagtacaccagccagatcgtgggcagattcatcaagagacagagcctggccatgctggccagactggtgctgaacagctggccccaggccgtgctgctgagactgccccccagagtgctgggcctgcagcccctgagcaacgcctaccacgagctggcccaggtgtacagcaccaacaaccccagcgagctgagaaacctggtgaacaagcacagcgagaccttcaccagatag

SEQ ID NO: 77616 - DNA, 834 bp, synthetic construct
  misc_feature 1..834: note = Description of Artificial Sequence: Synthetic coding sequence
  source 1..834: mol_type = other DNA
gccagccccttctgggtgagctggctgtacggcagccccctgcccgccccccccctgcccggcggcgccagaagcggcacctgcgcccccatcctggtgctgcagaacgccgccgaggccctggccagacagatgacccagctgtgcgagctgatcaacaagagcggcgagctgctggccaagaacctgagccacctggacaccgtgctgggcgccctggacgtgcaggagcacagcctgggcgtgctggccgtgctgttcgtgaagttcagcatgcccagcgtgcccgacttcgagaccctgttcagccaggtgcagctgttcatcagcacctgcaacggcgagcacatcagatacgccaccgacaccttcgccggcctgtgccaccagctgaccaacgccctggtggagagaaagcagcccctgagaggcatcggcatcctgaagcaggccatcgacaagatgcagatgaacaccaaccagctgaccagcatccacgccgacctgtgccagctgtgcctgctggccaagtgcttcaagcccgccctgccctacctggacgtggacatgatggacatctgcaaggagaacggcgcctacgacgccaagcacttcctgtgctactactactacggcggcatgatctacaccggcctgaagaacttcgagagagccctgtacttctacgagcaggccatcaccacccccgccatggccgtgagccacatcatgctggagagctacaagaagtacatcctggtgagcctgatcctgctgggcaaggtgcagcagctgcccaagtacaccagccagatcgtgggcagattcatctag

SEQ ID NO: 77617 - DNA, 1212 bp, synthetic construct
  misc_feature 1..1212: note = Description of Artificial Sequence: Synthetic coding sequence
  source 1..1212: mol_type = other DNA
atgacccagctgtgcgagctgatcaacaagagcggcgagctgctggccaagaacctgagccacctggacaccgtgctgggcgccctggacgtgcaggagcacagcctgggcgtgctggccgtgctgttcgtgaagttcagcatgcccagcgtgcccgacttcgagaccctgttcagccaggtgcagctgttcatcagcacctgcaacggcgagcacatcagatacgccaccgacaccttcgccggcctgtgccaccagctgaccaacgccctggtggagagaaagcagcccctgagaggcatcggcatcctgaagcaggccatcgacaagatgcagatgaacaccaaccagctgaccagcatccacgccgacctgtgccagctgtgcctgctggccaagtgcttcaagcccgccctgccctacctggacgtggacatgatggacatctgcaaggagaacggcgcctacgacgccaagcacttcctgtgctactactactacggcggcatgatctacaccggcctgaagaacttcgagagagccctgtacttctacgagcaggccatcaccacccccgccatggccgtgagccacatcatgctggagagctacaagaagtacatcctggtgagcctgatcctgctgggcaaggtgcagcagctgcccaagtacaccagccagatcgtgggcagattcatcaagcccctgagcaacgcctaccacgagctggcccaggtgtacagcaccaacaaccccagcgagctgagaaacctggtgaacaagcacagcgagaccttcaccagagacaacaacatgggcctggtgaagcagtgcctgagcagcctgtacaagaagaacatccagagactgaccaagaccttcctgaccctgagcctgcaggacatggccagcagagtgcagctgagcggcccccaggaggccgagaagtacgtgctgcacatgatcgaggacggcgagatcttcgccagcatcaaccagaaggacggcatggtgagcttccacgacaaccccgagaagtacaacaaccccgccatgctgcacaacatcgaccaggagatgctgaagtgcatcgagctggacgagagactgaaggccatggaccaggagatcaccgtgaacccccagttcgtgcagaagagcatgggcagccaggaggacgacagcggcaacaagcccagcagctacagctag

SEQ ID NO: 77618 - DNA, 1614 bp, synthetic construct
  misc_feature 1..1614: note = Description of Artificial Sequence: Synthetic coding sequence
  source 1..1614: mol_type = other DNA
atggccgcccagtgcgtgaccaaggtggccctgaacgtgagctgcgccaacctgctggacaaggacatcggcagcaagagcgaccccctgtgcgtgctgttcctgaacaccagcggccagcagtggtacgaggtggagagaaccgagagaatcaagaactgcctgaacccccagttcagcaagaccttcatcatcgactactacttcgaggtggtgcagaagctgaagttcggcgtgtacgacatcgacaacaagaccatcgagctgagcgacgacgacttcctgggcgagtgcgagtgcaccctgggccagatcgtgagcagcaagaagctgaccagacccctggtgatgaagaccggcagacccgccggcaagggcagcatcaccatcagcgccgaggagatcaaggacaacagagtggtgctgttcgagatggaggccagaaagctggacaacaaggacctgttcggcaagagcgacccctacctggagttccacaagcagaccagcgacggcaactggctgatggtgcacagaaccgaggtggtgaagaacaacctgaaccccgtgtggagacccttcaagatcagcctgaacagcctgtgctacggcgacatggacaagaccatcaaggtggagtgctacgactacgacaacgacggcagccacgacctgatcggcaccttccagaccaccatgaccaagctgaaggaggccagcagaagcagccccgtggagttcgagtgcatcaacgagaagaagagacagaagaagaagagctacaagaacagcggcgtgatcagcgtgaagcagtgcgagatcaccgtggagtgcaccttcctggactacatcatgggcggctgccagctgaacttcaccgtgggcgtggacttcaccggcagcaacggcgaccccagaagccccgacagcctgcactacatcagccccaacggcgtgaacgagtacctgaccgccctgtggagcgtgggcctggtgatccaggactacgacgccgacaagatgttccccgccttcggcttcggcgcccagatccccccccagtggcaggtgagccacgagttccccatgaacttcaaccccagcaacccctactgcaacggcatccagggcatcgtggaggcctacagaagctgcctgccccagatcaagctgtacggccccaccaacttcagccccatcatcaaccacgtggccagattcgccgccgccgccacccagcagcagaccgccagccagtacttcgtgctgctgatcatcaccgacggcgtgatcaccgacctggacgagaccagacaggccatcgtgaacgccagcagactgcccatgagcatcatcatcgtgggcgtgggcggcgccgacttcagcgccatggagttcctggacggcgacggcggcagcctgagaagccccctgggcgaggtggccatcagagacatcgtgcagttcgtgcccttcagacagttccagaacgcccccaaggaggccctggcccagtgcgtgctggccgagatcccccagcaggtggtgggctacttcaacacctacaagctgctgccccccaagaaccccgccaccaagcagcagaagcagtag

SEQ ID NO: 77619 - DNA, 420 bp, synthetic construct
  misc_feature 1..420: note = Description of Artificial Sequence: Synthetic coding sequence
  source 1..420: mol_type = other DNA
atggccgcccagtgcgtgaccaaggtggccctgaacgtgagctgcgccaacctgctggacaaggacatcggcagcaagagcgaccccctgtgcgtgctgttcctgaacaccagcggccagcagtggtacgaggtggagagaaccgagagaatcaagaactgcctgaacccccagttcagcaagaccttcatcatcgactactacttcgaggtggtgcagaagctgaagttcggcgtgtacgacatcgacaacaagaccatcgagctgagcgacgacgacttcctgggcgagtgcgagtgcaccctgggccagatcgtgagcagcaagaagctgaccagacccctggtgatgaagaccggcagacccgccggcaagggcagcatcaccatcagcgccgaggagatcaaggacaacagatag

SEQ ID NO: 77620 - DNA, 30 bp, synthetic construct
  misc_feature 1..30: note = Description of Artificial Sequence: Synthetic coding sequence
  source 1..30: mol_type = other DNA
atggccgcccagtgcgtgaccaaggtgtag

SEQ ID NO: 77621 - DNA, 1614 bp, synthetic construct; identical to SEQ ID NO: 77618
  misc_feature 1..1614: note = Description of Artificial Sequence: Synthetic coding sequence
  source 1..1614: mol_type = other DNA

SEQ ID NO: 77622 - DNA, 240 bp, synthetic construct
  misc_feature 1..240: note = Description of Artificial Sequence: Synthetic coding sequence
  source 1..240: mol_type = other DNA
atggccgcccagtgcgtgaccaaggtggccctgaacgtgagctgcgccaacctgctggacaaggacatcggcagcaagagcgaccccctgtgcgtgctgttcctgaacaccagcggccagcagtggtacgaggtggagagaaccgagagaatcaagaactgcctgaacccccagttcagcaagaccttcatcatcgactactacttcgaggtggtgcagaagctgaagttcggcgtgtag

SEQ ID NO: 77623 - DNA, 408 bp, synthetic construct
  misc_feature 1..408: note = Description of Artificial Sequence: Synthetic coding sequence
  source 1..408: mol_type = other DNA
atggccgcccagtgcgtgaccaaggtggccctgaacgtgagctgcgccaacctgctggacaaggacatcggcagcaagagcgaccccctgtgcgtgctgttcctgaacaccagcggccagcagtggtacgaggtggagagaaccgagagaatcaagaactgcctgaacccccagttcagcaagaccttcatcatcgactactacttcgaggtggtgcagaagctgaagttcggcgtgtacgacatcgacaacaagaccatcgagctgagcgacgacgacttcctgggcgagtgcgagtgcaccctgggccagatcgtgagcagcaagaagctgaccagacccctggtgatgaagaccggcagacccgccggcaagggcagcatcaccatcagcgccgaggagatctag

SEQ ID NO: 77624 - DNA, 705 bp, synthetic construct
  misc_feature 1..705: note = Description of Artificial Sequence: Synthetic coding sequence
  source 1..705: mol_type = other DNA
atggccgcccagtgcgtgaccaaggtggccctgaacgtgagctgcgccaacctgctggacaaggacatcggcagcaagagcgaccccctgtgcgtgctgttcctgaacaccagcggccagcagtggtacgaggtggagagaaccgagagaatcaagaactgcctgaacccccagttcagcaagaccttcatcatcgactactacttcgaggtggtgcagaagctgaagttcggcgtgtacgacatcgacaacaagaccatcgagctgagcgacgacgacttcctgggcgagtgcgagtgcaccctgggccagatcgtgagcagcaagaagctgaccagacccctggtgatgaagaccggcagacccgccggcaagggcagcatcaccatcagcgccgaggagatcaaggacaacagagtggtgctgttcgagatggaggccagaaagctggacaacaaggacctgttcggcaagagcgacccctacctggagttccacaagcagaccagcgacggcaactggctgatggtgcacagaaccgaggtggtgaagaacaacctgaaccccgtgtggagacccttcaagatcagcctgaacagcctgtgctacggcgacatggacaagaccatcaaggtggagtgctacgactacgacaacgacggcagccacgacctgatcggcaccttccagaccaccatgacctag

SEQ ID NO: 77625 - DNA, 462 bp, synthetic construct
  misc_feature 1..462: note = Description of Artificial Sequence: Synthetic coding sequence
  source 1..462: mol_type = other DNA
atggccgcccagtgcgtgaccaaggtggccctgaacgtgagctgcgccaacctgctggacaaggacatcggcagcaagagcgaccccctgtgcgtgctgttcctgaacaccagcggccagcagtggtacgaggtggagagaaccgagagaatcaagaactgcctgaacccccagttcagcaagaccttcatcatcgactactacttcgaggtggtgcagaagctgaagttcggcgtgtacgacatcgacaacaagaccatcgagctgagcgacgacgacttcctgggcgagtgcgagtgcaccctgggccagatcgtgagcagcaagaagctgaccagacccctggtgatgaagaccggcagacccgccggcaagggcagcatcaccatcagcgccgaggagatcaaggacaacagagtggtgctgttcgagatggaggccagaaagctggacaacaagtag

SEQ ID NO: 77626 - DNA, 1782 bp, synthetic construct
  misc_feature 1..1782: note = Description of Artificial Sequence: Synthetic coding sequence
  source 1..1782: mol_type = other DNA
atggagcagcccgaggacatggccagcctgagcgagttcgacagcctggccggcagcatccccgccaccaaggtggagatcaccgtgagctgcagaaacctgctggacaaggacatgttcagcaagagcgaccccctgtgcgtgatgtacacccagggcatggagaacaagcagtggagagagttcggcagaaccgaggtgatcgacaacaccctgaaccccgacttcgtgagaaagttcatcgtggactacttcttcgaggagaagcagaacctgagattcgacctgtacgacgtggacagcaagagccccgacctgagcaagcacgacttcctgggccaggccttctgcaccctgggcgagatcgtgggcagccccggcagcagactggagaagcccctgaccatcggcgccttcagcctgaacagcagaaccggcaagcccatgcccgccgtgagcaacggcggcgtgcccggcaagaagtgcggcaccatcatcctgagcgccgaggagctgagcaactgcagagacgtggccaccatgcagttctgcgccaacaagctggacaagaaggacttcttcggcaagagcgaccccttcctggtgttctacagaagcaacgaggacggcaccttcaccatctgccacaagaccgaggtgatgaagaacaccctgaaccccgtgtggcagaccttcagcatccccgtgagagccctgtgcaacggcgactacgacagaaccatcaaggtggaggtgtacgactgggacagagacggcagccacgacttcatcggcgagttcaccaccagctacagagagctggccagaggccagagccagttcaacatctacgaggtggtgaaccccaagaagaagatgaagaagaagaagtacgtgaacagcggcaccgtgaccctgctgagcttcgccgtggagagcgagtgcaccttcctggactacatcaagggcggcacccagatcaacttcaccgtggccatcgacttcaccgccagcaacggcaaccccagccagagcaccagcctgcactacatgagcccctaccagctgaacgcctacgccctggccctgaccgccgtgggcgagatcatccagcactacgacagcgacaagatgttccccgccctgggcttcggcgccaagctgccccccgacggcagagtgagccacgagttccccctgaacggcaaccaggagaaccccagctgctgcggcatcgacggcatcctggaggcctaccacagaagcctgagaaccgtgcagctgtacggccccaccaacttcgcccccgtggtgacccacgtggccagaaacgccgccgccgtgcaggacggcagccagtacagcgtgctgctgatcatcaccgacggcgtgatcagcgacatggcccagaccaaggaggccatcgtgaacgccgccaagctgcccatgagcatcatcatcgtgggcgtgggccaggccgagttcgacgccatggtggagctggacggcgacgacgtgagaatcagcagcagaggcaagctggccgagagagacatcgtgcagttcgtgcccttcagagactacgtggacagaaccggcaaccacgtgctgagcatggccagactggccagagacgtgctggccgagatccccgaccagctggtgagctacatgaaggcccagggcatcagacccagacccccccccgccgcccccacccacagccccagccagagccccgccagaaccccccccgccagccccctgcacacccacatctag

SEQ ID NO: 77627 - DNA, 906 bp, synthetic construct
  misc_feature 1..906: note = Description of Artificial Sequence: Synthetic coding sequence
  source 1..906: mol_type = other DNA
atgaagaagaagaagtacgtgaacagcggcaccgtgaccctgctgagcttcgccgtggagagcgagtgcaccttcctggactacatcaagggcggcacccagatcaacttcaccgtggccatcgacttcaccgccagcaacggcaaccccagccagagcaccagcctgcactacatgagcccctaccagctgaacgcctacgccctggccctgaccgccgtgggcgagatcatccagcactacgacagcgacaagatgttccccgccctgggcttcggcgccaagctgccccccgacggcagagtgagccacgagttccccctgaacggcaaccaggagaaccccagctgctgcggcatcgacggcatcctggaggcctaccacagaagcctgagaaccgtgcagctgtacggccccaccaacttcgcccccgtggtgacccacgtggccagaaacgccgccgccgtgcaggacggcagccagtacagcgtgctgctgatcatcaccgacggcgtgatcagcgacatggcccagaccaaggaggccatcgtgaacgccgccaagctgcccatgagcatcatcatcgtgggcgtgggccaggccgagttcgacgccatggtggagctggacggcgacgacgtgagaatcagcagcagaggcaagctggccgagagagacatcgtgcagttcgtgcccttcagagactacgtggacagaaccggcaaccacgtgctgagcatggccagactggccagagacgtgctggccgagatccccgaccagctggtgagctacatgaaggcccagggcatcagacccagacccccccccgccgcccccacccacagccccagccagagccccgccagaaccccccccgccagccccctgcacacccacatctag

SEQ ID NO: 77628 - DNA, 1515 bp, synthetic construct
  misc_feature 1..1515: note = Description of Artificial Sequence: Synthetic coding sequence
  source 1..1515: mol_type = other DNA
atggtgctggccgacctgggcagaaagatcaccagcgccctgagaagcctgagcaacgccaccatcatcaacgaggaggtgctgaacgccatgctgaaggaggtgtgcaccgccctgctggaggccgacgtgaacatcaagctggtgaagcagctgagagagaacgtgaagagcgccatcgacctggaggagatggccagcggcctgaacaagagaaagatgatccagcacgccgtgttcaaggagctggtgaagctggtggaccccggcgtgaaggcctggacccccaccaagggcaagcagaacgtgatcatgttcgtgggcctgcagggcagcggcaagaccaccacctgcagcaagctggcctactactaccagagaaagggctggaagacctgcctgatctgcgccgacaccttcagagccggcgccttcgaccagctgaagcagaacgccaccaaggccagaatccccttctacggcagctacaccgagatggaccccgtgatcatcgccagcgagggcgtggagaagttcaagaacgagaacttcgagatcatcatcgtggacaccagcggcagacacaagcaggaggacagcctgttcgaggagatgctgcaggtggccaacgccatccagcccgacaacatcgtgtacgtgatggacgccagcatcggccaggcctgcgaggcccaggccaaggccttcaaggacaaggtggacgtggccagcgtgatcgtgaccaagctggacggccacgccaagggcggcggcgccctgagcgccgtggccgccaccaagagccccatcatcttcatcggcaccggcgagcacatcgacgacttcgagcccttcaagacccagcccttcatcagcaagctgctgggcatgggcgacatcgagggcctgatcgacaaggtgaacgagctgaagctggacgacaacgaggccctgatcgagaagctgaagcacggccagttcaccctgagagacatgtacgagcagttccagaacatcatgaagatgggccccttcagccagatcctgggcatgatccccggcttcggcaccgacttcatgagcaagggcaacgagcaggagagcatggccagactgaagaagctgatgaccatcatggacagcatgaacgaccaggagctggacagcaccgacggcgccaaggtgttcagcaagcagcccggcagaatccagagagtggccagaggcagcggcgtgagcaccagagacgtgcaggagctgctgacccagtacaccaagttcgcccagatggtgaagaagatgggcggcatcaagggcctgttcaagggcggcgacatgagcaagaacgtgagccagagccagatggccaagctgaaccagcagatggccaagatgatggaccccagagtgctgcaccacatgggcggcatggccggcctgcagagcatgatgagacagttccagcagggcgccgccggcaacatgaagggcatgatgggcttcaacaacatgtag

SEQ ID NO: 77629 - DNA, 1674 bp, synthetic construct
  misc_feature 1..1674: note = Description of Artificial Sequence: Synthetic coding sequence
  source 1..1674: mol_type = other DNA
atgagcgaccccgagatgggctgggtgcccgagccccccaccatgaccctgggcgccagcagagtggagctgagagtgagctgccacggcctgctggacagagacaccctgaccaagccccacccctgcgtgctgctgaagctgtacagcgacgagcagtgggtggaggtggagagaaccgaggtgctgagaagctgcagcagccccgtgttcagcagagtgctggccctggagtacttcttcgaggagaagcagcccctgcagttccacgtgttcgacgccgaggacggcgccaccagccccagaaacgacaccttcctgggcagcaccgagtgcaccctgggccagatcgtgagccagaccaaggtgaccaagcccctgctgctgaagaacggcaagaccgccggcaagagcaccatcaccatcgtggccgaggaggtgagcggcaccaacgactacgtgcagctgaccttcagagcctacaagctggacaacaaggacctgttcagcaagagcgaccccttcatggagatctacaagaccaacgaggaccagagcgaccagctggtgtggagaaccgaggtggtgaagaacaacctgaaccccagctgggagcccttcagactgagcctgcacagcctgtgcagctgcgacgtgcacagacccctgaagttcctggtgtacgactacgacagcagcggcaagcacgacttcatcggcgagttcaccagcaccttccaggagatgcaggagggcaccgccaaccccggccaggagatgcagtgggactgcatcaaccccaagtacagagacaagaagaagaactacaagagcagcggcaccgtggtgctggcccagtgcaccgtggagaaggtgcacaccttcctggactacatcatgggcggctgccagatcagcttcaccgtggccatcgacttcaccgccagcaacggcgaccccagaagcagccagagcctgcactgcctgagccccagacagcccaaccactacctgcaggccctgagagccgtgggcggcatctgccaggactacgacagcgacaagagattccccgccttcggcttcggcgccagaatcccccccaacttcgaggtgagccacgacttcgccatcaacttcgaccccgagaaccccgagtgcgaggagatcagcggcgtgatcgccagctacagaagatgcctgccccagatccagctgtacggccccaccaacgtggcccccatcatcaacagagtggccgagcccgcccagagagagcagagcaccggccaggccaccaagtacagcgtgctgctggtgctgaccgacggcgtggtgagcgacatggccgagaccagaaccgccatcgtgagagccagcagactgcccatgagcatcatcatcgtgggcgtgggcaacgccgacttcagcgacatgagactgctggacggcgacgacggccccctgagatgccccagaggcgtgcccgccgccagagacatcgtgcagttcgtgcccttcagagacttcaaggacgccgcccccagcgccctggccaagtgcgtgctggccgaggtgcccagacaggtggtggagtactacgccagccagggcatcagccccggcgcccccagaccctgcaccctggccaccacccccagccccagcccctag

SEQ ID NO: 77630 - DNA, 1839 bp, synthetic construct
  misc_feature 1..1839: note = Description of Artificial Sequence: Synthetic coding sequence
  source 1..1839: mol_type = other DNA
atggccttcaaggagcacggcaagatcaccagctgctgcatccccggccccatcaacagcagcagagccggcgccggcgccggcgccagcggctggagcagcaagggcgtgagagccagagccagagagcccgagagaggcgcccccgacagagagcccagcgacatgagcgaccccgagatgggctgggtgcccgagccccccaccatgaccctgggcgccagcagagtggagctgagagtgagctgccacggcctgctggacagagacaccctgaccaagccccacccctgcgtgctgctgaagctgtacagcgacgagcagtgggtggaggtggagagaaccgaggtgctgagaagctgcagcagccccgtgttcagcagagtgctggccctggagtacttcttcgaggagaagcagcccctgcagttccacgtgttcgacgccgaggacggcgccaccagccccagaaacgacaccttcctgggcagcaccgagtgcaccctgggccagatcgtgagccagaccaaggtgaccaagcccctgctgctgaagaacggcaagaccgccggcaagagcaccatcaccatcgtggccgaggaggtgagcggcaccaacgactacgtgcagctgaccttcagagcctacaagctggacaacaaggacctgttcagcaagagcgaccccttcatggagatctacaagaccaacgaggaccagagcgaccagctggtgtggagaaccgaggtggtgaagaacaacctgaaccccagctgggagcccttcagactgagcctgcacagcctgtgcagctgcgacgtgcacagacccctgaagttcctggtgtacgactacgacagcagcggcaagcacgacttcatcggcgagttcaccagcaccttccaggagatgcaggagggcaccgccaaccccggccaggagatgcagtgggactgcatcaaccccaagtacagagacaagaagaagaactacaagagcagcggcaccgtggtgctggcccagtgcaccgtggagaaggtgcacaccttcctggactacatcatgggcggctgccagatcagcttcaccgtggccatcgacttcaccgccagcaacggcgaccccagaagcagccagagcctgcactgcctgagccccagacagcccaaccactacctgcaggccctgagagccgtgggcggcatctgccaggactacgacagcgacaagagattccccgccttcggcttcggcgccagaatcccccccaacttcgaggtgagccacgacttcgccatcaacttcgaccccgagaaccccgagtgcgaggagatcagcggcgtgatcgccagctacagaagatgcctgccccagatccagctgtacggccccaccaacgtggcccccatcatcaacagagtggccgagcccgcccagagagagcagagcaccggccaggccaccaagtacagcgtgctgctggtgctgaccgacggcgtggtgagcgacatggccgagaccagaaccgccatcgtgagagccagcagactgcccatgagcatcatcatcgtgggcgtgggcaacgccgacttcagcgacatgagactgctggacggcgacgacggccccctgagatgccccagaggcgtgcccgccgccagagacatcgtgcagttcgtgcccttcagagacttcaaggacgccgcccccagcgccctggccaagtgcgtgctggccgaggtgcccagacaggtggtggagtactacgccagccagggcatcagccccggcgcccccagaccctgcaccctggccaccacccccagccccagcccctag

SEQ ID NO: 77631 - DNA, 159 bp, synthetic construct
  misc_feature 1..159: note = Description of Artificial Sequence: Synthetic coding sequence
  source 1..159: mol_type = other DNA
atgagcgaccccgagatgggctgggtgcccgagccccccaccatgaccctgggcgccagcagagtggagctgagagtgagctgccacggcctgctggacagagacaccctgaccaagccccacccctgcgtgctgctgaagctgtacagcgacgagtag

SEQ ID NO: 77632 - DNA, 396 bp, synthetic construct
  misc_feature 1..396: note = Description of Artificial Sequence: Synthetic coding sequence
  source 1..396: mol_type = other DNA
atgagcgaccccgagatgggctgggtgcccgagccccccaccatgaccctgggcgccagcagagtggagctgagagtgagctgccacggcctgctggacagagacaccctgaccaagccccacccctgcgtgctgctgaagctgtacagcgacgagcagtgggtggaggtggagagaaccgaggtgctgagaagctgcagcagccccgtgttcagcagagtgctggccctggagtacttcttcgaggagaagcagcccctgcagttccacgtgttcgacgccgaggacggcgccaccagccccagaaacgacaccttcctgggcagcaccgagtgcaccctgggccagatcgtgagccagaccaaggtgaccaagcccctgctgctgaagaactag

SEQ ID NO: 77633 - DNA, 681 bp, synthetic construct
  misc_feature 1..681: note = Description of Artificial Sequence: Synthetic coding sequence
  source 1..681: mol_type = other DNA
atgagcgaccccgagatgggctgggtgcccgagccccccaccatgaccctgggcgccagcagagtggagctgagagtgagctgccacggcctgctggacagagacaccctgaccaagccccacccctgcgtgctgctgaagctgtacagcgacgagcagtgggtggaggtggagagaaccgaggtgctgagaagctgcagcagccccgtgttcagcagagtgctggccctggagtacttcttcgaggagaagcagcccctgcagttccacgtgttcgacgccgaggacggcgccaccagccccagaaacgacaccttcctgggcagcaccgagtgcaccctgggccagatcgtgagccagaccaaggtgaccaagcccctgctgctgaagaacggcaagaccgccggcaagagcaccatcaccatcgtggccgaggaggtgagcggcaccaacgactacgtgcagctgaccttcagagcctacaagctggacaacaaggacctgttcagcaagagcgaccccttcatggagatctacaagaccaacgaggaccagagcgaccagctggtgtggagaaccgaggtggtgaagaacaacctgaaccccagctgggagcccttcagactgagcctgcacagcctgtgcagctgcgacgtgcacagacccctgaagttcctgtag

SEQ ID NO: 77634 - DNA, 318 bp, synthetic construct
  misc_feature 1..318: note = Description of Artificial Sequence: Synthetic coding sequence
  source 1..318: mol_type = other DNA
atgagcgaccccgagatgggctgggtgcccgagccccccaccatgaccctgggcgccagcagagtggagctgagagtgagctgccacggcctgctggacagagacaccctgaccaagccccacccctgcgtgctgctgaagctgtacagcgacgagcagtgggtggaggtggagagaaccgaggtgctgagaagctgcagcagccccgtgttcagcagagtgctggccctggagtacttcttcgaggagaagcagcccctgcagttccacgtgttcgacgccgaggacggcgccaccagccccagaaacgacacctag

SEQ ID NO: 77635 - DNA, 426 bp, synthetic construct
  misc_feature 1..426: note = Description of Artificial Sequence: Synthetic coding sequence
  source 1..426: mol_type = other DNA
atgagcgaccccgagatgggctgggtgcccgagccccccaccatgaccctgggcgccagcagagtggagctgagagtgagctgccacggcctgctggacagagacaccctgaccaagccccacccctgcgtgctgctgaagctgtacagcgacgagcagtgggtggaggtggagagaaccgaggtgctgagaagctgcagcagccccgtgttcagcagagtgctggccctggagtacttcttcgaggagaagcagcccctgcagttccacgtgttcgacgccgaggacggcgccaccagccccagaaacgacaccttcctgggcagcaccgagtgcaccctgggccagatcgtgagccagaccaaggtgaccaagcccctgctgctgaagaacggcaagaccgccggcaagagcaccatcacctag

SEQ ID NO: 77636 - DNA, 450 bp, synthetic construct
  misc_feature 1..450: note = Description of Artificial Sequence: Synthetic coding sequence
  source 1..450: mol_type = other DNA
atgagcgaccccgagatgggctgggtgcccgagccccccaccatgaccctgggcgccagcagagtggagctgagagtgagctgccacggcctgctggacagagacaccctgaccaagccccacccctgcgtgctgctgaagctgtacagcgacgagcagtgggtggaggtggagagaaccgaggtgctgagaagctgcagcagccccgtgttcagcagagtgctggccctggagtacttcttcgaggagaagcagcccctgcagttccacgtgttcgacgccgaggacggcgccaccagccccagaaacgacaccttcctgggcagcaccgagtgcaccctgggccagatcgtgagccagaccaaggtgaccaagcccctgctgctgaagaacggcaagaccgccggcaagagcaccatcaccatcgtggccgaggaggtgagcggctag

SEQ ID NO: 77637 - DNA, 1902 bp, synthetic construct
  misc_feature 1..1902: note = Description of Artificial Sequence: Synthetic coding sequence
  source 1..1902: mol_type = other DNA
atgagcgccggcagcgagagaggcgccgccgccacccccggcggcctgcccgccccctgcgccagcaaggtggagctgagactgagctgcagacacctgctggacagagaccccctgaccaagagcgaccccagcgtggccctgctgcagcaggcccagggccagtgggtgcaggtgggcagaaccgaggtggtgagaagcagcctgcaccccgtgttcagcaaggtgttcaccgtggactactacttcgaggaggtgcagagactgagattcgaggtgtacgacacccacggccccagcggcttcagctgccaggaggacgacttcctgggcggcatggagtgcaccctgggccagcccgcccagaagtggctgctgcaggtggtgatgagagtgagcgtggacgtgctgggccccgccggccactgcgccaagcacttcctgtgctgcaccgagagcagccacctggccagaaccggccccagcttcctgctgagatacgacgacctgtgcctgccctgggccaccgccggcgccgtgagatggtggacctgcagaggcggccacacccagggctggcagatcgtggcccagaagaaggtgaccagacccctgctgctgaagttcggcagaaacgccggcaagagcaccatcaccgtgatcgccgaggacatcagcggcaacaacggctacgtggagctgagcttcagagccagaaagctggacgacaaggacctgttcagcaagagcgaccccttcctggagctgtacagagtgaacgacgaccagggcctgcagctggtgtacagaaccgaggtggtgaagaacaacctgaaccccgtgtgggaggccttcaaggtgagcctgagcagcctgtgcagctgcgaggagaccagacccctgaagtgcctggtgtgggactacgacagcagaggcaagcacgacttcatcggcgagttcagcaccaccttcgaggagatgcagaaggccttcgaggagggccaggcccagtgggactgcgtgaaccccaagtacaagcagaagagaagaagctacaagaacagcggcgtggtggtgctggccgacctgaagttccacagagtgtacagcttcctggactacatcatgggcggctgccagatccacttcaccgtggccatcgacttcaccgccagcaacggcgaccccagaaacagctgcagcctgcactacatcaacccctaccagcccaacgagtacctgaaggccctggtgagcgtgggcgagatctgccaggactacgacagcgacaagagattcagcgccctgggcttcggcgccagaatcccccccaagtacgaggtgagccacgacttcgccatcaacttcaaccccgaggacgacgagtgcgagggcatccagggcgtggtggaggcctaccagaactgcctgcccagagtgcagctgtacggccccaccaacgtggcccccatcatcagcaaggtggccagagtggccgccgccgaggagagcaccggcaaggccagccagtactacatcctgctgatcctgaccgacggcgtggtgaccgacatggccgacaccagagaggccatcgtgagagccagcagactgcccatgagcatcatcatcgtgggcgtgggcaacgccgacttcaccgacatgcaggtgctggacggcgacgacggcgtgctgagaagccccagaggcgagcccgccctgagagacatcgtgcagttcgtgcccttcagagagctgaagaacgccagccccgccgccctggccaagtgcgtgctggccgaggtgcccaagcaggtggtggagtactacagccacagaggcctgccccccagaagcctgggcgtgcccgccggcgaggccagccccggctgcaccccctag

SEQ ID NO: 77638 - DNA, 1677 bp, synthetic construct
  misc_feature 1..1677: note = Description of Artificial Sequence: Synthetic coding sequence
  source 1..1677: mol_type = other DNA
atgagcgccggcagcgagagaggcgccgccgccacccccggcggcctgcccgccccctgcgccagcaaggtggagctgagactgagctgcagacacctgctggacagagaccccctgaccaagagcgaccccagcgtggccctgctgcagcaggcccagggccagtgggtgcaggtgggcagaaccgaggtggtgagaagcagcctgcaccccgtgttcagcaaggtgttcaccgtggactactacttcgaggaggtgcagagactgagattcgaggtgtacgacacccacggccccagcggcttcagctgccaggaggacgacttcctgggcggcatggagtgcaccctgggccagatcgtggcccagaagaaggtgaccagacccctgctgctgaagttcggcagaaacgccggcaagagcaccatcaccgtgatcgccgaggacatcagcggcaacaacggctacgtggagctgagcttcagagccagaaagctggacgacaaggacctgttcagcaagagcgaccccttcctggagctgtacagagtgaacgacgaccagggcctgcagctggtgtacagaaccgaggtggtgaagaacaacctgaaccccgtgtgggaggccttcaaggtgagcctgagcagcctgtgcagctgcgaggagaccagacccctgaagtgcctggtgtgggactacgacagcagaggcaagcacgacttcatcggcgagttcagcaccaccttcgaggagatgcagaaggccttcgaggagggccaggcccagtgggactgcgtgaaccccaagtacaagcagaagagaagaagctacaagaacagcggcgtggtggtgctggccgacctgaagttccacagagtgtacagcttcctggactacatcatgggcggctgccagatccacttcaccgtggccatcgacttcaccgccagcaacggcgaccccagaaacagctgcagcctgcactacatcaacccctaccagcccaacgagtacctgaaggccctggtgagcgtgggcgagatctgccaggactacgacagcgacaagagattcagcgccctgggcttcggcgccagaatcccccccaagtacgaggtgagccacgacttcgccatcaacttcaaccccgaggacgacgagtgcgagggcatccagggcgtggtggaggcctaccagaactgcctgcccagagtgcagctgtacggccccaccaacgtggcccccatcatcagcaaggtggccagagtggccgccgccgaggagagcaccggcaaggccagccagtactacatcctgctgatcctgaccgacggcgtggtgaccgacatggccgacaccagagaggccatcgtgagagccagcagactgcccatgagcatcatcatcgtgggcgtgggcaacgccgacttcaccgacatgcaggtgctggacggcgacgacggcgtgctgagaagccccagaggcgagcccgccctgagagacatcgtgcagttcgtgcccttcagagagctgaagaacgccagccccgccgccctggccaagtgcgtgctggccgaggtgcccaagcaggtggtggagtactacagccacagaggcctgccccccagaagcctgggcgtgcccgccggcgaggccagccccggctgcaccccctag

SEQ ID NO: 77639 - DNA, 825 bp, synthetic construct
  misc_feature 1..825: note = Description of Artificial Sequence: Synthetic coding sequence
  source 1..825: mol_type = other DNA
atggccagcgacagcggcaaccagggcaccctgtgcaccctggagttcgccgtgcagatgacctgccagagctgcgtggacgccgtgagaaagagcctgcagggcgtggccggcgtgcaggacgtggaggtgcacctggaggaccagatggtgctggtgcacaccaccctgcccagccaggaggtgcaggccctgctggagggcaccggcagacaggccgtgctgaagggcatgggcagcggccagctgcagaacctgggcgccgccgtggccatcctgggcggccccggcaccgtgcagggcgtggtgagattcctgcagctgacccccgagagatgcctgatcgagggcaccatcgacggcctggagcccggcctgcacggcctgcacgtgcaccagtacggcgacctgaccaacaactgcaacagctgcggcaaccacttcaaccccgacggcgccagccacggcggcccccaggacagcgacagacacagaggcgacctgggcaacgtgagagccgacgccgacggcagagccatcttcagaatggaggacgagcagctgaaggtgtgggacgtgatcggcagaagcctgatcatcgacgagggcgaggacgacctgggcagaggcggccaccccctgagcaagatcaccggcaacagcggcgagagactggcctgcggcatcatcgccagaagcgccggcctgttccagaaccccaagcagatctgcagctgcgacggcctgaccatctgggaggagagaggcagacccatcgccggcaagggcagaaaggagagcgcccagccccccgcccacctgtag

SEQ ID NO: 77640 - DNA, 1365 bp, synthetic construct
  misc_feature 1..1365: note = Description of Artificial Sequence: Synthetic coding sequence
  source 1..1365: mol_type = other DNA
atggccctgcagctgggcagactgagcagcggcccctgctggctggtggccagaggcggctgcggcggccccagagcctggagccagtgcggcggcggcggcctgagagcctggagccagagaagcgccgccggcagagtgtgcagaccccccggccccgccggcaccgagcagagcagaggcctgggccacggcagcaccagcagaggcggcccctgggtgggcaccggcctggccgccgccctggccggcctggtgggcctggccaccgccgccttcggccacgtgcagagagccgagatgctgcccaagaccagcggcaccagagccaccagcctgggcagacccgaggaggaggaggacgagctggcccacagatgcagcagcttcatggccccccccgtgaccgacctgggcgagctgagaagaagacccggcgacatgaagaccaagatggagctgctgatcctggagacccaggcccaggtgtgccaggccctggcccaggtggacggcggcgccaacttcagcgtggacagatgggagagaaaggagggcggcggcggcatcagctgcgtgctgcaggacggctgcgtgttcgagaaggccggcgtgagcatcagcgtggtgcacggcaacctgagcgaggaggccgccaagcagatgagaagcagaggcaaggtgctgaagaccaaggacggcaagctgcccttctgcgccatgggcgtgagcagcgtgatccaccccaagaacccccacgcccccaccatccacttcaactacagatacttcgaggtggaggaggccgacggcaacaagcagtggtggttcggcggcggctgcgacctgacccccacctacctgaaccaggaggacgccgtgcacttccacagaaccctgaaggaggcctgcgaccagcacggccccgacctgtaccccaagttcaagaagtggtgcgacgactacttcttcatcgcccacagaggcgagagaagaggcatcggcggcatcttcttcgacgacctggacagccccagcaaggaggaggtgttcagattcgtgcagagctgcgccagagccgtggtgcccagctacatccccctggtgaagaagcactgcgacgacagcttcaccccccaggagaagctgtggcagcagctgagaagaggcagatacgtggagttcaacctgctgtacgacagaggcaccaagttcggcctgttcacccccggcagcagaatcgagagcatcctgatgagcctgcccctgaccgccagatgggagtacatgcacagccccagcgagaacagcaaggaggccgagatcctggaggtgctgagacaccccagagactgggtgagatag

SEQ ID NO: 77641 - DNA, 1026 bp, synthetic construct
  misc_feature 1..1026: note = Description of Artificial Sequence: Synthetic coding sequence
  source 1..1026: mol_type = other DNA
atgggcgtggccaccaccctgcagccccccaccaccagcaagaccctgcagaagcagcacctggaggccgtgggcgcctaccagtacgtgctgaccttcctgttcatgggccccttcttcagcctgctggtgttcgtgctgctgttcaccagcctgtggcccttcagcgtgttctacctggtgtggctgtacgtggactgggacacccccaaccagggcggcagaagaagcgagtggatcagaaacagagccatctggagacagctgagagactactaccccgtgaagctggtgaagaccgccgagctgccccccgacagaaactacgtgctgggcgcccacccccacggcatcatgtgcaccggcttcctgtgcaacttcagcaccgagagcaacggcttcagccagctgttccccggcctgagaccctggctggccgtgctggccggcctgttctacctgcccgtgtacagagactacatcatgagcttcggcctgtgccccgtgagcagacagagcctggacttcatcctgagccagccccagctgggccaggccgtggtgatcatggtgggcggcgcccacgaggccctgtacagcgtgcccggcgagcactgcctgaccctgcagaagagaaagggcttcgtgagactggccctgagacacggcgccagcctggtgcccgtgtacagcttcggcgagaacgacatcttcagactgaaggccttcgccaccggcagctggcagcactggtgccagctgaccttcaagaagctgatgggcttcagcccctgcatcttctggggcagaggcctgttcagcgccaccagctggggcctgctgcccttcgccgtgcccatcaccaccgtggtgggcagacccatccccgtgccccagagactgcaccccaccgaggaggaggtgaaccactaccacgccctgtacatgaccgccctggagcagctgttcgaggagcacaaggagagctgcggcgtgcccgccagcacctgcctgaccttcatctag

SEQ ID NO: 77642 - DNA, 930 bp, synthetic construct
  misc_feature 1..930: note = Description of Artificial Sequence: Synthetic coding sequence
  source 1..930: mol_type = other DNA
atggccagcaagagctggctgaacttcctgaccttcctgtgcggcagcgccatcggcttcctgctgtgcagccagctgttcagcatcctgctgggcgagaaggtggacacccagcccaacgtgctgcacaacgacccccacgccagacacagcgacgacaacggccagaaccacctggagggccagatgaacttcaacgccgacagcagccagcacaaggacgagaacaccgacatcgccgagaacctgtaccagaaggtgagaatcctgtgctgggtgatgaccggcccccagaacctggagaagaaggccaagcacgtgaaggccacctgggcccagagatgcaacaaggtgctgttcatgagcagcgaggagaacaaggacttccccgccgtgggcctgaagaccaaggagggcagagaccagctgtactggaagaccatcaaggccttccagtacgtgcacgagcactacctggaggacgccgactggttcctgaaggccgacgacgacacctacgtgatcctggacaacctgagatggctgctgagcaagtacgaccccgaggagcccatctacttcggcagaagattcaagccctacgtgaagcagggctacatgagcggcggcgccggctacgtgctgagcaaggaggccctgaagagattcgtggacgccttcaagaccgacaagtgcacccacagcagcagcatcgaggacctggccctgggcagatgcatggagatcatgaacgtggaggccggcgacagcagagacaccatcggcaaggagaccttccaccccttcgtgcccgagcaccacctgatcaagggctacctgcccagaaccttctggtactggaactacaactactacccccccgtggaggtgagcctggagatcctgctgctgtgccagtacctggactag

SEQ ID NO: 77643 - DNA, 303 bp, synthetic construct
  misc_feature 1..303: note = Description of Artificial Sequence: Synthetic coding sequence
  source 1..303: mol_type = other DNA
atggccagcaagagctggctgaacttcctgaccttcctgtgcggcagcgccatcggcttcctgctgtgcagccagctgttcagcatcctgctgggcgagaaggtggacacccagcccaacgtgctgcacaacgacccccacgccagacacagcgacgacaacggccagaaccacctggagggccagatgaacttcaacgccgacagcagccagcacaaggacgagaacaccgacatcgccgagaacctgtaccagaaggtgagaatcctgtgctgggtgatgaccggcccccagaacctgtag

SEQ ID NO: 77644 - DNA, 396 bp, synthetic construct
  misc_feature 1..396: note = Description of Artificial Sequence: Synthetic coding sequence
  source 1..396: mol_type = other DNA
atggccagcaagagctggctgaacttcctgaccttcctgtgcggcagcgccatcggcttcctgctgtgcagccagctgttcagcatcctgctgggcgagaaggtggacacccagcccaacgtgctgcacaacgacccccacgccagacacagcgacgacaacggccagaaccacctggagggccagatgaacttcaacgccgacagcagccagcacaaggacgagaacaccgacatcgccgagaacctgtaccagaaggtgagaatcctgtgctgggtgatgaccggcccccagaacctggagaagaaggccaagcacgtgaaggccacctgggcccagagatgcaacaaggtgctgttcatgagcagcgaggagaacaaggacttccccgcctag

SEQ ID NO: 77645 - DNA, 1092 bp, synthetic construct
  misc_feature 1..1092: note = Description of Artificial Sequence: Synthetic coding sequence
  source 1..1092: mol_type = other DNA
atggccagcaagagctggctgaacttcctgaccttcctgtgcggcagcgccatcggcttcctgctgtgcagccagctgttcagcatcctgctgggcgagaaggtggacacccagcccaacgtgctgcacaacgacccccacgccagacacagcgacgacaacggccagaaccacctggagggccagatgaacttcaacgccgacagcagccagcacaaggacgagaacaccgacatcgccgagaacctgtaccagaaggtgagaatcctgtgctgggtgatgaccggcccccagaacctggagaagaaggccaagcacgtgaaggccacctgggcccagagatgcaacaaggtgctgttcatgagcagcgaggagaacaaggacttccccgccgtgggcctgaagaccaaggagggcagagaccagctgtactggaagaccatcaaggccttccagtacgtgcacgagcactacctggaggacgccgactggttcctgaaggccgacgacgacacctacgtgatcctggacaacctgagatggctgctgagcaagtacgaccccgaggagcccatctacttcggcagaagattcaagccctacgtgaagcagggctacatgagcggcggcgccggctacgtgctgagcaaggaggccctgaagagattcgtggacgccttcaagaccgacaagtgcacccacagcagcagcatcgaggacctggccctgggcagatgcatggagatcatgaacgtggaggccggcgacagcagagacaccatcggcaaggagaccttccaccccttcgtgcccgagcaccacctgatcaagggctacctgcccagaaccttctggtactggaactacaactactacccccccgtggagggccccggctgctgcagcgacctggccgtgagcttccactacgtggacagcaccaccatgtacgagctggagtacctggtgtaccacctgagaccctacggctacctgtacagataccagcccaccctgcccgagagaatcctgaaggagatcagccaggccaacaagaacgaggacaccaaggtgaagctgggcaacccctag

SEQ ID NO: 77646 - DNA, 549 bp, synthetic construct
  misc_feature 1..549: note = Description of Artificial Sequence: Synthetic coding sequence
  source 1..549: mol_type = other DNA
atgcccagagtggtgcccgaccagagaagcaagttcgagaacgaggagttcttcagaaagctgagcagagagtgcgagatcaagtacaccggcttcagagacagaccccacgaggagagacaggccagattccagaacgcctgcagagacggcagaagcgagatcgccttcgtggccaccggcaccaacctgagcctgcagttcttccccgccagctggcagggcgagcagagacagacccccagcagagagtacgtggacctggagagagaggccggcaaggtgtacctgaaggcccccatgatcctgaacggcgtgtgcgtgatctggaagggctggatcgacctgcagagactggacggcatgggctgcctggagttcgacgaggagagagcccagcaggaggacgccctggcccagcaggccttcgaggaggccagaagaagaaccagagagttcgaggacagagacagaagccacagagaggagatggaggtgagagtgagccagctgctggccgtgaccggcaagaagaccaccagaccctag

SEQ ID NO: 77647 - DNA, 564 bp, synthetic construct
  misc_feature 1..564: note = Description of Artificial Sequence: Synthetic coding sequence
  source 1..564: mol_type = other DNA
atgcccagagtggtgcccgaccagagaagcaagttcgagaacgaggagttcttcagaaagctgagcagagagtgcgagatcaagtacaccggcttcagagacagaccccacgaggagagacaggccagattccagaacgcctgcagagacggcagaagcgagatcgccttcgtggccaccggcaccaacctgagcctgcagttcttccccgccagctggcagggcgagcagagacagacccccagcagagagtacgtggacctggagagagaggccggcaaggtgtacctgaaggcccccatgatcctgaacggcgtgtgcgtgatctggaagggctggatcgacctgcagagactggacggcatgggctgcctggagttcgacgaggagagagcccagcaggaggacgccctggcccagcaggccttcgaggaggccagaagaagaaccagagagttcgaggacagagacagaagccacagagaggagatggaggccagaagacagcaggaccccagccccggcagcaacctgggcggcggcgacgacctgaagctgagatag

SEQ ID NO: 77648 - DNA, 1788 bp, synthetic construct
  misc_feature 1..1788: note = Description of Artificial Sequence: Synthetic coding sequence
  source 1..1788: mol_type = other DNA
atggtgggcgtgcccggcgccgccgccttccagctgggccccgagaagagagtgcccgccatgcccggcagccccgtggaggtgaagatccagagcagaagcagcccccccaccatgccccccctgccccccatcaaccccggcggccccagacccgtgagcttcacccccaccgccctgagcaacggcatcaaccacagcccccccaccctgaacggcgcccccagccccccccagagattcagcaacggccccgccagcagcaccagcagcgccctgaccaaccagcagctgcccgccacctgcggcgccagacagctgagcaagctgaagagattcctgaccaccctgcagcagttcggcaacgacatcagccccgagatcggcgagaaggtgagaaccctggtgctggccctggtgaacagcaccgtgaccatcgaggagttccactgcaagctgcaggaggccaccaacttccccctgagacccttcgtgatccccttcctgaaggccaacctgcccctgctgcagagagagctgctgcactgcgccagagccgccaagcagacccccagccagtacctggcccagcacgagcacctgctgctgaacaccagcatcgccagccccgccgacagcagcgagctgctgatggaggtgcacggcaacggcaagagacccagccccgagagaagagaggagaacagcttcgacagagacaccatcgcccccgagccccccgccaagagagtgtgcaccatcagccccgcccccagacacagccccgccctgaccgtgcccctgatgaaccccggcggccagttccaccccacccccccccccctgcagcactacaccctggaggacatcgccaccagccacctgtacagagagcccaacaagatgctggagcacagagaggtgagagacagacaccacagcctgggcctgaacggcggctaccaggacgagctggtggaccacagactgaccgagagagagtgggccgacgagtggaagcacctggaccacgccctgaactgcatcatggagatggtggagaagaccagaagaagcatggccgtgctgagaagatgccaggagagcgacagagaggagctgaactactggaagagaagatacaacgagaacaccgagctgagaaagaccggcaccgagctggtgagcagacagcacagccccggcagcgccgacagcctgagcaacgacagccagagagagttcaacagcagacccggcaccggctacgtgcccgtggagttctggaagaagaccgaggaggccgtgaacaaggtgaagatccaggccatgagcgaggtgcagaaggccgtggccgaggccgagcagaaggccttcgaggtgatcgccaccgagagagccagaatggagcagaccatcgccgacgtgaagagacaggccgccgaggacgccttcctggtgatcaacgagcaggaggagagcaccgagaactgctggaactgcggcagaaaggccagcgagacctgcagcggctgcaacatcgccagatactgcggcagcttctgccagcacaaggactgggagagacaccacagactgtgcggccagaacctgcacggccagagcccccacggccagggcagacccctgctgcccgtgggcagaggcagcagcgccagaagcgccgactgcagcgtgcccagccccgccctggacaagaccagcgccaccaccagcagaagcagcacccccgccagcgtgaccgccatcgacaccaacggcctgtag

SEQ ID NO: 77649 - DNA, 1815 bp, synthetic construct
  misc_feature 1..1815: note = Description of Artificial Sequence: Synthetic coding sequence
  source 1..1815: mol_type = other DNA
atggccaaggagagcggcatcagcctgaaggagatccaggtgctggccagacagtggaaggtgggccccgagaagagagtgcccgccatgcccggcagccccgtggaggtgaagatccagagcagaagcagcccccccaccatgccccccctgccccccatcaaccccggcggccccagacccgtgagcttcacccccaccgccctgagcaacggcatcaaccacagcccccccaccctgaacggcgcccccagccccccccagagattcagcaacggccccgccagcagcaccagcagcgccctgaccaaccagcagctgcccgccacctgcggcgccagacagctgagcaagctgaagagattcctgaccaccctgcagcagttcggcaacgacatcagccccgagatcggcgagaaggtgagaaccctggtgctggccctggtgaacagcaccgtgaccatcgaggagttccactgcaagctgcaggaggccaccaacttccccctgagacccttcgtgatccccttcctgaaggccaacctgcccctgctgcagagagagctgctgcactgcgccagagccgccaagcagacccccagccagtacctggcccagcacgagcacctgctgctgaacaccagcatcgccagccccgccgacagcagcgagctgctgatggaggtgcacggcaacggcaagagacccagccccgagagaagagaggagaacagcttcgacagagacaccatcgcccccgagccccccgccaagagagtgtgcaccatcagccccgcccccagacacagccccgccctgaccgtgcccctgatgaaccccggcggccagttccaccccacccccccccccctgcagcactacaccctggaggacatcgccaccagccacctgtacagagagcccaacaagatgctggagcacagagaggtgagagacagacaccacagcctgggcctgaacggcggctaccaggacgagctggtggaccacagactgaccgagagagagtgggccgacgagtggaagcacctggaccacgccctgaactgcatcatggagatggtggagaagaccagaagaagcatggccgtgctgagaagatgccaggagagcgacagagaggagctgaactactggaagagaagatacaacgagaacaccgagctgagaaagaccggcaccgagctggtgagcagacagcacagccccggcagcgccgacagcctgagcaacgacagccagagagagttcaacagcagacccggcaccggctacgtgcccgtggagttctggaagaagaccgaggaggccgtgaacaaggtgaagatccaggccatgagcgaggtgcagaaggccgtggccgaggccgagcagaaggccttcgaggtgatcgccaccgagagagccagaatggagcagaccatcgccgacgtgaagagacaggccgccgaggacgccttcctggtgatcaacgagcaggaggagagcaccgagaactgctggaactgcggcagaaaggccagcgagacctgcagcggctgcaacatcgccagatactgcggcagcttctgccagcacaaggactgggagagacaccacagactgtgcggccagaacctgcacggccagagcccccacggccagggcagacccctgctgcccgtgggcagaggcagcagcgccagaagcgccgactgcagcgtgcccagccccgccctggacaagaccagcgccaccaccagcagaagcagcacccccgccagcgtgaccgccatcgacaccaacggcctgtag

SEQ ID NO: 77650 - DNA, 1815 bp, synthetic construct; identical to SEQ ID NO: 77649
  misc_feature 1..1815: note = Description of Artificial Sequence: Synthetic coding sequence
  source 1..1815: mol_type = other DNA

SEQ ID NO: 77651 - DNA, 792 bp, synthetic construct
  misc_feature 1..792: note = Description of Artificial Sequence: Synthetic coding sequence
  source 1..792: mol_type = other DNA
atgcccggcagccccgtggaggtgaagatccagagcagaagcagcccccccaccatgccccccctgccccccatcaaccccggcggccccagacccgtgagcttcacccccaccgccctgagcaacggcatcaaccacagcccccccaccctgaacggcgcccccagccccccccagagattcagcaacggccccgccagcagcaccagcagcgccctgaccaaccagcagctgcccgccacctgcggcgccagacagctgagcaagctgaagagattcctgaccaccctgcagcagttcggcaacgacatcagccccgagatcggcgagaaggtgagaaccctggtgctggccctggtgaacagcaccgtgaccatcgaggagttccactgcaagctgcaggaggccaccaacttccccctgagacccttcgtgatccccttcctgaaggccaacctgcccctgctgcagagagagctgctgcactgcgccagagccgccaagcagacccccagccagtacctggcccagcacgagcacctgctgctgaacaccagcatcgccagccccgccgacagcagcgagctgctgatggaggtgcacggcaacggcaagagacccagccccgagagctgcatcatccacctgaagagcatgggcgtggccagcagacacgagtacttcagcggcaccctgcagatgcccgcccaccccgtgagaaacagcaccctggagaacctgtgggtggactgcagcagaagcctgagaagcaccgtgctgcccttcccctag

SEQ ID NO: 77652 - DNA, 1728 bp, synthetic construct
  misc_feature 1..1728: note = Description of Artificial Sequence: Synthetic coding sequence
  source 1..1728: mol_type = other DNA
atgcccggcagccccgtggaggtgaagatccagagcagaagcagcccccccaccatgccccccctgccccccatcaaccccggcggccccagacccgtgagcttcacccccaccgccctgagcaacggcatcaaccacagcccccccaccctgaacggcgcccccagccccccccagagattcagcaacggccccgccagcagcaccagcagcgccctgaccaaccagcagctgcccgccacctgcggcgccagacagctgagcaagctgaagagattcctgaccaccctgcagcagttcggcaacgacatcagccccgagatcggcgagaaggtgagaaccctggtgctggccctggtgaacagcaccgtgaccatcgaggagttccactgcaagctgcaggaggccaccaacttccccctgagacccttcgtgatccccttcctgaaggccaacctgcccctgctgcagagagagctgctgcactgcgccagagccgccaagcagacccccagccagtacctggcccagcacgagcacctgctgctgaacaccagcatcgccagccccgccgacagcagcgagctgctgatggaggtgcacggcaacggcaagagacccagccccgagagaagagaggagaacagcttcgacagagacaccatcgcccccgagccccccgccaagagagtgtgcaccatcagccccgcccccagacacagccccgccctgaccgtgcccctgatgaaccccggcggccagttccaccccacccccccccccctgcagcactacaccctggaggacatcgccaccagccacctgtacagagagcccaacaagatgctggagcacagagaggtgagagacagacaccacagcctgggcctgaacggcggctaccaggacgagctggtggaccacagactgaccgagagagagtgggccgacgagtggaagcacctggaccacgccctgaactgcatcatggagatggtggagaagaccagaagaagcatggccgtgctgagaagatgccaggagagcgacagagaggagctgaactactggaagagaagatacaacgagaacaccgagctgagaaagaccggcaccgagctggtgagcagacagcacagccccggcagcgccgacagcctgagcaacgacagccagagagagttcaacagcagacccggcaccggctacgtgcccgtggagttctggaagaagaccgaggaggccgtgaacaaggtgaagatccaggccatgagcgaggtgcagaaggccgtggccgaggccgagcagaaggccttcgaggtgatcgccaccgagagagccagaatggagcagaccatcgccgacgtgaagagacaggccgccgaggacgccttcctggtgatcaacgagcaggaggagagcaccgagaactgctggaactgcggcagaaaggccagcgagacctgcagcggctgcaacatcgccagatactgcggcagcttctgccagcacaaggactgggagagacaccacagactgtgcggccagaacctgcacggccagagcccccacggccagggcagacccctgctgcccgtgggcagaggcagcagcgccagaagcgccgactgcagcgtgcccagccccgccctggacaagaccagcgccaccaccagcagaagcagcacccccgccagcgtgaccgccatcgacaccaacggcctgtag

SEQ ID NO: 77653 - DNA, 1137 bp, synthetic construct
  misc_feature 1..1137: note = Description of Artificial Sequence: Synthetic coding sequence
  source 1..1137: mol_type = other DNA
atggaggtgcacggcaacggcaagagacccagccccgagagaagagaggagaacagcttcgacagagacaccatcgcccccgagccccccgccaagagagtgtgcaccatcagccccgcccccagacacagccccgccctgaccgtgcccctgatgaaccccggcggccagttccaccccacccccccccccctgcagcactacaccctggaggacatcgccaccagccacctgtacagagagcccaacaagatgctggagcacagagaggtgagagacagacaccacagcctgggcctgaacggcggctaccaggacgagctggtggaccacagactgaccgagagagagtgggccgacgagtggaagcacctggaccacgccctgaactgcatcatggagatggtggagaagaccagaagaagcatggccgtgctgagaagatgccaggagagcgacagagaggagctgaactactggaagagaagatacaacgagaacaccgagctgagaaagaccggcaccgagctggtgagcagacagcacagccccggcagcgccgacagcctgagcaacgacagccagagagagttcaacagcagacccggcaccggctacgtgcccgtggagttctggaagaagaccgaggaggccgtgaacaaggtgaagatccaggccatgagcgaggtgcagaaggccgtggccgaggccgagcagaaggccttcgaggtgatcgccaccgagagagccagaatggagcagaccatcgccgacgtgaagagacaggccgccgaggacgccttcctggtgatcaacgagcaggaggagagcaccgagaactgctggaactgcggcagaaaggccagcgagacctgcagcggctgcaacatcgccagatactgcggcagcttctgccagcacaaggactgggagagacaccacagactgtgcggccagaacctgcacggccagagcccccacggccagggcagacccctgctgcccgtgggcagaggcagcagcgccagaagcgccgactgcagcgtgcccagccccgccctggacaagaccagcgccaccaccagcagaagcagcacccccgccagcgtgaccgccatcgacaccaacggcctgtag

SEQ ID NO: 77654 - DNA, 546 bp, synthetic construct
  misc_feature 1..546: note = Description of Artificial Sequence: Synthetic coding sequence
  source 1..546: mol_type = other DNA
atggtgggcgtgcccggcgccgccgccttccagctgggccccgagaagagagtgcccgccatgcccggcagccccgtggaggtgaagatccagagcagaagcagcccccccaccatgccccccctgccccccatcaaccccggcggccccagacccgtgagcttcacccccaccgccctgagcaacggcatcaaccacagcccccccaccctgaacggcgcccccagccccccccagagattcagcaacggccccgccagcagcaccagcagcgccctgaccaaccagcagctgcccgccacctgcggcgccagacagctgagcaagctgaagagattcctgaccaccctgcagcagttcggcaacgacatcagccccgagatcggcgagaaggtgagaaccctggtgctggccctggtgaacagcaccgtgaccatcgaggagttccactgcaagctgcaggaggccaccaacttccccctgagacccttcgtgatccccttcctgaaggccaacctgcccctgctgcagagagagctgctgtag

SEQ ID NO: 77655 - DNA, 243 bp, synthetic construct
  misc_feature 1..243: note = Description of Artificial Sequence: Synthetic coding sequence
  source 1..243: mol_type = other DNA
atggccaaggagagcggcatcagcctgaaggagatccaggtgctggccagacagtggaaggtgggccccgagaagagagtgcccgccatgcccggcagccccgtggaggtgaagatccagagcagaagcagcccccccaccatgccccccctgccccccatcaaccccggcggccccagacccgtgagcttcacccccaccgccctgagcaacggcatcaaccacagcccccccaccctgtag

SEQ ID NO: 77656 - DNA, 459 bp, synthetic construct
  misc_feature 1..459: note = Description of Artificial Sequence: Synthetic coding sequence
  source 1..459: mol_type = other DNA
atgagcgaggtgcagaaggccgtggccgaggccgagcagaaggccttcgaggtgatcgccaccgagagagccagaatggagcagaccatcgccgacgtgaagagacaggccgccgaggacgccttcctggtgatcaacgagcaggaggagagcaccgagaactgctggaactgcggcagaaaggccagcgagacctgcagcggctgcaacatcgccagatactgcggcagcttctgccagcacaaggactgggagagacaccacagactgtgcggccagaacctgcacggccagagcccccacggccagggcagacccctgctgcccgtgggcagaggcagcagcgccagaagcgccgactgcagcgtgcccagccccgccctggacaagaccagcgccaccaccagcagaagcagcacccccgccagcgtgaccgccatcgacaccaacggcctgtag

SEQ ID NO: 77657 - DNA, 1962 bp, synthetic construct
  misc_feature 1..1962: note = Description of Artificial Sequence: Synthetic coding sequence
  source 1..1962: mol_type = other DNA
atgcccgccagcagactgagagacagagccgccagcagcgccagcggcagcacctgcggcagcatgagccagacccaccccgtgctggagagcggcctgctggccagcgccggctgcagcgcccccagaggccccagaaagggcggccccgcccccgtggacagaaaggccaaggccagcgccatgcccgacagccccgccgaggtgaagacccagcccagaagcaccccccccagcatgcccccccccccccccgccgccagccagggcgccaccagaccccccagcttcaccccccacacccacagagaggacggccccgccaccctgccccacggcagattccacggctgcctgaagtggagcatggtgtgcctgctgatgaacggcagcagccacagccccaccgccatcaacggcgccccctgcacccccaacggcttcagcaacggccccgccaccagcagcaccgccagcctgagcacccagcacctgccccccgcctgcggcgccagacagctgagcaagctgaagagattcctgaccaccctgcagcagttcggcagcgacatcagccccgagatcggcgagagagtgagaaccctggtgctgggcctggtgaacagcaccctgaccatcgaggagttccacagcaagctgcaggaggccaccaacttccccctgagacccttcgtgatccccttcctgaaggccaacctgcccctgctgcagagagagctgctgcactgcgccagactggccaagcagacccccgcccagtacctggcccagcacgagcagctgctgctggacgccagcgccagcagccccatcgacagcagcgagctgctgctggaggtgaacgagaacggcaagagaagaacccccgacagaaccaaggagaacggcagcgacagagaccccctgcaccccgagcacctgagcaagagaccctgcaccctgaaccccgcccagagatacagccccagcaacggccccccccagcccaccccccccccccactacagactggaggacatcgccatggcccaccacttcagagacgcctacagacaccccgaccccagagagctgagagagagacacagacccctggtggtgcccggcagcagacaggaggaggtgatcgaccacaagctgaccgagagagagtgggccgaggagtggaagcacctgaacaacctgctgaactgcatcatggacatggtggagaagaccagaagaagcctgaccgtgctgagaagatgccaggaggccgacagagaggagctgaaccactgggccagaagatacagcgacgccgaggacaccaagaagggccccgcccccgccgccgccagacccagaagcagcagcgccggccccgagggcccccagctggacgtgcccagagagttcctgcccagaaccctgaccggctacgtgcccgaggacatctggagaaaggccgaggaggccgtgaacgaggtgaagagacaggccatgagcgagctgcagaaggccgtgagcgacgccgagagaaaggcccacgagctgatcaccaccgagagagccaagatggagagagccctggccgaggccaagagacaggccagcgaggacgccctgaccgtgatcaaccagcaggaggacagcagcgagagctgctggaactgcggcagaaaggccagcgagacctgcagcggctgcaacgccgccagatactgcggcagcttctgccagcacagagactgggagaagcaccaccacgtgtgcggccagagcctgcagggccccaccgccgtggtggccgaccccgtgcccggcccccccgaggccgcccacagcctgggccccagcctgcccgtgggcgccgccagccccagcgaggccggcagcgccggccccagcagacccggcagccccagcccccccggccccctggacaccgtgcccagatag

SEQ ID NO: 77658 - DNA, 1704 bp, synthetic construct
  misc_feature 1..1704: note = Description of Artificial Sequence: Synthetic coding sequence
  source 1..1704: mol_type = other DNA
atgcccgacagccccgccgaggtgaagacccagcccagaagcaccccccccagcatgcccccccccccccccgccgccagccagggcgccaccagaccccccagcttcaccccccacaccctgatgaacggcagcagccacagccccaccgccatcaacggcgccccctgcacccccaacggcttcagcaacggccccgccaccagcagcaccgccagcctgagcacccagcacctgccccccgcctgcggcgccagacagctgagcaagctgaagagattcctgaccaccctgcagcagttcggcagcgacatcagccccgagatcggcgagagagtgagaaccctggtgctgggcctggtgaacagcaccctgaccatcgaggagttccacagcaagctgcaggaggccaccaacttccccctgagacccttcgtgatccccttcctgaaggccaacctgcccctgctgcagagagagctgctgcactgcgccagactggccaagcagacccccgcccagtacctggcccagcacgagcagctgctgctggacgccagcgccagcagccccatcgacagcagcgagctgctgctggaggtgaacgagaacggcaagagaagaacccccgacagaaccaaggagaacggcagcgacagagaccccctgcaccccgagcacctgagcaagagaccctgcaccctgaaccccgcccagagatacagccccagcaacggccccccccagcccaccccccccccccactacagactggaggacatcgccatggcccaccacttcagagacgcctacagacaccccgaccccagagagctgagagagagacacagacccctggtggtgcccggcagcagacaggaggaggtgatcgaccacaagctgaccgagagagagtgggccgaggagtggaagcacctgaacaacctgctgaactgcatcatggacatggtggagaagaccagaagaagcctgaccgtgctgagaagatgccaggaggccgacagagaggagctgaaccactgggccagaagatacagcgacgccgaggacaccaagaagggccccgcccccgccgccgccagacccagaagcagcagcgccggccccgagggcccccagctggacgtgcccagagagttcctgcccagaaccctgaccggctacgtgcccgaggacatctggagaaaggccgaggaggccgtgaacgaggtgaagagacaggccatgagcgagctgcagaaggccgtgagcgacgccgagagaaaggcccacgagctgatcaccaccgagagagccaagatggagagagccctggccgaggccaagagacaggccagcgaggacgccctgaccgtgatcaaccagcaggaggacagcagcgagagctgctggaactgcggcagaaaggccagcgagacctgcagcggctgcaacgccgccagatactgcggcagcttctgccagcacagagactgggagaagcaccaccacgtgtgcggccagagcctgcagggccccaccgccgtggtggccgaccccgtgcccggcccccccgaggccgcccacagcctgggccccagcctgcccgtgggcgccgccagccccagcgaggccggcagcgccggccccagcagacccggcagccccagcccccccggccccctggacaccgtgcccagatag

SEQ ID NO: 77659 - DNA, 1704 bp, synthetic construct; identical to SEQ ID NO: 77658
  misc_feature 1..1704: note = Description of Artificial Sequence: Synthetic coding sequence
  source 1..1704: mol_type = other DNA

SEQ ID NO: 77660 - DNA, 1848 bp, synthetic construct
  misc_feature 1..1848: note = Description of Artificial Sequence: Synthetic coding sequence
  source 1..1848: mol_type = other DNA
atgcccgccagcagactgagagacagagccgccagcagcgccagcggcagcacctgcggcagcatgagccagacccaccccgtgctggagagcggcctgctggccagcgccggctgcagcgcccccagaggccccagaaagggcggccccgcccccgtggacagaaaggccaaggccagcgccatgcccgacagccccgccgaggtgaagacccagcccagaagcaccccccccagcatgcccccccccccccccgccgccagccagggcgccaccagaccccccagcttcaccccccacaccctgatgaacggcagcagccacagccccaccgccatcaacggcgccccctgcacccccaacggcttcagcaacggccccgccaccagcagcaccgccagcctgagcacccagcacctgccccccgcctgcggcgccagacagctgagcaagctgaagagattcctgaccaccctgcagcagttcggcagcgacatcagccccgagatcggcgagagagtgagaaccctggtgctgggcctggtgaacagcaccctgaccatcgaggagttccacagcaagctgcaggaggccaccaacttccccctgagacccttcgtgatccccttcctgaaggccaacctgcccctgctgcagagagagctgctgcactgcgccagactggccaagcagacccccgcccagtacctggcccagcacgagcagctgctgctggacgccagcgccagcagccccatcgacagcagcgagctgctgctggaggtgaacgagaacggcaagagaagaacccccgacagaaccaaggagaacggcagcgacagagaccccctgcaccccgagagatacagccccagcaacggccccccccagcccaccccccccccccactacagactggaggacatcgccatggcccaccacttcagagacgcctacagacaccccgaccccagagagctgagagagagacacagacccctggtggtgcccggcagcagacaggaggaggtgatcgaccacaagctgaccgagagagagtgggccgaggagtggaagcacctgaacaacctgctgaactgcatcatggacatggtggagaagaccagaagaagcctgaccgtgctgagaagatgccaggaggccgacagagaggagctgaaccactgggccagaagatacagcgacgccgaggacaccaagaagggccccgcccccgccgccgccagacccagaagcagcagcgccggccccgagggcccccagctggacgtgcccagagagttcctgcccagaaccctgaccggctacgtgcccgaggacatctggagaaaggccgaggaggccgtgaacgaggtgaagagacaggccatgagcgagctgcagaaggccgtgagcgacgccgagagaaaggcccacgagctgatcaccaccgagagagccaagatggagagagccctggccgaggccaagagacaggccagcgaggacgccctgaccgtgatcaaccagcaggaggacagcagcgagagctgctggaactgcggcagaaaggccagcgagacctgcagcggctgcaacgccgccagatactgcggcagcttctgccagcacagagactgggagaagcaccaccacgtgtgcggccagagcctgcagggccccaccgccgtggtggccgaccccgtgcccggcccccccgaggccgcccacagcctgggccccagcctgcccgtgggcgccgccagccccagcgaggccggcagcgccggccccagcagacccggcagccccagcccccccggccccctggacaccgtgcccagatag

SEQ ID NO: 77661 - DNA, 1734 bp, synthetic construct
  misc_feature 1..1734: note = Description of Artificial Sequence: Synthetic coding sequence
  source 1..1734: mol_type = other DNA
atgcccgccagcagactgagagacagagccgccagcagcgccagcggcagcacctgcggcagcatgagccagacccaccccgtgctggagagcggcctgctggccagcgccggctgcagcgcccccagaggccccagaaagggcggccccgtgatgaacggcagcagccacagccccaccgccatcaacggcgccccctgcacccccaacggcttcagcaacggccccgccaccagcagcaccgccagcctgagcacccagcacctgccccccgcctgcggcgccagacagctgagcaagctgaagagattcctgaccaccctgcagcagttcggcagcgacatcagccccgagatcggcgagagagtgagaaccctggtgctgggcctggtgaacagcaccctgaccatcgaggagttccacagcaagctgcaggaggccaccaacttccccctgagacccttcgtgatccccttcctgaaggccaacctgcccctgctgcagagagagctgctgcactgcgccagactggccaagcagacccccgcccagtacctggcccagcacgagcagctgctgctggacgccagcgccagcagccccatcgacagcagcgagctgctgctggaggtgaacgagaacggcaagagaagaacccccgacagaaccaaggagaacggcagcgacagagaccccctgcaccccgagcacctgagcaagagaccctgcaccctgaaccccgcccagagatacagccccagcaacggccccccccagcccaccccccccccccactacagactggaggacatcgccatggcccaccacttcagagacgcctacagacaccccgaccccagagagctgagagagagacacagacccctggtggtgcccggcagcagacaggaggaggtgatcgaccacaagctgaccgagagagagtgggccgaggagtggaagcacctgaacaacctgctgaactgcatcatggacatggtggagaagaccagaagaagcctgaccgtgctgagaagatgccaggaggccgacagagaggagctgaaccactgggccagaagatacagcgacgccgaggacaccaagaagggccccgcccccgccgccgccagacccagaagcagcagcgccggccccgagggcccccagctggacgtgcccagagagttcctgcccagaaccctgaccggctacgtgcccgaggacatctggagaaaggccgaggaggccgtgaacgaggtgaagagacaggccatgagcgagctgcagaaggccgtgagcgacgccgagagaaaggcccacgagctgatcaccaccgagagagccaagatggagagagccctggccgaggccaagagacaggccagcgaggacgccctgaccgtgatcaaccagcaggaggacagcagcgagagctgctggaactgcggcagaaaggccagcgagacctgcagcggctgcaacgccgccagatactgcggcagcttctgccagcacagagactgggagaagcaccaccacgtgtgcggccagagcctgcagggccccaccgccgtggtggccgaccccgtgcccggcccccccgaggccgcccacagcctgggccccagcctgcccgtgggcgccgccagccccagcgaggccggcagcgccggccccagcagacccggcagccccagcccccccggccccctggacaccgtgcccagatag

SEQ ID NO: 77662 - DNA, 558 bp, synthetic construct
  misc_feature 1..558: note = Description of Artificial Sequence: Synthetic coding sequence
  source 1..558: mol_type = other DNA
atggccgcccagaaggaccagcagaaggacgccgaggccgagggcctgagcggcaccaccctgctgcccaagctgatccccagcggcgccggcagagagtggctggagagaagaagagccaccatcagaccctggagcaccttcgtggaccagcagagattcagcagacccagaaacctgggcgagctgtgccagagactggtgagaaacgtggagtactaccagagcaactacgtgttcgtgttcctgggcctgatcctgtactgcgtggtgaccagccccatgctgctggtggccctggccgtgttcttcggcgcctgctacatcctgtacctgagaaccctggagagcaagctggtgctgttcggcagagaggtgagccccgcccaccagtacgccctggccggcggcatcagcttccccttcttctggctggccggcgccggcagcgccgtgttctgggtgctgggcgccaccctggtggtgatcggcagccacgccgccttccaccagatcgaggccgtggacggcgaggagctgcagatggagcccgtgtag

SEQ ID NO: 77663 - DNA, 3147 bp, synthetic construct
  misc_feature 1..3147: note = Description of Artificial Sequence: Synthetic coding sequence
  source 1..3147: mol_type = other DNA
atgaacagattcagagtgagcaagttcagacacaccgaggccagaccccccagaagagagagctggatcagcgacatcagagccggcaccgcccccagctgcagaaaccacatcaagagcagctgcagcctgatcgccttcaacagcgacagacccggcgtgctgggcatcgtgcccctgcagggccagggcgaggacaagagaagagtggcccacctgggctgccacagcgacctggtgaccgacctggacttcagccccttcgacgacttcctgctggccaccggcagcgccgacagaaccgtgaagctgtggagactgcccggccccggccaggccctgcccagcgcccccggcgtggtgctgggccccgaggacctgcccgtggaggtgctgcagttccaccccaccagcgacggcatcctggtgagcgccgccggcaccaccgtgaaggtgtgggacgccgccaagcagcagcccctgaccgagctggccgcccacggcgacctggtgcagagcgccgtgtggagcagagacggcgccctggtgggcaccgcctgcaaggacaagcagctgagaatcttcgaccccagaaccaagcccagagccagccagagcacccaggcccacgagaacagcagagacagcagactggcctggatgggcacctgggagcacctggtgagcaccggcttcaaccagatgagagagagagaggtgaagctgtgggacaccagattcttcagcagcgccctggccagcctgaccctggacaccagcctgggctgcctggtgcccctgctggaccccgacagcggcctgctggtgctggccggcaagggcgagagacagctgtactgctacgaggtggtgccccagcagcccgccctgagccccgtgacccagtgcgtgctggagagcgtgctgagaggcgccgccctggtgcccagacaggccctggccgtgatgagctgcgaggtgctgagagtgctgcagctgagcgacaccgccatcgtgcccatcggctaccacgtgcccagaaaggccgtggagttccacgaggacctgttccccgacaccgccggctgcgtgcccgccaccgacccccacagctggtgggccggcgacaaccagcaggtgcagaaggtgagcctgaaccccgcctgcagaccccaccccagcttcaccagctgcctggtgccccccgccgagcccctgcccgacaccgcccagcccgccgtgatggagacccccgtgggcgacgccgacgccagcgagggcttcagcagcccccccagcagcctgaccagccccagcacccccagcagcctgggccccagcctgagcagcaccagcggcatcggcaccagccccagcctgagaagcctgcagagcctgctgggccccagcagcaagttcagacacgcccagggcaccgtgctgcacagagacagccacatcaccaacctgaagggcctgaacctgaccacccccggcgagagcgacggcttctgcgccaacaagctgagagtggccgtgcccctgctgagcagcggcggccaggtggccgtgctggagctgagaaagcccggcagactgcccgacaccgccctgcccaccctgcagaacggcgccgccgtgaccgacctggcctgggaccccttcgacccccacagactggccgtggccggcgaggacgccagaatcagactgtggagagtgcccgccgagggcctggaggaggtgctgaccacccccgagaccgtgctgaccggccacaccgagaagatctgcagcctgagattccaccccctggccgccaacgtgctggccagcagcagctacgacctgaccgtgagaatctgggacctgcaggccggcgccgacagactgaagctgcagggccaccaggaccagatcttcagcctggcctggagccccgacggccagcagctggccaccgtgtgcaaggacggcagagtgagagtgtacagacccagaagcggccccgagcccctgcaggagggccccggccccaagggcggcagaggcgccagaatcgtgtgggtgtgcgacggcagatgcctgctggtgagcggcttcgacagccagagcgagagacagctgctgctgtacgaggccgaggccctggccggcggccccctggccgtgctgggcctggacgtggcccccagcaccctgctgcccagctacgaccccgacaccggcctggtgctgctgaccggcaagggcgacaccagagtgttcctgtacgagctgctgcccgagagccccttcttcctggagtgcaacagcttcaccagccccgacccccacaagggcctggtgctgctgcccaagaccgagtgcgacgtgagagaggtggagctgatgagatgcctgagactgagacagagcagcctggagcccgtggccttcagactgcccagagtgagaaaggagttcttccaggacgacgtgttccccgacaccgccgtgatctgggagcccgtgctgagcgccgaggcctggctgcagggcgccaacggccagccctggctgctgagcctgcagccccccgacatgagccccgtgagccaggcccccagagaggcccccgccagaagagcccccagcagcgcccagtacctggaggagaagagcgaccagcagaagaaggaggagctgctgaacgccatggtggccaagctgggcaacagagaggaccccctgccccaggacagcttcgagggcgtggacgaggacgagtgggccaagtacctggcccagatcatcgtgatgggcgtgcaggtggtgggcagagccttcgccagagccctgagacaggagttcgccgccagcagagccgccgccgacgccagaggcagagccggccacagaagcgccgccgccagcaacctgagcggcctgagcctgcaggaggcccagcagatcctgaacgtgagcaagctgagccccgaggaggtgcagaagaactacgagcacctgttcaaggtgaacgacaagagcgtgggcggcagcttctacctgcagagcaaggtggtgagagccaaggagagactggacgaggagctgaagatccaggcccaggaggacagagagaagggccagatgccccacacctag

SEQ ID NO: 77664 - DNA, 2778 bp, synthetic construct
  misc_feature 1..2778: note = Description of Artificial Sequence: Synthetic coding sequence
  source 1..2778: mol_type = other DNA
atgaacagattcagagtgagcaagttcagacacaccgaggccagaccccccagaagagagagctggatcagcgacatcagagccggcaccgcccccagctgcagaaaccacatcaagagcagctgcagcctgatcgccttcaacagcgacagacccggcgtgctgggcatcgtgcccctgcagggccagggcgaggacaagagaagagtggcccacctgggctgccacagcgacctggtgaccgacctggacttcagccccttcgacgacttcctgctggccaccggcagcgccgacagaaccgtgaagctgtggagactgcccggccccggccaggccctgcccagcgcccccggcgtggtgctgggccccgaggacctgcccgtggaggtgctgcagttccaccccaccagcgacggcatcctggtgagcgccgccggcaccaccgtgaaggtgtgggacgccgccaagcagcagcccctgaccgagctggccgcccacggcgacctggtgcagagcgccgtgtggagcagagacggcgccctggtgggcaccgcctgcaaggacaagcagctgagaatcttcgaccccagaaccaagcccagagccagccagagcacccaggcccacgagaacagcagagacagcagactggcctggatgggcacctgggagcacctggtgagcaccggcttcaaccagatgagagagagagaggtgaagctgtgggacaccagattcttcagcagcgccctggccagcctgaccctggacaccagcctgggctgcctggtgcccctgctggaccccgacagcggcctgctggtgctggccggcaagggcgagagacagctgtactgctacgaggtggtgccccagcagcccgccctgagccccgtgacccagtgcgtgctggagagcgtgctgagaggcgccgccctggtgcccagacaggccctggccgtgatgagctgcgaggtgctgagagtgctgcagctgagcgacaccgccatcgtgcccatcggctaccacgtgcccagaaaggccgtggagttccacgaggacctgttccccgacaccgccggctgcgtgcccgccaccgacccccacagctggtgggccggcgacaaccagcaggtgcagaaggtgagcctgaaccccgcctgcagaccccaccccagcttcaccagctgcctggtgccccccgccgagcccctgcccgacaccgcccagcccgccgtgatggagacccccgtgggcgacgccgacgccagcgagggcttcagcagcccccccagcagcctgaccagccccagcacccccagcagcctgggccccagcctgagcagcaccagcggcatcggcaccagccccagcctgagaagcctgcagagcctgctgggccccagcagcaagttcagacacgcccagggcaccgtgctgcacagagacagccacatcaccaacctgaagggcctgaacctgaccacccccggcgagagcgacggcttctgcgccaacaagctgagagtggccgtgcccctgctgagcagcggcggccaggtggccgtgctggagctgagaaagcccggcagactgcccgacaccgccctgcccaccctgcagaacggcgccgccgtgaccgacctggcctgggaccccttcgacccccacagactggccgtggccggcgaggacgccagaatcagactgtggagagtgcccgccgagggcctggaggaggtgctgaccacccccgagaccgtgctgaccggccacaccgagaagatctgcagcctgagattccaccccctggccgccaacgtgctggccagcagcagctacgacctgaccgtgagaatctgggacctgcaggccggcgccgacagactgaagctgcagggccaccaggaccagatcttcagcctggcctggagccccgacggccagcagctggccaccgtgtgcaaggacggcagagtgagagtgtacagacccagaagcggccccgagcccctgcaggagggccccggccccaagggcggcagaggcgccagaatcgtgtgggtgtgcgacggcagatgcctgctggtgagcggcttcgacagccagagcgagagacagctgctgctgtacgaggccgaggccctggccggcggccccctggccgtgctgggcctggacgtggcccccagcaccctgctgcccagctacgaccccgacaccggcctggtgctgctgaccggcaagggcgacaccagagtgttcctgtacgagctgctgcccgagagccccttcttcctggagtgcaacagcttcaccagccccgacccccacaagggcctggtgctgctgcccaagaccgagtgcgacgtgagagaggtggagctgatgagatgcctgagactgagacagagcagcctggagcccgtggccttcagactgcccagagtgagaaaggagttcttccaggacgacgtgttccccgacaccgccgtgatctgggagcccgtgctgagcgccgaggcctggctgcagggcgccaacggccagccctggctgctgagcctgcagccccccgacatgagccccgtgagccaggcccccagagaggcccccgccagaagagcccccagcagcgcccagtacctggaggagaagagcgaccagcagaagaaggaggagctgctgaacgccatggtggccaagctgggcaacagagaggaccccctgccccaggacagcttcgagggcgtggacgaggacgagtgggactag

SEQ ID NO: 77665 - DNA, 1104 bp, synthetic construct
  misc_feature 1..1104: note = Description of Artificial Sequence: Synthetic coding sequence
  source 1..1104: mol_type = other DNA
atgaacagattcagagtgagcaagttcagacacaccgaggccagaccccccagaagagaggacaagcagctgagaatcttcgaccccagaaccaagcccagagccagccagagcacccaggcccacgagaacagcagagacagcagactggcctggatgggcacctgggagcacctggtgagcaccggcttcaaccagatgagagagagagaggtgaagctgtgggacaccagattcttcagcagcgccctggccagcctgaccctggacaccagcctgggctgcctggtgcccctgctggaccccgacagcggcctgctggtgctggccggcaagggcgagagacagctgtactgctacgaggtggtgccccagcagcccgccctgagccccgtgacccagtgcgtgctggagagcgtgctgagaggcgccgccctggtgcccagacaggccctggccgtgatgagctgcgaggtgctgagagtgctgcagctgagcgacaccgccatcgtgcccatcggctaccacgtgcccagaaaggccgtggagttccacgaggacctgttccccgacaccgccggctgcgtgcccgccaccgacccccacagctggtgggccggcgacaaccagcaggtgcagaaggtgagcctgaaccccgcctgcagaccccaccccagcttcaccagctgcctggtgccccccgccgagcccctgcccgacaccgcccagcccgccgtgatggagacccccgtgggcgacgccgacgccagcgagggcttcagcagcccccccagcagcctgaccagccccagcacccccagcagcctgggccccagcctgagcagcaccagcggcatcggcaccagccccagcctgagaagcctgcagagcctgctgggccccagcagcaagttcagacacgcccagggcaccgtgctgcacagagacagccacatcaccaacctgaagggcctgaacctgaccacccccggcgagagcgacggcttctgcgccaacaagctgagagtggccgtgcccctgctgagcagcggcggccaggtggccgtgctggagatgagagagaagagacacagagaggtgtag

SEQ ID NO: 77666 - DNA, 2523 bp, synthetic construct
  misc_feature 1..2523: note = Description of Artificial Sequence: Synthetic coding sequence
  source 1..2523: mol_type = other DNA
atgaacagattcagagtgagcaagttcagacacaccgaggccagaccccccagaagagagagctggatcagcgacatcagagccggcaccgcccccagctgcagaaaccacatcaagagcagctgcagcctgatcgccttcaacagcgacagacccggcgtgctgggcatcgtgcccctgcagggccagggcgaggacaagagaagagtggcccacctgggctgccacagcgagctggccgcccacggcgacctggtgcagagcgccgtgtggagcagagacggcgccctggtgggcaccgcctgcaaggacaagcagctgagaatcttcgaccccagaaccaagcccagagccagccagagcacccaggcccacgagaacagcagagacagcagactggcctggatgggcacctgggagcacctggtgagcaccggcttcaaccagatgagagagagagaggtgaagctgtgggacaccagattcttcagcagcgccctggccagcctgaccctggacaccagcctgggctgcctggtgcccctgctggaccccgacagcggcctgctggtgctggccggcaagggcgagagacagctgtactgctacgaggtggtgccccagcagcccgccctgagccccgtgacccagtgcgtgctggagagcgtgctgagaggcgccgccctggtgcccagacaggccctggccgtgatgagctgcgaggtgctgagagtgctgcagctgagcgacaccgccatcgtgcccatcggctaccacgtgcccagaaaggccgtggagttccacgaggacctgttccccgacaccgccggctgcgtgcccgccaccgacccccacagctggtgggccggcgacaaccagcaggtgcagaaggtgagcctgaaccccgcctgcagaccccaccccagcttcaccagctgcctggtgccccccgccgagcccctgcccgacaccgcccagcccgccgtgatggagacccccgtgggcgacgccgacgccagcgagggcttcagcagcccccccagcagcctgaccagccccagcacccccagcagcctgggccccagcctgagcagcaccagcggcatcggcaccagccccagcctgagaagcctgcagagcctgctgggccccagcagcaagttcagacacgcccagggcaccgtgctgcacagagacagccacatcaccaacctgaagggcctgaacctgaccacccccggcgagagcgacggcttctgcgccaacaagctgagagtggccgtgcccctgctgagcagcggcggccaggtggccgtgctggagctgagaaagcccggcagactgcccgacaccgccctgcccaccctgcagaacggcgccgccgtgaccgacctggcctgggaccccttcgacccccacagactggccgtggccggcgaggacgccagaatcagactgtggagagtgcccgccgagggcctggaggaggtgctgaccacccccgagaccgtgctgaccggccacaccgagaagatctgcagcctgagattccaccccctggccgccaacgtgctggccagcagcagctacgacctgaccgtgagaatctgggacctgcaggccggcgccgacagactgaagctgcagggccaccaggaccagatcttcagcctggcctggagccccgacggccagcagctggccaccgtgtgcaaggacggcagagtgagagtgtacagacccagaagcggccccgagcccctgcaggagggccccggccccaagggcggcagaggcgccagaatcgtgtgggtgtgcgacggcagatgcctgctggtgagcggcttcgacagccagagcgagagacagctgctgctgtacgaggccgaggccctggccggcggccccctggccgtgctgggcctggacgtggcccccagcaccctgctgcccagctacgaccccgacaccggcctggtgctgctgaccggcaagggcgacaccagagtgttcctgtacgagctgctgcccgagagccccttcttcctggagtgcaacagcttcaccagccccgacccccacaagggcctggtgctgctgcccaagaccgagtgcgacgtgagagaggtggagctgatgagatgcctgagactgagacagagcagcctggagcccgtggccttcagactgcccagagtgagaaaggagttcttccaggacgacgtgttccccgacaccgccgtgatctgggagcccgtgctgagcgccgaggcctggctgcagggcgccaacggccagccctggctgctgagcctgcagccccccgacatgagccccgtgagccaggcccccagagaggcccccgccagaagagcccccagcagcgcccagtacctggaggagaagagcgaccagcagaagaaggaggagctgctgaacgccatggtggccaagctgggcaacagagaggaccccctgccccaggacagcttcgagggcgtggacgaggacgagtgggactag

SEQ ID NO: 77667 - DNA, 2118 bp, synthetic construct
  misc_feature 1..2118: note = Description of Artificial Sequence: Synthetic coding sequence
  source 1..2118: mol_type = other DNA
atgggcacctgggagcacctggtgagcaccggcttcaaccagatgagagagagagaggtgaagctgtgggacaccagattcttcagcagcgccctggccagcctgaccctggacaccagcctgggctgcctggtgcccctgctggaccccgacagcggcctgctggtgctggccggcaagggcgagagacagctgtactgctacgaggtggtgccccagcagcccgccctgagccccgtgacccagtgcgtgctggagagcgtgctgagaggcgccgccctggtgcccagacaggccctggccgtgatgagctgcgaggtgctgagagtgctgcagctgagcgacaccgccatcgtgcccatcggctaccacgtgcccagaaaggccgtggagttccacgaggacctgttccccgacaccgccggctgcgtgcccgccaccgacccccacagctggtgggccggcgacaaccagcaggtgcagaaggtgagcctgaaccccgcctgcagaccccaccccagcttcaccagctgcctggtgccccccgccgagcccctgcccgacaccgcccagcccgccgtgatggagacccccgtgggcgacgccgacgccagcgagggcttcagcagcccccccagcagcctgaccagccccagcacccccagcagcctgggccccagcctgagcagcaccagcggcatcggcaccagccccagcctgagaagcctgcagagcctgctgggccccagcagcaagttcagacacgcccagggcaccgtgctgcacagagacagccacatcaccaacctgaagggcctgaacctgaccacccccggcgagagcgacggcttctgcgccaacaagctgagagtggccgtgcccctgctgagcagcggcggccaggtggccgtgctggagctgagaaagcccggcagactgcccgacaccgccctgcccaccctgcagaacggcgccgccgtgaccgacctggcctgggaccccttcgacccccacagactggccgtggccggcgaggacgccagaatcagactgtggagagtgcccgccgagggcctggaggaggtgctgaccacccccgagaccgtgctgaccggccacaccgagaagatctgcagcctgagattccaccccctggccgccaacgtgctggccagcagcagctacgacctgaccgtgagaatctgggacctgcaggccggcgccgacagactgaagctgcagggccaccaggaccagatcttcagcctggcctggagccccgacggccagcagctggccaccgtgtgcaaggacggcagagtgagagtgtacagacccagaagcggccccgagcccctgcaggagggccccggccccaagggcggcagaggcgccagaatcgtgtgggtgtgcgacggcagatgcctgctggtgagcggcttcgacagccagagcgagagacagctgctgctgtacgaggccgaggccctggccggcggccccctggccgtgctgggcctggacgtggcccccagcaccctgctgcccagctacgaccccgacaccggcctggtgctgctgaccggcaagggcgacaccagagtgttcctgtacgagctgctgcccgagagccccttcttcctggagtgcaacagcttcaccagccccgacccccacaagggcctggtgctgctgcccaagaccgagtgcgacgtgagagaggtggagctgatgagatgcctgagactgagacagagcagcctggagcccgtggccttcagactgcccagagtgagaaaggagttcttccaggacgacgtgttccccgacaccgccgtgatctgggagcccgtgctgagcgccgaggcctggctgcagggcgccaacggccagccctggctgctgagcctgcagccccccgacatgagccccgtgagccaggcccccagagaggcccccgccagaagagcccccagcagcgcccagtacctggaggagaagagcgaccagcagaagaaggaggagctgctgaacgccatggtggccaagctgggcaacagagaggaccccctgccccaggacagcttcgagggcgtggacgaggacgagtgggactag

SEQ ID NO: 77668 - DNA, 1386 bp, synthetic construct; identical to SEQ ID NO: 71717
  misc_feature 1..1386: note = Description of Artificial Sequence: Synthetic coding sequence
  source 1..1386: mol_type = other DNA

SEQ ID NO: 77669 - DNA, 1443 bp, synthetic construct
  misc_feature 1..1443: note = Description of Artificial Sequence: Synthetic coding sequence
  source 1..1443: mol_type = other DNA
atgaccgtgaccaagatgagctggagaccccagtacagaagcagcaagttcagaaacgtgtacggcaaggtggccaacagagagcactgcttcgacggcatccccatcaccaagaacgtgcacgacaaccacttctgcgccgtgaacaccagattcctggccatcgtgaccgagagcgccggcggcggcagcttcctggtgatccccctggagcagaccggcagaatcgagcccaactaccccaaggtgtgcggccaccagggcaacgtgctggacatcaagtggaaccccttcatcgacaacatcatcgccagctgcagcgaggacaccagcgtgagaatctgggagatccccgagggcggcctgaagagaaacatgaccgaggccctgctggagctgcacggccacagcagaagagtgggcctggtggagtggcaccccaccaccaacaacatcctgttcagcgccggctacgactacaaggtgctgatctggaacctggacgtgggcgagcccgtgaagatgatcgactgccacaccgacgtgatcctgtgcatgagcttcaacaccgacggcagcctgctgaccaccacctgcaaggacaagaagctgagagtgatcgagcccagaagcggcagagtgctgcaggaggccaactgcaagaaccacagagtgaacagagtggtgttcctgggcaacatgaagagactgctgaccaccggcgtgagcagatggaacaccagacagatcgccctgtgggaccaggaggacctgagcatgcccctgatcgaggaggagatcgacggcctgagcggcctgctgttccccttctacgacgccgacacccacatgctgtacctggccggcaagggcgacggcaacatcagatactacgagatcagcaccgagaagccctacctgagctacctgatggagttcagaagccccgccccccagaagggcctgggcgtgatgcccaagcacggcctggacgtgagcgcctgcgaggtgttcagattctacaagctggtgaccctgaagggcctgatcgagcccatcagcatgatcgtgcccagaagaagcgacagctaccaggaggacatctaccccatgacccccggcaccgagcccgccctgacccccgacgagtggctgggcggcatcaacagagaccccgtgctgatgagcctgaaggagggctacaagaagagcagcaagatggtgttcaaggcccccatcaaggagaagaagagcgtggtggtgaacggcatcgacctgctggagaacgtgccccccagaaccgagaacgagctgctgagaatgttcttcagacagcaggacgagatcagaagactgaaggaggagctggcccagaaggacatcagaatcagacagctgcagctggagctgaagaacctgagaaacagccccaagaactgctag

SEQ ID NO: 77670 - DNA, 1269 bp, synthetic construct
  misc_feature 1..1269: note = Description of Artificial Sequence: Synthetic coding sequence
  source 1..1269: mol_type = other DNA
atgctggacctggaggtggtgcccgagagaagcctgggcaacgagcagtgggagttcaccctgggcatgcccctggcccaggccgtggccatcctgcagaagcactgcagaatcatcaagaacgtgcaggtgctgtacagcgagcagagccccctgagccacgacctgatcctgaacctgacccaggacggcatcaagctgatgttcgacgccttcaaccagagactgaaggtgatcgaggtgtgcgacctgaccaaggtgaagctgaagtactgcggcgtgcacttcaacagccaggccatcgcccccaccatcgagcagatcgaccagagcttcggcgccacccaccccggcgtgtacaacagcgccgagcagctgttccacctgaacttcagaggcctgagcttcagcttccagctggacagctggaccgaggcccccaagtacgagcccaacttcgcccacggcctggccagcctgcagatcccccacggcgccaccgtgaagagaatgtacatctacagcggcaacagcctgcaggacaccaaggcccccatgatgcccctgagctgcttcctgggcaacgtgtacgccgagagcgtggacgtgctgagagacggcaccggccccgccggcctgagactgagactgctggccgccggctgcggccccggcctgctggccgacgccaagatgagagtgttcgagagaagcgtgtacttcggcgacagctgccaggacgtgctgagcatgctgggcagcccccacaaggtgttctacaagagcgaggacaagatgaagatccacagccccagcccccacaagcaggtgcccagcaagtgcaacgactacttcttcaactacttcaccctgggcgtggacatcctgttcgacgccaacacccacaaggtgaagaagttcgtgctgcacaccaactaccccggccactacaacttcaacatctaccacagatgcgagttcaagatccccctggccatcaagaaggagaacgccgacggccagaccgagacctgcaccacctacagcaagtgggacaacatccaggagctgctgggccaccccgtggagaagcccgtggtgctgcacagaagcagcagccccaacaacaccaaccccttcggcagcaccttctgcttcggcctgcagagaatgatcttcgaggtgatgcagaacaaccacatcgccagcgtgaccctgtacggcccccccagacccggcagccacctgagaaccgccgagctgccctag

SEQ ID NO: 77671 - DNA, 1470 bp, synthetic construct
  misc_feature 1..1470: note = Description of Artificial Sequence: Synthetic coding sequence
  source 1..1470: mol_type = other DNA
atgagcttcagaaaggtggtgagacagagcaagttcagacacgtgttcggccagcccgtgaagaacgaccagtgctacgaggacatcagagtgagcagagtgacctgggacagcaccttctgcgccgtgaaccccaagttcctggccgtgatcgtggaggccagcggcggcggcgccttcctggtgctgcccctgagcaagaccggcagaatcgacaaggcctaccccaccgtgtgcggccacaccggccccgtgctggacatcgactggtgcccccacaacgacgaggtgatcgccagcggcagcgaggactgcaccgtgatggtgtggcagatccccgagaacggcctgaccagccccctgaccgagcccgtggtggtgctggagggccacaccaagagagtgggcatcatcgcctggcaccccaccgccagaaacgtgctgctgagcgccggctgcgacaacgtggtgctgatctggaacgtgggcaccgccgaggagctgtacagactggacagcctgcaccccgacctgatctacaacgtgagctggaaccacaacggcagcctgttctgcagcgcctgcaaggacaagagcgtgagaatcatcgaccccagaagaggcaccctggtggccgagagagagaaggcccacgagggcgccagacccatgagagccatcttcctggccgacggcaaggtgttcaccaccggcttcagcagaatgagcgagagacagctggccctgtgggaccccgagaacctggaggagcccatggccctgcaggagctggacagcagcaacggcgccctgctgcccttctacgaccccgacaccagcgtggtgtacgtgtgcggcaagggcgacagcagcatcagatacttcgagatcaccgaggagcccccctacatccacttcctgaacaccttcaccagcaaggagccccagagaggcatgggcagcatgcccaagagaggcctggaggtgagcaagtgcgagatcgccagattctacaagctgcacgagagaaagtgcgagcccatcgtgatgaccgtgcccagaaagagcgacctgttccaggacgacctgtaccccgacaccgccggccccgaggccgccctggaggccgaggagtgggtgagcggcagagacgccgaccccatcctgatcagcctgagagaggcctacgtgcccagcaagcagagagacctgaagatcagcagaagaaacgtgctgagcgacagcagacccgccatggcccccggcagcagccacctgggcgcccccgccagcaccaccaccgccgccgacgccacccccagcggcagcctggccagagccggcgaggccggcaagctggaggaggtgatgcaggagctgagagccctgagagccctggtgaaggagcagggcgacagaatctgcagactggaggagcagctgggcagaatggagaacggcgacgcctag

SEQ ID NO: 77672 - DNA, 864 bp, synthetic construct
  misc_feature 1..864: note = Description of Artificial Sequence: Synthetic coding sequence
  source 1..864: mol_type = other DNA
tgcttcctgctgcccagaggcagagaccccgagccccccgaggccggcgccgccgccccctgcgcccccggcgcccccgacatgagcttcagaaaggtggtgagacagagcaagttcagacacgtgttcggccagcccgtgaagaacgaccagtgctacgaggacatcagagtgagcagagtgacctgggacagcaccttctgcgccgtgaaccccaagttcctggccgtgatcgtggaggccagcggcggcggcgccttcctggtgctgcccctgagcaagaccggcagaatcgacaaggcctaccccaccgtgtgcggccacaccggccccgtgctggacatcgactggtgcccccacaacgacgaggtgatcgccagcggcagcgaggactgcaccgtgatggtgtggcagatccccgagaacggcctgaccagccccctgaccgagcccgtggtggtgctggagggccacaccaagagagtgggcatcatcgcctggcaccccaccgccagaaacgtgctgctgagcgccggctgcgacaacgtggtgctgatctggaacgtgggcaccgccgaggagctgtacagactggacagcctgcaccccgacctgatctacaacgtgagctggaaccacaacggcagcctgttctgcagcgcctgcaaggacaagagcgtgagaatcatcgaccccagaagaggcaccctggtggccgagagagagaaggcccacgagggcgccagacccatgagagccatcttcctggccgacggcaaggtgttcaccaccggcttcagcagaatgagcgagagacagctggccctgtgggaccccggcgtgagaagattctgcctggcctag

SEQ ID NO: 77673 - DNA, 1470 bp, synthetic construct; identical to SEQ ID NO: 77671
  misc_feature 1..1470: note = Description of Artificial Sequence: Synthetic coding sequence
  source 1..1470: mol_type = other DNA

SEQ ID NO: 77674 - DNA, 870 bp, synthetic construct
  misc_feature 1..870: note = Description of Artificial Sequence: Synthetic coding sequence
  source 1..870: mol_type = other DNA
atgagcttcagaaaggtggtgagacagagcaagttcagacacgtgttcggccagcccgtgaagaacgaccagtgctacgaggacatcagagtgagcagagtgacctgggacagcaccttctgcgccgtgaaccccaagttcctggccgtgatcgtggaggccagcggcggcggcgccttcctggtgctgcccctgagcaagaccggcagaatcgacaaggcctaccccaccgtgtgcggccacaccggccccgtgctggacatcgactggtgcccccacaacgacgaggtgatcgccagcggcagcgaggactgcaccgtgatggtgtggcagatccccgagaacggcctgaccagccccctgaccgagcccgtggtggtgctggagggccacaccaagagagtgggcatcatcgcctggcaccccaccgccagaaacgtgctgctgagcgccggctgcgacaacgtggtgctgatctggaacgtgggcaccgccgaggagctgtacagactggacagcctgcaccccgacctgatctacaacgtgagctggaaccacaacggcagcctgttctgcagcgcctgcaaggacaagagcgtgagaatcatcgaccccagaagaggcaccctggtggccgagagagagaaggcccacgagggcgccagacccatgagagccatcttcctggccgacggcaaggtgttcaccaccggcttcagcagaatgagcgagagacagctggccctgtgggaccccgtgagcggccagcccgagggcgccaacctgagactgggcccccaccccggccccggcagacagggcagcccctggggcggcctgtggttcctggccagcctgcccggcacctag

SEQ ID NO: 77675 - DNA, 552 bp, synthetic construct
  misc_feature 1..552: note = Description of Artificial Sequence: Synthetic coding sequence
  source 1..552: mol_type = other DNA
atgagcttcagaaaggtggtgagacagagcaagttcagacacgtgttcggccagcccgtgaagaacgaccagtgctacgaggacatcagagtgagcagagtgacctgggacagcaccttctgcgccgtgaaccccaagttcctggccgtgatcgtggaggccagcggcggcggcgccttcctggtgctgcccctgagcaagaccggcagaatcgacaaggcctaccccaccgtgtgcggccacaccggccccgtgctggacatcgactggtgcccccacaacgacgaggtgatcgccagcggcagcgaggactgcaccgtgatggtgtggcagatccccgagaacggcctgaccagccccctgaccgagcccgtggtggtgctggagggccacaccaagagagtgggcatcatcgcctggcaccccaccgccagaaacgtgctgctgagcgccggcctgcacagaccccccttctgcgccccccccccccacggccccctgcacaccagccagcagcccctgcagggcccccacgacaagtgggagagctag

SEQ ID NO: 77676 - DNA, 1425 bp, synthetic construct
  misc_feature 1..1425: note = Description of Artificial Sequence: Synthetic coding sequence
  source 1..1425: mol_type = other DNA
atgagaagagtggtgagacagagcaagttcagacacgtgttcggccaggccgtgaagaacgaccagtgctacgacgacatcagagtgagcagagtgacctgggacagcagcttctgcgccgtgaaccccagattcgtggccatcatcatcgaggccagcggcggcggcgccttcctggtgctgcccctgcacaagaccggcagaatcgacaagagctaccccaccgtgtgcggccacaccggccccgtgctggacatcgactggtgcccccacaacgaccaggtgatcgccagcggcagcgaggactgcaccgtgatggtgtggcagatccccgagaacggcctgaccctgagcctgaccgagcccgtggtgatcctggagggccacagcaagagagtgggcatcgtggcctggcaccccaccgccagaaacgtgctgctgagcgccggctgcgacaacgccatcatcatctggaacgtgggcaccggcgaggccctgatcaacctggacgacatgcacagcgacatgatctacaacgtgagctggaacagaaacggcagcctgatctgcaccgccagcaaggacaagaaggtgagagtgatcgaccccagaaagcaggagatcgtggccgagaaggagaaggcccacgagggcgccagacccatgagagccatcttcctggccgacggcaacgtgttcaccaccggcttcagcagaatgagcgagagacagctggccctgtggaaccccaagaacatgcaggagcccatcgccctgcacgagatggacaccagcaacggcgtgctgctgcccttctacgaccccgacaccagcatcatctacctgtgcggcaagggcgacagcagcatcagatacttcgagatcaccgacgagagcccctacgtgcactacctgaacaccttcagcagcaaggagccccagagaggcatgggctacatgcccaagagaggcctggacgtgaacaagtgcgagatcgccagattcttcaagctgcacgagagaaagtgcgagcccatcatcatgaccgtgcccagaaagagcgacctgttccaggacgacctgtaccccgacaccgccggccccgaggccgccctggaggccgaggagtggttcgagggcaagaacgccgaccccatcctgatcagcctgaagcacggctacatccccggcaagaacagagacctgaaggtggtgaagaagaacatcctggacagcaagcccaccgccaacaagaagtgcgacctgatcagcatccccaagaagaccaccgacaccgccagcgtgcagaacgaggccaagctggacgagatcctgaaggagatcaagagcatcaaggacaccatctgcaaccaggacgagagaatcagcaagctggagcagcagatggccaagatcgccgcctag

SEQ ID NO: 77677 - DNA, 1584 bp, synthetic construct
  misc_feature 1..1584: note = Description of Artificial Sequence: Synthetic coding sequence
  source 1..1584: mol_type = other DNA
atgtacggccccggcagccagctgggcaagagcggcaacaacagctgggccaaggagagaggctgcagcatcgcctgccagggcagcctgaccagcgccagactgcacgcccccagcatcggcgagagacccctgagccacatgagatggaaggacaccatgagaagagtggtgagacagagcaagttcagacacgtgttcggccaggccgtgaagaacgaccagtgctacgacgacatcagagtgagcagagtgacctgggacagcagcttctgcgccgtgaaccccagattcgtggccatcatcatcgaggccagcggcggcggcgccttcctggtgctgcccctgcacaagaccggcagaatcgacaagagctaccccaccgtgtgcggccacaccggccccgtgctggacatcgactggtgcccccacaacgaccaggtgatcgccagcggcagcgaggactgcaccgtgatggtgtggcagatccccgagaacggcctgaccctgagcctgaccgagcccgtggtgatcctggagggccacagcaagagagtgggcatcgtggcctggcaccccaccgccagaaacgtgctgctgagcgccggctgcgacaacgccatcatcatctggaacgtgggcaccggcgaggccctgatcaacctggacgacatgcacagcgacatgatctacaacgtgagctggaacagaaacggcagcctgatctgcaccgccagcaaggacaagaaggtgagagtgatcgaccccagaaagcaggagatcgtggccgagaaggagaaggcccacgagggcgccagacccatgagagccatcttcctggccgacggcaacgtgttcaccaccggcttcagcagaatgagcgagagacagctggccctgtggaaccccaagaacatgcaggagcccatcgccctgcacgagatggacaccagcaacggcgtgctgctgcccttctacgaccccgacaccagcatcatctacctgtgcggcaagggcgacagcagcatcagatacttcgagatcaccgacgagagcccctacgtgcactacctgaacaccttcagcagcaaggagccccagagaggcatgggctacatgcccaagagaggcctggacgtgaacaagtgcgagatcgccagattcttcaagctgcacgagagaaagtgcgagcccatcatcatgaccgtgcccagaaagagcgacctgttccaggacgacctgtaccccgacaccgccggccccgaggccgccctggaggccgaggagtggttcgagggcaagaacgccgaccccatcctgatcagcctgaagcacggctacatccccggcaagaacagagacctgaaggtggtgaagaagaacatcctggacagcaagcccaccgccaacaagaagtgcgacctgatcagcatccccaagaagaccaccgacaccgccagcgtgcagaacgaggccaagctggacgagatcctgaaggagatcaagagcatcaaggacaccatctgcaaccaggacgagagaatcagcaagctggagcagcagatggccaagatcgccgcctag

SEQ ID NO: 77678 - DNA, 1425 bp, synthetic construct; identical to SEQ ID NO: 77676
  misc_feature 1..1425: note = Description of Artificial Sequence: Synthetic coding sequence
  source 1..1425: mol_type = other DNA

SEQ ID NO: 77679 - DNA, 489 bp, synthetic construct
  misc_feature 1..489: note = Description of Artificial Sequence: Synthetic coding sequence
  source 1..489: mol_type = other DNA
atgagaagagtggtgagacagagcaagttcagacacgtgttcggccaggccgtgaagaacgaccagtgctacgacgacatcagagtgagcagagtgacctgggacagcagcttctgcgccgtgaaccccagattcgtggccatcatcatcgaggccagcggcggcggcgccttcctggtgctgcccctgcacaagaccggcagaatcgacaagagctaccccaccgtgtgcggccacaccggccccgtgctggacatcgactggtgcccccacaacgaccaggtgatcgccagcggcagcgaggactgcaccgtgatggtgtggcagatccccgagaacggcctgaccctgagcctgaccgagcccgtggtgatcctggagggccacagcaagagagtgggcatcgtggcctggcaccccaccgccagaaacgtgctgctgagcgccggctgcgacaacgccatcatcatctggaacgtgggcacctag

SEQ ID NO: 77680 - DNA, 498 bp, synthetic construct
  misc_feature 1..498: note = Description of Artificial Sequence: Synthetic coding sequence
  source 1..498: mol_type = other DNA
agcaaggagccccagagaggcatgggctacatgcccaagagaggcctggacgtgaacaagtgcgagatcgccagattcttcaagctgcacgagagaaagtgcgagcccatcatcatgaccgtgcccagaaagagcgacctgttccaggacgacctgtaccccgacaccgccggccccgaggccgccctggaggccgaggagtggttcgagggcaagaacgccgaccccatcctgatcagcctgaagcacggctacatccccggcaagaacagagacctgaaggtggtgaagaagaacatcctggacagcaagcccaccgccaacaagaagtgcgacctgatcagcatccccaagaagaccaccgacaccgccagcgtgcagaacgaggccaagctggacgagatcctgaaggagatcaagagcatcaaggacaccatctgcaaccaggacgagagaatcagcaagctggagcagcagatggccaagatcgccgcctag

SEQ ID NO: 77681 - DNA, 546 bp, synthetic construct
  misc_feature 1..546: note = Description of Artificial Sequence: Synthetic coding sequence
  source 1..546: mol_type = other DNA
atgagaagagtggtgagacagagcaagttcagacacgtgttcggccaggccgtgaagaacgaccagtgctacgacgacatcagagtgagcagagtgacctgggacagcagcttctgcgccgtgaaccccagattcgtggccatcatcatcgaggccagcggcggcggcgccttcctggtgctgcccctgcacaagaccggcagaatcgacaagagctaccccaccgtgtgcggccacaccggccccgtgctggacatcgactggtgcccccacaacgaccaggtgatcgccagcggcagcgaggactgcaccgtgatggtgtggcagatccccgagaacggcctgaccctgagcctgaccgagcccgtggtgatcctggagggccacagcaagagagtgggcatcgtggcctggcaccccaccgccagaaacgtgctgctgagcgccggctgcgacaacgccatcatcatctggaacgtgggcaccggcgaggccctgatcaacctggacgacatgcacagcgacatgatctacaacgtgagctag

SEQ ID NO: 77682 - DNA, 1443 bp, synthetic construct
  misc_feature 1..1443: note = Description of Artificial Sequence: Synthetic coding sequence
  source 1..1443: mol_type = other DNA
atgagatggaaggacaccatgagaagagtggtgagacagagcaagttcagacacgtgttcggccaggccgtgaagaacgaccagtgctacgacgacatcagagtgagcagagtgacctgggacagcagcttctgcgccgtgaaccccagattcgtggccatcatcatcgaggccagcggcggcggcgccttcctggtgctgcccctgcacaagaccggcagaatcgacaagagctaccccaccgtgtgcggccacaccggccccgtgctggacatcgactggtgcccccacaacgaccaggtgatcgccagcggcagcgaggactgcaccgtgatggtgtggcagatccccgagaacggcctgaccctgagcctgaccgagcccgtggtgatcctggagggccacagcaagagagtgggcatcgtggcctggcaccccaccgccagaaacgtgctgctgagcgccggctgcgacaacgccatcatcatctggaacgtgggcaccggcgaggccctgatcaacctggacgacatgcacagcgacatgatctacaacgtgagctggaacagaaacggcagcctgatctgcaccgccagcaaggacaagaaggtgagagtgatcgaccccagaaagcaggagatcgtggccgagaaggagaaggcccacgagggcgccagacccatgagagccatcttcctggccgacggcaacgtgttcaccaccggcttcagcagaatgagcgagagacagctggccctgtggaaccccaagaacatgcaggagcccatcgccctgcacgagatggacaccagcaacggcgtgctgctgcccttctacgaccccgacaccagcatcatctacctgtgcggcaagggcgacagcagcatcagatacttcgagatcaccgacgagagcccctacgtgcactacctgaacaccttcagcagcaaggagccccagagaggcatgggctacatgcccaagagaggcctggacgtgaacaagtgcgagatcgccagattcttcaagctgcacgagagaaagtgcgagcccatcatcatgaccgtgcccagaaagagcgacctgttccaggacgacctgtaccccgacaccgccggccccgaggccgccctggaggccgaggagtggttcgagggcaagaacgccgaccccatcctgatcagcctgaagcacggctacatccccggcaagaacagagacctgaaggtggtgaagaagaacatcctggacagcaagcccaccgccaacaagaagtgcgacctgatcagcatccccaagaagaccaccgacaccgccagcgtgcagaacgaggccaagctggacgagatcctgaaggagatcaagagcatcaaggacaccatctgcaaccaggacgagagaatcagcaagctggagcagcagatggccaagatcgccgcctag

SEQ ID NO: 77683 - DNA, 510 bp, synthetic construct
  misc_feature 1..510: note = Description of Artificial Sequence: Synthetic coding sequence
  source 1..510: mol_type = other DNA
atgagaagagtggtgagacagagcaagttcagacacgtgttcggccaggccgtgaagaacgaccagtgctacgacgacatcagagtgagcagagtgacctgggacagcagcttctgcgccgtgaaccccagattcgtggccatcatcatcgaggccagcggcggcggcgccttcctggtgctgcccctgcacaagaccggcagaatcgacaagagctaccccaccgtgtgcggccacaccggccccgtgctggacatcgactggtgcccccacaacgaccaggtgatcgccagcggcagcgaggactgcaccgtgatggtgtggcagatccccgagaacggcctgaccctgagcctgaccgagcccgtggtgatcctggagggccacagcaagagagtgggcatcgtggcctggcaccccaccgccagaaacgtgctgctgagcgccggctgcgacaacgccatcatcatctggaacgtgggcaccggcgaggccctgatcaacctgtag

SEQ ID NO: 77684 - DNA, 456 bp, synthetic construct
  misc_feature 1..456: note = Description of Artificial Sequence: Synthetic coding sequence
  source 1..456: mol_type = other DNA
atgagaagagtggtgagacagagcaagttcagacacgtgttcggccaggccgtgaagaacgaccagtgctacgacgacatcagagtgagcagagtgacctgggacagcagcttctgcgccgtgaaccccagattcgtggccatcatcatcgaggccagcggcggcggcgccttcctggtgctgcccctgcacaagaccggcagaatcgacaagagctaccccaccgtgtgcggccacaccggccccgtgctggacatcgactggtgcccccacaacgaccaggtgatcgccagcggcagcgaggactgcaccgtgatggtgtggcagatccccgagaacggcctgaccctgagcctgaccgagcccgtggtgatcctggagggccacagcaagagagtgggcatcgtggcctggcaccccaccgccagaaacgtgctgctgagcgccggcggctag

SEQ ID NO: 77685 - DNA, 492 bp, synthetic construct
  misc_feature 1..492: note = Description of Artificial Sequence: Synthetic coding sequence
  source 1..492: mol_type = other DNA
atgagaagagtggtgagacagagcaagttcagacacgtgttcggccaggccgtgaagaacgaccagtgctacgacgacatcagagtgagcagagtgacctgggacagcagcttctgcgccgtgaaccccagattcgtggccatcatcatcgaggccagcggcggcggcgccttcctggtgctgcccctgcacaagaccggcagaatcgacaagagctaccccaccgtgtgcggccacaccggccccgtgctggacatcgactggtgcccccacaacgaccaggtgatcgccagcggcagcgaggactgcaccgtgatggtgtggcagatccccgagaacggcctgaccctgagcctgaccgagcccgtggtgatcctggagggccacagcaagagagtgggcatcgtggcctggcaccccaccgccagaaacgtgctgctgagcgccggctgcgacaacgccatcatcatctggaacgtgggcaccggctag

SEQ ID NO: 77686 - DNA, 1578 bp, synthetic construct
  misc_feature 1..1578: note = Description of Artificial Sequence: Synthetic coding sequence
  source 1..1578: mol_type = other DNA
atgagctggcacccccagtacagaagcagcaagttcagacacgtgttcggcaagcccgccagcaaggagaactgctacgacagcgtgcccatcaccagaagcgtgcacgacaaccacttctgcgccgtgaacccccacttcatcgccgtggtgaccgagtgcgccggcggcggcgccttcctggtgatccccctgcaccagaccggcaagctggacccccactaccccaaggtgtgcggccacagaggcaacgtgctggacgtgaagtggaaccccttcgacgacttcgagatcgccagctgcagcgaggacgccaccatcaagatctggagcatccccaagcagctgctgaccagaaacctgaccgcctacagaaaggagctggtgggccacgccagaagagtgggcctggtggagtggcaccccaccgccgccaacatcctgttcagcgccggctacgactacaaggtgatgatctggaacctggacaccaaggagagcgtgatcaccagccccatgagcaccatcagctgccaccaggacgtgatcctgagcatgagcttcaacaccaacggcagcctgctggccaccacctgcaaggacagaaagatcagagtgatcgaccccagagccggcaccgtgctgcaggaggccagctacaagggccacagagccagcaaggtgctgttcctgggcaacctgaagaagctgatgagcaccggcaccagcagatggaacaacagacaggtggccctgtgggaccaggacaacctgagcgtgcccctgatggaggaggacctggacggcagcagcggcgtgctgttccccttctacgacgccgacaccagcatgctgtacgtggtgggcaagggcgacggcaacatcagatactacgaggtgagcgccgacaagccccacctgagctacctgaccgagtacagaagctacaacccccagaagggcatcggcgtgatgcccaagagaggcctggacgtgagcagctgcgagatcttcagattctacaagctgatcaccaccaagagcctgatcgagcccatcagcatgatcgtgcccagaagaagcgagagctaccaggaggacatctacccccccaccgccggcgcccagcccagcctgaccgcccaggagtggctgagcggcatgaacagagaccccatcctggtgagcctgagacccggcagcgagctgctgagaccccaccccctgcccgccgagagacccatcttcaacagcatggcccccgccagccccagactgctgaaccagaccgagaagctggccgccgaggacggctggagaagcagcagcctgctggaggagaagatgcccagatgggccgccgagcacagactggaggagaagaagacctggctgaccaacggcttcgacgtgttcgagtgccccccccccaagaccgagaacgagctgctgcagatgttctacagacagcaggaggagatcagaagactgagagagctgctgacccagagagaggtgcaggccaagcagctggagctggagatcaagaacctgagaatgggcagcgagcagctgtag

SEQ ID NO: 77687 - DNA, 1578 bp, synthetic construct; identical to SEQ ID NO: 77686
  misc_feature 1..1578: note = Description of Artificial Sequence: Synthetic coding sequence
  source 1..1578: mol_type = other DNA

SEQ ID NO: 77688 - DNA, 1443 bp, synthetic construct; identical to SEQ ID NO: 77669
  misc_feature 1..1443: note = Description of Artificial Sequence: Synthetic coding sequence
  source 1..1443: mol_type = other DNA

SEQ ID NO: 77689 - DNA, 1428 bp, synthetic construct
  misc_feature 1..1428: note = Description of Artificial Sequence: Synthetic coding sequence
  source 1..1428: mol_type = other DNA
atgagctggagaccccagtacagaagcagcaagttcagaaacgtgtacggcaaggtggccaacagagagcactgcttcgacggcatccccatcaccaagaacgtgcacgacaaccacttctgcgccgtgaacaccagattcctggccatcgtgaccgagagcgccggcggcggcagcttcctggtgatccccctggagcagaccggcagaatcgagcccaactaccccaaggtgtgcggccaccagggcaacgtgctggacatcaagtggaaccccttcatcgacaacatcatcgccagctgcagcgaggacaccagcgtgagaatctgggagatccccgagggcggcctgaagagaaacatgaccgaggccctgctggagctgcacggccacagcagaagagtgggcctggtggagtggcaccccaccaccaacaacatcctgttcagcgccggctacgactacaaggtgctgatctggaacctggacgtgggcgagcccgtgaagatgatcgactgccacaccgacgtgatcctgtgcatgagcttcaacaccgacggcagcctgctgaccaccacctgcaaggacaagaagctgagagtgatcgagcccagaagcggcagagtgctgcaggaggccaactgcaagaaccacagagtgaacagagtggtgttcctgggcaacatgaagagactgctgaccaccggcgtgagcagatggaacaccagacagatcgccctgtgggaccaggaggacctgagcatgcccctgatcgaggaggagatcgacggcctgagcggcctgctgttccccttctacgacgccgacacccacatgctgtacctggccggcaagggcgacggcaacatcagatactacgagatcagcaccgagaagccctacctgagctacctgatggagttcagaagccccgccccccagaagggcctgggcgtgatgcccaagcacggcctggacgtgagcgcctgcgaggtgttcagattctacaagctggtgaccctgaagggcctgatcgagcccatcagcatgatcgtgcccagaagaagcgacagctaccaggaggacatctaccccatgacccccggcaccgagcccgccctgacccccgacgagtggctgggcggcatcaacagagaccccgtgctgatgagcctgaaggagggctacaagaagagcagcaagatggtgttcaaggcccccatcaaggagaagaagagcgtggtggtgaacggcatcgacctgctggagaacgtgccccccagaaccgagaacgagctgctgagaatgttcttcagacagcaggacgagatcagaagactgaaggaggagctggcccagaaggacatcagaatcagacagctgcagctggagctgaagaacctgagaaacagccccaagaactgctag

SEQ ID NO: 77690 - DNA, 1428 bp, synthetic construct; identical to SEQ ID NO: 77689
  misc_feature 1..1428: note = Description of Artificial Sequence: Synthetic coding sequence
  source 1..1428: mol_type = other DNA

SEQ ID NO: 77691 - DNA, 4992 bp, synthetic construct
  misc_feature 1..4992: note = Description of Artificial Sequence: Synthetic coding sequence
  source 1..4992: mol_type = other DNA
atggccaccgacggcgccagctgcgagcccgacctgagcagagcccccgaggacgccgccggcgccgccgccgaggccgccaagaaggagttcgacgtggacaccctgagcaagagcgagctgagaatgctgctgagcgtgatggagggcgagctggaggccagagacctggtgatcgaggccctgagagccagaagaaaggaggtgttcatccaggagagatacggcagattcaacctgaacgaccccttcctggccctgcagagagactacgaggccggcgccggcgacaaggagaagaagcccgtgtgcaccaaccccctgagcatcctggaggccgtgatggcccactgcaagaagatgcaggagagaatgagcgcccagctggccgccgccgagagcagacagaagaagctggagatggagaagctgcagctgcaggccctggagcaggagcacaagaagctggccgccagactggaggaggagagaggcaagaacaagcaggtggtgctgatgctggtgaaggagtgcaagcagctgagcggcaaggtgatcgaggaggcccagaagctggaggacgtgatggccaagctggaggaggagaagaagaagaccaacgagctggaggaggagctgagcgccgagaagagaagaagcaccgagatggaggcccagatggagaagcagctgagcgagttcgacaccgagagagagcagctgagagccaagctgaacagagaggaggcccacaccaccgacctgaaggaggagatcgacaagatgagaaagatgatcgagcagctgaagagaggcagcgacagcaagcccagcctgagcctgcccagaaagaccaaggacagaagactggtgagcatcagcgtgggcaccgagggcaccgtgaccagaagcgtggcctgccagaccgacctggtgaccgagaacgccgaccacatgaagaagctgcccctgaccatgcccgtgaagcccagcaccggcagccccctggtgagcgccaacgccaagggcagcgtgtgcaccagcgccaccatggccagacccggcatcgacagacaggccagctacggcgacctgatcggcgccagcgtgcccgccttccccccccccagcgccaacaagatcgaggagaacggccccagcaccggcagcacccccgaccccaccagcagcaccccccccctgcccagcaacgccgccccccccaccgcccagacccccggcatcgccccccagaacagccaggccccccccatgcacagcctgcacagcccctgcgccaacaccagcctgcaccccggcctgaaccccagaatccaggccgccagattcagattccagggcaacgccaacgaccccgaccagaacggcaacaccacccagagcccccccagcagagacgtgagccccaccagcagagacaacctggtggccaagcagctggccagaaacaccgtgacccaggccctgagcagattcaccagcccccaggccggcgcccccagcagacccggcgtgccccccaccggcgacgtgggcacccacccccccgtgggcagaaccagcctgaagacccacggcgtggccagagtggacagaggcaaccccccccccatcccccccaagaagcccggcctgagccagacccccagccccccccacccccagctgaaggtgatcatcgacagcagcagagccagcaacaccggcgccaaggtggacaacaagaccgtggccagcacccccagcagcctgccccagggcaacagagtgatcaacgaggagaacctgcccaagagcagcagcccccagctgccccccaagcccagcatcgacctgaccgtggcccccgccggctgcgccgtgagcgccctggccaccagccaggtgggcgcctggcccgccgccacccccggcctgaaccagcccgcctgcagcgacagcagcctggtgatccccaccaccatcgccttctgcagcagcatcaaccccgtgagcgccagcagctgcagacccggcgccagcgacagcctgctggtgaccgccagcggctggagccccagcctgacccccctgctgatgagcggcggccccgcccccctggccggcagacccaccctgctgcagcaggccgccgcccagggcaacgtgaccctgctgagcatgctgctgaacgaggagggcctggacatcaactacagctgcgaggacggccacagcgccctgtacagcgccgccaagaacggccacaccgactgcgtgagactgctgctgagcgccgaggcccaggtgaacgccgccgacaagaacggcttcacccccctgtgcgccgccgccgcccagggccacttcgagtgcgtggagctgctgatcagctacgacgccaacatcaaccacgccgccgacggcggccagacccccctgtacctggcctgcaagaacggcaacaaggagtgcatcaagctgctgctggaggccggcaccaacagaagcgtgaagaccaccgacggctggacccccgtgcacgccgccgtggacaccggcaacgtggacagcctgaagctgctgatgtaccacagaatccccgcccacggcaacagcttcaacgaggaggagagcgagagcagcgtgttcgacctggacggcggcgaggagagccccgagggcatcagcaagcccgtggtgcccgccgacctgatcaaccacgccaacagagagggctggaccgccgcccacatcgccgccagcaagggcttcaagaactgcctggagatcctgtgcagacacggcggcctggagcccgagagaagagacaagtgcaacagaaccgtgcacgacgtggccaccgacgactgcaagcacctgctggagaacctgaacgccctgaagatccccctgagaatcagcgtgggcgagatcgagcccagcaactacggcagcgacgacctggagtgcgagaacaccatctgcgccctgaacatcagaaagcagaccagctgggacgacttcagcaaggccgtgagccaggccctgaccaaccacttccaggccatcagcagcgacggctggtggagcctggaggacgtgacctgcaacaacaccaccgacagcaacatcggcctgagcgccagaagcatcagaagcatcaccctgggcaacgtgccctggagcgtgggccagagcttcgcccagagcccctgggacttcatgagaaagaacaaggccgagcacatcaccgtgctgctgagcggcccccaggagggctgcctgagcagcgtgacctacgccagcatgatccccctgcagatgatgcagaactacctgagactggtggagcagtaccacaacgtgatcttccacggccccgagggcagcctgcaggactacatcgtgcaccagctggccctgtgcctgaagcacagacagatggccgccggcttcagctgcgagatcgtgagagccgaggtggacgccggcttcagcaaggagcagctgctggacctgttcatcagcagcgcctgcctgatccccgtgaagcagagccccagcaagaagaagatcatcatcatcctggagaacctggagaagagcagcctgagcgagctgctgagagacttcctggcccccctggagaacagaagcaccgagagcccctgcaccttccagaagggcaacggcctgagcgagtgctactacttccacgagaactgcttcctgatgggcaccatcgccaaggcctgcctgcagggcagcgacctgctggtgcagcagcacttcagatgggtgcagctgagatgggacggcgagcccatgcagggcctgctgcagagattcctgagaagaaaggtggtgaacaagttcaagggccaggcccccagcccctgcgaccccgtgtgcaagatcgtggactgggccctgagcgtgtggagacagctgaacagctgcctggccagactgggcacccccgaggccctgctgggccccaagtacttcctgagctgccccgtggtgcccggccacgcccaggtgaccgtgaagtggatgagcaagctgtggaacggcgtgatcgcccccagagtgcaggaggccatcctgagcagagccagcgtgaagagacagcccggcttcggccagaccaccgccaagagacaccccagccagggccagcaggccgtggtgaaggccgccctgagcatcctgctgaacaaggccgtgctgcacggctgccccctgcccagagccgagctggaccagcacaccgccgacttcaagggcggcagcttccccctgagcatcgtgagcagctacaacacctgcaacaagaagaagggcgagagcggcgcctggagaaaggtgaacaccagccccagaagaaagagcggcagattcagcctgcccacctggaacaagcccgacctgagcaccgagggcatgaagaacaagaccatcagccagctgaactgcaacagaaacgccagcctgagcaagcagaagagcctggagaacgacctgagcctgaccctgaacctggaccagagactgagcctgggcagcgacgacgaggccgacctggtgaaggagctgcagagcatgtgcagcagcaagagcgagagcgacatcagcaagatcgccgacagcagagacgacctgagaatgttcgacagcagcggcaacaaccccgtgctgagcgccaccatcaacaacctgagaatgcccgtgagccagaaggaggtgagccccctgagcagccaccagaccaccgagtgcagcaacagcaagagcaagaccgagctgggcgtgagcagagtgaagagcttcctgcccgtgcccagaagcaaggtgacccagtgcagccagaacaccaagagaagcagcagcagcagcaacaccagacagatcgagatcaacaacaacagcaaggaggtgaactggaacctgcacaagaacgagcacctggagaagcccaacaagtag

SEQ ID NO: 77692 - DNA, 249 bp, synthetic construct
  misc_feature 1..249: note = Description of Artificial Sequence: Synthetic coding sequence
  source 1..249: mol_type = other DNA
atgagcgccacctggaccctgagccccgagcccctgccccccagcaccggcccccccgtgggcgccggcctggacgccgagcagagaaccgtgttcgccttcgtgctgtgcctgctggtggtgctggtgctgctgatggtgagatgcgtgagaatcctgctggacccctacagcagaatgcccgccagcagctggaccgaccacaaggaggccctggagagaggccagttcgactacgccctggtgtag

SEQ ID NO: 77693 - DNA, 969 bp, synthetic construct
  misc_feature 1..969: note = Description of Artificial Sequence: Synthetic coding sequence
  source 1..969: mol_type = other DNA
atgagccccaacttcaagctgcagtgccacttcatcctgatcttcctgaccgccctgagaggcgagagcagatacctggagctgagagaggccgccgactacgaccccttcctgctgttcagcgccaacctgaagagagagctggccggcgagcagccctacagaagagccctgagatgcctggacatgctgagcctgcagggccagttcaccttcaccgccgacagaccccagctgcactgcgccgccttcttcatcagcgagcccgaggagttcatcaccatccactacgaccaggtgagcatcgactgccagggcggcgacttcctgaaggtgttcgacggctggatcctgaagggcgagaagttccccagcagccaggaccaccccctgcccagcgccgagagatacatcgacttctgcgagagcggcctgagcagaagaagcatcagaagcagccagaacgtggccatgatcttcttcagagtgcacgagcccggcaacggcttcaccctgaccatcaagaccgaccccaacctgttcccctgcaacgtgatcagccagacccccaacggcaagttcaccctggtggtgccccaccagcacagaaactgcagcttcagcatcatctaccccgtggtgatcaagatcagcgacctgaccctgggccacgtgaacggcctgcagctgaagaagagcagcgccggctgcgagggcatcggcgacttcgtggagctgctgggcggcaccggcctggaccccagcaagatgacccccctggccgacctgtgctaccccttccacggccccgcccagatgaaggtgggctgcgacaacaccgtggtgagaatggtgagcagcggcaagcacgtgaacagagtgaccttcgagtacagacagctggagccctacgagctggagaaccccaacggcaacagcatcggcgagttctgcctgagcggcctgtag

SEQ ID NO: 77694 - DNA, 723 bp, synthetic construct
  misc_feature 1..723: note = Description of Artificial Sequence: Synthetic coding sequence
  source 1..723: mol_type = other DNA
atgagccccgaggtgcaccagagcaacgtgggctggtgcagactggtgaccgccgcctacaactacttccacgtgaccaacttcttctggatgttcggcgagggctgctacctgcacaccgccatcgtgctgacctacagcaccgacagactgagaaagtggatgttcatctgcatcggctggggcgtgcccttccccatcatcgtggcctgggccatcggcaagctgtactacgacaacgagaagtgctggttcggcaagagacccggcgtgtacaccgactacatctaccagggccccatgatcctggtgctgctgatcaacttcatcttcctgttcaacatcgtgagaatcctgatgaccaagctgagagccagcaccaccagcgagaccatccagtacagaaaggccgtgaaggccaccctggtgctgctgcccctgctgggcatcacctacatgctgttcttcgtgaaccccggcgaggacgaggtgagcagagtggtgttcatctacttcaacagcttcctggagagcttccagggcttcttcgtgagcgtgttctactgcttcctgaacagcgaggtgagaagcgccatcagaaagagatggcacagatggcaggacaagcacagcatcagagccagagtggccagagccatgagcatccccaccagccccaccagagtgagcttccacagcatcaagcagagcaccgccgtgtag

SEQ ID NO: 77695 - DNA, 1248 bp, synthetic construct
  misc_feature 1..1248: note = Description of Artificial Sequence: Synthetic coding sequence
  source 1..1248: mol_type = other DNA
atgggcggccacccccagctgagactggtgaaggccctgctgctgctgggcctgaaccccgtgagcgccagcctgcaggaccagcactgcgagagcctgagcctggccagcaacatcagcggcctgcagtgcaacgccagcgtggacctgatcggcacctgctggcccagaagccccgccggccagctggtggtgagaccctgccccgccttcttctacggcgtgagatacaacaccaccaacaacggctacagagagtgcctggccaacggcagctgggccgccagagtgaactacagcgagtgccaggagatcctgaacgaggagaagaagagcaaggtgcactaccacgtggccgtgatcatcaactacctgggccactgcatcagcctggtggccctgctggtggccttcgtgctgttcctgagactgagaagcatcagatgcctgagaaacatcatccactggaacctgatcagcgccttcatcctgagaaacgccacctggttcgtggtgcagctgaccatgagccccgaggtgcaccagagcaacgtgggctggtgcagactggtgaccgccgcctacaactacttccacgtgaccaacttcttctggatgttcggcgagggctgctacctgcacaccgccatcgtgctgacctacagcaccgacagactgagaaagtggatgttcatctgcatcggctggggcgtgcccttccccatcatcgtggcctgggccatcggcaagctgtactacgacaacgagaagtgctggttcggcaagagacccggcgtgtacaccgactacatctaccagggccccatgatcctggtgctgctgatcaacttcatcttcctgttcaacatcgtgagaatcctgatgaccaagctgagagccagcaccaccagcgagaccatccagtacagaaaggccgtgaaggccaccctggtgctgctgcccctgctgggcatcacctacatgctgttcttcgtgaaccccggcgaggacgaggtgagcagagtggtgttcatctacttcaacagcttcctggagagcttccagggcttcttcgtgagcgtgttctactgcttcctgaacagcgaggtgagaagcgccatcagaaagagatggcacagatggcaggacaagcacagcatcagagccagagtggccagagccatgagcatccccaccagccccaccagagtgagcttccacagcatcaagcagagcaccgccgtgtag

SEQ ID NO: 77696 - DNA, 858 bp, synthetic construct
  misc_feature 1..858: note = Description of Artificial Sequence: Synthetic coding sequence
  source 1..858: mol_type = other DNA
atggtgagcgccaccatcccccagaagaagagcaaggtgcactaccacgtggccgtgatcatcaactacctgggccactgcatcagcctggtggccctgctggtggccttcgtgctgttcctgagactgagaagcatcagatgcctgagaaacatcatccactggaacctgatcagcgccttcatcctgagaaacgccacctggttcgtggtgcagctgaccatgagccccgaggtgcaccagagcaacgtgggctggtgcagactggtgaccgccgcctacaactacttccacgtgaccaacttcttctggatgttcggcgagggctgctacctgcacaccgccatcgtgctgacctacagcaccgacagactgagaaagtggatgttcatctgcatcggctggggcgtgcccttccccatcatcgtggcctgggccatcggcaagctgtactacgacaacgagaagtgctggttcggcaagagacccggcgtgtacaccgactacatctaccagggccccatgatcctggtgctgctgatcaacttcatcttcctgttcaacatcgtgagaatcctgatgaccaagctgagagccagcaccaccagcgagaccatccagtacagagccagcctgtgcctgtgcagcaccgtgagcagcatcgtgagaagcgtgctgcccagcggcagaggcggcaccggcggcagaaccagcaccagaagcgtgcccgagtggcccgtgccctgccccagcccccccccccagcccgtgagcgccttcaccgccagcagcagcccccagcagagcgagctggccggccacggcgccgcccccaaggagctgtggctgggcggctag

SEQ ID NO: 77697 - DNA, 1206 bp, synthetic construct
  misc_feature 1..1206: note = Description of Artificial Sequence: Synthetic coding sequence
  source 1..1206: mol_type = other DNA
atgggcggccacccccagctgagactggtgaaggccctgctgctgctgggcctgaaccccgtgagcgccagcctgcaggaccagcactgcgagagcctgagcctggccagcaacatcagcggcctgcagtgcaacgccagcgtggacctgatcggcacctgctggcccagaagccccgccggccagctggtggtgagaccctgccccgccttcttctacggcgtgagatacaacaccaccaacaacggctacagagagtgcctggccaacggcagctgggccgccagagtgaactacagcgagtgccaggagatcctgaacgaggagaagaagagcaaggtgcactaccacgtggccgtgatcatcaactacctgggccactgcatcagcctggtggccctgctggtggccttcgtgctgttcctgagactgagaagcatcagatgcctgagaaacatcatccactggaacctgatcagcgccttcatcctgagaaacgccacctggttcgtggtgcagctgaccatgagccccgaggtgcaccagagcaacgtgggctggtgcagactggtgaccgccgcctacaactacttccacgtgaccaacttcttctggatgttcggcgagggctgctacctgcacaccgccatcgtgctgacctacagcaccgacagactgagaaagtggatgttcatctgcatcggctggggcgtgcccttccccatcatcgtggcctgggccatcggcaagctgtactacgacaacgagaagtgctggttcggcaagagacccggcgtgtacaccgactacatctaccagggccccatgatcctggtgctgctgatcaacttcatcttcctgttcaacatcgtgagaatcctgatgaccaagctgagagccagcaccaccagcgagaccatccagtacagaaaggccgtgaaggccaccctggtgctgctgcccctgctgggcatcacctacatgctgttcttcgtgaaccccggcgaggacgaggtgagcagagtggtgttcatctacttcaacagcttcctggagagcttccaggtgagaagcgccatcagaaagagatggcacagatggcaggacaagcacagcatcagagccagagtggccagagccatgagcatccccaccagccccaccagagtgagcttccacagcatcaagcagagcaccgccgtgtag

SEQ ID NO: 77698 - DNA, 1128 bp, synthetic construct
  misc_feature 1..1128: note = Description of Artificial Sequence: Synthetic coding sequence
  source 1..1128: mol_type = other DNA
atgggcggccacccccagctgagactggtgaaggccctgctgctgctgggcctgaaccccgtgagcgccagcctgcaggaccagcactgcgagagcctgagcctggccagcaacatcagcgacaacggctacagagagtgcctggccaacggcagctgggccgccagagtgaactacagcgagtgccaggagatcctgaacgaggagaagaagagcaaggtgcactaccacgtggccgtgatcatcaactacctgggccactgcatcagcctggtggccctgctggtggccttcgtgctgttcctgagactgagaagcatcagatgcctgagaaacatcatccactggaacctgatcagcgccttcatcctgagaaacgccacctggttcgtggtgcagctgaccatgagccccgaggtgcaccagagcaacgtgggctggtgcagactggtgaccgccgcctacaactacttccacgtgaccaacttcttctggatgttcggcgagggctgctacctgcacaccgccatcgtgctgacctacagcaccgacagactgagaaagtggatgttcatctgcatcggctggggcgtgcccttccccatcatcgtggcctgggccatcggcaagctgtactacgacaacgagaagtgctggttcggcaagagacccggcgtgtacaccgactacatctaccagggccccatgatcctggtgctgctgatcaacttcatcttcctgttcaacatcgtgagaatcctgatgaccaagctgagagccagcaccaccagcgagaccatccagtacagaaaggccgtgaaggccaccctggtgctgctgcccctgctgggcatcacctacatgctgttcttcgtgaaccccggcgaggacgaggtgagcagagtggtgttcatctacttcaacagcttcctggagagcttccagggcttcttcgtgagcgtgttctactgcttcctgaacagcgaggtgagaagcgccatcagaaagagatggcacagatggcaggacaagcacagcatcagagccagagtggccagagccatgagcatccccaccagccccaccagagtgagcttccacagcatcaagcagagcaccgccgtgtag

SEQ ID NO: 77699 - DNA, 1335 bp, synthetic construct
  misc_feature 1..1335: note = Description of Artificial Sequence: Synthetic coding sequence
  source 1..1335: mol_type = other DNA
atgggcggccacccccagctgagactggtgaaggccctgctgctgctgggcctgaaccccgtgagcgccagcctgcaggaccagcactgcgagagcctgagcctggccagcaacatcagcggcctgcagtgcaacgccagcgtggacctgatcggcacctgctggcccagaagccccgccggccagctggtggtgagaccctgccccgccttcttctacggcgtgagatacaacaccaccaacaacggctacagagagtgcctggccaacggcagctgggccgccagagtgaactacagcgagtgccaggagatcctgaacgaggagaagaagagcaaggtgcactaccacgtggccgtgatcatcaactacctgggccactgcatcagcctggtggccctgctggtggccttcgtgctgttcctgagactgagacccggctgcacccactggggcgaccaggccgacggcgccctggaggtgggcgccccctggagcggcgcccccttccaggtgagaagaagcatcagatgcctgagaaacatcatccactggaacctgatcagcgccttcatcctgagaaacgccacctggttcgtggtgcagctgaccatgagccccgaggtgcaccagagcaacgtgggctggtgcagactggtgaccgccgcctacaactacttccacgtgaccaacttcttctggatgttcggcgagggctgctacctgcacaccgccatcgtgctgacctacagcaccgacagactgagaaagtggatgttcatctgcatcggctggggcgtgcccttccccatcatcgtggcctgggccatcggcaagctgtactacgacaacgagaagtgctggttcggcaagagacccggcgtgtacaccgactacatctaccagggccccatgatcctggtgctgctgatcaacttcatcttcctgttcaacatcgtgagaatcctgatgaccaagctgagagccagcaccaccagcgagaccatccagtacagaaaggccgtgaaggccaccctggtgctgctgcccctgctgggcatcacctacatgctgttcttcgtgaaccccggcgaggacgaggtgagcagagtggtgttcatctacttcaacagcttcctggagagcttccagggcttcttcgtgagcgtgttctactgcttcctgaacagcgaggtgagaagcgccatcagaaagagatggcacagatggcaggacaagcacagcatcagagccagagtggccagagccatgagcatccccaccagccccaccagagtgagcttccacagcatcaagcagagcaccgccgtgtag

SEQ ID NO: 77700 - DNA, 114 bp, synthetic construct
  misc_feature 1..114: note = Description of Artificial Sequence: Synthetic coding sequence
  source 1..114: mol_type = other DNA
gtgtacaccgactacatctacttcaacagcttcctggagagcttccagggcttcttcgtgagcgtgttctactgcttcctgaacagcgaggtgagaagcgccatcagaaagtag

SEQ ID NO: 77701 - DNA, 1206 bp, synthetic construct; identical to SEQ ID NO: 77697
  misc_feature 1..1206: note = Description of Artificial Sequence: Synthetic coding sequence
  source 1..1206: mol_type = other DNA

SEQ ID NO: 77702 - DNA, 1194 bp, synthetic construct
  misc_feature 1..1194: note = Description of Artificial Sequence: Synthetic coding sequence
  source 1..1194: mol_type = other DNA
atgggcagagagccctggcccgaggacagagacctgggcttcccccagctgttctgccagggcccctacagctactgcaacaccaccctggaccagatcggcacctgctggcccagaagcgccgccggcgccctggtggagagaccctgccccgagtacttcaacggcgtgaagtacaacaccaccagaaacgcctacagagagtgcctggagaacggcacctgggccagcaagatcaactacagccagtgcgagcccatcctggacgacaagcagagaaagtacgacctgcactacagaatcgccctggtggtgaactacctgggccactgcgtgagcgtggccgccctggtggccgccttcctgctgttcctggccctgagaagcatcagatgcctgagaaacgtgatccactggaacctgatcaccaccttcatcctgagaaacgtgatgtggttcctgctgcagctggtggaccacgaggtgcacgagagcaacgaggtgtggtgcagatgcatcaccaccatcttcaactacttcgtggtgaccaacttcttctggatgttcgtggagggctgctacctgcacaccgccatcgtgatgacctacagcaccgagagactgagaaagtgcctgttcctgttcatcggctggtgcatccccttccccatcatcgtggcctgggccatcggcaagctgtactacgagaacgagcagtgctggttcggcaaggagcccggcgacctggtggactacatctaccagggccccatcatcctggtgctgctgatcaacttcgtgttcctgttcaacatcgtgagaatcctgatgaccaagctgagagccagcaccaccagcgagaccatccagtacagaaaggccgtgaaggccaccctggtgctgctgcccctgctgggcatcacctacatgctgttcttcgtgaaccccggcgaggacgacctgagccagatcatgttcatctacttcaacagcttcctgcagagcttccagggcttcttcgtgagcgtgttctactgcttcttcaacggcgaggtgagaagcgccgtgagaaagagatggcacagatggcaggaccaccacagcctgagagtgcccatggccagagccatgagcatccccaccagccccaccagaatcagcttccacagcatcaagcagaccgccgccgtgtag

SEQ ID NO: 77703 - DNA, 1317 bp, synthetic construct
  misc_feature 1..1317: note = Description of Artificial Sequence: Synthetic coding sequence
  source 1..1317: mol_type = other DNA
atgagaggccccagcggcccccccggcctgctgtacgtgccccacctgctgctgtgcctgctgtgcctgctgcccccccccctgcagtacgccgccggccagagccagatgcccaaggaccagcccctgtgggccctgctggagcagtactgccacaccatcatgaccctgaccaacctgagcggcccctacagctactgcaacaccaccctggaccagatcggcacctgctggcccagaagcgccgccggcgccctggtggagagaccctgccccgagtacttcaacggcgtgaagtacaacaccaccagaaacgcctacagagagtgcctggagaacggcacctgggccagcaagatcaactacagccagtgcgagcccatcctggacgacaagcagagaaagtacgacctgcactacagaatcgccctggtggtgaactacctgggccactgcgtgagcgtggccgccctggtggccgccttcctgctgttcctggccctgagaagcatcagatgcctgagaaacgtgatccactggaacctgatcaccaccttcatcctgagaaacgtgatgtggttcctgctgcagctggtggaccacgaggtgcacgagagcaacgaggtgtggtgcagatgcatcaccaccatcttcaactacttcgtggtgaccaacttcttctggatgttcgtggagggctgctacctgcacaccgccatcgtgatgacctacagcaccgagagactgagaaagtgcctgttcctgttcatcggctggtgcatccccttccccatcatcgtggcctgggccatcggcaagctgtactacgagaacgagcagtgctggttcggcaaggagcccggcgacctggtggactacatctaccagggccccatcatcctggtgctgctgatcaacttcgtgttcctgttcaacatcgtgagaatcctgatgaccaagctgagagccagcaccaccagcgagaccatccagtacagaaaggccgtgaaggccaccctggtgctgctgcccctgctgggcatcacctacatgctgttcttcgtgaaccccggcgaggacgacctgagccagatcatgttcatctacttcaacagcttcctgcagagcttccagggcttcttcgtgagcgtgttctactgcttcttcaacggcgaggtgagaagcgccgtgagaaagagatggcacagatggcaggaccaccacagcctgagagtgcccatggccagagccatgagcatccccaccagccccaccagaatcagcttccacagcatcaagcagaccgccgccgtgtag

SEQ ID NO: 77704 - DNA, 1236 bp, synthetic construct
  misc_feature 1..1236: note = Description of Artificial Sequence: Synthetic coding sequence
  source 1..1236: mol_type = other DNA
atggacgccgccctgctgcacagcctgctggaggccaactgcagcctggccctggccgaggagctgctgctggacggctggggcccccccctggaccccgagggcccctacagctactgcaacaccaccctggaccagatcggcacctgctggcccagaagcgccgccggcgccctggtggagagaccctgccccgagtacttcaacggcgtgaagtacaacaccaccagaaacgcctacagagagtgcctggagaacggcacctgggccagcaagatcaactacagccagtgcgagcccatcctggacgacaagcagagaaagtacgacctgcactacagaatcgccctggtggtgaactacctgggccactgcgtgagcgtggccgccctggtggccgccttcctgctgttcctggccctgagaagcatcagatgcctgagaaacgtgatccactggaacctgatcaccaccttcatcctgagaaacgtgatgtggttcctgctgcagctggtggaccacgaggtgcacgagagcaacgaggtgtggtgcagatgcatcaccaccatcttcaactacttcgtggtgaccaacttcttctggatgttcgtggagggctgctacctgcacaccgccatcgtgatgacctacagcaccgagagactgagaaagtgcctgttcctgttcatcggctggtgcatccccttccccatcatcgtggcctgggccatcggcaagctgtactacgagaacgagcagtgctggttcggcaaggagcccggcgacctggtggactacatctaccagggccccatcatcctggtgctgctgatcaacttcgtgttcctgttcaacatcgtgagaatcctgatgaccaagctgagagccagcaccaccagcgagaccatccagtacagaaaggccgtgaaggccaccctggtgctgctgcccctgctgggcatcacctacatgctgttcttcgtgaaccccggcgaggacgacctgagccagatcatgttcatctacttcaacagcttcctgcagagcttccagggcttcttcgtgagcgtgttctactgcttcttcaacggcgaggtgagaagcgccgtgagaaagagatggcacagatggcaggaccaccacagcctgagagtgcccatggccagagccatgagcatccccaccagccccaccagaatcagcttccacagcatcaagcagaccgccgccgtgtag

SEQ ID NO: 77705 - DNA, 1113 bp, synthetic construct
  misc_feature 1..1113: note = Description of Artificial Sequence: Synthetic coding sequence
  source 1..1113: mol_type = other DNA
atggacgccgccctgctgcacagcctgctggaggccaactgcagcctggccctggccgaggagctgctgctggacggctggggcccccccctggaccccgagggcccctacagctactgcaacaccaccctggaccagatcggcacctgctggcccagaagcgccgccggcgccctggtggagagaccctgccccgagtacttcaacggcgtgaagtacaacaccaccagaaacgcctacagagagtgcctggagaacggcacctgggccagcaagatcaactacagccagtgcgagcccatcctggacgacaagcagagaaagtacgacctgcactacagaatcgccctggtggtgaactacctgggccactgcgtgagcgtggccgccctggtggccgccttcctgctgttcctggccctgagaagcatcagatgcctgagaaacgtgatccactggaacctgatcaccaccttcatcctgagaaacgtgatgtggttcctgctgcagctggtggaccacgaggtgcacgagagcaacgaggtgtggtgcagatgcatcaccaccatcttcaactacttcgtggtgaccaacttcttctggatgttcgtggagggctgctacctgcacaccgccatcgtgatgacctacagcaccgagagactgagaaagtgcctgttcctgttcatcggctggtgcatccccttccccatcatcgtggcctgggccatcggcaagctgtactacgagaacgagcagtgctggttcggcaaggagcccggcgacctggtggactacatctaccagggccccatcatcctggtgctgctgatcaacttcgtgttcctgttcaacatcgtgagaatcctgatgaccaagctgagagccagcaccaccagcgagaccatccagtacagaaaggccgtgaaggccaccctggtgctgctgcccctgctgggcatcacctacatgctgttcttcgtgaaccccggcgaggacgacctgagccagatcatgttcatctacttcaacagcttcctgcagagcttccagggcttcttcgtgagcgtgttctactgcttcttcaacggcgagggcctggagcccgtgtag

SEQ ID NO: 77706 - DNA, 468 bp, synthetic construct
  misc_feature 1..468: note = Description of Artificial Sequence: Synthetic coding sequence
  source 1..468: mol_type = other DNA
atgtacagacacaagaacagctggagactgggcctgaagtacccccccagcagcaaggaggagacccaggtgcccaagaccctgatcagcggcctgcccggcagaaagagcagcagcagagtgggcgagaagctgcagagcgcccacaagatgcccctgagccccggcctgctgctgctgctgctgagcggcgccaccgccaccgccgccctgcccctggagggcggccccaccggcagagacagcgagcacatgcaggaggccgccggcatcagaaagagcagcctgctgaccttcctggcctggtggttcgagtggaccagccaggccagcgccggccccctgatcggcgaggaggccagagaggtggccagaagacaggagggcgcccccccccagcagagcgccagaagagacagaatgccctgcagaaacttcttctggaagaccttcagcagctgcaagtag

SEQ ID NO: 77707 - DNA, 318 bp, synthetic construct
  misc_feature 1..318: note = Description of Artificial Sequence: Synthetic coding sequence
  source 1..318: mol_type = other DNA
atgcccctgagccccggcctgctgctgctgctgctgagcggcgccaccgccaccgccgccctgcccctggagggcggccccaccggcagagacagcgagcacatgcaggaggccgccggcatcagaaagagcagcctgctgaccttcctggcctggtggttcgagtggaccagccaggccagcgccggccccctgatcggcgaggaggccagagaggtggccagaagacaggagggcgcccccccccagcagagcgccagaagagacagaatgccctgcagaaacttcttctggaagaccttcagcagctgcaagtag

SEQ ID NO: 77708 - DNA, 1332 bp, synthetic construct
  misc_feature 1..1332: note = Description of Artificial Sequence: Synthetic coding sequence
  source 1..1332: mol_type = other DNA
atggccgccagcccccacaccctgagcagcagactgctgaccggctgcgtgggcggcagcgtgtggtacctggagagaagaaccatccaggacagcccccacaagttcctgcacctgctgagaaacgtgaacaagcagtggatcaccttccagcacttcagcttcctgaagagaatgtacgtgacccagctgaacagaagccacaaccagcaggtgagacccaagcccgagcccgtggccagccccttcctggagaagaccagcagcggccaggccaaggccgagatctacgagatgagacccctgagcccccccagcctgagcctgagcagaaagcccaacgagaaggagctgatcgagctggagcccgacagcgtgatcgaggacagcatcgacgtgggcaaggagaccaaggaggagaagagatggaaggagatgaagctgcaggtgtacgacctgcccggcatcctggccagactgagcaagatcaagctgaccgccctggtggtgagcaccaccgccgccggcttcgccctggcccccggccccttcgactggccctgcttcctgctgaccagcgtgggcaccggcctggccagctgcgccgccaacagcatcaaccagttcttcgaggtgcccttcgacagcaacatgaacagaaccaagaacagacccctggtgagaggccagatcagccccctgctggccgtgagcttcgccacctgctgcgccgtgcccggcgtggccatcctgaccctgggcgtgaaccccctgaccggcgccctgggcctgttcaacatcttcctgtacacctgctgctacacccccctgaagagaatcagcatcgccaacacctgggtgggcgccgtggtgggcgccatcccccccgtgatgggctggaccgccgccaccggcagcctggacgccggcgccttcctgctgggcggcatcctgtacagctggcagttcccccacttcaacgccctgagctggggcctgagagaggactacagcagaggcggctactgcatgatgagcgtgacccaccccggcctgtgcagaagagtggccctgagacactgcctggccctgctggtgctgagcgccgccgcccccgtgctggacatcaccacctggaccttccccatcatggccctgcccatcaacgcctacatcagctacctgggcttcagattctacgtggacgccgacagaagaagcagcagaagactgttcttctgcagcctgtggcacctgcccctgctgctgctgctgatgctgacctgcaagagacccagcggcggcggcgacgccggccccccccccagctag

SEQ ID NO: 77709 - DNA, 399 bp, synthetic construct
  misc_feature 1..399: note = Description of Artificial Sequence: Synthetic coding sequence
  source 1..399: mol_type = other DNA
tgaagaaacgtgaacaagcagtggatcaccttccagcacttcagcttcctgaagagaatgtacgtgacccagctgaacagaagccacaaccagcaggtgagacccaagcccgagcccgtggccagccccttcctggagaagaccagcagcggccaggccaaggccgagatctacgagatgagacccctgagcccccccagcctgagcctgagcagaaagcccaacgagaaggagctgatcgagctggagcccgacagcgtgatcgaggacagcatcgacgtgggcaaggagaccaaggaggagaagagatggaaggagatgaagctgcaggtgtacgacctgcccggcatcctggccagactgagcaagatcaagctgaccggcaccctgttcttctag

SEQ ID NO: 77710 - DNA, 756 bp, synthetic construct
  misc_feature 1..756: note = Description of Artificial Sequence: Synthetic coding sequence
  source 1..756: mol_type = other DNA
atgatctgccaggagttctggctggactaccccaagagcaacagccagttcttcgaggtgcccttcgacagcaacatgaacagaaccaagaacagacccctggtgagaggccagatcagccccctgctggccgtgagcttcgccacctgctgcgccgtgcccggcgtggccatcctgaccctgggcgtgaaccccctgaccggcgccctgggcctgttcaacatcttcctgtacacctgctgctacacccccctgaagagaatcagcatcgccaacacctgggtgggcgccgtggtgggcgccatcccccccgtgatgggctggaccgccgccaccggcagcctggacgccggcgccttcctgctgggcggcatcctgtacagctggcagttcccccacttcaacgccctgagctggggcctgagagaggactacagcagaggcggctactgcatgatgagcgtgacccaccccggcctgtgcagaagagtggccctgagacactgcctggccctgctggtgctgagcgccgccgcccccgtgctggacatcaccacctggaccttccccatcatggccctgcccatcaacgcctacatcagctacctgggcttcagattctacgtggacgccgacagaagaagcagcagaagactgttcttctgcagcctgtggcacctgcccctgctgctgctgctgatgctgacctgcaagagacccagcggcggcggcgacgccggccccccccccagctag

SEQ ID NO: 77711 - DNA, 681 bp, synthetic construct
  misc_feature 1..681: note = Description of Artificial Sequence: Synthetic coding sequence
  source 1..681: mol_type = other DNA
atgaacagaaccaagaacagacccctggtgagaggccagatcagccccctgctggccgtgagcttcgccacctgctgcgccgtgcccggcgtggccatcctgaccctgggcgtgaaccccctgaccggcgccctgggcctgttcaacatcttcctgtacacctgctgctacacccccctgaagagaatcagcatcgccaacacctgggtgggcgccgtggtgggcgccatcccccccgtgatgggctggaccgccgccaccggcagcctggacgccggcgccttcctgctgggcggcatcctgtacagctggcagttcccccacttcaacgccctgagctggggcctgagagaggactacagcagaggcggctactgcatgatgagcgtgacccaccccggcctgtgcagaagagtggccctgagacactgcctggccctgctggtgctgagcgccgccgcccccgtgctggacatcaccacctggaccttccccatcatggccctgcccatcaacgcctacatcagctacctgggcttcagattctacgtggacgccgacagaagaagcagcagaagactgttcttctgcagcctgtggcacctgcccctgctgctgctgctgatgctgacctgcaagagacccagcggcggcggcgacgccggccccccccccagctag

SEQ ID NO: 77712 - DNA, 831 bp, synthetic construct
  misc_feature 1..831: note = Description of Artificial Sequence: Synthetic coding sequence
  source 1..831: mol_type = other DNA
atgggcggcctgtggagacccggctggagatgcgtgcccttctgcggctggagatggatccaccccggcagccccaccagagccgccgagagagtggagcccttcctgagacccgagtggagcggcaccggcggcgccgagagaggcctgagatggctgggcacctggaagagatgcagcctgagagccagacaccccgccctgcagccccccagaagacccaagagcagcaaccccttcaccagagcccaggaggaggagagaagaagacagaacaagaccaccctgacctacgtggccgccgtggccgtgggcatgctgggcgccagctacgccgccgtgcccctgtacagactgtactgccagaccaccggcctgggcggcagcgccgtggccggccacgccagcgacaagatcgagaacatggtgcccgtgaaggacagaatcatcaagatcagcttcaacgccgacgtgcacgccagcctgcagtggaacttcagaccccagcagaccgagatctacgtggtgcccggcgagaccgccctggccttctacagagccaagaaccccaccgacaagcccgtgatcggcatcagcacctacaacatcgtgcccttcgaggccggccagtacttcaacaagatccagtgcttctgcttcgaggagcagagactgaacccccaggaggaggtggacatgcccgtgttcttctacatcgaccccgagttcgccgaggaccccagaatgatcaaggtggacctgatcaccctgagctacaccttcttcgaggccaaggagggccacaagctgcccgtgcccggctacaactag

SEQ ID NO: 77713 - DNA, 1233 bp, synthetic construct
  misc_feature 1..1233: note = Description of Artificial Sequence: Synthetic coding sequence
  source 1..1233: mol_type = other DNA
atgcagagactgctgttcccccccctgagagccctgaagggcagacagtacctgcccctgctggcccccagagccgcccccagagcccagtgcgactgcatcagaagacccctgagacccggccagtacagcaccatcagcgaggtggccctgcagagcggcagaggcaccgtgagcctgcccagcaaggccgccgagagagtggtgggcagatggctgctggtgtgcagcggcaccgtggccggcgccgtgatcctgggcggcgtgaccagactgaccgagagcggcctgagcatggtggactggcacctgatcaaggagatgaagccccccaccagccaggaggagtgggaggccgagttccagagataccagcagttccccgagttcaagatcctgaaccacgacatgaccctgaccgagttcaagttcatctggtacatggagtacagccacagaatgtggggcagactggtgggcctggtgtacatcctgcccgccgcctacttctggagaaagggctggctgagcagaggcatgaagggcagagtgctggccctgtgcggcctggtgtgcttccagggcctgctgggctggtacatggtgaagagcggcctggaggagaagagcgacagccacgacatccccagagtgagccagtacagactggccgcccacctgggcagcgccctggtgctgtactgcgccagcctgtggaccagcctgagcctgctgctgcccccccacaagctgcccgagacccaccagctgctgcagctgagaagattcgcccacggcaccgccggcctggtgttcctgaccgccctgagcggcgccttcgtggccggcctggacgccggcctggtgtacaacagcttccccaagatgggcgagagctggatccccgaggacctgttcaccttcagccccatcctgagaaacgtgttcgagaaccccaccatggtgcagttcgaccacagaatcctgggcatcaccagcgtgaccgccatcaccgtgctgtacttcctgagcagaagaatccccctgcccagaagaaccaagatggccgccgtgaccctgctggccctggcctacacccaggtgggcctgggcatcagcaccctgctgatgtacgtgcccacccccctggccgccacccaccagagcggcagcctggccctgctgaccggcgccctgtggctgatgaacgagctgagaagagtgcccaagtag

SEQ ID NO: 77714 - DNA, 1167 bp, synthetic construct
  misc_feature 1..1167: note = Description of Artificial Sequence: Synthetic coding sequence
  source 1..1167: mol_type = other DNA
atgcagagactgctgttcccccccctgagagccctgaagggcagacagtacctgcccctgctggcccccagagccgcccccagagcccagtgcgactgcatcagaagacccctgagacccggccagtacagcaccatcagcgaggtggccctgcagagcggcagaggcaccgtgagcctgcccagcaaggccgccgagagagtggtgggcagatggctgctggtgtgcagcggcaccgtggccggcgccgtgatcctgggcggcgtgaccagactgaccgagagcggcctgagcatggtggactggcacctgatcaaggagatgaagccccccaccagccaggaggagtgggaggccgagttccagagataccagcagttccccgagttcaagatcctgaaccacgacatgaccctgaccgagttcaagttcatctggtacatggagtacagccacagaatgtggggcagactggtgggcctggtgtacatcctgcccgccgcctacttctggagaaagggctggctgagcagaggcatgaagggcagagtgctggccctgtgcggcctggtgtgcttccagggcctgctgggctggtacatggtgaagagcggcctggaggagaagagcgacagccacgacatccccagagtgagccagtacagactggccgcccacctgggcagcgccctggtgctgtactgcgccagcctgtggaccagcctgagcctgctgctgcccccccacaagctgcccgagacccaccagctgctgcagctgagaagattcgcccacggcaccgccggcctggtgttcctgaccgccctgagcggcgccttcgtggccggcctggacgccggcctggtgtacaacagcttccccaagatgggcgagagctggatccccgaggacctgttcaccttcagccccatcctgagaaacgtgttcgagaaccccaccatggtgcagttcgaccacagaatcctgggcatcaccagcgtgaccgccatcaccgtgctgtacttcctgagcagaagaatccccctgcccagaagaaccaagatggccgccgtgaccctgctggccctggcctacacccagggccccgtgctgttcaacttcaccttcaagatcagcgacctggacgagggcatcagaaacatctag

SEQ ID NO: 77715 - DNA, 192 bp, synthetic construct
  misc_feature 1..192: note = Description of Artificial Sequence: Synthetic coding sequence
  source 1..192: mol_type = other DNA
atgcccggcctggtggacagcaaccccgccccccccgagagccaggagaagaagcccctgaagccctgctgcgcctgccccgagaccaagaaggccagagacgcctgcatcatcgagaagggcgaggagcactgcggccacctgatcgaggcccacaaggagtgcatgagagccctgggcttcaagatctag

SEQ ID NO: 77716 - DNA, 192 bp, synthetic construct; identical to SEQ ID NO: 77715
  misc_feature 1..192: note = Description of Artificial Sequence: Synthetic coding sequence
  source 1..192: mol_type = other DNA

SEQ ID NO: 77717 - DNA, 297 bp, synthetic construct
  misc_feature 1..297: note = Description of Artificial Sequence: Synthetic coding sequence
  source 1..297: mol_type = other DNA
atgcccggcctggtggacagcaaccccgccccccccgagagccaggagaagaagcccctgaagccctgctgcgcctgccccgagaccaagaaggccagagacgcctggttcagaggcagagtgagcgtggacctgagcagaagcctggtgcccggcaacgacggcgagagaggcgagagacaggccagcaccacccacagcttcctgcagatcatcatcgagaagggcgaggagcactgcggccacctgatcgaggcccacaaggagtgcatgagagccctgggcttcaagatctag

SEQ ID NO: 77718 - DNA, 192 bp, synthetic construct; identical to SEQ ID NO: 77715
  misc_feature 1..192: note = Description of Artificial Sequence: Synthetic coding sequence
  source 1..192: mol_type = other DNA

SEQ ID NO: 77719 - DNA, 1098 bp, synthetic construct
  misc_feature 1..1098: note = Description of Artificial Sequence: Synthetic coding sequence
  source 1..1098: mol_type = other DNA
atggccctgctgctgtgcttcgtgctgctgtgcggcgtggtggacttcgccagaagcctgagcatcaccacccccgaggagatgatcgagaaggccaagggcgagaccgcctacctgccctgcaagttcaccctgagccccgaggaccagggccccctggacatcgagtggctgatcagccccgccgacaaccagaaggtggaccaggtgatcatcctgtacagcggcgacaagatctacgacgactactaccccgacctgaagggcagagtgcacttcaccagcaacgacctgaagagcggcgacgccagcatcaacgtgaccaacctgcagctgagcgacatcggcacctaccagtgcaaggtgaagaaggcccccggcgtggccaacaagaagatccacctggtggtgctggtgaagcccagcggcgccagatgctacgtggacggcagcgaggagatcggcagcgacttcaagatcaagtgcgagcccaaggagggcagcctgcccctgcagtacgagtggcagaagctgagcgacagccagaagatgcccaccagctggctggccgagatgaccagcagcgtgatcagcgtgaagaacgccagcagcgagtacagcggcacctacagctgcaccgtgagaaacagagtgggcagcgaccagtgcctgctgagactgaacgtggtgccccccagcaacaaggccggcctgatcgccggcgccatcatcggcaccctgctggccctggccctgatcggcctgatcatcttctgctgcagaaagaagagaagagaggagaagtacgagaaggaggtgcaccacgacatcagagaggacgtgcccccccccaagagcagaaccagcaccgccagaagctacatcggcagcaaccacagcagcctgggcagcatgagccccagcaacatggagggctacagcaagacccagtacaaccaggtgcccagcgaggacttcgagagaaccccccagagccccaccctgccccccgccaaggtggccgcccccaacctgagcagaatgggcgccatccccgtgatgatccccgcccagagcaaggacggcagcatcgtgtag

SEQ ID NO: 77720 - DNA, 975 bp, synthetic construct
  misc_feature 1..975: note = Description of Artificial Sequence: Synthetic coding sequence
  source 1..975: mol_type = other DNA
atggccctgctgctgtgcttcgtgctgctgtgcggcgtggtggacttcgccagaagcctgagcatcaccacccccgaggagatgatcgagaaggccaagggcgagaccgcctacctgccctgcaagttcaccctgagccccgaggaccagggccccctggacatcgagtggctgatcagccccgccgacaaccagaaggtggaccaggtgatcatcctgtacagcggcgacaagatctacgacgactactaccccgacctgaagggcagagtgcacttcaccagcaacgacctgaagagcggcgacgccagcatcaacgtgaccaacctgcagctgagcgacatcggcacctaccagtgcaaggtgaagaaggcccccggcgtggccaacaagaagatccacctggtggtgctggtgaagcccagcggcgccagatgctacgtggacggcagcgaggagatcggcagcgacttcaagatcaagtgcgagcccaaggagggcagcctgcccctgcagtacgagtggcagaagctgagcgacagccagaagatgcccaccagctggctggccgccagcaacaaggccggcctgatcgccggcgccatcatcggcaccctgctggccctggccctgatcggcctgatcatcttctgctgcagaaagaagagaagagaggagaagtacgagaaggaggtgcaccacgacatcagagaggacgtgcccccccccaagagcagaaccagcaccgccagaagctacatcggcagcaaccacagcagcctgggcagcatgagccccagcaacatggagggctacagcaagacccagtacaaccaggtgcccagcgaggacttcgagagaaccccccagagccccaccctgccccccgccaaggtggccgcccccaacctgagcagaatgggcgccatccccgtgatgatccccgcccagagcaaggacggcagcatcgtgtag

SEQ ID NO: 77721 - DNA, 603 bp, synthetic construct
  misc_feature 1..603: note = Description of Artificial Sequence: Synthetic coding sequence
  source 1..603: mol_type = other DNA
atggccctgctgctgtgcttcgtgctgctgtgcggcgtggtggacttcgccagaagcctgagcatcaccacccccgaggagatgatcgagaaggccaagggcgagaccgcctacctgccctgcaagttcaccctgagccccgaggaccagggccccctggacatcgagtggctgatcagccccgccgacaaccagaaggtggaccaggtgatcatcctgtacagcggcgacaagatctacgacgactactaccccgacctgaagggcagagtgcacttcaccagcaacgacctgaagagcggcgacgccagcatcaacgtgaccaacctgcagctgagcgacatcggcacctaccagtgcaaggtgaagaaggcccccggcgtggccaacaagaagatccacctggtggtgctgggcaagatgtgccacctgcagagagccgtgagacccctgcccgaggccaccagcgccgtgatcatccacccctggggcccctgcctgctgcccacctggaaggacatccccagactgagcatcaccaagtaccaggtgaagaccctgaacgccctgctgagagtgagactgagccacctgctgagatag

SEQ ID NO: 77722 - DNA, 759 bp, synthetic construct
  misc_feature 1..759: note = Description of Artificial Sequence: Synthetic coding sequence
  source 1..759: mol_type = other DNA
atggccctgctgctgtgcttcgtgctgctgtgcggcgtggtggacttcgccagaagcctgagcatcaccacccccgaggagatgatcgagaaggccaagggcgagaccgcctacctgccctgcaagttcaccctgagccccgaggaccagggccccctggacatcgagtggctgatcagccccgccgacaaccagaaggtggaccaggtgatcatcctgtacagcggcgacaagatctacgacgactactaccccgacctgaagggcagagtgcacttcaccagcaacgacctgaagagcggcgacgccagcatcaacgtgaccaacctgcagctgagcgacatcggcacctaccagtgcaaggtgaagaaggcccccggcgtggccaacaagaagatccacctggtggtgctggtgaagcccagcggcgccagatgctacgtggacggcagcgaggagatcggcagcgacttcaagatcaagtgcgagcccaaggagggcagcctgcccctgcagtacgagtggcagaagctgagcgacagccagaagatgcccaccagctggctggccggcaagatgtgccacctgcagagagccgtgagacccctgcccgaggccaccagcgccgtgatcatccacccctggggcccctgcctgctgcccacctggaaggacatccccagactgagcatcaccaagtaccaggtgaagaccctgaacgccctgctgagagtgagactgagccacctgctgagatag

SEQ ID NO: 77723 - DNA, 1059 bp, synthetic construct
  misc_feature 1..1059: note = Description of Artificial Sequence: Synthetic coding sequence
  source 1..1059: mol_type = other DNA
atggccctgctgctgtgcttcgtgctgctgtgcggcgtggtggacttcgccagaagcctgagcatcaccacccccgaggagatgatcgagaaggccaagggcgagaccgcctacctgccctgcaagttcaccctgagccccgaggaccagggccccctggacatcgagtggctgatcagccccgccgacaaccagaaggtggaccaggtgatcatcctgtacagcggcgacaagatctacgacgactactaccccgacctgaagggcagagtgcacttcaccagcaacgacctgaagagcggcgacgccagcatcaacgtgaccaacctgcagctgagcgacatcggcacctaccagtgcaaggtgaagaaggcccccggcgtggccaacaagaagatccacctggtggtgctggtgaagcccagcggcgccagatgctacgtggacggcagcgaggagatcggcagcgacttcaagatcaagtgcgagcccaaggagggcagcctgcccctgcagtacgagtggcagaagctgagcgacagccagaagatgcccaccagctggctggccgagatgaccagcagcgtgatcagcgtgaagaacgccagcagcgagtacagcggcacctacagctgcaccgtgagaaacagagtgggcagcgaccagtgcctgctgagactgaacgtggtgccccccagcaacaaggccggcctgatcgccggcgccatcatcggcaccctgctggccctggccctgatcggcctgatcatcttctgctgcagaaagaagagaagagaggagaagtacgagaaggaggtgcaccacgacatcagagaggacgtgcccccccccaagagcagaaccagcaccgccagaagctacatcggcagcaaccacagcagcctgggcagcatgagccccagcaacatggagggctacagcaagacccagtacaaccaggtgcccagcgaggacttcgagagaaccccccagagccccaccctgccccccgccaagttcaagtacccctacaagaccgacggcatcaccgtggtgtag

SEQ ID NO: 77724 - DNA, 270 bp, synthetic construct
  misc_feature 1..270: note = Description of Artificial Sequence: Synthetic coding sequence
  source 1..270: mol_type = other DNA
atggccctgctgctgtgcttcgtgctgctgtgcggcgtggtggacttcgccagaagcctgagcatcaccacccccgaggagatgatcgagaaggccaagggcgagaccgcctacctgccctgcaagttcaccctgagccccgaggaccagggccccctggacatcgagtggctgatcagccccgccgacaaccagaaggtggaccaggtgggcagatgcgccaccagcaaggagccctacgtgcactgccagaagctgcacagacagtag

SEQ ID NO: 77725 - DNA, 900 bp, synthetic construct
  misc_feature 1..900: note = Description of Artificial Sequence: Synthetic coding sequence
  source 1..900: mol_type = other DNA
atggaggagttcgacagcgaggacttcagcaccagcgaggaggacgaggactacgtgcccagcggcggcgagtacagcgaggacgacgtgaacgagctggtgaaggaggacgaggtggacggcgaggagcagacccagaagacccagggcaagaagagaaaggcccagagcatccccgccagaaagagaagacagggcggcctgagcctggaggaggaggaggaggaggacgccaacagcgagagcgagggcagcagcagcgaggaggaggacgacgccgccgagcaggagaagggcatcggcagcgaggacgccagaaagaagaaggaggacgagctgtgggccagcttcctgaacgacgtgggccccaagagcaaggtgccccccagcacccaggtgaagaagggcgaggagaccgaggagaccagcagcagcaagctgctggtgaaggccgaggagctggagaagcccaaggagaccgagaaggtgaagatcaccaaggtgttcgacttcgccggcgaggaggtgagagtgaccaaggaggtggacgccaccagcaaggaggccaagagcttcttcaagcagaacgagaaggagaagccccaggccaacgtgcccagcgccctgcccagcctgcccgccggcagcggcctgaagagaagcagcggcatgagcagcctgctgggcaagatcggcgccaagaagcagaagatgagcaccctggagaagagcaagctggactgggagagcttcaaggaggaggagggcatcggcgaggagctggccatccacaacagaggcaaggagggctacatcgagagaaaggccttcctggacagagtggaccacagacagttcgagatcgagagagacctgagactgagcaagatgaagccctag

SEQ ID NO: 77726 - DNA, 675 bp, synthetic construct
  misc_feature 1..675: note = Description of Artificial Sequence: Synthetic coding sequence
  source 1..675: mol_type = other DNA
atggagaagctgctgtgcttcctggtgctgaccagcctgagccacgccttcggccagaccgacatgagcagaaaggccttcgtgttccccaaggagagcgacaccagctacgtgagcctgaaggcccccctgaccaagcccctgaaggccttcaccgtgtgcctgcacttctacaccgagctgagcagcaccagaggctacagcatcttcagctacgccaccaagagacaggacaacgagatcctgatcttctggagcaaggacatcggctacagcttcaccgtgggcggcagcgagatcctgttcgaggtgcccgaggtgaccgtggcccccgtgcacatctgcaccagctgggagagcgccagcggcatcgtggagttctgggtggacggcaagcccagagtgagaaagagcctgaagaagggctacaccgtgggcgccgaggccagcatcatcctgggccaggagcaggacagcttcggcggcaacttcgagggcagccagagcctggtgggcgacatcggcaacgtgaacatgtgggacttcgtgctgagccccgacgagatcaacaccatctacctgggcggccccttcagccccaacgtgctgaactggagagccctgaagtacgaggtgcagggcgaggtgttcaccaagccccagctgtggccctag

SEQ ID NO: 77727 - DNA, 309 bp, synthetic construct
  misc_feature 1..309: note = Description of Artificial Sequence: Synthetic coding sequence
  source 1..309: mol_type = other DNA
atggagaagctgctgtgcttcctggtgctgaccagcctgagccacgccttcggccagaccgacatgagcagaaaggccttcgtgttccccaaggagagcgacaccagctacgtgagcctgaaggcccccctgaccaagcccctgaaggccttcaccgtgtgcctgcacttctacaccgagctgagcagcacccacgagatcaacaccatctacctgggcggccccttcagccccaacgtgctgaactggagagccctgaagtacgaggtgcagggcgaggtgttcaccaagccccagctgtggccctag

SEQ ID NO: 77728 - DNA, 309 bp, synthetic construct; identical to SEQ ID NO: 77727
  misc_feature 1..309: note = Description of Artificial Sequence: Synthetic coding sequence
  source 1..309: mol_type = other DNA

SEQ ID NO: 77729 - DNA, 309 bp, synthetic construct; identical to SEQ ID NO: 77727
  misc_feature 1..309: note = Description of Artificial Sequence: Synthetic coding sequence
  source 1..309: mol_type = other DNA

SEQ ID NO: 77730 - DNA, 276 bp, synthetic construct
  misc_feature 1..276: note = Description of Artificial Sequence: Synthetic coding sequence
  source 1..276: mol_type = other DNA
atggagaagctgctgtgcttcctggtgctgaccagcctgagccacgccttcggccagaccgacatgagcagaaaggccttcgtgttccccaaggagagcgacaccagctacgtgagcctgaaggcccccctgaccaagcccctgaaggccttcaccgtgtgcctgcacttctacaccgagctgagcagcaccagaggccccaacgtgctgaactggagagccctgaagtacgaggtgcagggcgaggtgttcaccaagccccagctgtggccctag

SEQ ID NO: 77731 - DNA, 141 bp, synthetic construct
  misc_feature 1..141: note = Description of Artificial Sequence: Synthetic coding sequence
  source 1..141: mol_type = other DNA
atgtgggacttcgtgctgagccccgacgagatcaacaccatctacctgggcggccccttcagccccaacgtgctgaactggagagccctgaagtacgaggtgcagggcgaggtgttcaccaagccccagctgtggccctag

SEQ ID NO: 77732 - DNA, 1146 bp, synthetic construct
  misc_feature 1..1146: note = Description of Artificial Sequence: Synthetic coding sequence
  source 1..1146: mol_type = other DNA
atgcccttcagcaacagccacaacgccctgaagctgagattccccgccgaggacgagttccccgacctgagcgcccacaacaaccacatggccaaggtgctgacccccgagctgtacgccgagctgagagccaagagcacccccagcggcttcaccctggacgacgtgatccagaccggcgtggacaaccccggccacccctacatcatgaccgtgggctgcgtggccggcgacgaggagagctacgaggtgttcaaggacctgttcgaccccatcatcgaggacagacacggcggctacaagcccagcgacgagcacaagaccgacctgaaccccgacaacctgcagggcggcgacgacctggaccccaactacgtgctgagcagcagagtgagaaccggcagaagcatcagaggcttctgcctgcccccccactgcagcagaggcgagagaagagccatcgagaagctggccgtggaggccctgagcagcctggacggcgacctggccggcagatactacgccctgaagagcatgaccgaggccgagcagcagcagctgatcgacgaccacttcctgttcgacaagcccgtgagccccctgctgctggccagcggcatggccagagactggcccgacgccagaggcatctggcacaacgacaacaagaccttcctggtgtgggtgaacgaggaggaccacctgagagtgatcagcatgcagaagggcggcaacatgaaggaggtgttcaccagattctgcaccggcctgacccagatcgagaccctgttcaagagcaaggactacgagttcatgtggaacccccacctgggctacatcctgacctgccccagcaacctgggcaccggcctgagagccggcgtgcacatcaagctgcccaacctgggcaagcacgagaagttcagcgaggtgctgaagagactgagactgcagaagagaggcaccggcggcgtggacaccgccgccgtgggcggcgtgttcgacgtgagcaacgccgacagactgggcttcagcgaggtggagctggtgcagatggtggtggacggcgtgaagctgctgatcgagatggagcagagactggagcagggccaggccatcgacgacctgatgcccgcccagaagtag

SEQ ID NO: 77733 - DNA, 1041 bp, synthetic construct
  misc_feature 1..1041: note = Description of Artificial Sequence: Synthetic coding sequence
  source 1..1041: mol_type = other DNA
atgcccttcagcaacagccacaacgccctgaagctgagattccccgccgaggacgagttccccgacctgagcgcccacaacaaccacatggccaaggtgctgacccccgagctgtacgccgagctgagagccaagagcacccccagcggcttcaccctggacgacgtgatccagaccggcgtggacaaccccggccacccctacatcatgaccgtgggctgcgtggccggcgacgaggagagctacgaggtgttcaaggacctgttcgaccccatcatcgaggacagacacggcggctacaagcccagcgacgagcacaagaccgacctgaacccccccagaggcgcccccagaatcgagaagctggccgtggaggccctgagcagcctggacggcgacctggccggcagatactacgccctgaagagcatgaccgaggccgagcagcagcagctgatcgacgaccacttcctgttcgacaagcccgtgagccccctgctgctggccagcggcatggccagagactggcccgacgccagaggcatctggcacaacgacaacaagaccttcctggtgtgggtgaacgaggaggaccacctgagagtgatcagcatgcagaagggcggcaacatgaaggaggtgttcaccagattctgcaccggcctgacccagatcgagaccctgttcaagagcaaggactacgagttcatgtggaacccccacctgggctacatcctgacctgccccagcaacctgggcaccggcctgagagccggcgtgcacatcaagctgcccaacctgggcaagcacgagaagttcagcgaggtgctgaagagactgagactgcagaagagaggcaccggcggcgtggacaccgccgccgtgggcggcgtgttcgacgtgagcaacgccgacagactgggcttcagcgaggtggagctggtgcagatggtggtggacggcgtgaagctgctgatcgagatggagcagagactggagcagggccaggccatcgacgacctgatgcccgcccagaagtag

SEQ ID NO: 77734 - DNA, 654 bp, synthetic construct
  misc_feature 1..654: note = Description of Artificial Sequence: Synthetic coding sequence
  source 1..654: mol_type = other DNA
atgcccttcagcaacagccacaacgccctgaagctgagattccccgccgaggacgagttccccgacctgagcgcccacaacaaccacatggccaaggtgctgacccccgagctgtacgccgagctgagagccaagagcacccccagcggcttcaccctggacgacgtgatccagaccggcgtggacaaccccggccacccctacatcatgaccgtgggctgcgtggccggcgacgaggagagctacgaggtgttcaaggacctgttcgaccccatcatcgaggacagacacggcggctacaagcccagcgacgagcacaagaccgacctgaaccccgacaacctgcagggcggcgacgacctggaccccaactacgtgctgagcagcagagtgagaaccggcagaagcatcagaggcttctgcctgcccccccactgcagcagaggcgagagaagagccatcgagaagctggccgtggaggccctgagcagcctggacggcgacctggccggcagatactacgccctgaagagcatgaccgaggccgagcagcagcagctgatcgacgaccacttcctgttcgacaagcccgtgagccccctgctgctggccagcggcatggccagagactggcccgacgccagaggcatctag

SEQ ID NO: 77735 - DNA, 447 bp, synthetic construct
  misc_feature 1..447: note = Description of Artificial Sequence: Synthetic coding sequence
  source 1..447: mol_type = other DNA
atggccggccccttcagcagactgctgagcgccagacccggcctgagactgctggccctggccggcgccggcagcctggccgccggcttcctgctgagacccgagcccgtgagagccgccagcgagagaagaagactgtacccccccagcgccgagtaccccgacctgagaaagcacaacaactgcatggccagccacctgacccccgccgtgtacgccagactgtgcgacaagaccacccccaccggctggaccctggaccagtgcatccagaccggcgtggacaaccccggccaccccttcatcaagaccgtgggcatggtggccggcgacgaggagacctacgaggtgttcgccgacctgttcgaccccgtgatccaggagagacacaacggctacgaccccagaaccatgaagcacaccaccgacctggacgccagcaagtag

SEQ ID NO: 77736 - DNA, 1254 bp, synthetic construct
  misc_feature 1..1254: note = Description of Artificial Sequence: Synthetic coding sequence
  source 1..1254: mol_type = other DNA
atggccggccccttcagcagactgctgagcgccagacccggcctgagactgctggccctggccggcgccggcagcctggccgccggcttcctgctgagacccgagcccgtgagagccgccagcgagagaagaagactgtacccccccagcgccgagtaccccgacctgagaaagcacaacaactgcatggccagccacctgacccccgccgtgtacgccagactgtgcgacaagaccacccccaccggctggaccctggaccagtgcatccagaccggcgtggacaaccccggccaccccttcatcaagaccgtgggcatggtggccggcgacgaggagacctacgaggtgttcgccgacctgttcgaccccgtgatccaggagagacacaacggctacgaccccagaaccatgaagcacaccaccgacctggacgccagcaagatcagaagcggctacttcgacgagagatacgtgctgagcagcagagtgagaaccggcagaagcatcagaggcctgagcctgccccccgcctgcaccagagccgagagaagagaggtggagagagtggtggtggacgccctgagcggcctgaagggcgacctggccggcagatactacagactgagcgagatgaccgaggccgagcagcagcagctgatcgacgaccacttcctgttcgacaagcccgtgagccccctgctgaccgccgccggcatggccagagactggcccgacgccagaggcatctggcacaacaacgagaagagcttcctgatctgggtgaacgaggaggaccacaccagagtgatcagcatggagaagggcggcaacatgaagagagtgttcgagagattctgcagaggcctgaaggaggtggagagactgatccaggagagaggctgggagttcatgtggaacgagagactgggctacatcctgacctgccccagcaacctgggcaccggcctgagagccggcgtgcacatcaagctgcccctgctgagcaaggacagcagattccccaagatcctggagaacctgagactgcagaagagaggcaccggcggcgtggacaccgccgccaccggcggcgtgttcgacatcagcaacctggacagactgggcaagagcgaggtggagctggtgcagctggtgatcgacggcgtgaactacctgatcgactgcgagagaagactggagagaggccaggacatcagaatccccacccccgtgatccacaccaagcactag

SEQ ID NO: 77737 - DNA, 1347 bp, synthetic construct
  misc_feature 1..1347: note = Description of Artificial Sequence: Synthetic coding sequence
  source 1..1347: mol_type = other DNA
atggccggccccttcagcagactgctgagcgccagacccggcctgagactgctggccctggccggcgccggcagcctggccgccggcttcctgctgagacccgagcccgtgagagccgccagcgagagaagaagactgtacccccccagccagacctggcccaccggccagctgcccggcaactgcaccagaagcagaagactgtgcccccccagcatggtgaccggctaccccctgcccagcgccgagtaccccgacctgagaaagcacaacaactgcatggccagccacctgacccccgccgtgtacgccagactgtgcgacaagaccacccccaccggctggaccctggaccagtgcatccagaccggcgtggacaaccccggccaccccttcatcaagaccgtgggcatggtggccggcgacgaggagacctacgaggtgttcgccgacctgttcgaccccgtgatccaggagagacacaacggctacgaccccagaaccatgaagcacaccaccgacctggacgccagcaagatcagaagcggctacttcgacgagagatacgtgctgagcagcagagtgagaaccggcagaagcatcagaggcctgagcctgccccccgcctgcaccagagccgagagaagagaggtggagagagtggtggtggacgccctgagcggcctgaagggcgacctggccggcagatactacagactgagcgagatgaccgaggccgagcagcagcagctgatcgacgaccacttcctgttcgacaagcccgtgagccccctgctgaccgccgccggcatggccagagactggcccgacgccagaggcatctggcacaacaacgagaagagcttcctgatctgggtgaacgaggaggaccacaccagagtgatcagcatggagaagggcggcaacatgaagagagtgttcgagagattctgcagaggcctgaaggaggtggagagactgatccaggagagaggctgggagttcatgtggaacgagagactgggctacatcctgacctgccccagcaacctgggcaccggcctgagagccggcgtgcacatcaagctgcccctgctgagcaaggacagcagattccccaagatcctggagaacctgagactgcagaagagaggcaccggcggcgtggacaccgccgccaccggcggcgtgttcgacatcagcaacctggacagactgggcaagagcgaggtggagctggtgcagctggtgatcgacggcgtgaactacctgatcgactgcgagagaagactggagagaggccaggacatcagaatccccacccccgtgatccacaccaagcactag

SEQ ID NO: 77738 - DNA, 1254 bp, synthetic construct; identical to SEQ ID NO: 77736
  misc_feature 1..1254: note = Description of Artificial Sequence: Synthetic coding sequence
  source 1..1254: mol_type = other DNA

SEQ ID NO: 77739 - DNA, 765 bp, synthetic construct
  misc_feature 1..765: note = Description of Artificial Sequence: Synthetic coding sequence
  source 1..765: mol_type = other DNA
atggccggccccttcagcagactgctgagcgccagacccggcctgagactgctggccctggccggcgccggcagcctggccgccggcttcctgctgagacccgagcccgtgagagccgccagcgagagaagaagactgtacccccccagcgccgagtaccccgacctgagaaagcacaacaactgcatggccagccacctgacccccgccgtgtacgccagactgtgcgacaagaccacccccaccggctggaccctggaccagtgcatccagaccggcgtggacaaccccggccaccccttcatcaagaccgtgggcatggtggccggcgacgaggagacctacgaggtgttcgccgacctgttcgaccccgtgatcagaggcctgagcctgccccccgcctgcaccagagccgagagaagagaggtggagagagtggtggtggacgccctgagcggcctgaagggcgacctggccggcagatactacagactgagcgagatgaccgaggccgagcagcagcagctgatcgacgaccacttcctgttcgacaagcccgtgagccccctgctgaccgccgccggcatggccagagactggcccgacgccagaggcatctggcacaacaacgagaagagcttcctgatctgggtgaacgaggaggaccacaccagagtgatcagcatggagaagggcggcaacatgaagagagtgttcgagagattctgcagaggcctgaaggaggtggtggtgggcatcaagtag

SEQ ID NO: 77740 - DNA, 1254 bp, synthetic construct; identical to SEQ ID NO: 77736
  misc_feature 1..1254: note = Description of Artificial Sequence: Synthetic coding sequence
  source 1..1254: mol_type = other DNA

SEQ ID NO: 77741 - DNA, 441 bp, synthetic construct
  misc_feature 1..441: note = Description of Artificial Sequence: Synthetic coding sequence
  source 1..441: mol_type = other DNA
atgcccgtgaaggtgagaaccggcagaagcatcagaggcctgagcctgccccccgcctgcaccagagccgagagaagagaggtggagagagtggtggtggacgccctgagcggcctgaagggcgacctggccggcagatactacagactgagcgagatgaccgaggccgagcagcagcagctgatcgacgaccacttcctgttcgacaagcccgtgagccccctgctgaccgccgccggcatggccagagactggcccgacgccagaggcatctggcacaacaacgagaagagcttcctgatctgggtgaacgaggaggaccacaccagagtgatcagcatggagaagggcggcaacatgaagagagtgttcgagagattctgcagaggcctgaaggaggtgagagaggactgcgtgggcgagctgggcggcagaacctag

SEQ ID NO: 77742 - DNA, 507 bp, synthetic construct
  misc_feature 1..507: note = Description of Artificial Sequence: Synthetic coding sequence
  source 1..507: mol_type = other DNA
atgaagcacaccaccgacctggacgccagcaagatcagaagcggctacttcgacgagagatacgtgctgagcagcagagtgagaaccggcagaagcatcagaggcctgagcctgccccccgcctgcaccagagccgagagaagagaggtggagagagtggtggtggacgccctgagcggcctgaagggcgacctggccggcagatactacagactgagcgagatgaccgaggccgagcagcagcagctgatcgacgaccacttcctgttcgacaagcccgtgagccccctgctgaccgccgccggcatggccagagactggcccgacgccagaggcatctggcacaacaacgagaagagcttcctgatctgggtgaacgaggaggaccacaccagagtgatcagcatggagaagggcggcaacatgaagagagtgttcgagagattctgcagaggcctgaaggaggtgagagaggactacgtgggcgagctgggcggcagaacctag

SEQ ID NO: 77743 - DNA, 312 bp, synthetic construct
  misc_feature 1..312: note = Description of Artificial Sequence: Synthetic coding sequence
  source 1..312: mol_type = other DNA
atggccggccccttcagcagactgctgagcgccagacccggcctgagactgctggccctggccggcgccggcagcctggccgccggcttcctgctgagacccgagcccgtgagagccgccagcgagagaagaagactgtacccccccagcgccgagtaccccgacctgagaaagcacaacaactgcatggccagccacctgacccccgccgtgtacgccagactgtgcgacaagaccacccccaccggctggaccctggaccagtgcatccagaccggcgtggacaaccccggccaccccttcatcaagtag

SEQ ID NO: 77744 - DNA, 390 bp, synthetic construct
  misc_feature 1..390: note = Description of Artificial Sequence: Synthetic coding sequence
  source 1..390: mol_type = other DNA
atggccggccccttcagcagactgctgagcgccagacccggcctgagactgctggccctggccggcgccggcagcctggccgccggcttcctgctgagacccgagcccgtgagagccgccagcgagagaagaagactgtacccccccagcgccgagtaccccgacctgagaaagcacaacaactgcatggccagccacctgacccccgccgtgtacgccagactgtgcgacaagaccacccccaccggctggaccctggaccagtgcatccagaccggcgtggacaaccccggccaccccttcatcaagaccgtgggcatggtggccggcgacgaggagacctacgaggtgttcgccgacctgttcgaccccgtgatccaggagagatag

SEQ ID NO: 77745 - DNA, 1017 bp, synthetic construct
  misc_feature 1..1017: note = Description of Artificial Sequence: Synthetic coding sequence
  source 1..1017: mol_type = other DNA
atggccggccccttcagcagactgctgagcgccagacccggcctgagactgctggccctggccggcgccggcagcctggccgccggcttctgcagcgacagaaacctgtacgagctgcccgtgaacgacggcggctgcatccccagagagcagagccagacctggcccaccggccagctgcccggcaactgcaccagaagcagaagactgtgcccccccagcatggtgaccggctaccccctgcccagcgccgagtaccccgacctgagaaagcacaacaactgcatggccagccacctgacccccgccgtgtacgccagactgtgcgacaagaccacccccaccggctggaccctggaccagtgcatccagaccggcgtggacaaccccggccaccccttcatcaagaccgtgggcatggtggccggcgacgaggagacctacgaggtgttcgccgacctgttcgaccccgtgatccaggagagacacaacggctacgaccccagaaccatgaagcacaccaccgacctggacgccagcaagatcagaagcggctacttcgacgagagatacgtgctgagcagcagagtgagaaccggcagaagcatcagaggcctgagcctgccccccgcctgcaccagagccgagagaagagaggtggagagagtggtggtggacgccctgagcggcctgaagggcgacctggccggcagatactacagactgagcgagatgaccgaggccgagcagcagcagctgatcgacgaccacttcctgttcgacaagcccgtgagccccctgctgaccgccgccggcatggccagagactggcccgacgccagaggcatctggcacaacaacgagaagagcttcctgatctgggtgaacgaggaggaccacaccagagtgatcagcatggagaagggcggcaacatgaagagagtgttcgagagattctgcagaggcctgaaggaggtgagagaggactacgtgggcgagctgggcggcagaacctag

SEQ ID NO: 77746 - DNA, 1254 bp, synthetic construct; identical to SEQ ID NO: 77736
  misc_feature 1..1254: note = Description of Artificial Sequence: Synthetic coding sequence
  source 1..1254: mol_type = other DNA

SEQ ID NO: 77747 - DNA, 774 bp, synthetic construct
  misc_feature 1..774: note = Description of Artificial Sequence: Synthetic coding sequence
  source 1..774: mol_type = other DNA
atggtgaccggctaccccctgcccagcgccgagtaccccgacctgagaaagcacaacaactgcatggccagccacctgacccccgccgtgtacgccagactgtgcgacaagaccacccccaccggctggaccctggaccagtgcatccagaccggcgtggacaaccccggccaccccttcatcaagaccgtgggcatggtggccggcgacgaggagacctacgaggtgttcgccgacctgttcgaccccgtgatccaggagagacacaacggctacgaccccagaaccatgaagcacaccaccgacctggacgccagcaagatcagaagcggctacttcgacgagagatacgtgctgagcagcagagtgagaaccggcagaagcatcagaggcctgagcctgccccccgcctgcaccagagccgagagaagagaggtggagagagtggtggtggacgccctgagcggcctgaagggcgacctggccggcagatactacagactgagcgagatgaccgaggccgagcagcagcagctgatcgacgaccacttcctgttcgacaagcccgtgagccccctgctgaccgccgccggcatggccagagactggcccgacgccagaggcatctggcacaacaacgagaagagcttcctgatctgggtgaacgaggaggaccacaccagagtgatcagcatggagaagggcggcaacatgaagagagtgttcgagagattctgcagaggcctgaaggaggtggtggtgggcatcaagtag

SEQ ID NO: 77748 - DNA, 726 bp, synthetic construct
  misc_feature 1..726: note = Description of Artificial Sequence: Synthetic coding sequence
  source 1..726: mol_type = other DNA
atggccggccccttcagcagactgctgagcgccagacccggcctgagactgctggccctggccggcgccggcagcctggccgccggcttcctgctgagacccgagcccgtgagagccgccagcgagagaagaagactgtacccccccagcgccgagtaccccgacctgagaaagcacaacaactgcatggccagccacctgacccccgccgtgtacgccagactgtgcgacaagaccacccccaccggctggaccctggaccagtgcatccagaccggcgtggacaaccccggccaccccttcatcaagaccgtgggcatggtggccggcgacgaggagacctacgaggtgttcgccgacctgttcgaccccgtgatccaggagagacacaacggctacgaccccagaaccatgaagcacaccaccgacctggacgccagcaagatcagaagcggctacttcgacgagagatacgtgctgagcagcagagtgagaaccggcagaagcatcagaggcctgagcctgccccccgcctgcaccagagccgagagaagagaggtggagagagtggtggtggacgccctgagcggcctgaagggcgacctggccggcagatactacagactgagcgagatgaccgaggccgagcagcagcagctgatcgacgaccacttcctgttcgacaagcccgtgagccccctgctgaccgccgccggcatggcctag

SEQ ID NO: 77749 - DNA, 1260 bp, synthetic construct
  misc_feature 1..1260: note = Description of Artificial Sequence: Synthetic coding sequence
  source 1..1260: mol_type = other DNA
atggccagcatcttcagcaagctgctgaccggcagaaacgccagcctgctgttcgccaccatgggcaccagcgtgctgaccaccggctacctgctgaacagacagaaggtgtgcgccgaggtgagagagcagcccagactgttcccccccagcgccgactaccccgacctgagaaagcacaacaactgcatggccgagtgcctgacccccgccatctacgccaagctgagaaacaaggtgacccccaacggctacaccctggaccagtgcatccagaccggcgtggacaaccccggccaccccttcatcaagaccgtgggcatggtggccggcgacgaggagagctacgaggtgttcgccgacctgttcgaccccgtgatcaagctgagacacaacggctacgaccccagagtgatgaagcacaccaccgacctggacgccagcaagatcacccagggccagttcgacgagcactacgtgctgagcagcagagtgagaaccggcagaagcatcagaggcctgagcctgccccccgcctgcaccagagccgagagaagagaggtggagaacgtggccatcaccgccctggagggcctgaagggcgacctggccggcagatactacaagctgagcgagatgaccgagcaggaccagcagagactgatcgacgaccacttcctgttcgacaagcccgtgagccccctgctgacctgcgccggcatggccagagactggcccgacgccagaggcatctggcacaactacgacaagaccttcctgatctggatcaacgaggaggaccacaccagagtgatcagcatggagaagggcggcaacatgaagagagtgttcgagagattctgcagaggcctgaaggaggtggagagactgatccaggagagaggctgggagttcatgtggaacgagagactgggctacatcctgacctgccccagcaacctgggcaccggcctgagagccggcgtgcacgtgagaatccccaagctgagcaaggaccccagattcagcaagatcctggagaacctgagactgcagaagagaggcaccggcggcgtggacaccgccgccgtggccgacgtgtacgacatcagcaacatcgacagaatcggcagaagcgaggtggagctggtgcagatcgtgatcgacggcgtgaactacctggtggactgcgagaagaagctggagagaggccaggacatcaaggtgcccccccccctgccccagttcggcaagaagtag

SEQ ID NO: 77750 - DNA, 1260 bp, synthetic construct; identical to SEQ ID NO: 77749
  misc_feature 1..1260: note = Description of Artificial Sequence: Synthetic coding sequence
  source 1..1260: mol_type = other DNA

SEQ ID NO: 77751 - DNA, 1260 bp, synthetic construct; identical to SEQ ID NO: 77749
  misc_feature 1..1260: note = Description of Artificial Sequence: Synthetic coding sequence
  source 1..1260: mol_type = other DNA

SEQ ID NO: 77752 - DNA, 513 bp, synthetic construct
  misc_feature 1..513: note = Description of Artificial Sequence: Synthetic coding sequence
  source 1..513: mol_type = other DNA
atggccagcatcttcagcaagctgctgaccggcagaaacgccagcctgctgttcgccaccatgggcaccagcgtgctgaccaccggctacctgctgaacagacagaaggtgtgcgccgaggtgagagagcagcccagactgttcccccccagcgccgactaccccgacctgagaaagcacaacaactgcatggccgagtgcctgacccccgccatctacgccaagctgagaaacaaggtgacccccaacggctacaccctggaccagtgcatccagaccggcgtggacaaccccggccaccccttcatcaagaccgtgggcatggtggccggcgacgaggagagctacgaggtgttcgccgacctgttcgaccccgtgatcaagctgagacacaacggctacgaccccagagtgatgaagcacaccaccgacctggacgccagcaagatcacccagggccagttcgacgagcactacgtgctgagcagcagagtgagaaccggcagaagctag

SEQ ID NO: 77753 - DNA, 1098 bp, synthetic construct
  misc_feature 1..1098: note = Description of Artificial Sequence: Synthetic coding sequence
  source 1..1098: mol_type = other DNA
atgggcgtgcccagaccccagccctgggccctgggcctgctgctgttcctgctgcccggcagcctgggcgccgagagccacctgagcctgctgtaccacctgaccgccgtgagcagccccgcccccggcacccccgccttctgggtgagcggctggctgggcccccagcagtacctgagctacaacagcctgagaggcgaggccgagccctgcggcgcctgggtgtgggagaaccaggtgagctggtactgggagaaggagaccaccgacctgagaatcaaggagaagctgttcctggaggccttcaaggccctgggcggcaagggcccctacaccctgcagggcctgctgggctgcgagctgggccccgacaacaccagcgtgcccaccgccaagttcgccctgaacggcgaggagttcatgaacttcgacctgaagcagggcacctggggcggcgactggcccgaggccctggccatcagccagagatggcagcagcaggacaaggccgccaacaaggagctgaccttcctgctgttcagctgcccccacagactgagagagcacctggagagaggcagaggcaacctggagtggaaggagccccccagcatgagactgaaggccagacccagcagccccggcttcagcgtgctgacctgcagcgccttcagcttctacccccccgagctgcagctgagattcctgagaaacggcctggccgccggcaccggccagggcgacttcggccccaacagcgacggcagcttccacgccagcagcagcctgaccgtgaagagcggcgacgagcaccactactgctgcatcgtgcagcacgccggcctggcccagcccctgagagtggagctggagagccccgccaagagcagcgtgctggtggtgggcatcgtgatcggcgtgctgctgctgaccgccgccgccgtgggcggcgccctgctgtggagaagaatgagaagcggcctgcccgccccctggatcagcctgagaggcgacgacaccggcgtgctgctgcccacccccggcgaggcccaggacgccgacctgaaggacgtgaacgtgatccccgccaccgcctag

SEQ ID NO: 77754 - DNA, 7329 bp, synthetic construct
  misc_feature 1..7329: note = Description of Artificial Sequence: Synthetic coding sequence
  source 1..7329: mol_type = other DNA
atggccgagaacctgctggacggcccccccaaccccaagagagccaagctgagcagccccggcttcagcgccaacgacagcaccgacttcggcagcctgttcgacctggagaacgacctgcccgacgagctgatccccaacggcggcgagctgggcctgctgaacagcggcaacctggtgcccgacgccgccagcaagcacaagcagctgagcgagctgctgagaggcggcagcggcagcagcatcaaccccggcatcggcaacgtgagcgccagcagccccgtgcagcagggcctgggcggccaggcccagggccagcccaacagcgccaacatggccagcctgagcgccatgggcaagagccccctgagccagggcgacagcagcgcccccagcctgcccaagcaggccgccagcaccagcggccccacccccgccgccagccaggccctgaacccccaggcccagaagcaggtgggcctggccaccagcagccccgccaccagccagaccggccccggcatctgcatgaacgccaacttcaaccagacccaccccggcctgctgaacagcaacagcggccacagcctgatcaaccaggccagccagggccaggcccaggtgatgaacggcagcctgggcgccgccggcagaggcagaggcgccggcatgccctaccccacccccgccatgcagggcgccagcagcagcgtgctggccgagaccctgacccaggtgagcccccagatgaccggccacgccggcctgaacaccgcccaggccggcggcatggccaagatgggcatcaccggcaacaccagccccttcggccagcccttcagccaggccggcggccagcccatgggcgccaccggcgtgaacccccagctggccagcaagcagagcatggtgaacagcctgcccaccttccccaccgacatcaagaacaccagcgtgaccaacgtgcccaacatgagccagatgcagaccagcgtgggcatcgtgcccacccaggccatcgccaccggccccaccgccgaccccgagaagagaaagctgatccagcagcagctggtgctgctgctgcacgcccacaagtgccagagaagagagcaggccaacggcgaggtgagagcctgcagcctgccccactgcagaaccatgaagaacgtgctgaaccacatgacccactgccaggccggcaaggcctgccaggtggcccactgcgccagcagcagacagatcatcagccactggaagaactgcaccagacacgactgccccgtgtgcctgcccctgaagaacgccagcgacaagagaaaccagcagaccatcctgggcagccccgccagcggcatccagaacaccatcggcagcgtgggcaccggccagcagaacgccaccagcctgagcaaccccaaccccatcgaccccagcagcatgcagagagcctacgccgccctgggcctgccctacatgaaccagccccagacccagctgcagccccaggtgcccggccagcagcccgcccagccccagacccaccagcagatgagaaccctgaaccccctgggcaacaaccccatgaacatccccgccggcggcatcaccaccgaccagcagccccccaacctgatcagcgagagcgccctgcccaccagcctgggcgccaccaaccccctgatgaacgacggcagcaacagcggcaacatcggcaccctgagcaccatccccaccgccgccccccccagcagcaccggcgtgagaaagggctggcacgagcacgtgacccaggacctgagaagccacctggtgcacaagctggtgcaggccatcttccccacccccgaccccgccgccctgaaggacagaagaatggagaacctggtggcctacgccaagaaggtggagggcgacatgtacgagagcgccaacagcagagacgagtactaccacctgctggccgagaagatctacaagatccagaaggagctggaggagaagagaagaagcagactgcacaagcagggcatcctgggcaaccagcccgccctgcccgcccccggcgcccagccccccgtgatcccccaggcccagcccgtgagaccccccaacggccccctgagcctgcccgtgaacagaatgcaggtgagccagggcatgaacagcttcaaccccatgagcctgggcaacgtgcagctgccccaggcccccatgggccccagagccgccagccccatgaaccacagcgtgcagatgaacagcatgggcagcgtgcccggcatggccatcagccccagcagaatgccccagccccccaacatgatgggcgcccacaccaacaacatgatggcccaggcccccgcccagagccagttcctgccccagaaccagttccccagcagcagcggcgccatgagcgtgggcatgggccagccccccgcccagaccggcgtgagccagggccaggtgcccggcgccgccctgcccaaccccctgaacatgctgggcccccaggccagccagctgccctgcccccccgtgacccagagccccctgcaccccacccccccccccgccagcaccgccgccggcatgcccagcctgcagcacaccaccccccccggcatgacccccccccagcccgccgcccccacccagcccagcacccccgtgagcagcagcggccagacccccacccccacccccggcagcgtgcccagcgccacccagacccagagcacccccaccgtgcaggccgccgcccaggcccaggtgaccccccagccccagacccccgtgcagccccccagcgtggccaccccccagagcagccagcagcagcccacccccgtgcacgcccagccccccggcacccccctgagccaggccgccgccagcatcgacaacagagtgcccacccccagcagcgtggccagcgccgagaccaacagccagcagcccggccccgacgtgcccgtgctggagatgaagaccgagacccaggccgaggacaccgagcccgaccccggcgagagcaagggcgagcccagaagcgagatgatggaggaggacctgcagggcgccagccaggtgaaggaggagaccgacatcgccgagcagaagagcgagcccatggaggtggacgagaagaagcccgaggtgaaggtggaggtgaaggaggaggaggagagcagcagcaacggcaccgccagccagagcaccagccccagccagcccagaaagaagatcttcaagcccgaggagctgagacaggccctgatgcccaccctggaggccctgtacagacaggaccccgagagcctgcccttcagacagcccgtggacccccagctgctgggcatccccgactacttcgacatcgtgaagaaccccatggacctgagcaccatcaagagaaagctggacaccggccagtaccaggagccctggcagtacgtggacgacgtgtggctgatgttcaacaacgcctggctgtacaacagaaagaccagcagagtgtacaagttctgcagcaagctggccgaggtgttcgagcaggagatcgaccccgtgatgcagagcctgggctactgctgcggcagaaagtacgagttcagcccccagaccctgtgctgctacggcaagcagctgtgcaccatccccagagacgccgcctactacagctaccagaacagataccacttctgcgagaagtgcttcaccgagatccagggcgagaacgtgaccctgggcgacgaccccagccagccccagaccaccatcagcaaggaccagttcgagaagaagaagaacgacaccctggaccccgagcccttcgtggactgcaaggagtgcggcagaaagatgcaccagatctgcgtgctgcactacgacatcatctggcccagcggcttcgtgtgcgacaactgcctgaagaagaccggcagacccagaaaggagaacaagttcagcgccaagagactgcagaccaccagactgggcaaccacctggaggacagagtgaacaagttcctgagaagacagaaccaccccgaggccggcgaggtgttcgtgagagtggtggccagcagcgacaagaccgtggaggtgaagcccggcatgaagagcagattcgtggacagcggcgagatgagcgagagcttcccctacagaaccaaggccctgttcgccttcgaggagatcgacggcgtggacgtgtgcttcttcggcatgcacgtgcaggagtacggcagcgactgccccccccccaacaccagaagagtgtacatcagctacctggacagcatccacttcttcagacccagatgcctgagaaccgccgtgtaccacgagatcctgatcggctacctggagtacgtgaagaagctgggctacgtgaccggccacatctgggcctgcccccccagcgagggcgacgactacatcttccactgccacccccccgaccagaagatccccaagcccaagagactgcaggagtggtacaagaagatgctggacaaggccttcgccgagagaatcatccacgactacaaggacatcttcaagcaggccaccgaggacagactgaccagcgccaaggagctgccctacttcgagggcgacttctggcccaacgtgctggaggagagcatcaaggagctggagcaggaggaggaggagagaaagaaggaggagagcaccgccgccagcgagaccaccgagggcagccagggcgacagcaagaacgccaagaagaagaacaacaagaagaccaacaagaacaagagcagcatcagcagagccaacaagaagaagcccagcatgcccaacgtgagcaacgacctgagccagaagctgtacgccaccatggagaagcacaaggaggtgttcttcgtgatccacctgcacgccggccccgtgatcaacaccctgccccccatcgtggaccccgaccccctgctgagctgcgacctgatggacggcagagacgccttcctgaccctggccagagacaagcactgggagttcagcagcctgagaagaagcaagtggagcaccctgtgcatgctggtggagctgcacacccagggccaggacagattcgtgtacacctgcaacgagtgcaagcaccacgtggagaccagatggcactgcaccgtgtgcgaggactacgacctgtgcatcaactgctacaacaccaagagccacgcccacaagatggtgaagtggggcctgggcctggacgacgagggcagcagccagggcgagccccagagcaagagcccccaggagagcagaagactgagcatccagagatgcatccagagcctggtgcacgcctgccagtgcagaaacgccaactgcagcctgcccagctgccagaagatgaagagagtggtgcagcacaccaagggctgcaagagaaagaccaacggcggctgccccgtgtgcaagcagctgatcgccctgtgctgctaccacgccaagcactgccaggagaacaagtgccccgtgcccttctgcctgaacatcaagcacaagctgagacagcagcagatccagcacagactgcagcaggcccagctgatgagaagaagaatggccaccatgaacaccagaaacgtgccccagcagagcctgcccagccccaccagcgccccccccggcacccccacccagcagcccagcaccccccagaccccccagccccccgcccagccccagcccagccccgtgagcatgagccccgccggcttccccagcgtggccagaacccagccccccaccaccgtgagcaccggcaagcccaccagccaggtgcccgccccccccccccccgcccagcccccccccgccgccgtggaggccgccagacagatcgagagagaggcccagcagcagcagcacctgtacagagtgaacatcaacaacagcatgccccccggcagaaccggcatgggcacccccggcagccagatggcccccgtgagcctgaacgtgcccagacccaaccaggtgagcggccccgtgatgcccagcatgccccccggccagtggcagcaggcccccctgccccagcagcagcccatgcccggcctgcccagacccgtgatcagcatgcaggcccaggccgccgtggccggccccagaatgcccagcgtgcagccccccagaagcatcagccccagcgccctgcaggacctgctgagaaccctgaagagccccagcagcccccagcagcagcagcaggtgctgaacatcctgaagagcaacccccagctgatggccgccttcatcaagcagagaaccgccaagtacgtggccaaccagcccggcatgcagccccagcccggcctgcagagccagcccggcatgcagccccagcccggcatgcaccagcagcccagcctgcagaacctgaacgccatgcaggccggcgtgcccagacccggcgtgcccccccagcagcaggccatgggcggcctgaacccccagggccaggccctgaacatcatgaaccccggccacaaccccaacatggccagcatgaacccccagtacagagagatgctgagaagacagctgctgcagcagcagcagcagcagcagcagcagcagcagcagcagcagcagcagcagcagggcagcgccggcatggccggcggcatggccggccacggccagttccagcagccccagggccccggcggctacccccccgccatgcagcagcagcagagaatgcagcagcacctgcccctgcagggcagcagcatgggccagatggccgcccagatgggccagctgggccagatgggccagcccggcctgggcgccgacagcacccccaacatccagcaggccctgcagcagagaatcctgcagcagcagcagatgaagcagcagatcggcagccccggccagcccaaccccatgagcccccagcagcacatgctgagcggccagccccaggccagccacctgcccggccagcagatcgccaccagcctgagcaaccaggtgagaagccccgcccccgtgcagagccccagaccccagagccagcccccccacagcagccccagccccagaatccagccccagcccagcccccaccacgtgagcccccagaccggcagcccccaccccggcctggccgtgaccatggccagcagcatcgaccagggccacctgggcaaccccgagcagagcgccatgctgccccagctgaacacccccagcagaagcgccctgagcagcgagctgagcctggtgggcgacaccaccggcgacaccctggagaagttcgtggagggcctgtag

SEQ ID NO: 77755 - DNA, 2934 bp, synthetic construct
  misc_feature 1..2934: note = Description of Artificial Sequence: Synthetic coding sequence
  source 1..2934: mol_type = other DNA
atgcacgtgcaggagtacggcagcgactgccccccccccaacaccagaagagtgtacatcagctacctggacagcatccacttcttcagacccagatgcctgagaaccgccgtgtaccacgagatcctgatcggctacctggagtacgtgaagaagctgggctacgtgaccggccacatctgggcctgcccccccagcgagggcgacgactacatcttccactgccacccccccgaccagaagatccccaagcccaagagactgcaggagtggtacaagaagatgctggacaaggccttcgccgagagaatcatccacgactacaaggacatcttcaagcaggccaccgaggacagactgaccagcgccaaggagctgccctacttcgagggcgacttctggcccaacgtgctggaggagagcatcaaggagctggagcaggaggaggaggagagaaagaaggaggagagcaccgccgccagcgagaccaccgaggtgttcttcgtgatccacctgcacgccggccccgtgatcaacaccctgccccccatcgtggaccccgaccccctgctgagctgcgacctgatggacggcagagacgccttcctgaccctggccagagacaagcactgggagttcagcagcctgagaagaagcaagtggagcaccctgtgcatgctggtggagctgcacacccagggccaggacagattcgtgtacacctgcaacgagtgcaagcaccacgtggagaccagatggcactgcaccgtgtgcgaggactacgacctgtgcatcaactgctacaacaccaagagccacgcccacaagatggtgaagtggggcctgggcctggacgacgagggcagcagccagggcgagccccagagcaagagcccccaggagagcagaagactgagcatccagagatgcatccagagcctggtgcacgcctgccagtgcagaaacgccaactgcagcctgcccagctgccagaagatgaagagagtggtgcagcacaccaagggctgcaagagaaagaccaacggcggctgccccgtgtgcaagcagctgatcgccctgtgctgctaccacgccaagcactgccaggagaacaagtgccccgtgcccttctgcctgaacatcaagcacaagctgagacagcagcagatccagcacagactgcagcaggcccagctgatgagaagaagaatggccaccatgaacaccagaaacgtgccccagcagagcctgcccagccccaccagcgccccccccggcacccccacccagcagcccagcaccccccagaccccccagccccccgcccagccccagcccagccccgtgagcatgagccccgccggcttccccagcgtggccagaacccagccccccaccaccgtgagcaccggcaagcccaccagccaggtgcccgccccccccccccccgcccagcccccccccgccgccgtggaggccgccagacagatcgagagagaggcccagcagcagcagcacctgtacagagtgaacatcaacaacagcatgccccccggcagaaccggcatgggcacccccggcagccagatggcccccgtgagcctgaacgtgcccagacccaaccaggtgagcggccccgtgatgcccagcatgccccccggccagtggcagcaggcccccctgccccagcagcagcccatgcccggcctgcccagacccgtgatcagcatgcaggcccaggccgccgtggccggccccagaatgcccagcgtgcagccccccagaagcatcagccccagcgccctgcaggacctgctgagaaccctgaagagccccagcagcccccagcagcagcagcaggtgctgaacatcctgaagagcaacccccagctgatggccgccttcatcaagcagagaaccgccaagtacgtggccaaccagcccggcatgcagccccagcccggcctgcagagccagcccggcatgcagccccagcccggcatgcaccagcagcccagcctgcagaacctgaacgccatgcaggccggcgtgcccagacccggcgtgcccccccagcagcaggccatgggcggcctgaacccccagggccaggccctgaacatcatgaaccccggccacaaccccaacatggccagcatgaacccccagtacagagagatgctgagaagacagctgctgcagcagcagcagcagcagcagcagcagcagcagcagcagcagcagcagcagcagggcagcgccggcatggccggcggcatggccggccacggccagttccagcagccccagggccccggcggctacccccccgccatgcagcagcagcagagaatgcagcagcacctgcccctgcagggcagcagcatgggccagatggccgcccagatgggccagctgggccagatgggccagcccggcctgggcgccgacagcacccccaacatccagcaggccctgcagcagagaatcctgcagcagcagcagatgaagcagcagatcggcagccccggccagcccaaccccatgagcccccagcagcacatgctgagcggccagccccaggccagccacctgcccggccagcagatcgccaccagcctgagcaaccaggtgagaagccccgcccccgtgcagagccccagaccccagagccagcccccccacagcagccccagccccagaatccagccccagcccagcccccaccacgtgagcccccagaccggcagcccccaccccggcctggccgtgaccatggccagcagcatcgaccagggccacctgggcaaccccgagcagagcgccatgctgccccagctgaacacccccagcagaagcgccctgagcagcgagctgagcctggtgggcgacaccaccggcgacaccctggagaagttcgtggagggcctgtag

SEQ ID NO: 77756 - DNA, 7215 bp, synthetic construct
  misc_feature 1..7215: note = Description of Artificial Sequence: Synthetic coding sequence
  source 1..7215: mol_type = other DNA
atggccgagaacctgctggacggcccccccaaccccaagagagccaagctgagcagccccggcttcagcgccaacgacagcaccgacttcggcagcctgttcgacctggagaacgacctgcccgacgagctgatccccaacggcggcgagctgggcctgctgaacagcggcaacctggtgcccgacgccgccagcaagcacaagcagctgagcgagctgctgagaggcggcagcggcagcagcatcaaccccggcatcggcaacgtgagcgccagcagccccgtgcagcagggcctgggcggccaggcccagggccagcccaacagcgccaacatggccagcctgagcgccatgggcaagagccccctgagccagggcgacagcagcgcccccagcctgcccaagcaggccgccagcaccagcggccccacccccgccgccagccaggccctgaacccccaggcccagaagcaggtgggcctggccaccagcagccccgccaccagccagaccggccccggcatctgcatgaacgccaacttcaaccagacccaccccggcctgctgaacagcaacagcggccacagcctgatcaaccaggccagccagggccaggcccaggtgatgaacggcagcctgggcgccgccggcagaggcagaggcgccggcatgccctaccccacccccgccatgcagggcgccagcagcagcgtgctggccgagaccctgacccaggtgagcccccagatgaccggccacgccggcctgaacaccgcccaggccggcggcatggccaagatgggcatcaccggcaacaccagccccttcggccagcccttcagccaggccggcggccagcccatgggcgccaccggcgtgaacccccagctggccagcaagcagagcatggtgaacagcctgcccaccttccccaccgacatcaagaacaccagcgtgaccaacgtgcccaacatgagccagatgcagaccagcgtgggcatcgtgcccacccaggccatcgccaccggccccaccgccgaccccgagaagagaaagctgatccagcagcagctggtgctgctgctgcacgcccacaagtgccagagaagagagcaggccaacggcgaggtgagagcctgcagcctgccccactgcagaaccatgaagaacgtgctgaaccacatgacccactgccaggccggcaaggcctgccaggccatcctgggcagccccgccagcggcatccagaacaccatcggcagcgtgggcaccggccagcagaacgccaccagcctgagcaaccccaaccccatcgaccccagcagcatgcagagagcctacgccgccctgggcctgccctacatgaaccagccccagacccagctgcagccccaggtgcccggccagcagcccgcccagccccagacccaccagcagatgagaaccctgaaccccctgggcaacaaccccatgaacatccccgccggcggcatcaccaccgaccagcagccccccaacctgatcagcgagagcgccctgcccaccagcctgggcgccaccaaccccctgatgaacgacggcagcaacagcggcaacatcggcaccctgagcaccatccccaccgccgccccccccagcagcaccggcgtgagaaagggctggcacgagcacgtgacccaggacctgagaagccacctggtgcacaagctggtgcaggccatcttccccacccccgaccccgccgccctgaaggacagaagaatggagaacctggtggcctacgccaagaaggtggagggcgacatgtacgagagcgccaacagcagagacgagtactaccacctgctggccgagaagatctacaagatccagaaggagctggaggagaagagaagaagcagactgcacaagcagggcatcctgggcaaccagcccgccctgcccgcccccggcgcccagccccccgtgatcccccaggcccagcccgtgagaccccccaacggccccctgagcctgcccgtgaacagaatgcaggtgagccagggcatgaacagcttcaaccccatgagcctgggcaacgtgcagctgccccaggcccccatgggccccagagccgccagccccatgaaccacagcgtgcagatgaacagcatgggcagcgtgcccggcatggccatcagccccagcagaatgccccagccccccaacatgatgggcgcccacaccaacaacatgatggcccaggcccccgcccagagccagttcctgccccagaaccagttccccagcagcagcggcgccatgagcgtgggcatgggccagccccccgcccagaccggcgtgagccagggccaggtgcccggcgccgccctgcccaaccccctgaacatgctgggcccccaggccagccagctgccctgcccccccgtgacccagagccccctgcaccccacccccccccccgccagcaccgccgccggcatgcccagcctgcagcacaccaccccccccggcatgacccccccccagcccgccgcccccacccagcccagcacccccgtgagcagcagcggccagacccccacccccacccccggcagcgtgcccagcgccacccagacccagagcacccccaccgtgcaggccgccgcccaggcccaggtgaccccccagccccagacccccgtgcagccccccagcgtggccaccccccagagcagccagcagcagcccacccccgtgcacgcccagccccccggcacccccctgagccaggccgccgccagcatcgacaacagagtgcccacccccagcagcgtggccagcgccgagaccaacagccagcagcccggccccgacgtgcccgtgctggagatgaagaccgagacccaggccgaggacaccgagcccgaccccggcgagagcaagggcgagcccagaagcgagatgatggaggaggacctgcagggcgccagccaggtgaaggaggagaccgacatcgccgagcagaagagcgagcccatggaggtggacgagaagaagcccgaggtgaaggtggaggtgaaggaggaggaggagagcagcagcaacggcaccgccagccagagcaccagccccagccagcccagaaagaagatcttcaagcccgaggagctgagacaggccctgatgcccaccctggaggccctgtacagacaggaccccgagagcctgcccttcagacagcccgtggacccccagctgctgggcatccccgactacttcgacatcgtgaagaaccccatggacctgagcaccatcaagagaaagctggacaccggccagtaccaggagccctggcagtacgtggacgacgtgtggctgatgttcaacaacgcctggctgtacaacagaaagaccagcagagtgtacaagttctgcagcaagctggccgaggtgttcgagcaggagatcgaccccgtgatgcagagcctgggctactgctgcggcagaaagtacgagttcagcccccagaccctgtgctgctacggcaagcagctgtgcaccatccccagagacgccgcctactacagctaccagaacagataccacttctgcgagaagtgcttcaccgagatccagggcgagaacgtgaccctgggcgacgaccccagccagccccagaccaccatcagcaaggaccagttcgagaagaagaagaacgacaccctggaccccgagcccttcgtggactgcaaggagtgcggcagaaagatgcaccagatctgcgtgctgcactacgacatcatctggcccagcggcttcgtgtgcgacaactgcctgaagaagaccggcagacccagaaaggagaacaagttcagcgccaagagactgcagaccaccagactgggcaaccacctggaggacagagtgaacaagttcctgagaagacagaaccaccccgaggccggcgaggtgttcgtgagagtggtggccagcagcgacaagaccgtggaggtgaagcccggcatgaagagcagattcgtggacagcggcgagatgagcgagagcttcccctacagaaccaaggccctgttcgccttcgaggagatcgacggcgtggacgtgtgcttcttcggcatgcacgtgcaggagtacggcagcgactgccccccccccaacaccagaagagtgtacatcagctacctggacagcatccacttcttcagacccagatgcctgagaaccgccgtgtaccacgagatcctgatcggctacctggagtacgtgaagaagctgggctacgtgaccggccacatctgggcctgcccccccagcgagggcgacgactacatcttccactgccacccccccgaccagaagatccccaagcccaagagactgcaggagtggtacaagaagatgctggacaaggccttcgccgagagaatcatccacgactacaaggacatcttcaagcaggccaccgaggacagactgaccagcgccaaggagctgccctacttcgagggcgacttctggcccaacgtgctggaggagagcatcaaggagctggagcaggaggaggaggagagaaagaaggaggagagcaccgccgccagcgagaccaccgagggcagccagggcgacagcaagaacgccaagaagaagaacaacaagaagaccaacaagaacaagagcagcatcagcagagccaacaagaagaagcccagcatgcccaacgtgagcaacgacctgagccagaagctgtacgccaccatggagaagcacaaggaggtgttcttcgtgatccacctgcacgccggccccgtgatcaacaccctgccccccatcgtggaccccgaccccctgctgagctgcgacctgatggacggcagagacgccttcctgaccctggccagagacaagcactgggagttcagcagcctgagaagaagcaagtggagcaccctgtgcatgctggtggagctgcacacccagggccaggacagattcgtgtacacctgcaacgagtgcaagcaccacgtggagaccagatggcactgcaccgtgtgcgaggactacgacctgtgcatcaactgctacaacaccaagagccacgcccacaagatggtgaagtggggcctgggcctggacgacgagggcagcagccagggcgagccccagagcaagagcccccaggagagcagaagactgagcatccagagatgcatccagagcctggtgcacgcctgccagtgcagaaacgccaactgcagcctgcccagctgccagaagatgaagagagtggtgcagcacaccaagggctgcaagagaaagaccaacggcggctgccccgtgtgcaagcagctgatcgccctgtgctgctaccacgccaagcactgccaggagaacaagtgccccgtgcccttctgcctgaacatcaagcacaagctgagacagcagcagatccagcacagactgcagcaggcccagctgatgagaagaagaatggccaccatgaacaccagaaacgtgccccagcagagcctgcccagccccaccagcgccccccccggcacccccacccagcagcccagcaccccccagaccccccagccccccgcccagccccagcccagccccgtgagcatgagccccgccggcttccccagcgtggccagaacccagccccccaccaccgtgagcaccggcaagcccaccagccaggtgcccgccccccccccccccgcccagcccccccccgccgccgtggaggccgccagacagatcgagagagaggcccagcagcagcagcacctgtacagagtgaacatcaacaacagcatgccccccggcagaaccggcatgggcacccccggcagccagatggcccccgtgagcctgaacgtgcccagacccaaccaggtgagcggccccgtgatgcccagcatgccccccggccagtggcagcaggcccccctgccccagcagcagcccatgcccggcctgcccagacccgtgatcagcatgcaggcccaggccgccgtggccggccccagaatgcccagcgtgcagccccccagaagcatcagccccagcgccctgcaggacctgctgagaaccctgaagagccccagcagcccccagcagcagcagcaggtgctgaacatcctgaagagcaacccccagctgatggccgccttcatcaagcagagaaccgccaagtacgtggccaaccagcccggcatgcagccccagcccggcctgcagagccagcccggcatgcagccccagcccggcatgcaccagcagcccagcctgcagaacctgaacgccatgcaggccggcgtgcccagacccggcgtgcccccccagcagcaggccatgggcggcctgaacccccagggccaggccctgaacatcatgaaccccggccacaaccccaacatggccagcatgaacccccagtacagagagatgctgagaagacagctgctgcagcagcagcagcagcagcagcagcagcagcagcagcagcagcagcagcagcagggcagcgccggcatggccggcggcatggccggccacggccagttccagcagccccagggccccggcggctacccccccgccatgcagcagcagcagagaatgcagcagcacctgcccctgcagggcagcagcatgggccagatggccgcccagatgggccagctgggccagatgggccagcccggcctgggcgccgacagcacccccaacatccagcaggccctgcagcagagaatcctgcagcagcagcagatgaagcagcagatcggcagccccggccagcccaaccccatgagcccccagcagcacatgctgagcggccagccccaggccagccacctgcccggccagcagatcgccaccagcctgagcaaccaggtgagaagccccgcccccgtgcagagccccagaccccagagccagcccccccacagcagccccagccccagaatccagccccagcccagcccccaccacgtgagcccccagaccggcagcccccaccccggcctggccgtgaccatggccagcagcatcgaccagggccacctgggcaaccccgagcagagcgccatgctgccccagctgaacacccccagcagaagcgccctgagcagcgagctgagcctggtgggcgacaccaccggcgacaccctggagaagttcgtggagggcctgtag

SEQ ID NO: 77757 - DNA, 7419 bp, synthetic construct
  misc_feature 1..7419: note = Description of Artificial Sequence: Synthetic coding sequence
  source 1..7419: mol_type = other DNA
ctgagaggcgccgtggccgtggccgagatctggccccccccccccccccccggcctgagaccccccagccccagcgcccccgccagacccctggccgccagagccagaagcagccccagccagcccgccggcccccccacccccgtgagagccctggccggccccgccgccagagccagaggctgcttcagagagcaggtgaagatggccgagaacctgctggacggcccccccaaccccaagagagccaagctgagcagccccggcttcagcgccaacgacagcaccgacttcggcagcctgttcgacctggagaacgacctgcccgacgagctgatccccaacggcggcgagctgggcctgctgaacagcggcaacctggtgcccgacgccgccagcaagcacaagcagctgagcgagctgctgagaggcggcagcggcagcagcatcaaccccggcatcggcaacgtgagcgccagcagccccgtgcagcagggcctgggcggccaggcccagggccagcccaacagcgccaacatggccagcctgagcgccatgggcaagagccccctgagccagggcgacagcagcgcccccagcctgcccaagcaggccgccagcaccagcggccccacccccgccgccagccaggccctgaacccccaggcccagaagcaggtgggcctggccaccagcagccccgccaccagccagaccggccccggcatctgcatgaacgccaacttcaaccagacccaccccggcctgctgaacagcaacagcggccacagcctgatcaaccaggccagccagggccaggcccaggtgatgaacggcagcctgggcgccgccggcagaggcagaggcgccggcatgccctaccccacccccgccatgcagggcgccagcagcagcgtgctggccgagaccctgacccaggtgagcccccagatgaccggccacgccggcctgaacaccgcccaggccggcggcatggccaagatgggcatcaccggcaacaccagccccttcggccagcccttcagccaggccggcggccagcccatgggcgccaccggcgtgaacccccagctggccagcaagcagagcatggtgaacagcctgcccaccttccccaccgacatcaagaacaccagcgtgaccaacgtgcccaacatgagccagatgcagaccagcgtgggcatcgtgcccacccaggccatcgccaccggccccaccgccgaccccgagaagagaaagctgatccagcagcagctggtgctgctgctgcacgcccacaagtgccagagaagagagcaggccaacggcgaggtgagagcctgcagcctgccccactgcagaaccatgaagaacgtgctgaaccacatgacccactgccaggccggcaaggcctgccaggccatcctgggcagccccgccagcggcatccagaacaccatcggcagcgtgggcaccggccagcagaacgccaccagcctgagcaaccccaaccccatcgaccccagcagcatgcagagagcctacgccgccctgggcctgccctacatgaaccagccccagacccagctgcagccccaggtgcccggccagcagcccgcccagccccagacccaccagcagatgagaaccctgaaccccctgggcaacaaccccatgaacatccccgccggcggcatcaccaccgaccagcagccccccaacctgatcagcgagagcgccctgcccaccagcctgggcgccaccaaccccctgatgaacgacggcagcaacagcggcaacatcggcaccctgagcaccatccccaccgccgccccccccagcagcaccggcgtgagaaagggctggcacgagcacgtgacccaggacctgagaagccacctggtgcacaagctggtgcaggccatcttccccacccccgaccccgccgccctgaaggacagaagaatggagaacctggtggcctacgccaagaaggtggagggcgacatgtacgagagcgccaacagcagagacgagtactaccacctgctggccgagaagatctacaagatccagaaggagctggaggagaagagaagaagcagactgcacaagcagggcatcctgggcaaccagcccgccctgcccgcccccggcgcccagccccccgtgatcccccaggcccagcccgtgagaccccccaacggccccctgagcctgcccgtgaacagaatgcaggtgagccagggcatgaacagcttcaaccccatgagcctgggcaacgtgcagctgccccaggcccccatgggccccagagccgccagccccatgaaccacagcgtgcagatgaacagcatgggcagcgtgcccggcatggccatcagccccagcagaatgccccagccccccaacatgatgggcgcccacaccaacaacatgatggcccaggcccccgcccagagccagttcctgccccagaaccagttccccagcagcagcggcgccatgagcgtgggcatgggccagccccccgcccagaccggcgtgagccagggccaggtgcccggcgccgccctgcccaaccccctgaacatgctgggcccccaggccagccagctgccctgcccccccgtgacccagagccccctgcaccccacccccccccccgccagcaccgccgccggcatgcccagcctgcagcacaccaccccccccggcatgacccccccccagcccgccgcccccacccagcccagcacccccgtgagcagcagcggccagacccccacccccacccccggcagcgtgcccagcgccacccagacccagagcacccccaccgtgcaggccgccgcccaggcccaggtgaccccccagccccagacccccgtgcagccccccagcgtggccaccccccagagcagccagcagcagcccacccccgtgcacgcccagccccccggcacccccctgagccaggccgccgccagcatcgacaacagagtgcccacccccagcagcgtggccagcgccgagaccaacagccagcagcccggccccgacgtgcccgtgctggagatgaagaccgagacccaggccgaggacaccgagcccgaccccggcgagagcaagggcgagcccagaagcgagatgatggaggaggacctgcagggcgccagccaggtgaaggaggagaccgacatcgccgagcagaagagcgagcccatggaggtggacgagaagaagcccgaggtgaaggtggaggtgaaggaggaggaggagagcagcagcaacggcaccgccagccagagcaccagccccagccagcccagaaagaagatcttcaagcccgaggagctgagacaggccctgatgcccaccctggaggccctgtacagacaggaccccgagagcctgcccttcagacagcccgtggacccccagctgctgggcatccccgactacttcgacatcgtgaagaaccccatggacctgagcaccatcaagagaaagctggacaccggccagtaccaggagccctggcagtacgtggacgacgtgtggctgatgttcaacaacgcctggctgtacaacagaaagaccagcagagtgtacaagttctgcagcaagctggccgaggtgttcgagcaggagatcgaccccgtgatgcagagcctgggctactgctgcggcagaaagtacgagttcagcccccagaccctgtgctgctacggcaagcagctgtgcaccatccccagagacgccgcctactacagctaccagaacagataccacttctgcgagaagtgcttcaccgagatccagggcgagaacgtgaccctgggcgacgaccccagccagccccagaccaccatcagcaaggaccagttcgagaagaagaagaacgacaccctggaccccgagcccttcgtggactgcaaggagtgcggcagaaagatgcaccagatctgcgtgctgcactacgacatcatctggcccagcggcttcgtgtgcgacaactgcctgaagaagaccggcagacccagaaaggagaacaagttcagcgccaagagactgcagaccaccagactgggcaaccacctggaggacagagtgaacaagttcctgagaagacagaaccaccccgaggccggcgaggtgttcgtgagagtggtggccagcagcgacaagaccgtggaggtgaagcccggcatgaagagcagattcgtggacagcggcgagatgagcgagagcttcccctacagaaccaaggccctgttcgccttcgaggagatcgacggcgtggacgtgtgcttcttcggcatgcacgtgcaggagtacggcagcgactgccccccccccaacaccagaagagtgtacatcagctacctggacagcatccacttcttcagacccagatgcctgagaaccgccgtgtaccacgagatcctgatcggctacctggagtacgtgaagaagctgggctacgtgaccggccacatctgggcctgcccccccagcgagggcgacgactacatcttccactgccacccccccgaccagaagatccccaagcccaagagactgcaggagtggtacaagaagatgctggacaaggccttcgccgagagaatcatccacgactacaaggacatcttcaagcaggccaccgaggacagactgaccagcgccaaggagctgccctacttcgagggcgacttctggcccaacgtgctggaggagagcatcaaggagctggagcaggaggaggaggagagaaagaaggaggagagcaccgccgccagcgagaccaccgagggcagccagggcgacagcaagaacgccaagaagaagaacaacaagaagaccaacaagaacaagagcagcatcagcagagccaacaagaagaagcccagcatgcccaacgtgagcaacgacctgagccagaagctgtacgccaccatggagaagcacaaggaggtgttcttcgtgatccacctgcacgccggccccgtgatcaacaccctgccccccatcgtggaccccgaccccctgctgagctgcgacctgatggacggcagagacgccttcctgaccctggccagagacaagcactgggagttcagcagcctgagaagaagcaagtggagcaccctgtgcatgctggtggagctgcacacccagggccaggacagattcgtgtacacctgcaacgagtgcaagcaccacgtggagaccagatggcactgcaccgtgtgcgaggactacgacctgtgcatcaactgctacaacaccaagagccacgcccacaagatggtgaagtggggcctgggcctggacgacgagggcagcagccagggcgagccccagagcaagagcccccaggagagcagaagactgagcatccagagatgcatccagagcctggtgcacgcctgccagtgcagaaacgccaactgcagcctgcccagctgccagaagatgaagagagtggtgcagcacaccaagggctgcaagagaaagaccaacggcggctgccccgtgtgcaagcagctgatcgccctgtgctgctaccacgccaagcactgccaggagaacaagtgccccgtgcccttctgcctgaacatcaagcacaagctgagacagcagcagatccagcacagactgcagcaggcccagctgatgagaagaagaatggccaccatgaacaccagaaacgtgccccagcagagcctgcccagccccaccagcgccccccccggcacccccacccagcagcccagcaccccccagaccccccagccccccgcccagccccagcccagccccgtgagcatgagccccgccggcttccccagcgtggccagaacccagccccccaccaccgtgagcaccggcaagcccaccagccaggtgcccgccccccccccccccgcccagcccccccccgccgccgtggaggccgccagacagatcgagagagaggcccagcagcagcagcacctgtacagagtgaacatcaacaacagcatgccccccggcagaaccggcatgggcacccccggcagccagatggcccccgtgagcctgaacgtgcccagacccaaccaggtgagcggccccgtgatgcccagcatgccccccggccagtggcagcaggcccccctgccccagcagcagcccatgcccggcctgcccagacccgtgatcagcatgcaggcccaggccgccgtggccggccccagaatgcccagcgtgcagccccccagaagcatcagccccagcgccctgcaggacctgctgagaaccctgaagagccccagcagcccccagcagcagcagcaggtgctgaacatcctgaagagcaacccccagctgatggccgccttcatcaagcagagaaccgccaagtacgtggccaaccagcccggcatgcagccccagcccggcctgcagagccagcccggcatgcagccccagcccggcatgcaccagcagcccagcctgcagaacctgaacgccatgcaggccggcgtgcccagacccggcgtgcccccccagcagcaggccatgggcggcctgaacccccagggccaggccctgaacatcatgaaccccggccacaaccccaacatggccagcatgaacccccagtacagagagatgctgagaagacagctgctgcagcagcagcagcagcagcagcagcagcagcagcagcagcagcagcagcagcagggcagcgccggcatggccggcggcatggccggccacggccagttccagcagccccagggccccggcggctacccccccgccatgcagcagcagcagagaatgcagcagcacctgcccctgcagggcagcagcatgggccagatggccgcccagatgggccagctgggccagatgggccagcccggcctgggcgccgacagcacccccaacatccagcaggccctgcagcagagaatcctgcagcagcagcagatgaagcagcagatcggcagccccggccagcccaaccccatgagcccccagcagcacatgctgagcggccagccccaggccagccacctgcccggccagcagatcgccaccagcctgagcaaccaggtgagaagccccgcccccgtgcagagccccagaccccagagccagcccccccacagcagccccagccccagaatccagccccagcccagcccccaccacgtgagcccccagaccggcagcccccaccccggcctggccgtgaccatggccagcagcatcgaccagggccacctgggcaaccccgagcagagcgccatgctgccccagctgaacacccccagcagaagcgccctgagcagcgagctgagcctggtgggcgacaccaccggcgacaccctggagaagttcgtggagggcctgtag

SEQ ID NO: 77758 - DNA, 1782 bp, synthetic construct
  misc_feature 1..1782: note = Description of Artificial Sequence: Synthetic coding sequence
  source 1..1782: mol_type = other DNA
atggccaccagcaacaaccccagaaagttcagcgagaagatcgccctgcacaaccagaagcaggccgaggagaccgccgccttcgaggaggtgatgaaggacctgagcctgaccagagccgccagactgcagctgcagaagagccagtacctgcagctgggccccagcagaggccagtactacggcggcagcctgcccaacgtgaaccagatcggcagcggcaccatggacctgcccttccagacccccttccagagcagcggcctggacaccagcagaaccaccagacaccacggcctggtggacagagtgtacagagagagaggcagactgggcagcccccacagaagacccctgagcgtggacaagcacggcagacaggccgacagctgcccctacggcaccatgtacctgagcccccccgccgacaccagctggagaagaaccaacagcgacagcgccctgcaccagagcaccatgacccccacccagcccgagagcttcagcagcggcagccaggacgtgcaccagaagagagtgctgctgctgaccgtgcccggcatggaggagaccaccagcgaggccgacaagaacctgagcaagcaggcctgggacaccaagaagaccggcagcagacccaagagctgcgaggtgcccggcatcaacatcttccccagcgccgaccaggagaacaccaccgccctgatccccgccacccacaacaccggcggcagcctgcccgacctgaccaacatccacttccccagccccctgcccacccccctggaccccgaggagcccaccttccccgccctgagcagcagcagcagcaccggcaacctggccgccaacctgacccacctgggcatcggcggcgccggccagggcatgagcacccccggcagcagcccccagcacagacccgccggcgtgagccccctgagcctgagcaccgaggccagaagacagcaggccagccccaccctgagccccctgagccccatcacccaggccgtggccatggacgccctgagcctggagcagcagctgccctacgccttcttcacccaggccggcagccagcagccccccccccagccccagcccccccccccccccccccccgccagccagcagccccccccccccccccccccccaggcccccgtgagactgccccccggcggccccctgctgcccagcgccagcctgaccagaggcccccagcccccccccctggccgtgaccgtgcccagcagcctgccccagagcccccccgagaaccccggccagcccagcatgggcatcgacatcgccagcgcccccgccctgcagcagtacagaaccagcgccggcagccccgccaaccagagccccaccagccccgtgagcaaccagggcttcagccccggcagcagcccccagctggagcagttcaacatgatggagaacgccatcagcagcagcagcctgtacagccccggcagcaccctgaactacagccaggccgccatgatgggcctgaccggcagccacggcagcctgcccgacagccagcagctgggctacgccagccacagcggcatccccaacatcatcctgaccgtgaccggcgagagcccccccagcctgagcaaggagctgaccagccacagaggccacctgcccgacggcccccccgtgagcggccacgccggcaccctgcccctgagcagacccgacggcgccagccccgccagaggcagaccctgcagcgtgcccagacagagacccagcctgtag

SEQ ID NO: 77759 - DNA, 1905 bp, synthetic construct
  misc_feature 1..1905: note = Description of Artificial Sequence: Synthetic coding sequence
  source 1..1905: mol_type = other DNA
atggccaccagcaacaaccccagaaagttcagcgagaagatcgccctgcacaaccagaagcaggccgaggagaccgccgccttcgaggaggtgatgaaggacctgagcctgaccagagccgccagactgcagctgcagaagagccagtacctgcagctgggccccagcagaggccagtactacggcggcagcctgcccaacgtgaaccagatcggcagcggcaccatggacctgcccttccagacccccttccagagcagcggcctggacaccagcagaaccaccagacaccacggcctggtggacagagtgtacagagagagaggcagactgggcagcccccacagaagacccctgagcgtggacaagcacggcagacaggccgacagctgcccctacggcaccatgtacctgagcccccccgccgacaccagctggagaagaaccaacagcgacagcgccctgcaccagagcaccatgacccccacccagcccgagagcttcagcagcggcagccaggacgtgcaccagaagagagtgctgctgctgaccgtgcccggcatggaggagaccaccagcgaggccgacaagaacctgagcaagcaggcctgggacaccaagaagaccggcagcagacccaagagctgcgaggtgcccggcatcaacatcttccccagcgccgaccaggagaacaccaccgccctgatccccgccacccacaacaccggcggcagcctgcccgacctgaccaacatccacttccccagccccctgcccacccccctggaccccgaggagcccaccttccccgccctgagcagcagcagcagcaccggcaacctggccgccaacctgacccacctgggcatcggcggcgccggccagggcatgagcacccccggcagcagcccccagcacagacccgccggcgtgagccccctgagcctgagcaccgaggccagaagacagcaggccagccccaccctgagccccctgagccccatcacccaggccgtggccatggacgccctgagcctggagcagcagctgccctacgccttcttcacccaggccggcagccagcagccccccccccagccccagcccccccccccccccccccccgccagccagcagccccccccccccccccccccccaggcccccgtgagactgccccccggcggccccctgctgcccagcgccagcctgaccagaggcccccagcccccccccctggccgtgaccgtgcccagcagcctgccccagagcccccccgagaaccccggccagcccagcatgggcatcgacatcgccagcgcccccgccctgcagcagtacagaaccagcgccggcagccccgccaaccagagccccaccagccccgtgagcaaccagggcttcagccccggcagcagcccccagcacaccagcaccctgggcagcgtgttcggcgacgcctactacgagcagcagatggccgccagacaggccaacgccctgagccaccagctggagcagttcaacatgatggagaacgccatcagcagcagcagcctgtacagccccggcagcaccctgaactacagccaggccgccatgatgggcctgaccggcagccacggcagcctgcccgacagccagcagctgggctacgccagccacagcggcatccccaacatcatcctgaccgtgaccggcgagagcccccccagcctgagcaaggagctgaccagcagcctggccggcgtgggcgacgtgagcttcgacagcgacagccagttccccctggacgagctgaagatcgaccccctgaccctggacggcctgcacatgctgaacgaccccgacatggtgctggccgaccccgccaccgaggacaccttcagaatggacagactgtag

SEQ ID NO: 77760 - DNA, 1953 bp, synthetic construct
  misc_feature 1..1953: note = Description of Artificial Sequence: Synthetic coding sequence
  source 1..1953: mol_type = other DNA
atggccaccagcaacaaccccagaaagttcagcgagaagatcgccctgcacaaccagaagcaggccgaggagaccgccgccttcgaggaggtgatgaaggacctgagcctgaccagagccgccagactgcagctgcagaagagccagtacctgcagctgggccccagcagaggccagtactacggcggcagcctgcccaacgtgaaccagatcggcagcggcaccatggacctgcccttccagcccagcggcttcctgggcgaggccctggccgccgcccccgtgagcctgacccccttccagagcagcggcctggacaccagcagaaccaccagacaccacggcctggtggacagagtgtacagagagagaggcagactgggcagcccccacagaagacccctgagcgtggacaagcacggcagacaggccgacagctgcccctacggcaccatgtacctgagcccccccgccgacaccagctggagaagaaccaacagcgacagcgccctgcaccagagcaccatgacccccacccagcccgagagcttcagcagcggcagccaggacgtgcaccagaagagagtgctgctgctgaccgtgcccggcatggaggagaccaccagcgaggccgacaagaacctgagcaagcaggcctgggacaccaagaagaccggcagcagacccaagagctgcgaggtgcccggcatcaacatcttccccagcgccgaccaggagaacaccaccgccctgatccccgccacccacaacaccggcggcagcctgcccgacctgaccaacatccacttccccagccccctgcccacccccctggaccccgaggagcccaccttccccgccctgagcagcagcagcagcaccggcaacctggccgccaacctgacccacctgggcatcggcggcgccggccagggcatgagcacccccggcagcagcccccagcacagacccgccggcgtgagccccctgagcctgagcaccgaggccagaagacagcaggccagccccaccctgagccccctgagccccatcacccaggccgtggccatggacgccctgagcctggagcagcagctgccctacgccttcttcacccaggccggcagccagcagccccccccccagccccagcccccccccccccccccccccgccagccagcagccccccccccccccccccccccaggcccccgtgagactgccccccggcggccccctgctgcccagcgccagcctgaccagaggcccccagcccccccccctggccgtgaccgtgcccagcagcctgccccagagcccccccgagaaccccggccagcccagcatgggcatcgacatcgccagcgcccccgccctgcagcagtacagaaccagcgccggcagccccgccaaccagagccccaccagccccgtgagcaaccagggcttcagccccggcagcagcccccagcacaccagcaccctgggcagcgtgttcggcgacgcctactacgagcagcagatggccgccagacaggccaacgccctgagccaccagctggagcagttcaacatgatggagaacgccatcagcagcagcagcctgtacagccccggcagcaccctgaactacagccaggccgccatgatgggcctgaccggcagccacggcagcctgcccgacagccagcagctgggctacgccagccacagcggcatccccaacatcatcctgaccgtgaccggcgagagcccccccagcctgagcaaggagctgaccagcagcctggccggcgtgggcgacgtgagcttcgacagcgacagccagttccccctggacgagctgaagatcgaccccctgaccctggacggcctgcacatgctgaacgaccccgacatggtgctggccgaccccgccaccgaggacaccttcagaatggacagactgtag

SEQ ID NO: 77761 - DNA, 2082 bp, synthetic construct
  misc_feature 1..2082: note = Description of Artificial Sequence: Synthetic coding sequence
  source 1..2082: mol_type = other DNA
atggccaccagcggcgccaacggccccggcagcgccaccgccagcgccagcaaccccagaaagttcagcgagaagatcgccctgcagaagcagagacaggccgaggagaccgccgccttcgaggaggtgatgatggacatcggcagcaccagactgcaggcccagaagctgagactggcctacaccagaagcagccactacggcggcagcctgcccaacgtgaaccagatcggcagcggcctggccgagttccagagccccctgcacagccccctggacagcagcagaagcaccagacaccacggcctggtggagagagtgcagagagaccccagaagaatggtgagccccctgagaagatacaccagacacatcgacagcagcccctacagccccgcctacctgagccccccccccgagagcagctggagaagaaccatggcctggggcaacttccccgccgagaagggccagctgttcagactgcccagcgccctgaacagaaccagcagcgacagcgccctgcacaccagcgtgatgaaccccagcccccaggacacctaccccggccccaccccccccagcatcctgcccagcagaagaggcggcatcctggacggcgagatggaccccaaggtgcccgccatcgaggagaacctgctggacgacaagcacctgctgaagccctgggacgccaagaagctgagcagcagcagcagcagacccagaagctgcgaggtgcccggcatcaacatcttccccagccccgaccagcccgccaacgtgcccgtgctgccccccgccatgaacaccggcggcagcctgcccgacctgaccaacctgcacttccccccccccctgcccacccccctggaccccgaggagaccgcctaccccagcctgagcggcggcaacagcaccagcaacctgacccacaccatgacccacctgggcatcagcagaggcatgggcctgggccccggctacgacgcccccggcctgcacagccccctgagccaccccagcctgcagagcagcctgagcaaccccaacctgcaggccagcctgagcagcccccagccccagctgcagggcagccacagccaccccagcctgcccgccagcagcctggccagacacgtgctgcccaccaccagcctgggccaccccagcctgagcgcccccgccctgagcagcagcagcagcagcagcagcaccagcagccccgtgctgggcgcccccagctaccccgccagcacccccggcgccagcccccaccacagaagagtgcccctgagccccctgagcctgctggccggccccgccgacgccagaagaagccagcagcagctgcccaagcagttcagccccaccatgagccccaccctgagcagcatcacccagggcgtgcccctggacaccagcaagctgagcaccgaccagagactgcccccctacccctacagcagccccagcctggtgctgcccacccagccccacacccccaagagcctgcagcagcccggcctgcccagccagagctgcagcgtgcagagcagcggcggccagccccccggcagacagagccactacggcaccccctacccccccggccccagcggccacggccagcagagctaccacagacccatgagcgacttcaacctgggcaacctggagcagttcagcatggagagccccagcgccagcctggtgctggacccccccggcttcagcgagggccccggcttcctgggcggcgagggccccatgggcggcccccaggacccccacaccttcaaccaccagaacctgacccactgcagcagacacggcagcggccccaacatcatcctgaccggcgacagcagccccggcttcagcaaggagatcgccgccgccctggccggcgtgcccggcttcgaggtgagcgccgccggcctggagctgggcctgggcctggaggacgagctgagaatggagcccctgggcctggagggcctgaacatgctgagcgacccctgcgccctgctgcccgaccccgccgtggaggagagcttcagaagcgacagactgcagtag

SEQ ID NO: 77762 - DNA, 1860 bp, synthetic construct
  misc_feature 1..1860: note = Description of Artificial Sequence: Synthetic coding sequence
  source 1..1860: mol_type = other DNA
atggccgccagccccggcagcggcagcgccaaccccagaaagttcagcgagaagatcgccctgcacacccagagacaggccgaggagaccagagccttcgagcagctgatgaccgacctgaccctgagcagagtgcagttccagaagctgcagcagctgagactgacccagtaccacggcggcagcctgcccaacgtgagccagctgagaagcagcgccagcgagttccagcccagcttccaccaggccgacaacgtgagaggcaccagacaccacggcctggtggagagacccagcagaaacagattccaccccctgcacagaagaagcggcgacaagcccggcagacagttcgacggcagcgccttcggcgccaactacagcagccagcccctggacgagagctggcccagacagcagcccccctggaaggacgagaagcaccccggcttcagactgaccagcgccctgaacagaaccaacagcgacagcgccctgcacaccagcgccctgagcaccaagccccaggacccctacggcggcggcggccagagcgcctggcccgccccctacatgggcttctgcgacggcgagaacaacggccacggcgaggtggccagcttccccggccccctgaaggaggagaacctgctgaacgtgcccaagcccctgcccaagcagctgtgggagaccaaggagatccagagcctgagcggcagacccagaagctgcgacgtgggcggcggcaacgccttcccccacaacggccagaacctgggcctgagccccttcctgggcaccctgaacaccggcggcagcctgcccgacctgaccaacctgcactacagcacccccctgcccgccagcctggacaccaccgaccaccacttcggcagcatgagcgtgggcaacagcgtgaacaacatccccgccgccatgacccacctgggcatcagaagcagcagcggcctgcagagcagcagaagcaaccccagcatccaggccaccctgaacaagaccgtgctgagcagcagcctgaacaaccacccccagaccagcgtgcccaacgccagcgccctgcaccccagcctgagactgttcagcctgagcaaccccagcctgagcaccaccaacctgagcggccccagcagaagaagacagccccccgtgagccccctgaccctgagccccggccccgaggcccaccagggcttcagcagacagctgagcagcaccagccccctggccccctaccccaccagccagatggtgagcagcgacagaagccagctgagcttcctgcccaccgaggcccaggcccaggtgagccccccccccccctaccccgccccccaggagctgacccagcccctgctgcagcagcccagagcccccgaggcccccgcccagcagccccaggccgccagcagcctgccccagagcgacttccagctgctgcccgcccagggcagcagcctgaccaacttcttccccgacgtgggcttcgaccagcagagcatgagacccggccccgccttcccccagcaggtgcccctggtgcagcagggcagcagagagctgcaggacagcttccacctgagacccagcccctacagcaactgcggcagcctgcccaacaccatcctgcccgaggacagcagcaccagcctgttcaaggacctgaacagcgccctggccggcctgcccgaggtgagcctgaacgtggacacccccttccccctggaggaggagctgcagatcgagcccctgagcctggacggcctgaacatgctgagcgacagcagcatgggcctgctggaccccagcgtggaggagaccttcagagccgacagactgtag

SEQ ID NO: 77763 - DNA, 1857 bp, synthetic construct
  misc_feature 1..1857: note = Description of Artificial Sequence: Synthetic coding sequence
  source 1..1857: mol_type = other DNA
atggccgccagccccggcagcggcagcgccaaccccagaaagttcagcgagaagatcgccctgcacacccagagacaggccgaggagaccagagccttcgagcagctgatgaccgacctgaccctgagcagagtgcagttccagaagctgcagcagctgagactgacccagtaccacggcggcagcctgcccaacgtgagccagctgagaagcagcgccagcgagttccagcccagcttccaccaggccgacaacgtgagaggcaccagacaccacggcctggtggagagacccagcagaaacagattccaccccctgcacagaagaagcggcgacaagcccggcagacagttcgacggcagcgccttcggcgccaactacagcagccagcccctggacgagagctggcccagacagcagcccccctggaaggacgagaagcaccccggcttcagactgaccagcgccctgaacagaaccaacagcgacagcgccctgcacaccagcgccctgagcaccaagccccaggacccctacggcggcggcggccagagcgcctggcccgccccctacatgggcttctgcgacggcgagaacaacggccacggcgaggtggccagcttccccggccccctgaaggaggagaacctgctgaacgtgcccaagcccctgcccaagcagctgtgggagaccaaggagatccagagcctgagcggcagacccagaagctgcgacgtgggcggcggcaacgccttcccccacaacggccagaacctgggcctgagccccttcctgggcaccctgaacaccggcggcagcctgcccgacctgaccaacctgcactacagcacccccctgcccgccagcctggacaccaccgaccaccacttcggcagcatgagcgtgggcaacagcgtgaacaacatccccgccgccatgacccacctgggcatcagaagcagcagcggcctgcagagcagcagaagcaaccccagcatccaggccaccctgaacaagaccgtgctgagcagcagcctgaacaaccacccccagaccagcgtgcccaacgccagcgccctgcaccccagcctgagactgttcagcctgagcaaccccagcctgagcaccaccaacctgagcggccccagcagaagaagacagccccccgtgagccccctgaccctgagccccggccccgaggcccaccagggcttcagcagacagctgagcagcaccagccccctggccccctaccccaccagccagatggtgagcagcgacagaagccagctgagcttcctgcccaccgaggcccaggcccaggtgagccccccccccccctaccccgccccccaggagctgacccagcccctgctgcagcagcccagagcccccgaggcccccgcccagcagccccaggccgccagcagcctgccccagagcgacttccagctgctgcccgcccagggcagcagcctgaccaacttcttccccgacgtgggcttcgaccagcagagcatgagacccggccccgccttcccccagcaggtgcccctggtgcagcagggcagcagagagctgcaggacagcttccacctgagacccagcccctacagcaactgcggcagcctgcccaacaccatcctgcccgacagcagcaccagcctgttcaaggacctgaacagcgccctggccggcctgcccgaggtgagcctgaacgtggacacccccttccccctggaggaggagctgcagatcgagcccctgagcctggacggcctgaacatgctgagcgacagcagcatgggcctgctggaccccagcgtggaggagaccttcagagccgacagactgtag

SEQ ID NO: 77764 - DNA, 1749 bp, synthetic construct
  misc_feature 1..1749: note = Description of Artificial Sequence: Synthetic coding sequence
  source 1..1749: mol_type = other DNA
atgaccgacctgaccctgagcagagtgcagttccagaagctgcagcagctgagactgacccagtaccacggcggcagcctgcccaacgtgagccagctgagaagcagcgccagcgagttccagcccagcttccaccaggccgacaacgtgagaggcaccagacaccacggcctggtggagagacccagcagaaacagattccaccccctgcacagaagaagcggcgacaagcccggcagacagttcgacggcagcgccttcggcgccaactacagcagccagcccctggacgagagctggcccagacagcagcccccctggaaggacgagaagcaccccggcttcagactgaccagcgccctgaacagaaccaacagcgacagcgccctgcacaccagcgccctgagcaccaagccccaggacccctacggcggcggcggccagagcgcctggcccgccccctacatgggcttctgcgacggcgagaacaacggccacggcgaggtggccagcttccccggccccctgaaggaggagaacctgctgaacgtgcccaagcccctgcccaagcagctgtgggagaccaaggagatccagagcctgagcggcagacccagaagctgcgacgtgggcggcggcaacgccttcccccacaacggccagaacctgggcctgagccccttcctgggcaccctgaacaccggcggcagcctgcccgacctgaccaacctgcactacagcacccccctgcccgccagcctggacaccaccgaccaccacttcggcagcatgagcgtgggcaacagcgtgaacaacatccccgccgccatgacccacctgggcatcagaagcagcagcggcctgcagagcagcagaagcaaccccagcatccaggccaccctgaacaagaccgtgctgagcagcagcctgaacaaccacccccagaccagcgtgcccaacgccagcgccctgcaccccagcctgagactgttcagcctgagcaaccccagcctgagcaccaccaacctgagcggccccagcagaagaagacagccccccgtgagccccctgaccctgagccccggccccgaggcccaccagggcttcagcagacagctgagcagcaccagccccctggccccctaccccaccagccagatggtgagcagcgacagaagccagctgagcttcctgcccaccgaggcccaggcccaggtgagccccccccccccctaccccgccccccaggagctgacccagcccctgctgcagcagcccagagcccccgaggcccccgcccagcagccccaggccgccagcagcctgccccagagcgacttccagctgctgcccgcccagggcagcagcctgaccaacttcttccccgacgtgggcttcgaccagcagagcatgagacccggccccgccttcccccagcaggtgcccctggtgcagcagggcagcagagagctgcaggacagcttccacctgagacccagcccctacagcaactgcggcagcctgcccaacaccatcctgcccgacagcagcaccagcctgttcaaggacctgaacagcgccctggccggcctgcccgaggtgagcctgaacgtggacacccccttccccctggaggaggagctgcagatcgagcccctgagcctggacggcctgaacatgctgagcgacagcagcatgggcctgctggaccccagcgtggaggagaccttcagagccgacagactgtag

SEQ ID NO: 77765 - DNA, 672 bp, synthetic construct
  misc_feature 1..672: note = Description of Artificial Sequence: Synthetic coding sequence
  source 1..672: mol_type = other DNA
atgacctggagacaccacgtgagactgctgttcaccgtgagcctggccctgcagatcatcaacctgggcaacagctaccagagagagaagcacaacggcggcagagaggaggtgaccaaggtggccacccagaagcacagacagagccccctgaactggaccagcagccacttcggcgaggtgaccggcagcgccgagggctggggccccgaggagcccctgccctacagcagagccttcggcgagggcgccagcgccagacccagatgctgcagaaacggcggcacctgcgtgctgggcagcttctgcgtgtgccccgcccacttcaccggcagatactgcgagcacgaccagagaagaagcgagtgcggcgccctggagcacggcgcctggaccctgagagcctgccacctgtgcagatgcatcttcggcgccctgcactgcctgcccctgcagacccccgacagatgcgaccccaaggacttcctggccagccacgcccacggccccagcgccggcggcgcccccagcctgctgctgctgctgccctgcgccctgctgcacagactgctgagacccgacgcccccgcccaccccagaagcctggtgcccagcgtgctgcagagagagagaagaccctgcggcagacccggcctgggccacagactgtag

SEQ ID NO: 77766 - DNA, 2511 bp, synthetic construct
  misc_feature 1..2511: note = Description of Artificial Sequence: Synthetic coding sequence
  source 1..2511: mol_type = other DNA
atgaccgccaccgtggagaacctgaccttccagaaggacaccctgggcaacgccgtggacaagaacagaagacacggcagcaccgagcccctggtgctggcctggagcagccagttcagaagactgacctggggctgcgccctggacgccctgcacagaagcccctgcgtggccgccagccagcacggcgtgacccacctgatcagaagcagcagaaccccccacagcaccagatgcagaaaggaggacgcccagcccggccaccacggcaacggcgccgccagcgtgaccgcccaggccagaggccagagaagcgtgctgcaggtgcccctgcccgtgcccagaagctgcctgttcagcgagagcttcgtggtgagcgtgagcagccagagcagattcctggccagcgtgcccggcaccggcgtgcagagaagcaccgccgccgacatggccgccagcaccgccgccggcaagcagagaatccccaaggtggccaaggtgaagaacaaggcccccgccgaggtgcagatcaccgccgagcagctgctgagagaggccaaggagagagagctggagctgctgcccccccccccccagcagaagatcaccgacgaggaggagctgaacgactacaagctgagaaagagaaagaccttcgaggacaacatcagaaagaacagaaccgtgatcagcaactggatcaagtacgcccagtgggaggagagcctgaaggagatccagagagccagaagcatctacgagagagccctggacgtggactacagaaacatcaccctgtggctgaagtacgccgagatggagatgaagaacagacaggtgaaccacgccagaaacatctgggacagagccatcaccaccctgcccagagtgaaccagttctggtacaagtacacctacatggaggagatgctgggcaacgtggccggcgccagacaggtgttcgagagatggatggagtggcagcccgaggagcaggcctggcacagctacatcaacttcgagctgagatacaaggaggtggacagagccagaaccatctacgagagattcgtgctggtgcaccccgacgtgaagaactggatcaagtacgccagattcgaggagaagcacgcctacttcgcccacgccagaaaggtgtacgagagagccgtggagttcttcggcgacgagcacatggacgagcacctgtacgtggccttcgccaagttcgaggagaaccagaaggagttcgagagagtgagagtgatctacaagtacgccctggacagaatcagcaagcaggacgcccaggagctgttcaagaactacaccatcttcgagaagaagttcggcgacagaagaggcatcgaggacatcatcgtgagcaagagaagattccagtacgaggaggaggtgaaggccaacccccacaactacgacgcctggttcgactacctgagactggtggagagcgacgccgaggccgaggccgtgagagaggtgtacgagagagccatcgccaacgtgccccccatccaggagaagagacactggaagagatacatctacctgtggatcaactacgccctgtacgaggagctggaggccaaggaccccgagagaaccagacaggtgtaccaggccagcctggagctgatcccccacaagaagttcaccttcgccaagatgtggatcctgtacgcccagttcgagatcagacagaagaacctgagcctggccagaagagccctgggcaccagcatcggcaagtgccccaagaacaagctgttcaaggtgtacatcgagctggagctgcagctgagagagttcgacagatgcagaaagctgtacgagaagttcctggagttcggccccgagaactgcaccagctggatcaagttcgccgagctggagaccatcctgggcgacatcgacagagccagagccatctacgagctggccatcagccagcccagactggacatgcccgaggtgctgtggaagagctacatcgacttcgagatcgagcaggaggagaccgagagaaccagaaacctgtacagaagactgctgcagagaacccagcacgtgaaggtgtggatcagcttcgcccagttcgagctgagcagcggcaaggagggcagcctgaccaagtgcagacagatctacgaggaggccaacaagaccatgagaaactgcgaggagaaggaggagagactgatgctgctggagagctggagaagcttcgaggaggagttcggcaccgccagcgacaaggagagagtggacaagctgatgcccgagaaggtgaagaagagaagaaaggtgcagaccgacgacggcagcgacgccggctgggaggagtacttcgactacatcttccccgaggacgccgccaaccagcccaacctgaagctgctggccatggccaagctgtggaagaagcagcagcaggagaaggaggacgccgagcaccaccccgacgaggacgtggacgagagcgagagctag

SEQ ID NO: 77767 - DNA, 2547 bp, synthetic construct
  misc_feature 1..2547: note = Description of Artificial Sequence: Synthetic coding sequence
  source 1..2547: mol_type = other DNA
atgaccgccaccgtggagaacctgaccttccagaaggacaccctgggcaacgccgtggacaagaacaccagcagactggagctgagaagctacagcctggccggcagacacggcagcaccgagcccctggtgctggcctggagcagccagttcagaagactgacctggggctgcgccctggacgccctgcacagaagcccctgcgtggccgccagccagcacggcgtgacccacctgatcagaagcagcagaaccccccacagcaccagatgcagaaaggaggacgcccagcccggccaccacggcaacggcgccgccagcgtgaccgcccaggccagaggccagagaagcgtgctgcaggtgcccctgcccgtgcccagaagctgcctgttcagcgagagcttcgtggtgagcgtgagcagccagagcagattcctggccagcgtgcccggcaccggcgtgcagagaagcaccgccgccgacatggccgccagcaccgccgccggcaagcagagaatccccaaggtggccaaggtgaagaacaaggcccccgccgaggtgcagatcaccgccgagcagctgctgagagaggccaaggagagagagctggagctgctgcccccccccccccagcagaagatcaccgacgaggaggagctgaacgactacaagctgagaaagagaaagaccttcgaggacaacatcagaaagaacagaaccgtgatcagcaactggatcaagtacgcccagtgggaggagagcctgaaggagatccagagagccagaagcatctacgagagagccctggacgtggactacagaaacatcaccctgtggctgaagtacgccgagatggagatgaagaacagacaggtgaaccacgccagaaacatctgggacagagccatcaccaccctgcccagagtgaaccagttctggtacaagtacacctacatggaggagatgctgggcaacgtggccggcgccagacaggtgttcgagagatggatggagtggcagcccgaggagcaggcctggcacagctacatcaacttcgagctgagatacaaggaggtggacagagccagaaccatctacgagagattcgtgctggtgcaccccgacgtgaagaactggatcaagtacgccagattcgaggagaagcacgcctacttcgcccacgccagaaaggtgtacgagagagccgtggagttcttcggcgacgagcacatggacgagcacctgtacgtggccttcgccaagttcgaggagaaccagaaggagttcgagagagtgagagtgatctacaagtacgccctggacagaatcagcaagcaggacgcccaggagctgttcaagaactacaccatcttcgagaagaagttcggcgacagaagaggcatcgaggacatcatcgtgagcaagagaagattccagtacgaggaggaggtgaaggccaacccccacaactacgacgcctggttcgactacctgagactggtggagagcgacgccgaggccgaggccgtgagagaggtgtacgagagagccatcgccaacgtgccccccatccaggagaagagacactggaagagatacatctacctgtggatcaactacgccctgtacgaggagctggaggccaaggaccccgagagaaccagacaggtgtaccaggccagcctggagctgatcccccacaagaagttcaccttcgccaagatgtggatcctgtacgcccagttcgagatcagacagaagaacctgagcctggccagaagagccctgggcaccagcatcggcaagtgccccaagaacaagctgttcaaggtgtacatcgagctggagctgcagctgagagagttcgacagatgcagaaagctgtacgagaagttcctggagttcggccccgagaactgcaccagctggatcaagttcgccgagctggagaccatcctgggcgacatcgacagagccagagccatctacgagctggccatcagccagcccagactggacatgcccgaggtgctgtggaagagctacatcgacttcgagatcgagcaggaggagaccgagagaaccagaaacctgtacagaagactgctgcagagaacccagcacgtgaaggtgtggatcagcttcgcccagttcgagctgagcagcggcaaggagggcagcctgaccaagtgcagacagatctacgaggaggccaacaagaccatgagaaactgcgaggagaaggaggagagactgatgctgctggagagctggagaagcttcgaggaggagttcggcaccgccagcgacaaggagagagtggacaagctgatgcccgagaaggtgaagaagagaagaaaggtgcagaccgacgacggcagcgacgccggctgggaggagtacttcgactacatcttccccgaggacgccgccaaccagcccaacctgaagctgctggccatggccaagctgtggaagaagcagcagcaggagaaggaggacgccgagcaccaccccgacgaggacgtggacgagagcgagagctag

SEQ ID NO: 77768 - DNA, 7026 bp, synthetic construct
  misc_feature 1..7026: note = Description of Artificial Sequence: Synthetic coding sequence
  source 1..7026: mol_type = other DNA
atgaagaacatctactgcctgatccccaagctggtgaacttcgccaccctgggctgcctgtggatcagcgtggtgcagtgcaccgtgctgaacagctgcctgaagagctgcgtgaccaacctgggccagcagctggacctgggcaccccccacaacctgagcgagccctgcatccagggctgccacttctggaacagcgtggaccagaagaactgcgccctgaagtgcaacgacacctacgccaccgtgtgcgagagagagagctgcgaggtgggctgcagcagcgccgagggcgcctacgaggaggaggtgctggagaacgccgacctgcccaccgcccccttcgccagcagcatcggcagccacaacatgaccctgagatggaagagcgccaacttcagcggcgtgaagtacatcatccagtggaagtacgcccagctgctgggcagctggacctacaccaagaccgtgagcagacccagctacgtggtgaagcccctgcaccccttcaccgagtacatcttcagagtggtgtggatcttcaccgcccagctgcagctgtacagcccccccagccccagctacagaacccacccccacggcgtgcccgagaccgcccccctgatcagaaacatcgagagcagcagccccgacaccgtggaggtgagctgggaccccccccagttccccggcggccccatcctgggctacaacctgagactgatcagcaagaaccagaagctggacgccggcacccagagaaccagcttccagttctacagcaccctgcccaacaccatctacagattcagcatcgccgccgtgaacgaggtgggcgagggccccgaggccgagagcagcatcaccaccagcagcagcgccgtgcagcaggaggagcagtggctgttcctgagcagaaagaccagcctgagaaagagaagcctgaagcacctggtggacgaggcccactgcctgagactggacgccatctaccacaacatcaccggcatcagcgtggacgtgcaccagcagatcgtgtacttcagcgagggcaccctgatctgggccaagaaggccgccaacatgagcgacgtgagcgacctgagaatcttctacagaggcagcggcctgatcagcagcatcagcatcgactggctgtaccagagaatgtacttcatcatggacgagctggtgtgcgtgtgcgacctggagaactgcagcaacatcgaggagatcaccccccccagcatcagcgccccccagaagatcgtggccgacagctacaacggctacgtgttctacctgctgagagacggcatctacagagccgacctgcccgtgcccagcggcagatgcgccgaggccgtgagaatcgtggagagctgcaccctgaaggacttcgccatcaagccccaggccaagagaatcatctacttcaacgacaccgcccaggtgttcatgagcaccttcctggacggcagcgccagccacctgatcctgcccagaatccccttcgccgacgtgaagagcttcgcctgcgagaacaacgacttcctggtgaccgacggcaaggtgatcttccagcaggacgccctgagcttcaacgagttcatcgtgggctgcgacctgagccacatcgaggagttcggcttcggcaacctggtgatcttcggcagcagcagccagctgcaccccctgcccggcagaccccaggagctgagcgtgctgttcggcagccaccaggccctggtgcagtggaagccccccgccctggccatcggcgccagccccagcgcctggcagaactggacctacgaggtgaaggtgagcacccaggacccccccgaggtgacccacatcttcctgaacatcagcggcaccatgctgaacgtgcccgagctgcagagcgccatgaagtacaaggtgagcgtgagagccagcagccccaagagacccggcccctggagcgagcccagcgtgggcaccaccctggtgcccgccagcgagccccccttcatcatggccgtgaaggaggacggcctgtggagcaagcccctgaacagcttcggccccggcgagttcctgagcagcgacatcggcaacgtgagcgacatggactggtacaacaacagcctgtactacagcgacaccaagggcgacgtgttcgtgtggctgctgaacggcaccgacatcagcgagaactaccacctgcccagcatcgccggcgccggcgccctggccttcgagtggctgggccacttcctgtactgggccggcaagacctacgtgatccagagacagagcgtgctgaccggccacaccgacatcgtgacccacgtgaagctgctggtgaacgacatggtggtggacagcgtgggcggctacctgtactggaccaccctgtacagcgtggagagcaccagactgaacggcgagagcagcctggtgctgcagacccagccctggttcagcggcaagaaggtgatcgccctgaccctggacctgagcgacggcctgctgtactggctggtgcaggacagccagtgcatccacctgtacaccgccgtgctgagaggccagagcaccggcgacaccaccatcaccgagttcgccgcctggagcaccagcgagatcagccagaacgccctgatgtactacagcggcagactgttctggatcaacggcttcagaatcatcaccacccaggagatcggccagaagaccagcgtgagcgtgctggagcccgccagattcaaccagttcaccatcatccagaccagcctgaagcccctgcccggcaacttcagcttcacccccaaggtgatccccgacagcgtgcaggagagcagcttcagaatcgagggcaacgccagcagcttccagatcctgtggaacggcccccccgccgtggactggggcgtggtgttctacagcgtggagttcagcgcccacagcaagttcctggccagcgagcagcacagcctgcccgtgttcaccgtggagggcctggagccctacgccctgttcaacctgagcgtgaccccctacacctactggggcaagggccccaagaccagcctgagcctgagagcccccgagaccgtgcccagcgcccccgagaaccccagaatcttcatcctgcccagcggcaagtgctgcaacaagaacgaggtggtggtggagttcagatggaacaagcccaagcacgagaacggcgtgctgaccaagttcgagatcttctacaacatcagcaaccagagcatcaccaacaagacctgcgaggactggatcgccgtgaacgtgacccccagcgtgatgagcttccagctggagggcatgagccccagatgcttcatcgccttccaggtgagagccttcaccagcaagggccccggcccctacgccgacgtggtgaagagcaccaccagcgagatcaaccccttcccccacctgatcaccctgctgggcaacaagatcgtgttcctggacatggaccagaaccaggtggtgtggaccttcagcgccgagagagtgatcagcgccgtgtgctacaccgccgacaacgagatgggctactacgccgagggcgacagcctgttcctgctgcacctgcacaacagaagcagcagcgagctgttccaggacagcctggtgttcgacatcaccgtgatcaccatcgactggatcagcagacacctgtacttcgccctgaaggagagccagaacggcatgcaggtgttcgacgtggacctggagcacaaggtgaagtaccccagagaggtgaagatccacaacagaaacagcaccatcatcagcttcagcgtgtaccccctgctgagcagactgtactggaccgaggtgagcaacttcggctaccagatgttctactacagcatcatcagccacaccctgcacagaatcctgcagcccaccgccaccaaccagcagaacaagagaaaccagtgcagctgcaacgtgaccgagttcgagctgagcggcgccatggccatcgacaccagcaacctggagaagcccctgatctacttcgccaaggcccaggagatctgggccatggacctggagggctgccagtgctggagagtgatcaccgtgcccgccatgctgggcaagaccctggtgagcctgaccgtggacggcgacctgatctactggatcatcaccgccaaggacagcacccagatctaccaggccaagaagggcaacggcgccatcgtgagccaggtgaaggccctgagaagcagacacatcctggcctacagcagcgtgatgcagcccttccccgacaaggccttcctgagcctggccagcgacaccgtggagcccaccatcctgaacgccaccaacaccagcctgaccatcagactgcccctggccaagaccaacctgacctggtacggcatcaccagccccacccccacctacctggtgtactacgccgaggtgaacgacagaaagaacagcagcgacctgaagtacagaatcctggagttccaggacagcatcgccctgatcgaggacctgcagcccttcagcacctacatgatccagatcgccgtgaagaactactacagcgaccccctggagcacctgccccccggcaaggagatctggggcaagaccaagaacggcgtgcccgaggccgtgcagctgatcaacaccaccgtgagaagcgacaccagcctgatcatcagctggagagagagccacaagcccaacggccccaaggagagcgtgagataccagctggccatcagccacctggccctgatccccgagacccccctgagacagagcgagttccccaacggcagactgaccctgctggtgaccagactgagcggcggcaacatctacgtgctgaaggtgctggcctgccacagcgaggagatgtggtgcaccgagagccaccccgtgaccgtggagatgttcaacacccccgagaagccctacagcctggtgcccgagaacaccagcctgcagttcaactggaaggcccccctgaacgtgaacctgatcagattctgggtggagctgcagaagtggaagtacaacgagttctaccacgtgaagaccagctgcagccagggccccgcctacgtgtgcaacatcaccaacctgcagccctacaccagctacaacgtgagagtggtggtggtgtacaagaccggcgagaacagcaccagcctgcccgagagcttcaagaccaaggccggcgtgcccaacaagcccggcatccccaagctgctggagggcagcaagaacagcatccagtgggagaaggccgaggacaacggctgcagaatcacctactacatcctggagatcagaaagagcaccagcaacaacctgcagaaccagaacctgagatggaagatgaccttcaacggcagctgcagcagcgtgtgcacctggaagagcaagaacctgaagggcatcttccagttcagagtggtggccgccaacaacctgggcttcggcgagtacagcggcatcagcgagaacatcatcctggtgggcgacgacttctggatccccgagaccagcttcatcctgaccatcatcgtgggcatcttcctggtggtgaccatccccctgaccttcgtgtggcacagaagactgaagaaccagaagagcgccaaggagggcgtgaccgtgctgatcaacgaggacaaggagctggccgagctgagaggcctggccgccggcgtgggcctggccaacgcctgctacgccatccacaccctgcccacccaggaggagatcgagaacctgcccgccttccccagagagaagctgaccctgagactgctgctgggcagcggcgccttcggcgaggtgtacgagggcaccgccgtggacatcctgggcgtgggcagcggcgagatcaaggtggccgtgaagaccctgaagaagggcagcaccgaccaggagaagatcgagttcctgaaggaggcccacctgatgagcaagttcaaccaccccaacatcctgaagcagctgggcgtgtgcctgctgaacgagccccagtacatcatcctggagctgatggagggcggcgacctgctgacctacctgagaaaggccagaatggccaccttctacggccccctgctgaccctggtggacctggtggacctgtgcgtggacatcagcaagggctgcgtgtacctggagagaatgcacttcatccacagagacctggccgccagaaactgcctggtgagcgtgaaggactacaccagccccagaatcgtgaagatcggcgacttcggcctggccagagacatctacaagaacgactactacagaaagagaggcgagggcctgctgcccgtgagatggatggcccccgagagcctgatggacggcatcttcaccacccagagcgacgtgtggagcttcggcatcctgatctgggagatcctgaccctgggccaccagccctaccccgcccacagcaacctggacgtgctgaactacgtgcagaccggcggcagactggagccccccagaaactgccccgacgacctgtggaacctgatgacccagtgctgggcccaggagcccgaccagagacccaccttccacagaatccaggaccagctgcagctgttcagaaacttcttcctgaacagcatctacaagagcagagacgaggccaacaacagcggcgtgatcaacgagagcttcgagggcgaggacggcgacgtgatctgcctgaacagcgacgacatcatgcccgtggccctgatggagaccaagaacagagagggcctgaactacatggtgctggccaccgagtgcggccagggcgaggagaagagcgagggccccctgggcagccaggagagcgagagctgcggcctgagaaaggaggagaaggagccccacgccgacaaggacttctgccaggagaagcaggtggcctactgccccagcggcaagcccgagggcctgaactacgcctgcctgacccacagcggctacggcgacggcagcgactag

SEQ ID NO: 77769 - DNA, 7044 bp, synthetic construct
  misc_feature 1..7044: note = Description of Artificial Sequence: Synthetic coding sequence
  source 1..7044: mol_type = other DNA
atgaagaacatctactgcctgatccccaagctggtgaacttcgccaccctgggctgcctgtggatcagcgtggtgcagtgcaccgtgctgaacagctgcctgaagagctgcgtgaccaacctgggccagcagctggacctgggcaccccccacaacctgagcgagccctgcatccagggctgccacttctggaacagcgtggaccagaagaactgcgccctgaagtgcagagagagctgcgaggtgggctgcagcagcgccgagggcgcctacgaggaggaggtgctggagaacgccgacctgcccaccgcccccttcgccagcagcatcggcagccacaacatgaccctgagatggaagagcgccaacttcagcggcgtgaagtacatcatccagtggaagtacgcccagctgctgggcagctggacctacaccaagaccgtgagcagacccagctacgtggtgaagcccctgcaccccttcaccgagtacatcttcagagtggtgtggatcttcaccgcccagctgcagctgtacagcccccccagccccagctacagaacccacccccacggcgtgcccgagaccgcccccctgatcagaaacatcgagagcagcagccccgacaccgtggaggtgagctgggaccccccccagttccccggcggccccatcctgggctacaacctgagactgatcagcaagaaccagaagctggacgccggcacccagagaaccagcttccagttctacagcaccctgcccaacaccatctacagattcagcatcgccgccgtgaacgaggtgggcgagggccccgaggccgagagcagcatcaccaccagcagcagcgccgtgcagcaggaggagcagtggctgttcctgagcagaaagaccagcctgagaaagagaagcctgaagcacctggtggacgaggcccactgcctgagactggacgccatctaccacaacatcaccggcatcagcgtggacgtgcaccagcagatcgtgtacttcagcgagggcaccctgatctgggccaagaaggccgccaacatgagcgacgtgagcgacctgagaatcttctacagaggcagcggcctgatcagcagcatcagcatcgactggctgtaccagagaatgtacttcatcatggacgagctggtgtgcgtgtgcgacctggagaactgcagcaacatcgaggagatcaccccccccagcatcagcgccccccagaagatcgtggccgacagctacaacggctacgtgttctacctgctgagagacggcatctacagagccgacctgcccgtgcccagcggcagatgcgccgaggccgtgagaatcgtggagagctgcaccctgaaggacttcgccatcaagccccaggccaagagaatcatctacttcaacgacaccgcccaggtgttcatgagcaccttcctggacggcagcgccagccacctgatcctgcccagaatccccttcgccgacgtgaagagcttcgcctgcgagaacaacgacttcctggtgaccgacggcaaggtgatcttccagcaggacgccctgagcttcaacgagttcatcgtgggctgcgacctgagccacatcgaggagttcggcttcggcaacctggtgatcttcggcagcagcagccagctgcaccccctgcccggcagaccccaggagctgagcgtgctgttcggcagccaccaggccctggtgcagtggaagccccccgccctggccatcggcgccaacgtgatcctgatcagcgacatcatcgagctgttcgagctgggccccagcgcctggcagaactggacctacgaggtgaaggtgagcacccaggacccccccgaggtgacccacatcttcctgaacatcagcggcaccatgctgaacgtgcccgagctgcagagcgccatgaagtacaaggtgagcgtgagagccagcagccccaagagacccggcccctggagcgagcccagcgtgggcaccaccctggtgcccgccagcgagccccccttcatcatggccgtgaaggaggacggcctgtggagcaagcccctgaacagcttcggccccggcgagttcctgagcagcgacatcggcaacgtgagcgacatggactggtacaacaacagcctgtactacagcgacaccaagggcgacgtgttcgtgtggctgctgaacggcaccgacatcagcgagaactaccacctgcccagcatcgccggcgccggcgccctggccttcgagtggctgggccacttcctgtactgggccggcaagacctacgtgatccagagacagagcgtgctgaccggccacaccgacatcgtgacccacgtgaagctgctggtgaacgacatggtggtggacagcgtgggcggctacctgtactggaccaccctgtacagcgtggagagcaccagactgaacggcgagagcagcctggtgctgcagacccagccctggttcagcggcaagaaggtgatcgccctgaccctggacctgagcgacggcctgctgtactggctggtgcaggacagccagtgcatccacctgtacaccgccgtgctgagaggccagagcaccggcgacaccaccatcaccgagttcgccgcctggagcaccagcgagatcagccagaacgccctgatgtactacagcggcagactgttctggatcaacggcttcagaatcatcaccacccaggagatcggccagaagaccagcgtgagcgtgctggagcccgccagattcaaccagttcaccatcatccagaccagcctgaagcccctgcccggcaacttcagcttcacccccaaggtgatccccgacagcgtgcaggagagcagcttcagaatcgagggcaacgccagcagcttccagatcctgtggaacggcccccccgccgtggactggggcgtggtgttctacagcgtggagttcagcgcccacagcaagttcctggccagcgagcagcacagcctgcccgtgttcaccgtggagggcctggagccctacgccctgttcaacctgagcgtgaccccctacacctactggggcaagggccccaagaccagcctgagcctgagagcccccgagaccgtgcccagcgcccccgagaaccccagaatcttcatcctgcccagcggcaagtgctgcaacaagaacgaggtggtggtggagttcagatggaacaagcccaagcacgagaacggcgtgctgaccaagttcgagatcttctacaacatcagcaaccagagcatcaccaacaagacctgcgaggactggatcgccgtgaacgtgacccccagcgtgatgagcttccagctggagggcatgagccccagatgcttcatcgccttccaggtgagagccttcaccagcaagggccccggcccctacgccgacgtggtgaagagcaccaccagcgagatcaaccccttcccccacctgatcaccctgctgggcaacaagatcgtgttcctggacatggaccagaaccaggtggtgtggaccttcagcgccgagagagtgatcagcgccgtgtgctacaccgccgacaacgagatgggctactacgccgagggcgacagcctgttcctgctgcacctgcacaacagaagcagcagcgagctgttccaggacagcctggtgttcgacatcaccgtgatcaccatcgactggatcagcagacacctgtacttcgccctgaaggagagccagaacggcatgcaggtgttcgacgtggacctggagcacaaggtgaagtaccccagagaggtgaagatccacaacagaaacagcaccatcatcagcttcagcgtgtaccccctgctgagcagactgtactggaccgaggtgagcaacttcggctaccagatgttctactacagcatcatcagccacaccctgcacagaatcctgcagcccaccgccaccaaccagcagaacaagagaaaccagtgcagctgcaacgtgaccgagttcgagctgagcggcgccatggccatcgacaccagcaacctggagaagcccctgatctacttcgccaaggcccaggagatctgggccatggacctggagggctgccagtgctggagagtgatcaccgtgcccgccatgctggccggcaagaccctggtgagcctgaccgtggacggcgacctgatctactggatcatcaccgccaaggacagcacccagatctaccaggccaagaagggcaacggcgccatcgtgagccaggtgaaggccctgagaagcagacacatcctggcctacagcagcgtgatgcagcccttccccgacaaggccttcctgagcctggccagcgacaccgtggagcccaccatcctgaacgccaccaacaccagcctgaccatcagactgcccctggccaagaccaacctgacctggtacggcatcaccagccccacccccacctacctggtgtactacgccgaggtgaacgacagaaagaacagcagcgacctgaagtacagaatcctggagttccaggacagcatcgccctgatcgaggacctgcagcccttcagcacctacatgatccagatcgccgtgaagaactactacagcgaccccctggagcacctgccccccggcaaggagatctggggcaagaccaagaacggcgtgcccgaggccgtgcagctgatcaacaccaccgtgagaagcgacaccagcctgatcatcagctggagagagagccacaagcccaacggccccaaggagagcgtgagataccagctggccatcagccacctggccctgatccccgagacccccctgagacagagcgagttccccaacggcagactgaccctgctggtgaccagactgagcggcggcaacatctacgtgctgaaggtgctggcctgccacagcgaggagatgtggtgcaccgagagccaccccgtgaccgtggagatgttcaacacccccgagaagccctacagcctggtgcccgagaacaccagcctgcagttcaactggaaggcccccctgaacgtgaacctgatcagattctgggtggagctgcagaagtggaagtacaacgagttctaccacgtgaagaccagctgcagccagggccccgcctacgtgtgcaacatcaccaacctgcagccctacaccagctacaacgtgagagtggtggtggtgtacaagaccggcgagaacagcaccagcctgcccgagagcttcaagaccaaggccggcgtgcccaacaagcccggcatccccaagctgctggagggcagcaagaacagcatccagtgggagaaggccgaggacaacggctgcagaatcacctactacatcctggagatcagaaagagcaccagcaacaacctgcagaaccagaacctgagatggaagatgaccttcaacggcagctgcagcagcgtgtgcacctggaagagcaagaacctgaagggcatcttccagttcagagtggtggccgccaacaacctgggcttcggcgagtacagcggcatcagcgagaacatcatcctggtgggcgacgacttctggatccccgagaccagcttcatcctgaccatcatcgtgggcatcttcctggtggtgaccatccccctgaccttcgtgtggcacagaagactgaagaaccagaagagcgccaaggagggcgtgaccgtgctgatcaacgaggacaaggagctggccgagctgagaggcctggccgccggcgtgggcctggccaacgcctgctacgccatccacaccctgcccacccaggaggagatcgagaacctgcccgccttccccagagagaagctgaccctgagactgctgctgggcagcggcgccttcggcgaggtgtacgagggcaccgccgtggacatcctgggcgtgggcagcggcgagatcaaggtggccgtgaagaccctgaagaagggcagcaccgaccaggagaagatcgagttcctgaaggaggcccacctgatgagcaagttcaaccaccccaacatcctgaagcagctgggcgtgtgcctgctgaacgagccccagtacatcatcctggagctgatggagggcggcgacctgctgacctacctgagaaaggccagaatggccaccttctacggccccctgctgaccctggtggacctggtggacctgtgcgtggacatcagcaagggctgcgtgtacctggagagaatgcacttcatccacagagacctggccgccagaaactgcctggtgagcgtgaaggactacaccagccccagaatcgtgaagatcggcgacttcggcctggccagagacatctacaagaacgactactacagaaagagaggcgagggcctgctgcccgtgagatggatggcccccgagagcctgatggacggcatcttcaccacccagagcgacgtgtggagcttcggcatcctgatctgggagatcctgaccctgggccaccagccctaccccgcccacagcaacctggacgtgctgaactacgtgcagaccggcggcagactggagccccccagaaactgccccgacgacctgtggaacctgatgacccagtgctgggcccaggagcccgaccagagacccaccttccacagaatccaggaccagctgcagctgttcagaaacttcttcctgaacagcatctacaagagcagagacgaggccaacaacagcggcgtgatcaacgagagcttcgagggcgaggacggcgacgtgatctgcctgaacagcgacgacatcatgcccgtggccctgatggagaccaagaacagagagggcctgaactacatggtgctggccaccgagtgcggccagggcgaggagaagagcgagggccccctgggcagccaggagagcgagagctgcggcctgagaaaggaggagaaggagccccacgccgacaaggacttctgccaggagaagcaggtggcctactgccccagcggcaagcccgagggcctgaactacgcctgcctgacccacagcggctacggcgacggcagcgactag

SEQ ID NO: 77770 - DNA, 294 bp, synthetic construct
  misc_feature 1..294: note = Description of Artificial Sequence: Synthetic coding sequence
  source 1..294: mol_type = other DNA
tggaagtacaacgagttctaccacgtgaagaccagctgcagccagggccccgcctacgtgtgcaacatcaccaacctgcagccctacaccagctacaacgtgagagtggtggtggtgtacaagaccggcgagaacagcaccagcctgcccgagagcttcaagaccaaggccggcgtgcccaacaagcccggcatccccaagctgctggagggcagcaagaacagcatccagtgggagaaggccgaggacaacggctgcagaatcacctactacatcctggagatcagagactag

SEQ ID NO: 77771 - DNA, 2025 bp, synthetic construct
  misc_feature 1..2025: note = Description of Artificial Sequence: Synthetic coding sequence
  source 1..2025: mol_type = other DNA
atgaccagcaacggcgtggccctgctgaacttctacaacatgcccagcacccccagcttcgtgggctgcctgcaggacatcaagatcgactggaaccacatcaccctggagaacatcagcagcggcagcagcctgaacgtgaaggccggctgcgtgagaaaggactggtgcgagagccagccctgccagagcagaggcagatgcatcaacctgtggctgagctaccagtgcgactgccacagaccctacgagggccccaactgcctgagagagtacgtggccggcagattcggccaggacgacagcaccggctacgtgatcttcaccctggacgagagctacggcgacaccatcagcctgagcatgttcgtgagaaccctgcagcccagcggcctgctgctggccctggagaacagcacctaccagtacatcagagtgtggctggagagaggcagactggccatgctgacccccaacagccccaagctggtggtgaagttcgtgctgaacgacggcaacgtgcacctgatcagcctgaagatcaagccctacaagatcgagctgtaccagagcagccagaacctgggcttcatcagcgccagcacctggaagatcgagaagggcgacgtgatctacatcggcggcctgcccgacaagcaggagaccgagctgaacggcggcttcttcaagggctgcatccaggacgtgagactgaacaaccagaacctggagttcttccccaaccccaccaacaacgccagcctgaaccccgtgctggtgaacgtgacccagggctgcgccggcgacaacagctgcaagagcaacccctgccacaacggcggcgtgtgccacagcagatgggacgacttcagctgcagctgccccgccctgaccagcggcaaggcctgcgaggaggtgcagtggtgcggcttcagcccctgcccccacggcgcccagtgccagcccgtgctgcagggcttcgagtgcatcgccaacgccgtgttcaacggccagagcggccagatcctgttcagaagcaacggcaacatcaccagagagctgaccaacatcaccttcggcttcagaaccagagacgccaacgtgatcatcctgcacgccgagaaggagcccgagttcctgaacatcagcatccaggacagcagactgttcttccagctgcagagcggcaacagcttctacatgctgagcctgaccagcctgcagagcgtgaacgacggcacctggcacgaggtgaccctgagcatgaccgaccccctgagccagaccagcagatggcagatggaggtggacaacgagacccccttcgtgaccagcaccatcgccaccggcagcctgaacttcctgaaggacaacaccgacatctacgtgggcgacagagccatcgacaacatcaagggcctgcagggctgcctgagcaccatcgagatcggcggcatctacctgagctacttcgagaacgtgcacggcttcatcaacaagccccaggaggagcagttcctgaagatcagcaccaacagcgtggtgaccggctgcctgcagctgaacgtgtgcaacagcaacccctgcctgcacggcggcaactgcgaggacatctacagcagctaccactgcagctgccccctgggctggagcggcaagcactgcgagctgaacatcgacgagtgcttcagcaacccctgcatccacggcaactgcagcgacagagtggccgcctaccactgcacctgcgagcccggctacaccggcgtgaactgcgaggtggacatcgacaactgccagagccaccagtgcgccaacggcgccacctgcatcagccacaccaacggctacagctgcctgtgcttcggcaacttcaccggcaagttctgcagacagagcagactgcccagcaccgtgtgcggcaacgagaagaccaacctgacctgctacaacggcggcaactgcaccgagttccagaccgagctgaagtgcatgtgcagacccggcttcaccggcgagtggtag

SEQ ID NO: 77772 - DNA, 4221 bp, synthetic construct
  misc_feature 1..4221: note = Description of Artificial Sequence: Synthetic coding sequence
  source 1..4221: mol_type = other DNA
atggccctgaagaacatcaactacctgctgatcttctacctgagcttcagcctgctgatctacatcaagaacagcttctgcaacaagaacaacaccagatgcctgagcaacagctgccagaacaacagcacctgcaaggacttcagcaaggacaacgactgcagctgcagcgacaccgccaacaacctggacaaggactgcgacaacatgaaggacccctgcttcagcaacccctgccagggcagcgccacctgcgtgaacacccccggcgagagaagcttcctgtgcaagtgcccccccggctacagcggcaccatctgcgagaccaccatcggcagctgcggcaagaacagctgccagcacggcggcatctgccaccaggaccccatctaccccgtgtgcatctgccccgccggctacgccggcagattctgcgagatcgaccacgacgagtgcgccagcagcccctgccagaacggcgccgtgtgccaggacggcatcgacggctacagctgcttctgcgtgcccggctaccagggcagacactgcgacctggaggtggacgagtgcgccagcgacccctgcaagaacgaggccacctgcctgaacgagatcggcagatacacctgcatctgcccccacaactacagcggcgtgaactgcgagctggagatcgacgagtgctggagccagccctgcctgaacggcgccacctgccaggacgccctgggcgcctacttctgcgactgcgcccccggcttcctgggcgaccactgcgagctgaacaccgacgagtgcgccagccagccctgcctgcacggcggcctgtgcgtggacggcgagaacagatacagctgcaactgcaccggcagcggcttcaccggcacccactgcgagaccctgatgcccctgtgctggagcaagccctgccacaacaacgccacctgcgaggacagcgtggacaactacacctgccactgctggcccggctacaccggcgcccagtgcgagatcgacctgaacgagtgcaacagcaacccctgccagagcaacggcgagtgcgtggagctgagcagcgagaagcagtacggcagaatcaccggcctgcccagcagcttcagctaccacgaggccagcggctacgtgtgcatctgccagcccggcttcaccggcatccactgcgaggaggacgtgaacgagtgcagcagcaacccctgccagaacggcggcacctgcgagaacctgcccggcaactacacctgccactgccccttcgacaacctgagcagaaccttctacggcggcagagactgcagcgacatcctgctgggctgcacccaccagcagtgcctgaacaacggcacctgcatcccccacttccaggacggccagcacggcttcagctgcctgtgccccagcggctacaccggcagcctgtgcgagatcgccaccaccctgagcttcgagggcgacggcttcctgtgggtgaagagcggcagcgtgaccaccaagggcagcgtgtgcaacatcgccctgagattccagaccgtgcagcccatggccctgctgctgttcagaagcaacagagacgtgttcgtgaagctggagctgctgagcggctacatccacctgagcatccaggtgaacaaccagagcaaggtgctgctgttcatcagccacaacaccagcgacggcgagtggcacttcgtggaggtgatcttcgccgaggccgtgaccctgaccctgatcgacgacagctgcaaggagaagtgcatcgccaaggcccccacccccctggagagcgaccagagcatctgcgccttccagaacagcttcctgggcggcctgcccgtgggcatgaccagcaacggcgtggccctgctgaacttctacaacatgcccagcacccccagcttcgtgggctgcctgcaggacatcaagatcgactggaaccacatcaccctggagaacatcagcagcggcagcagcctgaacgtgaaggccggctgcgtgagaaaggactggtgcgagagccagccctgccagagcagaggcagatgcatcaacctgtggctgagctaccagtgcgactgccacagaccctacgagggccccaactgcctgagagagtacgtggccggcagattcggccaggacgacagcaccggctacgtgatcttcaccctggacgagagctacggcgacaccatcagcctgagcatgttcgtgagaaccctgcagcccagcggcctgctgctggccctggagaacagcacctaccagtacatcagagtgtggctggagagaggcagactggccatgctgacccccaacagccccaagctggtggtgaagttcgtgctgaacgacggcaacgtgcacctgatcagcctgaagatcaagccctacaagatcgagctgtaccagagcagccagaacctgggcttcatcagcgccagcacctggaagatcgagaagggcgacgtgatctacatcggcggcctgcccgacaagcaggagaccgagctgaacggcggcttcttcaagggctgcatccaggacgtgagactgaacaaccagaacctggagttcttccccaaccccaccaacaacgccagcctgaaccccgtgctggtgaacgtgacccagggctgcgccggcgacaacagctgcaagagcaacccctgccacaacggcggcgtgtgccacagcagatgggacgacttcagctgcagctgccccgccctgaccagcggcaaggcctgcgaggaggtgcagtggtgcggcttcagcccctgcccccacggcgcccagtgccagcccgtgctgcagggcttcgagtgcatcgccaacgccgtgttcaacggccagagcggccagatcctgttcagaagcaacggcaacatcaccagagagctgaccaacatcaccttcggcttcagaaccagagacgccaacgtgatcatcctgcacgccgagaaggagcccgagttcctgaacatcagcatccaggacagcagactgttcttccagctgcagagcggcaacagcttctacatgctgagcctgaccagcctgcagagcgtgaacgacggcacctggcacgaggtgaccctgagcatgaccgaccccctgagccagaccagcagatggcagatggaggtggacaacgagacccccttcgtgaccagcaccatcgccaccggcagcctgaacttcctgaaggacaacaccgacatctacgtgggcgacagagccatcgacaacatcaagggcctgcagggctgcctgagcaccatcgagatcggcggcatctacctgagctacttcgagaacgtgcacggcttcatcaacaagccccaggaggagcagttcctgaagatcagcaccaacagcgtggtgaccggctgcctgcagctgaacgtgtgcaacagcaacccctgcctgcacggcggcaactgcgaggacatctacagcagctaccactgcagctgccccctgggctggagcggcaagcactgcgagctgaacatcgacgagtgcttcagcaacccctgcatccacggcaactgcagcgacagagtggccgcctaccactgcacctgcgagcccggctacaccggcgtgaactgcgaggtggacatcgacaactgccagagccaccagtgcgccaacggcgccacctgcatcagccacaccaacggctacagctgcctgtgcttcggcaacttcaccggcaagttctgcagacagagcagactgcccagcaccgtgtgcggcaacgagaagaccaacctgacctgctacaacggcggcaactgcaccgagttccagaccgagctgaagtgcatgtgcagacccggcttcaccggcgagtggtgcgagaaggacatcgacgagtgcgccagcgacccctgcgtgaacggcggcctgtgccaggacctgctgaacaagttccagtgcctgtgcgacgtggccttcgccggcgagagatgcgaggtggacctggccgacgacctgatcagcgacatcttcaccaccatcggcagcgtgaccgtggccctgctgctgatcctgctgctggccatcgtggccagcgtggtgaccagcaacaagagagccacccagggcacctacagccccagcagacaggagaaggagggcagcagagtggagatgtggaacctgatgcccccccccgccatggagagactgatctag

SEQ ID NO: 77773 - DNA, 2826 bp, synthetic construct
  misc_feature 1..2826: note = Description of Artificial Sequence: Synthetic coding sequence
  source 1..2826: mol_type = other DNA
atgatcagaaacagcctgtgccagcccagcagatgcctggacggctacctgttcttcaacagaaagatgttcggcgccagaacccacggcttccacatcctgatggccatgctgatcggcatccactgcgaggaggacgtgaacgagtgcagcagcaacccctgccagaacggcggcacctgcgagaacctgcccggcaactacacctgccactgccccttcgacaacctgagcagaaccttctacggcggcagagactgcagcgacatcctgctgggctgcacccaccagcagtgcctgaacaacggcacctgcatcccccacttccaggacggccagcacggcttcagctgcctgtgccccagcggctacaccggcagcctgtgcgagatcgccaccaccctgagcttcgagggcgacggcttcctgtgggtgaagagcggcagcgtgaccaccaagggcagcgtgtgcaacatcgccctgagattccagaccgtgcagcccatggccctgctgctgttcagaagcaacagagacgtgttcgtgaagctggagctgctgagcggctacatccacctgagcatccaggtgaacaaccagagcaaggtgctgctgttcatcagccacaacaccagcgacggcgagtggcacttcgtggaggtgatcttcgccgaggccgtgaccctgaccctgatcgacgacagctgcaaggagaagtgcatcgccaaggcccccacccccctggagagcgaccagagcatctgcgccttccagaacagcttcctgggcggcctgcccgtgggcatgaccagcaacggcgtggccctgctgaacttctacaacatgcccagcacccccagcttcgtgggctgcctgcaggacatcaagatcgactggaaccacatcaccctggagaacatcagcagcggcagcagcctgaacgtgaaggccggctgcgtgagaaaggactggtgcgagagccagccctgccagagcagaggcagatgcatcaacctgtggctgagctaccagtgcgactgccacagaccctacgagggccccaactgcctgagagagtacgtggccggcagattcggccaggacgacagcaccggctacgtgatcttcaccctggacgagagctacggcgacaccatcagcctgagcatgttcgtgagaaccctgcagcccagcggcctgctgctggccctggagaacagcacctaccagtacatcagagtgtggctggagagaggcagactggccatgctgacccccaacagccccaagctggtggtgaagttcgtgctgaacgacggcaacgtgcacctgatcagcctgaagatcaagccctacaagatcgagctgtaccagagcagccagaacctgggcttcatcagcgccagcacctggaagatcgagaagggcgacgtgatctacatcggcggcctgcccgacaagcaggagaccgagctgaacggcggcttcttcaagggctgcatccaggacgtgagactgaacaaccagaacctggagttcttccccaaccccaccaacaacgccagcctgaaccccgtgctggtgaacgtgacccagggctgcgccggcgacaacagctgcaagagcaacccctgccacaacggcggcgtgtgccacagcagatgggacgacttcagctgcagctgccccgccctgaccagcggcaaggcctgcgaggaggtgcagtggtgcggcttcagcccctgcccccacggcgcccagtgccagcccgtgctgcagggcttcgagtgcatcgccaacgccgtgttcaacggccagagcggccagatcctgttcagaagcaacggcaacatcaccagagagctgaccaacatcaccttcggcttcagaaccagagacgccaacgtgatcatcctgcacgccgagaaggagcccgagttcctgaacatcagcatccaggacagcagactgttcttccagctgcagagcggcaacagcttctacatgctgagcctgaccagcctgcagagcgtgaacgacggcacctggcacgaggtgaccctgagcatgaccgaccccctgagccagaccagcagatggcagatggaggtggacaacgagacccccttcgtgaccagcaccatcgccaccggcagcctgaacttcctgaaggacaacaccgacatctacgtgggcgacagagccatcgacaacatcaagggcctgcagggctgcctgagcaccatcgagatcggcggcatctacctgagctacttcgagaacgtgcacggcttcatcaacaagccccaggaggagcagttcctgaagatcagcaccaacagcgtggtgaccggctgcctgcagctgaacgtgtgcaacagcaacccctgcctgcacggcggcaactgcgaggacatctacagcagctaccactgcagctgccccctgggctggagcggcaagcactgcgagctgaacatcgacgagtgcttcagcaacccctgcatccacggcaactgcagcgacagagtggccgcctaccactgcacctgcgagcccggctacaccggcgtgaactgcgaggtggacatcgacaactgccagagccaccagtgcgccaacggcgccacctgcatcagccacaccaacggctacagctgcctgtgcttcggcaacttcaccggcaagttctgcagacagagcagactgcccagcaccgtgtgcggcaacgagaagaccaacctgacctgctacaacggcggcaactgcaccgagttccagaccgagctgaagtgcatgtgcagacccggcttcaccggcgagtag

SEQ ID NO: 77774 - DNA, 129 bp, synthetic construct
  misc_feature 1..129: note = Description of Artificial Sequence: Synthetic coding sequence
  source 1..129: mol_type = other DNA
gagaaggacatcgacgagtgcgccagcgacccctgcgtgaacggcggcctgtgccaggacctgctgaacaagttccagtgcctgtgcgacgtggccttcgccggcgagagatgcgaggtggactactag

SEQ ID NO: 77775 - DNA, 4149 bp, synthetic construct
  misc_feature 1..4149: note = Description of Artificial Sequence: Synthetic coding sequence
  source 1..4149: mol_type = other DNA
atgaaggacccctgcttcagcaacccctgccagggcagcgccacctgcgtgaacacccccggcgagagaagcttcctgtgcaagtgcccccccggctacagcggcaccatctgcgagaccaccatcggcagctgcggcaagaacagctgccagcacggcggcatctgccaccaggaccccatctaccccgtgtgcatctgccccgccggctacgccggcagattctgcgagatcgaccacgacgagtgcgccagcagcccctgccagaacggcgccgtgtgccaggacggcatcgacggctacagctgcttctgcgtgcccggctaccagggcagacactgcgacctggaggtggacgagtgcgccagcgacccctgcaagaacgaggccacctgcctgaacgagatcggcagatacacctgcatctgcccccacaactacagcggcgtgaactgcgagctggagatcgacgagtgctggagccagccctgcctgaacggcgccacctgccaggacgccctgggcgcctacttctgcgactgcgcccccggcttcctgggcgaccactgcgagctgaacaccgacgagtgcgccagccagccctgcctgcacggcggcctgtgcgtggacggcgagaacagatacagctgcaactgcaccggcagcggcttcaccggcacccactgcgagaccctgatgcccctgtgctggagcaagccctgccacaacaacgccacctgcgaggacagcgtggacaactacacctgccactgctggcccggctacaccggcgcccagtgcgagatcgacctgaacgagtgcaacagcaacccctgccagagcaacggcgagtgcgtggagctgagcagcgagaagcagtacggcagaatcaccggcctgcccagcagcttcagctaccacgaggccagcggctacgtgtgcatctgccagcccggcttcaccggcatccactgcgaggaggacgtgaacgagtgcagcagcaacccctgccagaacggcggcacctgcgagaacctgcccggcaactacacctgccactgccccttcgacaacctgagcagaaccttctacggcggcagagactgcagcgacatcctgctgggctgcacccaccagcagtgcctgaacaacggcacctgcatcccccacttccaggacggccagcacggcttcagctgcctgtgccccagcggctacaccggcagcctgtgcgagatcgccaccaccctgagcttcgagggcgacggcttcctgtgggtgaagagcggcagcgtgaccaccaagggcagcgtgtgcaacatcgccctgagattccagaccgtgcagcccatggccctgctgctgttcagaagcaacagagacgtgttcgtgaagctggagctgctgagcggctacatccacctgagcatccaggtgaacaaccagagcaaggtgctgctgttcatcagccacaacaccagcgacggcgagtggcacttcgtggaggtgatcttcgccgaggccgtgaccctgaccctgatcgacgacagctgcaaggagaagtgcatcgccaaggcccccacccccctggagagcgaccagagcatctgcgccttccagaacagcttcctgggcggcctgcccgtgggcatgaccagcaacggcgtggccctgctgaacttctacaacatgcccagcacccccagcttcgtgggctgcctgcaggacatcaagatcgactggaaccacatcaccctggagaacatcagcagcggcagcagcctgaacgtgaaggccggctgcgtgagaaaggactggtgcgagagccagccctgccagagcagaggcagatgcatcaacctgtggctgagctaccagtgcgactgccacagaccctacgagggccccaactgcctgagagagtacgtggccggcagattcggccaggacgacagcaccggctacgtgatcttcaccctggacgagagctacggcgacaccatcagcctgagcatgttcgtgagaaccctgcagcccagcggcctgctgctggccctggagaacagcacctaccagtacatcagagtgtggctggagagaggcagactggccatgctgacccccaacagccccaagctggtggtgaagttcgtgctgaacgacggcaacgtgcacctgatcagcctgaagatcaagccctacaagatcgagctgtaccagagcagccagaacctgggcttcatcagcgccagcacctggaagatcgagaagggcgacgtgatctacatcggcggcctgcccgacaagcaggagaccgagctgaacggcggcttcttcaagggctgcatccaggacgtgagactgaacaaccagaacctggagttcttccccaaccccaccaacaacgccagcctgaaccccgtgctggtgaacgtgacccagggctgcgccggcgacaacagctgcaagagacagaccaacgtgggcagagccctgaccgagctgggcagcagaggccccaagtaccaggtgagcctgttcagattctgcgtgggcagctgggccaccggcaacaccttcttcctgagcagcatcaagcccggcagcaacccctgccacaacggcggcgtgtgccacagcagatgggacgacttcagctgcagctgccccgccctgaccagcggcaaggcctgcgaggaggtgcagtggtgcggcttcagcccctgcccccacggcgcccagtgccagcccgtgctgcagggcttcgagtgcatcgccaacgccgtgttcaacggccagagcggccagatcctgttcagaagcaacggcaacatcaccagagagctgaccaacatcaccttcggcttcagaaccagagacgccaacgtgatcatcctgcacgccgagaaggagcccgagttcctgaacatcagcatccaggacagcagactgttcttccagctgcagagcggcaacagcttctacatgctgagcctgaccagcctgcagagcgtgaacgacggcacctggcacgaggtgaccctgagcatgaccgaccccctgagccagaccagcagatggcagatggaggtggacaacgagacccccttcgtgaccagcaccatcgccaccggcagcctgaacttcctgaaggacaacaccgacatctacgtgggcgacagagccatcgacaacatcaagggcctgcagggctgcctgagcaccatcgagatcggcggcatctacctgagctacttcgagaacgtgcacggcttcatcaacaagccccaggaggagcagttcctgaagatcagcaccaacagcgtggtgaccggctgcctgcagctgaacgtgtgcaacagcaacccctgcctgcacggcggcaactgcgaggacatctacagcagctaccactgcagctgccccctgggctggagcggcaagcactgcgagctgaacatcgacgagtgcttcagcaacccctgcatccacggcaactgcagcgacagagtggccgcctaccactgcacctgcgagcccggctacaccggcgtgaactgcgaggtggacatcgacaactgccagagccaccagtgcgccaacggcgccacctgcatcagccacaccaacggctacagctgcctgtgcttcggcaacttcaccggcaagttctgcagacagagcagactgcccagcaccgtgtgcggcaacgagaagaccaacctgacctgctacaacggcggcaactgcaccgagttccagaccgagctgaagtgcatgtgcagacccggcttcaccggcgagtggtgcgagaaggacatcgacgagtgcgccagcgacccctgcgtgaacggcggcctgtgccaggacctgctgaacaagttccagtgcctgtgcgacgtggccttcgccggcgagagatgcgaggtggacctggccgacgacctgatcagcgacatcttcaccaccatcggcagcgtgaccgtggccctgctgctgatcctgctgctggccatcgtggccagcgtggtgaccagcaacaagagagccacccagggcacctacagccccagcagacaggagaaggagggcagcagagtggagatgtggaacctgatgcccccccccgccatggagagactgatctag

SEQ ID NO: 77776 - DNA, 2613 bp, synthetic construct
  misc_feature 1..2613: note = Description of Artificial Sequence: Synthetic coding sequence
  source 1..2613: mol_type = other DNA
atggccctgaagaacatcaactacctgctgatcttctacctgagcttcagcctgctgatctacatcaagaacagcttctgcaacaagaacaacaccagatgcctgagcaacagctgccagaacaacagcacctgcaaggacttcagcaaggacaacgactgcagctgcagcgacaccgccaacaacctggacaaggactgcgacaacatgaaggacccctgcttcagcaacccctgccagggcagcgccacctgcgtgaacacccccggcgagagaagcttcctgtgcaagtgcccccccggctacagcggcaccatctgcgagaccaccatcggcagctgcggcaagaacagctgccagcacggcggcatctgccaccaggaccccatctaccccgtgtgcatctgccccgccggctacgccggcagattctgcgagatcgaccacgacgagtgcgccagcagcccctgccagaacggcgccgtgtgccaggacggcatcgacggctacagctgcttctgcgtgcccggctaccagggcagacactgcgacctggaggtggacgagtgcgccagcgacccctgcaagaacgaggccacctgcctgaacgagatcggcagatacacctgcatctgcccccacaactacagcggcgtgaactgcgagctggagatcgacgagtgctggagccagccctgcctgaacggcgccacctgccaggacgccctgggcgcctacttctgcgactgcgcccccggcttcctgggcgaccactgcgagctgaacaccgacgagtgcgccagccagccctgcctgcacggcggcctgtgcgtggacggcgagaacagatacagctgcaactgcaccggcagcggcttcaccggcacccactgcgagaccctgatgcccctgtgctggagcaagccctgccacaacaacgccacctgcgaggacagcgtggacaactacacctgccactgctggcccggctacaccggcgcccagtgcgagatcgacctgaacgagtgcaacagcaacccctgccagagcaacggcgagtgcgtggagctgagcagcgagaagcagtacggcagaatcaccggcctgcccagcagcttcagctaccacgaggccagcggctacgtgtgcatctgccagcccggcttcaccggcatccactgcgaggaggacgtgaacgagtgcagcagcaacccctgccagaacggcggcacctgcgagaacctgcccggcaactacacctgccactgccccttcgacaacctgagcagaaccttctacggcggcagagactgcagcgacatcctgctgggctgcacccaccagcagtgcctgaacaacggcacctgcatcccccacttccaggacggccagcacggcttcagctgcctgtgccccagcggctacaccggcagcctgtgcgagatcgccaccaccctgagcttcgagggcgacggcttcctgtgggtgaagagcggcagcgtgaccaccaagggcagcgtgtgcaacatcgccctgagattccagaccgtgcagcccatggccctgctgctgttcagaagcaacagagacgtgttcgtgaagctggagctgctgagcggctacatccacctgagcatccaggtgaacaaccagagcaaggtgctgctgttcatcagccacaacaccagcgacggcgagtggcacttcgtggaggtgatcttcgccgaggccgtgaccctgaccctgatcgacgacagctgcaaggagaagtgcatcgccaaggcccccacccccctggagagcgaccagagcatctgcgccttccagaacagcttcctgggcggcctgcccgtgggcatgaccagcaacggcgtggccctgctgaacttctacaacatgcccagcacccccagcttcgtgggctgcctgcaggacatcaagatcgactggaaccacatcaccctggagaacatcagcagcggcagcagcctgaacgtgaaggccggctgcgtgagaaaggactggtgcgagagccagccctgccagagcagaggcagatgcatcaacctgtggctgagctaccagtgcgactgccacagaccctacgagggccccaactgcctgagaggcaagttctgcagacagagcagactgcccagcaccgtgtgcggcaacgagaagaccaacctgacctgctacaacggcggcaactgcaccgagttccagaccgagctgaagtgcatgtgcagacccggcttcaccggcgagtggtgcgagaaggacatcgacgagtgcgccagcgacccctgcgtgaacggcggcctgtgccaggacctgctgaacaagttccagtgcctgtgcgacgtggccttcgccggcgagagatgcgaggtggacctggccgacgacctgatcagcgacatcttcaccaccatcggcagcgtgaccgtggccctgctgctgatcctgctgctggccatcgtggccagcgtggtgaccagcaacaagagagccacccagggcacctacagccccagcagacaggagaaggagggcagcagagtggagatgtggaacctgatgcccccccccgccatggagagactgatctag

SEQ ID NO: 77777 - DNA, 882 bp, synthetic construct
  misc_feature 1..882: note = Description of Artificial Sequence: Synthetic coding sequence
  source 1..882: mol_type = other DNA
atgcccctgtgctggagcaagccctgccacaacaacgccacctgcgaggacagcgtggacaactacacctgccactgctggcccggctacaccggcgcccagtgcgagatcgacctgaacgagtgcaacagcaacccctgccagagcaacggcgagtgcgtggagctgagcagcgagaagcagtacggcagaatcaccggcctgcccagcagcttcagctaccacgaggccagcggctacgtgtgcatctgccagcccggcttcaccggcatccactgcgaggaggacgtgaacgagtgcagcagcaacccctgccagaacggcggcacctgcgagaacctgcccggcaactacacctgccactgccccttcgacaacctgagcagaaccttctacggcggcagagactgcagcgacatcctgctgggctgcacccaccagcagtgcctgaacaacggcacctgcatcccccacttccaggacggccagcacggcttcagctgcctgtgccccagcggctacaccggcagcctgtgcgagatcgccaccaccctgagcttcgagggcgacggcttcctgtgggtgaagagcggcagcgtgaccaccaagggcagcgtgtgcaacatcgccctgagattccagaccgtgcagcccatggccctgctgctgttcagaagcaacagagacgtgttcgtgaagctggagctgctgagcggctacatccacctgagcatccaggtgaacaaccagagcaaggtgctgctgttcatcagccacaacaccagcgacggcgagtggcacttcgtggaggccgtgagcaagaccctgaagctgatcggcatcaccctgccctggagaaccagcagactggcccaccactag

SEQ ID NO: 77778 - DNA, 2664 bp, synthetic construct
  misc_feature 1..2664: note = Description of Artificial Sequence: Synthetic coding sequence
  source 1..2664: mol_type = other DNA
atggccctgctgctgttcagaagcaacagagacgtgttcgtgaagctggagctgctgagcggctacatccacctgagcatccaggtgaacaaccagagcaaggtgctgctgttcatcagccacaacaccagcgacggcgagtggcacttcgtggaggtgatcttcgccgaggccgtgaccctgaccctgatcgacgacagctgcaaggagaagtgcatcgccaaggcccccacccccctggagagcgaccagagcatctgcgccttccagaacagcttcctgggcggcctgcccgtgggcatgaccagcaacggcgtggccctgctgaacttctacaacatgcccagcacccccagcttcgtgggctgcctgcaggacatcaagatcgactggaaccacatcaccctggagaacatcagcagcggcagcagcctgaacgtgaaggccggctgcgtgagaaaggactggtgcgagagccagccctgccagagcagaggcagatgcatcaacctgtggctgagctaccagtgcgactgccacagaccctacgagggccccaactgcctgagagagtacgtggccggcagattcggccaggacgacagcaccggctacgtgatcttcaccctggacgagagctacggcgacaccatcagcctgagcatgttcgtgagaaccctgcagcccagcggcctgctgctggccctggagaacagcacctaccagtacatcagagtgtggctggagagaggcagactggccatgctgacccccaacagccccaagctggtggtgaagttcgtgctgaacgacggcaacgtgcacctgatcagcctgaagatcaagccctacaagatcgagctgtaccagagcagccagaacctgggcttcatcagcgccagcacctggaagatcgagaagggcgacgtgatctacatcggcggcctgcccgacaagcaggagaccgagctgaacggcggcttcttcaagggctgcatccaggacgtgagactgaacaaccagaacctggagttcttccccaaccccaccaacaacgccagcctgaaccccgtgctggtgaacgtgacccagggctgcgccggcgacaacagctgcaagagcaacccctgccacaacggcggcgtgtgccacagcagatgggacgacttcagctgcagctgccccgccctgaccagcggcaaggcctgcgaggaggtgcagtggtgcggcttcagcccctgcccccacggcgcccagtgccagcccgtgctgcagggcttcgagtgcatcgccaacgccgtgttcaacggccagagcggccagatcctgttcagaagcaacggcaacatcaccagagagctgaccaacatcaccttcggcttcagaaccagagacgccaacgtgatcatcctgcacgccgagaaggagcccgagttcctgaacatcagcatccaggacagcagactgttcttccagctgcagagcggcaacagcttctacatgctgagcctgaccagcctgcagagcgtgaacgacggcacctggcacgaggtgaccctgagcatgaccgaccccctgagccagaccagcagatggcagatggaggtggacaacgagacccccttcgtgaccagcaccatcgccaccggcagcctgaacttcctgaaggacaacaccgacatctacgtgggcgacagagccatcgacaacatcaagggcctgcagggctgcctgagcaccatcgagatcggcggcatctacctgagctacttcgagaacgtgcacggcttcatcaacaagccccaggaggagcagttcctgaagatcagcaccaacagcgtggtgaccggctgcctgcagctgaacgtgtgcaacagcaacccctgcctgcacggcggcaactgcgaggacatctacagcagctaccactgcagctgccccctgggctggagcggcaagcactgcgagctgaacatcgacgagtgcttcagcaacccctgcatccacggcaactgcagcgacagagtggccgcctaccactgcacctgcgagcccggctacaccggcgtgaactgcgaggtggacatcgacaactgccagagccaccagtgcgccaacggcgccacctgcatcagccacaccaacggctacagctgcctgtgcttcggcaacttcaccggcaagttctgcagacagagcagactgcccagcaccgtgtgcggcaacgagaagaccaacctgacctgctacaacggcggcaactgcaccgagttccagaccgagctgaagtgcatgtgcagacccggcttcaccggcgagtggtgcgagaaggacatcgacgagtgcgccagcgacccctgcgtgaacggcggcctgtgccaggacctgctgaacaagttccagtgcctgtgcgacgtggccttcgccggcgagagatgcgaggtggacctggccgacgacctgatcagcgacatcttcaccaccatcggcagcgtgaccgtggccctgctgctgatcctgctgctggccatcgtggccagcgtggtgaccagcaacaagagagccacccagggcacctacagccccagcagacaggagaaggagggcagcagagtggagatgtggaacctgatgcccccccccgccatggagagactgatctag

SEQ ID NO: 77779 - DNA, 3885 bp, synthetic construct
  misc_feature 1..3885: note = Description of Artificial Sequence: Synthetic coding sequence
  source 1..3885: mol_type = other DNA
atggccctgaagaacatcaactacctgctgatcttctacctgagcttcagcctgctgatctacatcaagaacagcttctgcaacaagaacaacaccagatgcctgagcaacagctgccagaacaacagcacctgcaaggacttcagcaaggacaacgactgcagctgcagcgacaccgccaacaacctggacaaggactgcgacaacatgaaggacccctgcttcagcaacccctgccagggcagcgccacctgcgtgaacacccccggcgagagaagcttcctgtgcaagtgcccccccggctacagcggcaccatctgcgagaccaccatcggcagctgcggcaagaacagctgccagcacggcggcatctgccaccaggaccccatctaccccgtgtgcatctgccccgccggctacgccggcagattctgcgagatcgaccacgacgagtgcgccagcagcccctgccagaacggcgccgtgtgccaggacggcatcgacggctacagctgcttctgcgtgcccggctaccagggcagacactgcgacctggaggtggacgagtgcgccagcgacccctgcaagaacgaggccacctgcctgaacgagatcggcagatacacctgcatctgcccccacaactacagcggctacaccggcgcccagtgcgagatcgacctgaacgagtgcaacagcaacccctgccagagcaacggcgagtgcgtggagctgagcagcgagaagcagtacggcagaatcaccggcctgcccagcagcttcagctaccacgaggccagcggctacgtgtgcatctgccagcccggcttcaccggcatccactgcgaggaggacgtgaacgagtgcagcagcaacccctgccagaacggcggcacctgcgagaacctgcccggcaactacacctgccactgccccttcgacaacctgagcagaaccttctacggcggcagagactgcagcgacatcctgctgggctgcacccaccagcagtgcctgaacaacggcacctgcatcccccacttccaggacggccagcacggcttcagctgcctgtgccccagcggctacaccggcagcctgtgcgagatcgccaccaccctgagcttcgagggcgacggcttcctgtgggtgaagagcggcagcgtgaccaccaagggcagcgtgtgcaacatcgccctgagattccagaccgtgcagcccatggccctgctgctgttcagaagcaacagagacgtgttcgtgaagctggagctgctgagcggctacatccacctgagcatccaggtgaacaaccagagcaaggtgctgctgttcatcagccacaacaccagcgacggcgagtggcacttcgtggaggtgatcttcgccgaggccgtgaccctgaccctgatcgacgacagctgcaaggagaagtgcatcgccaaggcccccacccccctggagagcgaccagagcatctgcgccttccagaacagcttcctgggcggcctgcccgtgggcatgaccagcaacggcgtggccctgctgaacttctacaacatgcccagcacccccagcttcgtgggctgcctgcaggacatcaagatcgactggaaccacatcaccctggagaacatcagcagcggcagcagcctgaacgtgaaggccggctgcgtgagaaaggactggtgcgagagccagccctgccagagcagaggcagatgcatcaacctgtggctgagctaccagtgcgactgccacagaccctacgagggccccaactgcctgagagagtacgtggccggcagattcggccaggacgacagcaccggctacgtgatcttcaccctggacgagagctacggcgacaccatcagcctgagcatgttcgtgagaaccctgcagcccagcggcctgctgctggccctggagaacagcacctaccagtacatcagagtgtggctggagagaggcagactggccatgctgacccccaacagccccaagctggtggtgaagttcgtgctgaacgacggcaacgtgcacctgatcagcctgaagatcaagccctacaagatcgagctgtaccagagcagccagaacctgggcttcatcagcgccagcacctggaagatcgagaagggcgacgtgatctacatcggcggcctgcccgacaagcaggagaccgagctgaacggcggcttcttcaagggctgcatccaggacgtgagactgaacaaccagaacctggagttcttccccaaccccaccaacaacgccagcctgaaccccgtgctggtgaacgtgacccagggctgcgccggcgacaacagctgcaagagcaacccctgccacaacggcggcgtgtgccacagcagatgggacgacttcagctgcagctgccccgccctgaccagcggcaaggcctgcgaggaggtgcagtggtgcggcttcagcccctgcccccacggcgcccagtgccagcccgtgctgcagggcttcgagtgcatcgccaacgccgtgttcaacggccagagcggccagatcctgttcagaagcaacggcaacatcaccagagagctgaccaacatcaccttcggcttcagaaccagagacgccaacgtgatcatcctgcacgccgagaaggagcccgagttcctgaacatcagcatccaggacagcagactgttcttccagctgcagagcggcaacagcttctacatgctgagcctgaccagcctgcagagcgtgaacgacggcacctggcacgaggtgaccctgagcatgaccgaccccctgagccagaccagcagatggcagatggaggtggacaacgagacccccttcgtgaccagcaccatcgccaccggcagcctgaacttcctgaaggacaacaccgacatctacgtgggcgacagagccatcgacaacatcaagggcctgcagggctgcctgagcaccatcgagatcggcggcatctacctgagctacttcgagaacgtgcacggcttcatcaacaagccccaggaggagcagttcctgaagatcagcaccaacagcgtggtgaccggctgcctgcagctgaacgtgtgcaacagcaacccctgcctgcacggcggcaactgcgaggacatctacagcagctaccactgcagctgccccctgggctggagcggcaagcactgcgagctgaacatcgacgagtgcttcagcaacccctgcatccacggcaactgcagcgacagagtggccgcctaccactgcacctgcgagcccggctacaccggcgtgaactgcgaggtggacatcgacaactgccagagccaccagtgcgccaacggcgccacctgcatcagccacaccaacggctacagctgcctgtgcttcggcaacttcaccggcaagttctgcagacagagcagactgcccagcaccgtgtgcggcaacgagaagaccaacctgacctgctacaacggcggcaactgcaccgagttccagaccgagctgaagtgcatgtgcagacccggcttcaccggcgagtggtgcgagaaggacatcgacgagtgcgccagcgacccctgcgtgaacggcggcctgtgccaggacctgctgaacaagttccagtgcctgtgcgacgtggccttcgccggcgagagatgcgaggtggacctggccgacgacctgatcagcgacatcttcaccaccatcggcagcgtgaccgtggccctgctgctgatcctgctgctggccatcgtggccagcgtggtgaccagcaacaagagagccacccagggcacctacagccccagcagacaggagaaggagggcagcagagtggagatgtggaacctgatgcccccccccgccatggagagactgatctag

SEQ ID NO: 77780 - DNA, 3531 bp, synthetic construct
  misc_feature 1..3531: note = Description of Artificial Sequence: Synthetic coding sequence
  source 1..3531: mol_type = other DNA
atggccctggccagacccggcacccccgacccccaggccctggccagcgtgctgctgctgctgctgtgggcccccgccctgagcctgctggccggcaccgtgcccagcgagccccccagcgcctgcgccagcgacccctgcgcccccggcaccgagtgccaggccaccgagagcggcggctacacctgcggccccatggagcccagaggctgcgccacccagccctgccaccacggcgccctgtgcgtgccccagggccccgaccccaccggcttcagatgctactgcgtgcccggcttccagggccccagatgcgagctggacatcgacgagtgcgccagcagaccctgccaccacggcgccacctgcagaaacctggccgacagatacgagtgccactgccccctgggctacgccggcgtgacctgcgagatggaggtggacgagtgcgccagcgccccctgcctgcacggcggcagctgcctggacggcgtgggcagcttcagatgcgtgtgcgcccccggctacggcggcaccagatgccagctggacctggacgagtgccagagccagccctgcgcccacggcggcacctgccacgacctggtgaacggcttcagatgcgactgcgccggcaccggctacgagggcacccactgcgagagagaggtgctggagtgcgccagcgccccctgcgagcacaacgccagctgcctggagggcctgggcagcttcagatgcctgtgctggcccggctacagcggcgagctgtgcgaggtggacgaggacgagtgcgccagcagcccctgccagcacggcggcagatgcctgcagagaagcgaccccgccctgtacggcggcgtgcaggccgccttccccggcgccttcagcttcagacacgccgccggcttcctgtgccactgcccccccggcttcgagggcgccgactgcggcgtggaggtggacgagtgcgccagcagaccctgcctgaacggcggccactgccaggacctgcccaacggcttccagtgccactgccccgacggctacgccggccccacctgcgaggaggacgtggacgagtgcctgagcgacccctgcctgcacggcggcacctgcagcgacaccgtggccggctacatctgcagatgccccgagacctggggcggcagagactgcagcgtgcagctgaccggctgccagggccacacctgccccctggccgccacctgcatccccatcttcgagagcggcgtgcacagctacgtgtgccactgcccccccggcacccacggccccttctgcggccagaacaccaccttcagcgtgatggccggcagccccatccaggccagcgtgcccgccggcggccccctgggcctggccctgagattcagaaccaccctgcccgccggcaccctggccaccagaaacgacaccaaggagagcctggagctggccctggtggccgccaccctgcaggccaccctgtggagctacagcaccaccgtgctggtgctgagactgcccgacctggccctgaacgacggccactggcaccaggtggaggtggtgctgcacctggccaccctggagctgagactgtggcacgagggctgccccgccagactgtgcgtggccagcggccccgtggccctggccagcaccgccagcgccacccccctgcccgccggcatcagcagcgcccagctgggcgacgccaccttcgccggctgcctgcaggacgtgagagtggacggccacctgctgctgcccgaggacctgggcgagaacgtgctgctgggctgcgagagaagagagcagtgcagacccctgccctgcgtgcacggcggcagctgcgtggacctgtggacccacttcagatgcgactgcgccagaccccacagaggccccacctgcgccgacgagatccccgccgccaccttcggcctgggcggcgcccccagcagcgccagcttcctgctgcaggagctgcccggccccaacctgaccgtgagcttcctgctgagaaccagagagagcgccggcctgctgctgcagttcgccaacgacagcgccgccggcctgaccgtgttcctgagcgagggcagaatcagagccgaggtgcccggcagccccgccgtggtgctgcccggcagatgggacgacggcctgagacacctggtgatgctgagcttcggccccgaccagctgcaggacctgggccagcacgtgcacgtgggcggcagactgctggccgccgacagccagccctggggcggccccttcagaggctgcctgcaggacctgagactggacggctgccacctgcccttcttccccctgcccctggacaacagcagccagcccagcgagctgggcggcagacagagctggaacctgaccgccggctgcgtgagcgaggacatgtgcagccccgacccctgcttcaacggcggcacctgcctggtgacctggaacgacttccactgcacctgccccgccaacttcaccggccccacctgcgcccagcagctgtggtgccccggccagccctgcctgccccccgccacctgcgaggaggtgcccgacggcttcgtgtgcgtggccgaggccaccttcagagagggcccccccgccgccttcagcggccacaacgccagcagcggcagactgctgggcggcctgagcctggccttcagaaccagagacagcgaggcctggctgctgagagccgccgccggcgccctggagggcgtgtggctggccgtgagaaacggcagcctggccggcggcgtgagaggcggccacggcctgcccggcgccgtgctgcccatccccggccccagagtggccgacggcgcctggcacagagtgagactggccatggagagacccgccgccaccaccagcagatggctgctgtggctggacggcgccgccacccccgtggccctgagaggcctggccagcgacctgggcttcctgcagggccccggcgccgtgagaatcctgctggccgagaacttcaccggctgcctgggcagagtggccctgggcggcctgcccctgcccctggccagacccagacccggcgccgcccccggcgccagagagcacttcgccagctggcccggcacccccgcccccatcctgggctgcagaggcgcccccgtgtgcgcccccagcccctgcctgcacgacggcgcctgcagagacctgttcgacgccttcgcctgcgcctgcggccccggctgggagggccccagatgcgaggcccacgtggacccctgccacagcgccccctgcgccagaggcagatgccacacccaccccgacggcagattcgagtgcagatgcccccccggcttcggcggccccagatgcagatgggacggctgggccggcggctgggccgccaacgccccctggggctacggcggcgccgagaagagcgccagaagcgtggacgagagcctgcccttccccggcccccacgtgctgatctgcgacatgagaagaaccgtgtag

SEQ ID NO: 77781 - DNA, 2862 bp, synthetic construct
  misc_feature 1..2862: note = Description of Artificial Sequence: Synthetic coding sequence
  source 1..2862: mol_type = other DNA
atggccatggagcccggcgccctgtggaccttcctgggccacctgtggctgctggccggccccacctgcgaggaggacgtggacgagtgcctgagcgacccctgcctgcacggcggcacctgcagcgacaccgtggccggctacatctgcagatgccccgagacctggggcggcagagactgcagcgtgcagctgaccggctgccagggccacacctgccccctggccgccacctgcatccccatcttcgagagcggcgtgcacagctacgtgtgccactgcccccccggcacccacggccccttctgcggccagaacaccaccttcagcgtgatggccggcagccccatccaggccagcgtgcccgccggcggccccctgggcctggccctgagattcagaaccaccctgcccgccggcaccctggccaccagaaacgacaccaaggagagcctggagctggccctggtggccgccaccctgcaggccaccctgtggagctacagcaccaccgtgctggtgctgagactgcccgacctggccctgaacgacggccactggcaccaggtggaggtggtgctgcacctggccaccctggagctgagactgtggcacgagggctgccccgccagactgtgcgtggccagcggccccgtggccctggccagcaccgccagcgccacccccctgcccgccggcatcagcagcgcccagctgggcgacgccaccttcgccggctgcctgcaggacgtgagagtggacggccacctgctgctgcccgaggacctgggcgagaacgtgctgctgggctgcgagagaagagagcagtgcagacccctgccctgcgtgcacggcggcagctgcgtggacctgtggacccacttcagatgcgactgcgccagaccccacagaggccccacctgcgccgacgagatccccgccgccaccttcggcctgggcggcgcccccagcagcgccagcttcctgctgcaggagctgcccggccccaacctgaccgtgagcttcctgctgagaaccagagagagcgccggcctgctgctgcagttcgccaacgacagcgccgccggcctgaccgtgttcctgagcgagggcagaatcagagccgaggtgcccggcagccccgccgtggtgctgcccggcagatgggacgacggcctgagacacctggtgatgctgagcttcggccccgaccagctgcaggacctgggccagcacgtgcacgtgggcggcagactgctggccgccgacagccagccctggggcggccccttcagaggctgcctgcaggacctgagactggacggctgccacctgcccttcttccccctgcccctggacaacagcagccagcccagcgagctgggcggcagacagagctggaacctgaccgccggctgcgtgagcgaggacatgtgcagccccgacccctgcttcaacggcggcacctgcctggtgacctggaacgacttccactgcacctgccccgccaacttcaccggccccacctgcgcccagcagctgtggtgccccggccagccctgcctgccccccgccacctgcgaggaggtgcccgacggcttcgtgtgcgtggccgaggccaccttcagagagggcccccccgccgccttcagcggccacaacgccagcagcggcagactgctgggcggcctgagcctggccttcagaaccagagacagcgaggcctggctgctgagagccgccgccggcgccctggagggcgtgtggctggccgtgagaaacggcagcctggccggcggcgtgagaggcggccacggcctgcccggcgccgtgctgcccatccccggccccagagtggccgacggcgcctggcacagagtgagactggccatggagagacccgccgccaccaccagcagatggctgctgtggctggacggcgccgccacccccgtggccctgagaggcctggccagcgacctgggcttcctgcagggccccggcgccgtgagaatcctgctggccgagaacttcaccggctgcctgggcagagtggccctgggcggcctgcccctgcccctggccagacccagacccggcgccgcccccggcgccagagagcacttcgccagctggcccggcacccccgcccccatcctgggctgcagaggcgcccccgtgtgcgcccccagcccctgcctgcacgacggcgcctgcagagacctgttcgacgccttcgcctgcgcctgcggccccggctgggagggccccagatgcgaggcccacgtggacccctgccacagcgccccctgcgccagaggcagatgccacacccaccccgacggcagattcgagtgcagatgcccccccggcttcggcggccccagatgcagactgcccgtgcccagcaaggagtgcagcctgaacgtgacctgcctggacggcagcccctgcgagggcggcagccccgccgccaactgcagctgcctggagggcctggccggccagagatgccaggtgcccaccctgccctgcgaggccaacccctgcctgaacggcggcacctgcagagccgccggcggcgtgagcgagtgcatctgcaacgccagattcagcggccagttctgcgaggtggccaagggcctgcccctgcccctgcccttccccctgctggaggtggccgtgcccgccgcctgcgcctgcctgctgctgctgctgctgggcctgctgagcggcatcctggccgccagaaagagaagacagagcgagggcacctacagccccagccagcaggaggtggccggcgccagactggagatggacagcgtgctgaaggtgccccccgaggagagactgatctag

SEQ ID NO: 77782 - DNA, 3858 bp, synthetic construct
  misc_feature 1..3858: note = Description of Artificial Sequence: Synthetic coding sequence
  source 1..3858: mol_type = other DNA
atggccctggccagacccggcacccccgacccccaggccctggccagcgtgctgctgctgctgctgtgggcccccgccctgagcctgctggccggcaccgtgcccagcgagccccccagcgcctgcgccagcgacccctgcgcccccggcaccgagtgccaggccaccgagagcggcggctacacctgcggccccatggagcccagaggctgcgccacccagccctgccaccacggcgccctgtgcgtgccccagggccccgaccccaccggcttcagatgctactgcgtgcccggcttccagggccccagatgcgagctggacatcgacgagtgcgccagcagaccctgccaccacggcgccacctgcagaaacctggccgacagatacgagtgccactgccccctgggctacgccggcgtgacctgcgagatggaggtggacgagtgcgccagcgccccctgcctgcacggcggcagctgcctggacggcgtgggcagcttcagatgcgtgtgcgcccccggctacggcggcaccagatgccagctggacctggacgagtgccagagccagccctgcgcccacggcggcacctgccacgacctggtgaacggcttcagatgcgactgcgccggcaccggctacgagggcacccactgcgagagagaggtgctggagtgcgccagcgccccctgcgagcacaacgccagctgcctggagggcctgggcagcttcagatgcctgtgctggcccggctacagcggcgagctgtgcgaggtggacgaggacgagtgcgccagcagcccctgccagcacggcggcagatgcctgcagagaagcgaccccgccctgtacggcggcgtgcaggccgccttccccggcgccttcagcttcagacacgccgccggcttcctgtgccactgcccccccggcttcgagggcgccgactgcggcgtggaggtggacgagtgcgccagcagaccctgcctgaacggcggccactgccaggacctgcccaacggcttccagtgccactgccccgacggctacgccggccccacctgcgaggaggacgtggacgagtgcctgagcgacccctgcctgcacggcggcacctgcagcgacaccgtggccggctacatctgcagatgccccgagacctggggcggcagagactgcagcgtgcagctgaccggctgccagggccacacctgccccctggccgccacctgcatccccatcttcgagagcggcgtgcacagctacgtgtgccactgcccccccggcacccacggccccttctgcggccagaacaccaccttcagcgtgatggccggcagccccatccaggccagcgtgcccgccggcggccccctgggcctggccctgagattcagaaccaccctgcccgccggcaccctggccaccagaaacgacaccaaggagagcctggagctggccctggtggccgccaccctgcaggccaccctgtggagctacagcaccaccgtgctggtgctgagactgcccgacctggccctgaacgacggccactggcaccaggtggaggtggtgctgcacctggccaccctggagctgagactgtggcacgagggctgccccgccagactgtgcgtggccagcggccccgtggccctggccagcaccgccagcgccacccccctgcccgccggcatcagcagcgcccagctgggcgacgccaccttcgccggctgcctgcaggacgtgagagtggacggccacctgctgctgcccgaggacctgggcgagaacgtgctgctgggctgcgagagaagagagcagtgcagacccctgccctgcgtgcacggcggcagctgcgtggacctgtggacccacttcagatgcgactgcgccagaccccacagaggccccacctgcgccgacgagatccccgccgccaccttcggcctgggcggcgcccccagcagcgccagcttcctgctgcaggagctgcccggccccaacctgaccgtgagcttcctgctgagaaccagagagagcgccggcctgctgctgcagttcgccaacgacagcgccgccggcctgaccgtgttcctgagcgagggcagaatcagagccgaggtgcccggcagccccgccgtggtgctgcccggcagatgggacgacggcctgagacacctggtgatgctgagcttcggccccgaccagctgcaggacctgggccagcacgtgcacgtgggcggcagactgctggccgccgacagccagccctggggcggccccttcagaggctgcctgcaggacctgagactggacggctgccacctgcccttcttccccctgcccctggacaacagcagccagcccagcgagctgggcggcagacagagctggaacctgaccgccggctgcgtgagcgaggacatgtgcagccccgacccctgcttcaacggcggcacctgcctggtgacctggaacgacttccactgcacctgccccgccaacttcaccggccccacctgcgcccagcagctgtggtgccccggccagccctgcctgccccccgccacctgcgaggaggtgcccgacggcttcgtgtgcgtggccgaggccaccttcagagagggcccccccgccgccttcagcggccacaacgccagcagcggcagactgctgggcggcctgagcctggccttcagaaccagagacagcgaggcctggctgctgagagccgccgccggcgccctggagggcgtgtggctggccgtgagaaacggcagcctggccggcggcgtgagaggcggccacggcctgcccggcgccgtgctgcccatccccggccccagagtggccgacggcgcctggcacagagtgagactggccatggagagacccgccgccaccaccagcagatggctgctgtggctggacggcgccgccacccccgtggccctgagaggcctggccagcgacctgggcttcctgcagggccccggcgccgtgagaatcctgctggccgagaacttcaccggctgcctgggcagagtggccctgggcggcctgcccctgcccctggccagacccagacccggcgccgcccccggcgccagagagcacttcgccagctggcccggcacccccgcccccatcctgggctgcagaggcgcccccgtgtgcgcccccagcccctgcctgcacgacggcgcctgcagagacctgttcgacgccttcgcctgcgcctgcggccccggctgggagggccccagatgcgaggcccacgtggacccctgccacagcgccccctgcgccagaggcagatgccacacccaccccgacggcagattcgagtgcagatgcccccccggcttcggcggccccagatgcagactgcccgtgcccagcaaggagtgcagcctgaacgtgacctgcctggacggcagcccctgcgagggcggcagccccgccgccaactgcagctgcctggagggcctggccggccagagatgccaggtgcccaccctgccctgcgaggccaacccctgcctgaacggcggcacctgcagagccgccggcggcgtgagcgagtgcatctgcaacgccagattcagcggccagttctgcgaggtggccaagggcctgcccctgcccctgcccttccccctgctggaggtggccgtgcccgccgcctgcgcctgcctgctgctgctgctgctgggcctgctgagcggcatcctggccgccagaaagagaagacagagcgagggcacctacagccccagccagcaggaggtggccggcgccagactggagatggacagcgtgctgaaggtgccccccgaggagagactgatctag

SEQ ID NO: 77783 - DNA, 363 bp, synthetic construct
  misc_feature 1..363: note = Description of Artificial Sequence: Synthetic coding sequence
  source 1..363: mol_type = other DNA
atggccaaccccggcctgggcctgctgctggccctgggcctgcccttcctgctggccagatggggcagagcctggggccagatccagaccaccagcgccaacgagaacagcaccgtgctgcccagcagcaccagcagcagcagcgacggcaacctgagacccgaggccatcaccgccatcatcgtggtgttcagcctgctggccgccctgctgctggccgtgggcctggccctgctggtgagaaagctgagagagaagagacagaccgagggcacctacagacccagcagcgaggagcaggtgggcgccagagtgccccccacccccaacctgaagctgccccccgaggagagactgatctag

SEQ ID NO: 77784 - DNA, 372 bp, synthetic construct
  misc_feature 1..372: note = Description of Artificial Sequence: Synthetic coding sequence
  source 1..372: mol_type = other DNA
atggccaaccccggcctgggcctgctgctggccctgggcctgcccttcctgctggccagatggggcagagcctggggccagatccagaccaccagcgccaacgagaacagcaccgtgctgcccagcagcaccagcagcagcagcgacggcaacctgagacccgaggccatcaccgccatcatcgtggtgttcagcctgctggccgccctgctgctggccgtgggcctggccctgctggtgagaaagctgagagagaagagacagaccgagggcacctacagacccagcagcgaggagcagttcagccacgccgccgaggccagagccccccaggacagcaaggagaccgtgcagggctgcctgcccatctag

SEQ ID NO: 77785 - DNA, 363 bp, synthetic construct; identical to SEQ ID NO: 77783
  misc_feature 1..363: note = Description of Artificial Sequence: Synthetic coding sequence
  source 1..363: mol_type = other DNA

SEQ ID NO: 77786 - DNA, 1599 bp, synthetic construct
  misc_feature 1..1599: note = Description of Artificial Sequence: Synthetic coding sequence
  source 1..1599: mol_type = other DNA
atgcccgccccccccggcagaacccacacctggttcctgctgcagagcctggaggacctggacaccagcctgagaaagctgaacagcagactgttcgtggtgagaggccagcccgccgacgtgttccccagactgttcaaggagtggggcgtgaccagactgaccttcgagtacgacagcgagcccttcggcaaggagagagacgccgccatcatgaagatggccaaggaggccggcgtggaggtggtgaccgagaacagccacaccctgtacgacctggacagaatcatcgagctgaacggccagaagccccccctgacctacaagagattccaggccatcatcagcagaatggagctgcccaagaagcccgtgggcctggtgaccagccagcagatggagagctgcagagccgagatccaggagaaccacgacgagacctacggcgtgcccagcctggaggagctgggcttccccaccgagggcctgggccccgccgtgtggcagggcggcgagaccgaggccctggccagactggacaagcacctggagagaaaggcctgggtggccaactacgagagacccagaatgaacgccaacagcctgctggccagccccaccggcctgagcccctacctgagattcggctgcctgagctgcagactgttctactacagactgtgggacctgtacaagaaggtgaagagaaacagcaccccccccctgagcctgttcggccagctgctgtggagagagttcttctacaccgccgccaccaacaaccccagattcgacagaatggagggcaaccccatctgcatccagatcccctgggacagaaaccccgaggccctggccaagtgggccgagggcaagaccggcttcccctggatcgacgccatcatgacccagctgagacaggagggctggatccaccacctggccagacacgccgtggcctgcttcctgaccagaggcgacctgtgggtgagctgggagagcggcgtgagagtgttcgacgagctgctgctggacgccgacttcagcgtgaacgccggcagctggatgtggctgagctgcagcgccttcttccagcagttcttccactgctactgccccgtgggcttcggcagaagaaccgaccccagcggcgactacatcagaagatacctgcccaagctgaaggccttccccagcagatacatctacgagccctggaacgcccccgagagcatccagaaggccgccaagtgcatcatcggcgtggactaccccagacccatcgtgaaccacgccgagaccagcagactgaacatcgagagaatgaagcagatctaccagcagctgagcagatacagaggcctgtgcctgctggccagcgtgcccagctgcgtggaggacctgagccaccccgtggccgagcccagcagcagccaggccggcagcatgagcagcgccggccccagacccctgcccagcggccccgccagccccaagagaaagctggaggccgccgaggagccccccggcgaggagctgagcaagagagccagagtggccgagctgcccacccccgagctgcccagcaaggacgcctag

SEQ ID NO: 77787 - DNA, 1845 bp, synthetic construct
  misc_feature 1..1845: note = Description of Artificial Sequence: Synthetic coding sequence
  source 1..1845: mol_type = other DNA
atgggcggcgtgcacgtggcctacagaggcggcgccggcgtggccggcgccgtgtggaccgtgatggccgccaccgtggccaccgccgccgccgtggcccccgcccccgcccccggcaccgacagcgccagcagcgtgcactggttcagaaagggcctgagactgcacgacaaccccgccctgctggccgccgtgagaggcgccagatgcgtgagatgcgtgtacatcctggacccctggttcgccgccagcagcagcgtgggcatcaacagatggagattcctgctgcagagcctggaggacctggacaccagcctgagaaagctgaacagcagactgttcgtggtgagaggccagcccgccgacgtgttccccagactgttcaaggagtggggcgtgaccagactgaccttcgagtacgacagcgagcccttcggcaaggagagagacgccgccatcatgaagatggccaaggaggccggcgtggaggtggtgaccgagaacagccacaccctgtacgacctggacagaatcatcgagctgaacggccagaagccccccctgacctacaagagattccaggccatcatcagcagaatggagctgcccaagaagcccgtgggcctggtgaccagccagcagatggagagctgcagagccgagatccaggagaaccacgacgagacctacggcgtgcccagcctggaggagctgggcttccccaccgagggcctgggccccgccgtgtggcagggcggcgagaccgaggccctggccagactggacaagcacctggagagaaaggcctgggtggccaactacgagagacccagaatgaacgccaacagcctgctggccagccccaccggcctgagcccctacctgagattcggctgcctgagctgcagactgttctactacagactgtgggacctgtacaagaaggtgaagagaaacagcaccccccccctgagcctgttcggccagctgctgtggagagagttcttctacaccgccgccaccaacaaccccagattcgacagaatggagggcaaccccatctgcatccagatcccctgggacagaaaccccgaggccctggccaagtgggccgagggcaagaccggcttcccctggatcgacgccatcatgacccagctgagacaggagggctggatccaccacctggccagacacgccgtggcctgcttcctgaccagaggcgacctgtgggtgagctgggagagcggcgtgagagtgttcgacgagctgctgctggacgccgacttcagcgtgaacgccggcagctggatgtggctgagctgcagcgccttcttccagcagttcttccactgctactgccccgtgggcttcggcagaagaaccgaccccagcggcgactacatcagaagatacctgcccaagctgaaggccttccccagcagatacatctacgagccctggaacgcccccgagagcatccagaaggccgccaagtgcatcatcggcgtggactaccccagacccatcgtgaaccacgccgagaccagcagactgaacatcgagagaatgaagcagatctaccagcagctgagcagatacagaggcctgtgcctgctggccagcgtgcccagctgcgtggaggacctgagccaccccgtggccgagcccagcagcagccaggccggcagcatgagcagcgccggccccagacccctgcccagcggccccgccagccccaagagaaagctggaggccgccgaggagccccccggcgaggagctgagcaagagagccagagtggccgagctgcccacccccgagctgcccagcaaggacgcctag

SEQ ID NO: 77788 - DNA, 522 bp, synthetic construct
  misc_feature 1..522: note = Description of Artificial Sequence: Synthetic coding sequence
  source 1..522: mol_type = other DNA
atggacgtgaccatccagcacccctggttcaagagaaccctgggccccttctaccccagcagactgttcgaccagttcttcggcgagggcctgttcgagtacgacctgctgcccttcctgagcagcaccatcagcccctactacagacagagcctgttcagaaccgtgctggacagcggcatcagcgaggtgagaagcgacagagacaagttcgtgatcttcctggacgtgaagcacttcagccccgaggacctgaccgtgaaggtgcaggacgacttcgtggagatccacggcaagcacaacgagagacaggacgaccacggctacatcagcagagagttccacagaagatacagactgcccagcaacgtggaccagagcgccctgagctgcagcctgagcgccgacggcatgctgaccttctgcggccccaagatccagaccggcctggacgccacccacgccgagagagccatccccgtgagcagagaggagaagcccaccagcgcccccagcagctag

SEQ ID NO: 77789 - DNA, 570 bp, synthetic construct
  misc_feature 1..570: note = Description of Artificial Sequence: Synthetic coding sequence
  source 1..570: mol_type = other DNA
atggccctggtgagaggcggctggctgtggagacagagcagcatcctgagaagatggaagagaaactggttcgccctgtggctggacggcaccctgggctactaccacgacgagaccgcccaggacgaggaggacagagtgctgatccacttcaacgtgagagacatcaagatcggccccgagtgccacgacgtgcagccccccgagggcagaagcagagacggcctgctgaccgtgaacctgagagagggcggcagactgcacctgtgcgccgagaccaaggacgacgccctggcctggaagaccgccctgctggaggccaacagcacccccgtgagagtgtacagcccctaccaggactactacgaggtggtgccccccaacgcccacgaggccacctacgtgagaagctactacggccccccctacgccggccccggcgtgacccacgtgatcgtgagagaggacccctgctacagcgccggcgcccccctggccatgggcatgctggccggcgccgccaccggcgccgccctgggcagcctgatgtggagcccctgctggttctag

SEQ ID NO: 77790 - DNA, 528 bp, synthetic construct
  misc_feature 1..528: note = Description of Artificial Sequence: Synthetic coding sequence
  source 1..528: mol_type = other DNA
atggacatcgccatccaccacccctggatcagaagacccttcttccccttccacagccccagcagactgttcgaccagttcttcggcgagcacctgctggagagcgacctgttccccaccagcaccagcctgagccccttctacctgagaccccccagcttcctgagagcccccagctggttcgacaccggcctgagcgagatgagactggagaaggacagattcagcgtgaacctggacgtgaagcacttcagccccgaggagctgaaggtgaaggtgctgggcgacgtgatcgaggtgcacggcaagcacgaggagagacaggacgagcacggcttcatcagcagagagttccacagaaagtacagaatccccgccgacgtggaccccctgaccatcaccagcagcctgagcagcgacggcgtgctgaccgtgaacggccccagaaagcaggtgagcggccccgagagaaccatccccatcaccagagaggagaagcccgccgtgaccgccgcccccaagaagtag

SEQ ID NO: 77791 - DNA, 525 bp, synthetic construct
  misc_feature 1..525: note = Description of Artificial Sequence: Synthetic coding sequence
  source 1..525: mol_type = other DNA
atggacatcgccatccaccacccctggatcagaagacccttcttccccttccacagccccagcagactgttcgaccagttcttcggcgagcacctgctggagagcgacctgttccccaccagcaccagcctgagccccttctacctgagaccccccagcttcctgagagcccccagctggttcgacaccggcctgagcgagatgagactggagaaggacagattcagcgtgaacctggacgtgaagcacttcagccccgaggagctgaaggtgaaggtgctgggcgacgtgatcgaggtgcacggcaagcacgaggagagacaggacgagcacggcttcatcagcagagagttccacagaaagtacagaatccccgccgacgtggaccccctgaccatcaccagcagcctgagcagcgacggcgtgctgaccgtgaacggccccagaaagcaggtgagcggccccgagagaaccatccccatcaccagagaggagaagcccgccgtgaccgccgcccccaagtag

SEQ ID NO: 77792 - DNA, 528 bp, synthetic construct; identical to SEQ ID NO: 77790
  misc_feature 1..528: note = Description of Artificial Sequence: Synthetic coding sequence
  source 1..528: mol_type = other DNA

SEQ ID NO: 77793 - DNA, 234 bp, synthetic construct
  misc_feature 1..234: note = Description of Artificial Sequence: Synthetic coding sequence
  source 1..234: mol_type = other DNA
atggacatcgccatccaccacccctggatcagaagacccttcttccccttccacagccccagcagactgttcgaccagttcttcggcgagcacctgctggagagcgacctgttccccaccagcaccagcctgagccccttctacctgagaccccccagcttcctgagagcccccagctggttcgacaccggcctgagcgagatgagactggagaaggacagattcagcgtgtag

SEQ ID NO: 77794 - DNA, 393 bp, synthetic construct
  misc_feature 1..393: note = Description of Artificial Sequence: Synthetic coding sequence
  source 1..393: mol_type = other DNA
atggacatcgccatccaccacccctggatcagaagacccttcttccccttccacagccccagcagactgttcgaccagttcttcggcgagcacctgctggagagcgacctgttccccaccagcaccagcctgagccccttctacctgagaccccccagcttcctgagagcccccagctggttcgacaccggcctgagcgagatgagactggagaaggacagattcagcgtgaacctggacgtgaagcacttcagccccgaggagctgaaggtgaaggtgctgggcgacgtgatcgaggtgcacggcaagcacgaggagagacaggacgagcacggcttcatcagcagagagttccacagaaagtacagaatccccgccgacgtggacccctag

SEQ ID NO: 77795 - DNA, 528 bp, synthetic construct; identical to SEQ ID NO: 77790
  misc_feature 1..528: note = Description of Artificial Sequence: Synthetic coding sequence
  source 1..528: mol_type = other DNA

SEQ ID NO: 77796 - DNA, 528 bp, synthetic construct; identical to SEQ ID NO: 77790
  misc_feature 1..528: note = Description of Artificial Sequence: Synthetic coding sequence
  source 1..528: mol_type = other DNA

SEQ ID NO: 77797 - DNA, 210 bp, synthetic construct
  misc_feature 1..210: note = Description of Artificial Sequence: Synthetic coding sequence
  source 1..210: mol_type = other DNA
atggacatcgccatccaccacccctggatcagaagacccttcttccccttccacagccccagcagactgttcgaccagttcttcggcgagcacctgctggagagcgacctgttccccaccagcaccagcctgagccccttctacctgagaccccccagcttcctgagagcccccagctggttcgacaccggcctgagcgagatgagatag

SEQ ID NO: 77798 - DNA, 2148 bp, synthetic construct
  misc_feature 1..2148: note = Description of Artificial Sequence: Synthetic coding sequence
  source 1..2148: mol_type = other DNA
atgcacctgctgcccgccctggccggcgtgctggccaccctggtgctggcccagccctgcgagggcaccgaccccgccagccccggcgccgtggagaccagcgtgctgagagactgcatcgccgaggccaagctgctggtggacgccgcctacaactggacccagaagagcatcaagcagagactgagaagcggcagcgccagccccatggacctgctgagctacttcaagcagcccgtggccgccaccagaaccgtggtgagagccgccgactacatgcacgtggccctgggcctgctggaggagaagctgcagccccagagaagcggccccttcaacgtgaccgacgtgctgaccgagccccagctgagactgctgagccaggccagcggctgcgccctgagagaccaggccgagagatgcagcgacaagtacagaaccatcaccggcagatgcaacaacaagagaagacccctgctgggcgccagcaaccaggccctggccagatggctgcccgccgagtacgaggacggcctgagcctgcccttcggctggacccccagcagaagaagaaacggcttcctgctgcccctggtgagagccgtgagcaaccagatcgtgagattccccaacgagagactgaccagcgacagaggcagagccctgatgttcatgcagtggggccagttcatcgaccacgacctggacttcagccccgagagccccgccagagtggccttcaccgccggcgtggactgcgagagaacctgcgcccagctgcccccctgcttccccatcaagatcccccccaacgaccccagaatcaagaaccagagagactgcatccccttcttcagaagcgcccccagctgcccccagaacaagaacagagtgagaaaccagatcaacgccctgaccagcttcgtggacgccagcatggtgtacggcagcgaggtgagcctgagcctgagactgagaaacagaaccaactacctgggcctgctggccatcaaccagagattccaggacaacggcagagccctgctgcccttcgacaacctgcacgacgacccctgcctgctgaccaacagaagcgccagaatcccctgcttcctggccggcgacaccagaagcaccgagacccccaagctggccgccatgcacaccctgttcatgagagagcacaacagactggccaccgagctgagaagactgaaccccagatggaacggcgacaagctgtacaacgaggccagaaagatcatgggcgccatggtgcagatcatcacctacagagacttcctgcccctggtgctgggcaaggccagagccagaagaaccctgggccactacagaggctactgcagcaacgtggaccccagagtggccaacgtgttcaccctggccttcagattcggccacaccatgctgcagcccttcatgttcagactggacagccagtacagagccagcgcccccaacagccacgtgcccctgagcagcgccttcttcgccagctggagaatcgtgtacgagggcggcatcgaccccatcctgagaggcctgatggccacccccgccaagctgaacagacaggacgccatgctggtggacgagctgagagacagactgttcagacaggtgagaagaatcggcctggacctggccgccctgaacatgcagagaagcagagaccacggcctgcccggctacaacgcctggagaagattctgcggcctgagccagcccagaaacctggcccagctgagcagagtgctgaagaaccaggacctggccagaaagttcctgaacctgtacggcacccccgacaacatcgacatctggatcggcgccatcgccgagcccctgctgcccggcgccagagtgggccccctgctggcctgcctgttcgagaaccagttcagaagagccagagacggcgacagattctggtggcagaagagaggcgtgttcaccaagagacagagaaaggccctgagcagaatcagcctgagcagaatcatctgcgacaacaccggcatcaccaccgtgagcagagacatcttcagagccaacatctaccccagaggcttcgtgaactgcagcagaatccccagactgaacctgagcgcctggagaggcacctag

SEQ ID NO: 77799 - DNA, 594 bp, synthetic construct
  misc_feature 1..594: note = Description of Artificial Sequence: Synthetic coding sequence
  source 1..594: mol_type = other DNA
atgagcagcgcccccgcccccggccccgcccccgccagcctgaccctgtgggacgaggaggacttccagggcagaagatgcagactgctgagcgactgcgccaacgtgtgcgagagaggcggcctgcccagagtgagaagcgtgaaggtggagaacggcgtgtgggtggccttcgagtaccccgacttccagggccagcagttcatcctggagaagggcgactaccccagatggagcgcctggagcggcagcagcagccacaacagcaaccagctgctgagcttcagacccgtgctgtgcgccaaccacaacgacagcagagtgaccctgttcgagggcgacaacttccagggctgcaagttcgacctggtggacgactaccccagcctgcccagcatgggctgggccagcaaggacgtgggcagcctgaaggtgagcagcggcgcctgggtggcctaccagtaccccggctacagaggctaccagtacgtgctggagagagacagacacagcggcgagttctgcacctacggcgagctgggcacccaggcccacaccggccagctgcagagcatcagaagagtgcagcactag

SEQ ID NO: 77800 - DNA, 594 bp, synthetic construct; identical to SEQ ID NO: 77799
  misc_feature 1..594: note = Description of Artificial Sequence: Synthetic coding sequence
  source 1..594: mol_type = other DNA

SEQ ID NO: 77801 - DNA, 390 bp, synthetic construct
  misc_feature 1..390: note = Description of Artificial Sequence: Synthetic coding sequence
  source 1..390: mol_type = other DNA
atgagcagcgcccccgcccccggccccgcccccgccagcctgaccctgtgggacgaggaggacttccagggcagaagatgcagactgctgagcgactgcgccaacgtgtgcgagagaggcggcctgcccagagtgagaagcgtgaaggtggagaacggcgtgtgggtggccttcgagtaccccgacttccagggccagcagttcatcctggagaagggcgactaccccagatggagcgcctggagcggcagcagcagccacaacagcaaccagctgctgagcttcagacccgtgctgtgcgccaaccacaacgacagcagagtgaccctgttcgagggcgacaacttccagggctgcaagttcgacctggtggacgactaccccagctag

SEQ ID NO: 77802 - DNA, 591 bp, synthetic construct
  misc_feature 1..591: note = Description of Artificial Sequence: Synthetic coding sequence
  source 1..591: mol_type = other DNA
atgaccctgcagtgcaccaagagcgccggcccctggaagatggtggtgtgggacgaggacggcttccagggcagaagacacgagttcaccgccgagtgccccagcgtgctggagctgggcttcgagaccgtgagaagcctgaaggtgctgagcggcgcctgggtgggcttcgagcacgccggcttccagggccagcagtacatcctggagagaggcgagtaccccagctgggacgcctggggcggcaacaccgcctaccccgccgagagactgaccagcttcagacccgccgcctgcgccaaccacagagacagcagactgaccatcttcgagcaggagaacttcctgggcaagaagggcgagctgagcgacgactaccccagcctgcaggccatgggctgggagggcaacgaggtgggcagcttccacgtgcacagcggcgcctgggtgtgcagccagttccccggctacagaggcttccagtacgtgctggagtgcgaccaccacagcggcgactacaagcacttcagagagtggggcagccacgcccccaccttccaggtgcagagcatcagaagaatccagcagtag

SEQ ID NO: 77803 - DNA, 1614 bp, synthetic construct
  misc_feature 1..1614: note = Description of Artificial Sequence: Synthetic coding sequence
  source 1..1614: mol_type = other DNA
atggagagagtgaacgacgccagctgcggccccagcggctgctacacctaccaggtgagcagacacagcaccgagatgctgcacaacctgaaccagcagagaaagaacggcggcagattctgcgacgtgctgctgagagtgggcgacgagagcttccccgcccacagagccgtgctggccgcctgcagcgagtacttcgagagcgtgttcagcgcccagctgggcgacggcggcgccgccgacggcggccccgccgacgtgggcggcgccaccgccgcccccggcggcggcgccggcggcagcagagagctggagatgcacaccatcagcagcaaggtgttcggcgacatcctggacttcgcctacaccagcagaatcgtggtgagactggagagcttccccgagctgatgaccgccgccaagttcctgctgatgagaagcgtgatcgagatctgccaggaggtgatcaagcagagcaacgtgcagatcctggtgccccccgccagagccgacatcatgctgttcagaccccccggcaccagcgacctgggcttccccctggacatgaccaacggcgccgccctggccgccaacagcaacggcatcgccggcagcatgcagcccgaggaggaggccgccagagccgccggcgccgccatcgccggccaggccagcctgcccgtgctgcccggcgtggacagactgcccatggtggccggccccctgagcccccagctgctgaccagccccttccccagcgtggccagcagcgccccccccctgaccggcaagagaggcagaggcagacccagaaaggccaacctgctggacagcatgttcggcagccccggcggcctgagagaggccggcatcctgccctgcggcctgtgcggcaaggtgttcaccgacgccaacagactgagacagcacgaggcccagcacggcgtgaccagcctgcagctgggctacatcgacctgcccccccccagactgggcgagaacggcctgcccatcagcgaggaccccgacggccccagaaagagaagcagaaccagaaagcaggtggcctgcgagatctgcggcaagatcttcagagacgtgtaccacctgaacagacacaagctgagccacagcggcgagaagccctacagctgccccgtgtgcggcctgagattcaagagaaaggacagaatgagctaccacgtgagaagccacgacggcagcgtgggcaagccctacatctgccagagctgcggcaagggcttcagcagacccgaccacctgaacggccacatcaagcaggtgcacaccagcgagagaccccacaagtgccaggtgtgggtgggcagcagcagcggcctgccccccctggagcccctgcccagcgacctgcccagctgggacttcgcccagcccgccctgtggagaagcagccacagcgtgcccgacaccgccttcagcctgagcctgaagaagagcttccccgccctggagaacctgggccccgcccacagcagcaacaccctgttctgccccgccccccccggctacctgagacagggctggaccacccccgagggcagcagagccttcacccagtggcccgtgggctag

SEQ ID NO: 77804 - DNA, 618 bp, synthetic construct
  misc_feature 1..618: note = Description of Artificial Sequence: Synthetic coding sequence
  source 1..618: mol_type = other DNA
atggccagcgaccaccagacccaggccggcaagccccagagcctgaaccccaagatcatcatcttcgagcaggagaacttccagggccacagccacgagctgaacggcccctgccccaacctgaaggagaccggcgtggagaaggccggcagcgtgctggtgcaggccggcccctgggtgggctacgagcaggccaactgcaagggcgagcagttcgtgttcgagaagggcgagtaccccagatgggacagctggaccagcagcagaagaaccgacagcctgagcagcctgagacccatcaaggtggacagccaggagcacaagatcatcctgtacgagaaccccaacttcaccggcaagaagatggagatcatcgacgacgacgtgcccagcttccacgcccacggctaccaggagaaggtgagcagcgtgagagtgcagagcggcacctgggtgggctaccagtaccccggctacagaggcctgcagtacctgctggagaagggcgactacaaggacagcagcgacttcggcgccccccacccccaggtgcagagcgtgagaagaatcagagacatgcagtggcaccagagaggcgccttccaccccagcaactag

SEQ ID NO: 77805 - DNA, 1284 bp, synthetic construct
  misc_feature 1..1284: note = Description of Artificial Sequence: Synthetic coding sequence
  source 1..1284: mol_type = other DNA
atgagacacctgggcgccttcctgttcctgctgggcgtgctgggcgccctgaccgagatgtgcgagatccccgagatggacagccacctggtggagaagctgggccagcacctgctgccctggatggacagactgagcctggagcacctgaaccccagcatctacgtgggcctgagactgagcagcctgcaggccggcaccaaggaggacctgtacctgcacagcctgaagctgggctaccagcagtgcctgctgggcagcgccttcagcgaggacgacggcgactgccagggcaagcccagcatgggccagctggccctgtacctgctggccctgagagccaactgcgagttcgtgagaggccacaagggcgacagactggtgagccagctgaagtggttcctggaggacgagaagagagccatcggccacgaccacaagggccacccccacaccagctactaccagtacggcctgggcatcctggccctgtgcctgcaccagaagagagtgcacgacagcgtggtggacaagctgctgtacgccgtggagcccttccaccagggccaccacagcgtggacaccgccgccatggccggcctggccttcacctgcctgaagagaagcaacttcaaccccggcagaagacagagaatcaccatggccatcagaaccgtgagagaggagatcctgaaggcccagacccccgagggccacttcggcaacgtgtacagcacccccctggccctgcagttcctgatgaccagccccatgagaggcgccgagctgggcaccgcctgcctgaaggccagagtggccctgctggccagcctgcaggacggcgccttccagaacgccctgatgatcagccagctgctgcccgtgctgaaccacaagacctacatcgacctgatcttccccgactgcctggcccccagagtgatgctggagcccgccgccgagaccatcccccagacccaggagatcatcagcgtgaccctgcaggtgctgagcctgctgcccccctacagacagagcatcagcgtgctggccggcagcaccgtggaggacgtgctgaagaaggcccacgagctgggcggcttcacctacgagacccaggccagcctgagcggcccctacctgaccagcgtgatgggcaaggccgccggcgagagagagttctggcagctgctgagagaccccaacacccccctgctgcagggcatcgccgactacagacccaaggacggcgagaccatcgagctgagactggtgagctggtag

SEQ ID NO: 77806 - DNA, 525 bp, synthetic construct
  misc_feature 1..525: note = Description of Artificial Sequence: Synthetic coding sequence
  source 1..525: mol_type = other DNA
atgggcaagatcaccttctacgaggacagagacttccagggcagatgctacaactgcatcagcgactgccccaacctgagagtgtacttcagcagatgcaacagcatcagagtggacagcggctgctggatgctgtacgagagacccaactaccagggccaccagtacttcctgagaagaggcaagtaccccgactaccagcactggatgggcctgagcgacagcgtgcagagctgcagaatcatcccccacaccagcagccacaagctgagactgtacgagagagacgactacagaggcctgatgagcgagctgaccgacgactgcgcctgcgtgcccgagctgttcagactgcccgagatctacagcctgcacgtgctggagggctgctgggtgctgtacgagatgcccaactacagaggcagacagtacctgctgagacccggcgactacagaagataccacgactggggcggcgccgacgccaaggtgggcagcctgagaagagtgaccgacctgtactag

SEQ ID NO: 77807 - DNA, 528 bp, synthetic construct
  misc_feature 1..528: note = Description of Artificial Sequence: Synthetic coding sequence
  source 1..528: mol_type = other DNA
atgggcaagatcaccttctacgaggacagagccttccagggcagaagctacgagtgcaccaccgactgccccaacctgcagccctacttcagcagatgcaacagcatcagagtggagagcggctgctggatgatctacgagagacccaactaccagggccaccagtacttcctgagaagaggcgagtaccccgactaccagcagtggatgggcctgagcgacagcatcagaagctgctgcctgatccccccccacagcggcgcctacagaatgaagatctacgacagagacgagctgagaggccagatgagcgagctgaccgacgactgcatcagcgtgcaggacagattccacctgaccgagatccacagcctgaacgtgctggagggcagctggatcctgtacgagatgcccaactacagaggcagacagtacctgctgagacccggcgagtacagaagattcctggactggggcgcccccaacgccaaggtgggcagcctgagaagagtgatggacctgtactag

SEQ ID NO: 77808 - DNA, 525 bp, synthetic construct
  misc_feature 1..525: note = Description of Artificial Sequence: Synthetic coding sequence
  source 1..525: mol_type = other DNA
atgggcaagatcaccttctacgaggacagagccttccagggcagaagctacgagaccaccaccgactgccccaacctgcagccctacttcagcagatgcaacagcatcagagtggagagcggctgctggatgctgtacgagagacccaactaccagggccagcagtacctgctgagaagaggcgagtaccccgactaccagcagtggatgggcctgagcgacagcatcagaagctgctgcctgatcccccagaccgtgagccacagactgagactgtacgagagagaggaccacaagggcctgatgatggagctgagcgaggactgccccagcatccaggacagattccacctgagcgagatcagaagcctgcacgtgctggagggctgctgggtgctgtacgagctgcccaactacagaggcagacagtacctgctgagaccccaggagtacagaagatgccaggactggggcgccatggacgccaaggccggcagcctgagaagagtggtggacctgtactag

SEQ ID NO: 77809 - DNA, 525 bp, synthetic construct
  misc_feature 1..525: note = Description of Artificial Sequence: Synthetic coding sequence
  source 1..525: mol_type = other DNA
atgggcaagatcaccctgtacgaggacagaggcttccagggcagacactacgagtgcagcagcgaccaccccaacctgcagccctacctgagcagatgcaacagcgccagagtggacagcggctgctggatgctgtacgagcagcccaactacagcggcctgcagtacttcctgagaagaggcgactacgccgaccaccagcagtggatgggcctgagcgacagcgtgagaagctgcagactgatcccccacagcggcagccacagaatcagactgtacgagagagaggactacagaggccagatgatcgagttcaccgaggactgcagctgcctgcaggacagattcagattcaacgagatccacagcctgaacgtgctggagggcagctgggtgctgtacgagctgagcaactacagaggcagacagtacctgctgatgcccggcgactacagaagataccaggactggggcgccaccaacgccagagtgggcagcctgagaagagtgatcgacttcagctag

SEQ ID NO: 77810 - DNA, 537 bp, synthetic construct
  misc_feature 1..537: note = Description of Artificial Sequence: Synthetic coding sequence
  source 1..537: mol_type = other DNA
atgagcaagaccggcaccaagatcaccttctacgaggacaagaacttccagggcagaagatacgactgcgactgcgactgcgccgacttccacacctacctgagcagatgcaacagcatcaaggtggagggcggcacctgggccgtgtacgagagacccaacttcgccggctacatgtacatcctgccccagggcgagtaccccgagtaccagagatggatgggcctgaacgacagactgagcagctgcagagccgtgcacctgcccagcggcggccagtacaagatccagatcttcgagaagggcgacttcagcggccagatgtacgagaccaccgaggactgccccagcatcatggagcagttccacatgagagagatccacagctgcaaggtgctggagggcgtgtggatcttctacgagctgcccaactacagaggcagacagtacctgctggacaagaaggagtacagaaagcccatcgactggggcgccgccagccccgccgtgcagagcttcagaagaatcgtggagtag

SEQ ID NO: 77811 - DNA, 537 bp, synthetic construct; identical to SEQ ID NO: 77810
  misc_feature 1..537: note = Description of Artificial Sequence: Synthetic coding sequence
  source 1..537: mol_type = other DNA

SEQ ID NO: 77812 - DNA, 960 bp, synthetic construct
  misc_feature 1..960: note = Description of Artificial Sequence: Synthetic coding sequence
  source 1..960: mol_type = other DNA
atggccagcagcgccgccggctgcgtggtgatcgtgggcagcggcgtgatcggcagaagctgggccatgctgttcgccagcggcggcttccaggtgaagctgtacgacatcgagcagcagcagatcagaaacgccctggagaacatcagaaaggagatgaagctgctggagcaggccggcagcctgaagggcagcctgagcgtggaggagcagctgagcctgatcagcggctgccccaacatccaggaggccgtggagggcgccatgcacatccaggagtgcgtgcccgaggacctggagctgaagaagaagatcttcgcccagctggacagcatcatcgacgacagagtgatcctgagcagcagcaccagctgcctgatgcccagcaagctgttcgccggcctggtgcacgtgaagcagtgcatcgtggcccaccccgtgaaccccccctactacatccccctggtggagctggtgccccaccccgagaccgcccccaccaccgtggacagaacccacgccctgatgaagaagatcggccagtgccccatgagagtgcagaaggaggtggccggcttcgtgctgaacagactgcagtacgccatcatcagcgaggcctggagactggtggaggagggcatcgtgagccccagcgacctggacctggtgatgagcgagggcctgggcatgagatacgccttcatcggccccctggagaccatgcacctgaacgccgagggcatgctgagctactgcgacagatacagcgagggcatcaagcacgtgctgcagaccttcggccccatccccgagttcagcagagccaccgccgagaaggtgaaccaggacatgtgcatgaaggtgcccgacgaccccgagcacctggccgccagaagacagtggagagacgagtgcctgatgagactggccaagctgaagagccaggtgcagccccagtag

SEQ ID NO: 77813 - DNA, 2346 bp, synthetic construct
  misc_feature 1..2346: note = Description of Artificial Sequence: Synthetic coding sequence
  source 1..2346: mol_type = other DNA
atggccaagacccccagcgaccacctgctgagcaccctggaggagctggtgccctacgacttcgagaagttcaagttcaagctgcagaacaccagcgtgcagaaggagcacagcagaatccccagaagccagatccagagagccagacccgtgaagatggccaccctgctggtgacctactacggcgaggagtacgccgtgcagctgaccctgcaggtgctgagagccatcaaccagagactgctggccgaggagctgcacagagccgccatccaggagtacagcacccaggagaacggcaccgacgacagcgccgccagcagcagcctgggcgagaacaagcccagaagcctgaagacccccgaccaccccgagggcaacgagggcaacggccccagaccctacggcggcggcgccgccagcctgagatgcagccagcccgaggccggcagaggcctgagcagaaagcccctgagcaagagaagagagaaggccagcgagggcctggacgcccagggcaagcccagaaccagaagccccgccctgcccggcggcagaagccccggcccctgcagagccctggagggcggccaggccgaggtgagactgagaagaaacgccagcagcgccggcagactgcagggcctggccggcggcgcccccggccagaaggagtgcagacccttcgaggtgtacctgcccagcggcaagatgagacccagaagcctggaggtgaccatcagcaccggcgagaaggcccccgccaaccccgagatcctgctgaccctggaggagaagaccgccgccaacctggacagcgccaccgagcccagagccagacccacccccgacggcggcgccagcgccgacctgaaggagggccccggcaaccccgagcacagcgtgaccggcagaccccccgacaccgccgccagccccagatgccacgcccaggagggcgaccccgtggacggcacctgcgtgagagacagctgcagcttccccgaggccgtgagcggccacccccaggccagcggcagcagaagccccggctgccccagatgccaggacagccacgagagaaagagccccggcagcctgagcccccagcccctgccccagtgcaagagacacctgaagcaggtgcagctgctgttctgcgaggaccacgacgagcccatctgcctgatctgcagcctgagccaggagcaccagggccacagagtgagacccatcgaggaggtggccctggagcacaagaagaagatccagaagcagctggagcacctgaagaagctgagaaagagcggcgaggagcagagaagctacggcgaggagaaggccgtgagcttcctgaagcagaccgaggccctgaagcagagagtgcagagaaagctggagcaggtgtactacttcctggagcagcaggagcacttcttcgtggccagcctggaggacgtgggccagatggtgggccagatcagaaaggcctacgacaccagagtgagccaggacatcgccctgctggacgccctgatcggcgagctggaggccaaggagtgccagagcgagtgggagctgctgcaggacatcggcgacatcctgcacagagccaagaccgtgcccgtgcccgagaagtggaccaccccccaggagatcaagcagaagatccagctgctgcaccagaagagcgagttcgtggagaagagcaccaagtacttcagcgagaccctgagaagcgagatggagatgttcaacgtgcccgagctgatcggcgcccaggcccacgccgtgaacgtgatcctggacgccgagaccgcctaccccaacctgatcttcagcgacgacctgaagagcgtgagactgggcaacaagtgggagagactgcccgacggcccccagagattcgacagctgcatcatcgtgctgggcagccccagcttcctgagcggcagaagatactgggaggtggaggtgggcgacaagaccgcctggatcctgggcgcctgcaagaccagcatcagcagaaagggcaacatgaccctgagccccgagaacggctactgggtggtgatcatgatgaaggagaacgagtaccaggccagcagcgtgccccccaccagactgctgatcaaggagccccccaagagagtgggcatcttcgtggactacagagtgggcagcatcagcttctacaacgtgaccgccagaagccacatctacaccttcgccagctgcagcttcagcggccccctgcagcccatcttcagccccggcaccagagacggcggcaagaacaccgcccccctgaccatctgccccgtgggcggccagggccccgactag

SEQ ID NO: 77814 - DNA, 945 bp, synthetic construct
  misc_feature 1..945: note = Description of Artificial Sequence: Synthetic coding sequence
  source 1..945: mol_type = other DNA
atgagcagagtgcccgccttcctgagcgccgccgaggtggaggagcacctgagaagcagcagcctgctgatcccccccctggagaccgccctggccaacttcagcagcggccccgagggcggcgtgatgcagcccgtgagaaccgtggtgcccgtgaccaagcacagaggctacctgggcgtgatgcccgcctacagcgccgccgaggacgccctgaccaccaagctggtgaccttctacgaggacagaggcatcaccagcgtggtgcccagccaccaggccaccgtgctgctgttcgagcccagcaacggcaccctgctggccgtgatggacggcaacgtgatcaccgccaagagaaccgccgccgtgagcgccatcgccaccaagttcctgaagccccccagcagcgaggtgctgtgcatcctgggcgccggcgtgcaggcctacagccactacgagatcttcaccgagcagttcagcttcaaggaggtgagaatctggaacagaaccaaggagaacgccgagaagttcgccgacaccgtgcagggcgaggtgagagtgtgcagcagcgtgcaggaggccgtggccggcgccgacgtgatcatcaccgtgaccctggccaccgagcccatcctgttcggcgagtgggtgaagcccggcgcccacatcaacgccgtgggcgccagcagacccgactggagagagctggacgacgagctgatgaaggaggccgtgctgtacgtggacagccaggaggccgccctgaaggagagcggcgacgtgctgctgagcggcgccgagatcttcgccgagctgggcgaggtgatcaagggcgtgaagcccgcccactgcgagaagaccaccgtgttcaagagcctgggcatggccgtggaggacaccgtggccgccaagctgatctacgacagctggagcagcggcaagtag

SEQ ID NO: 77815 - DNA, 819 bp, synthetic construct
  misc_feature 1..819: note = Description of Artificial Sequence: Synthetic coding sequence
  source 1..819: mol_type = other DNA
atgcagcccgtgagaaccgtggtgcccgtgaccaagcacagaggctacctgggcgtgatgcccgcctacagcgccgccgaggacgccctgaccaccaagctggtgaccttctacgaggacagaggcatcaccagcgtggtgcccagccaccaggccaccgtgctgctgttcgagcccagcaacggcaccctgctggccgtgatggacggcaacgtgatcaccgccaagagaaccgccgccgtgagcgccatcgccaccaagttcctgaagccccccagcagcgaggtgctgtgcatcctgggcgccggcgtgcaggcctacagccactacgagatcttcaccgagcagttcagcttcaaggaggtgagaatctggaacagaaccaaggagaacgccgagaagttcgccgacaccgtgcagggcgaggtgagagtgtgcagcagcgtgcaggaggccgtggccggcgccgacgtgatcatcaccgtgaccctggccaccgagcccatcctgttcggcgagtgggtgaagcccggcgcccacatcaacgccgtgggcgccagcagacccgactggagagagctggacgacgagctgatgaaggaggccgtgctgtacgtggacagccaggaggccgccctgaaggagagcggcgacgtgctgctgagcggcgccgagatcttcgccgagctgggcgaggtgatcaagggcgtgaagcccgcccactgcgagaagaccaccgtgttcaagagcctgggcatggccgtggaggacaccgtggccgccaagctgatctacgacagctggagcagcggcaagtag

SEQ ID NO: 77816 - DNA, 945 bp, synthetic construct; identical to SEQ ID NO: 77814
  misc_feature 1..945: note = Description of Artificial Sequence: Synthetic coding sequence
  source 1..945: mol_type = other DNA

SEQ ID NO: 77817 - DNA, 990 bp, synthetic construct
  misc_feature 1..990: note = Description of Artificial Sequence: Synthetic coding sequence
  source 1..990: mol_type = other DNA
atggccaccggccagaagctgatgagagccgtgagagtgttcgagttcggcggccccgaggtgctgaagctgagaagcgacatcgccgtgcccatccccaaggaccaccaggtgctgatcaaggtgcacgcctgcggcgtgaaccccgtggagacctacatcagaagcggcacctacagcagaaagcccctgctgccctacacccccggcagcgacgtggccggcgtgatcgaggccgtgggcgacaacgccagcgccttcaagaagggcgacagagtgttcaccagcagcaccatcagcggcggctacgccgagtacgccctggccgccgaccacaccgtgtacaagctgcccgagaagctggacttcaagcagggcgccgccatcggcatcccctacttcaccgcctacagagccctgatccacagcgcctgcgtgaaggccggcgagagcgtgctggtgcacggcgccagcggcggcgtgggcctggccgcctgccagatcgccagagcctacggcctgaagatcctgggcaccgccggcaccgaggagggccagaagatcgtgctgcagaacggcgcccacgaggtgttcaaccacagagaggtgaactacatcgacaagatcaagaagtacgtgggcgagaagggcatcgacatcatcatcgagatgctggccaacgtgaacctgagcaaggacctgagcctgctgagccacggcggcagagtgatcgtggtgggcagcagaggcaccatcgagatcaaccccagagacaccatggccaaggagagcagcatcatcggcgtgaccctgttcagcagcaccaaggaggagttccagcagtacgccgccgccctgcaggccggcatggagatcggctggctgaagcccgtgatcggcagccagtaccccctggagaaggtggccgaggcccacgagaacatcatccacggcagcggcgccaccggcaagatgatcctgctgctgtag

SEQ ID NO: 77818 - DNA, 732 bp, synthetic construct
  misc_feature 1..732: note = Description of Artificial Sequence: Synthetic coding sequence
  source 1..732: mol_type = other DNA
atggccaccggccagaagctgatgagagccgtgagagtgttcgagttcggcggccccgaggtgctgaagctgagaagcgacatcgccgtgcccatccccaaggaccaccaggtgctgatcaaggtgcacgcctgcggcgtgaaccccgtggagacctacatcagaagcggcacctacagcagaaagcccctgctgccctacacccccggcagcgacgtggccggcgtgatcgaggccgtgggcgacaacgccagcgccttcaagaagggcgacagagtgttcaccagcagcaccatcagcggcggctacgccgagtacgccctggccgccgaccacaccgtgtacaagctgcccgagaagctggacttcaagcagggcgccgccatcggcatcccctacttcaccgcctacagagccctgatccacagcgcctgcgtgaaggccggcgagagcgtgctggtgcacggcgccagcggcggcgtgggcctggccgcctgccagatcgccagagcctacggcctgaagatcctgggcaccgccggcaccgaggagggccagaagatcgtgctgcagaacggcgcccacgaggtgttcaaccacagagaggtgaactacatcgacaagatcaagaagtacgtgggcgagaagggcatcgacatcatcatcgagatgctggccaacgtgaacctgagcaaggacctgagcctgctgagccacggcggcagagtgtag

SEQ ID NO: 77819 - DNA, 888 bp, synthetic construct
  misc_feature 1..888: note = Description of Artificial Sequence: Synthetic coding sequence
  source 1..888: mol_type = other DNA
atggccaccggccagaagctgatgagagccgtgagagtgttcgagttcggcggccccgaggtgctgaagctgagaagcgacatcgccgtgcccatccccaaggaccaccaggtgctgatcaaggtgcacgcctgcggcgtgaaccccgtggagacctacatcagaagcggcacctacagcagaaagcccctgctgccctacacccccggcagcgacgtggccggcgtgatcgaggccgtgggcgacaacgccagcgccttcaagaagggcgacagagtgttcaccagcagcaccatcagcggcggctacgccgagtacgccctggccgccgaccacaccgtgtacaagctgcccgagaagctggacttcaagcagggcgccgccatcggcatcccctacttcaccgcctacagagccctgatccacagcgcctgcgtgaaggccggcgagagcgtgctggtgcacggcgccagcggcggcgtgggcctggccgcctgccagatcgccagagcctacggcctgaagatcctgggcaccgccggcaccgaggagggccagaagatcgtgctgcagaacggcgcccacgaggtgttcaaccacagagaggtgaactacatcgacaagatcaaggtggtgggcagcagaggcaccatcgagatcaaccccagagacaccatggccaaggagagcagcatcatcggcgtgaccctgttcagcagcaccaaggaggagttccagcagtacgccgccgccctgcaggccggcatggagatcggctggctgaagcccgtgatcggcagccagtaccccctggagaaggtggccgaggcccacgagaacatcatccacggcagcggcgccaccggcaagatgatcctgctgctgtag

SEQ ID NO: 77820 - DNA, 579 bp, synthetic construct
  misc_feature 1..579: note = Description of Artificial Sequence: Synthetic coding sequence
  source 1..579: mol_type = other DNA
atgcacctgctgagcagcgcctgcgtgaaggccggcgagagcgtgctggtgcacggcgccagcggcggcgtgggcctggccgcctgccagatcgccagagcctacggcctgaagatcctgggcaccgccggcaccgaggagggccagaagatcgtgctgcagaacggcgcccacgaggtgttcaaccacagagaggtgaactacatcgacaagatcaagaagtacgtgggcgagaagggcatcgacatcatcatcgagatgctggccaacgtgaacctgagcaaggacctgagcctgctgagccacggcggcagagtgatcgtggtgggcagcagaggcaccatcgagatcaaccccagagacaccatggccaaggagagcagcatcatcggcgtgaccctgttcagcagcaccaaggaggagttccagcagtacgccgccgccctgcaggccggcatggagatcggctggctgaagcccgtgatcggcagccagtaccccctggagaaggtggccgaggcccacgagaacatcatccacggcagcggcgccaccggcaagatgatcctgctgctgtag

SEQ ID NO: 77821 - DNA, 990 bp, synthetic construct; identical to SEQ ID NO: 77817
  misc_feature 1..990: note = Description of Artificial Sequence: Synthetic coding sequence
  source 1..990: mol_type = other DNA

SEQ ID NO: 77822 - DNA, 621 bp, synthetic construct
  misc_feature 1..621: note = Description of Artificial Sequence: Synthetic coding sequence
  source 1..621: mol_type = other DNA
atggccaccggccagaagctgatgagagccgtgagagtgttcgagttcggcggccccgaggtgctgaagctgagaagcgacatcgccgtgcccatccccaaggaccaccaggtgctgatcaaggtgcacgcctgcggcgtgaaccccgtggagacctacatcagaagcggcacctacagcagaaagcccctgctgccctacacccccggcagcgacgtggccggcgtgatcgaggccgtgggcgacaacgccagcgccttcaagaagggcgacagagtgttcaccagcagcaccatcagcggcggctacgccgagtacgccctggccgccgaccacaccgtgtacaagctgcccgagaagctggacttcaagcagggcgccgccatcggcatcccctacttcaccgcctacagagccctgatccacagcgcctgcgtgaaggccggcgagagcgtgctggtgcacggcgccagcggcggcgtgggcctggccgcctgccagatcgccagagcctacggcctgaagatcctgggcaccgccggcaccgaggagggccagaagatcgtgctgcagaacggcgcccacgaggtgttcaaccacagagaggtgaactacatctag

SEQ ID NO: 77823 - DNA, 1050 bp, synthetic construct
  misc_feature 1..1050: note = Description of Artificial Sequence: Synthetic coding sequence
  source 1..1050: mol_type = other DNA
atgaagggcctgtacttccagcagagcagcaccgacgaggagatcaccttcgtgttccaggagaaggaggacctgcccgtgaccgaggacaacttcgtgaagctgcaggtgaaggcctgcgccctgagccagatcaacaccaagctgctggccgagatgaagatgaagaaggacctgttccccgtgggcagagagatcgccggcatcgtgctggacgtgggcagcaaggtgagcttcttccagcccgacgacgaggtggtgggcatcctgcccctggacagcgaggaccccggcctgtgcgaggtggtgagagtgcacgagcactacctggtgcacaagcccgagaaggtgacctggaccgaggccgccggcagcatcagagacggcgtgagagcctacaccgccctgcactacctgagccacctgagccccggcaagagcgtgctgatcatggacggcgccagcgccttcggcaccatcgccatccagctggcccaccacagaggcgccaaggtgatcagcaccgcctgcagcctggaggacaagcagtgcctggagagattcagaccccccatcgccagagtgatcgacgtgagcaacggcaaggtgcacgtggccgagagctgcctggaggagaccggcggcctgggcgtggacatcgtgctggacgccggcgtgagactgtacagcaaggacgacgagcccgccgtgaagctgcagctgctgccccacaagcacgacatcatcaccctgctgggcgtgggcggccactgggtgaccaccgaggagaacctgcagctggacccccccgacagccactgcctgttcctgaagggcgccaccctggccttcctgaacgacgaggtgtggaacctgagcaacgtgcagcagggcaagtacctgtgcatcctgaaggacgtgatggagaagctgagcaccggcgtgttcagaccccagctggacgagcccatccccctgtacgaggccaaggtgagcatggaggccgtgcagaagaaccagggcagaaagaagcaggtggtgcagttctag

SEQ ID NO: 77824 - DNA, 546 bp, synthetic construct
  misc_feature 1..546: note = Description of Artificial Sequence: Synthetic coding sequence
  source 1..546: mol_type = other DNA
atgaagggcctgtacttccagcagagcagcaccgacgaggagatcaccttcgtgttccaggagaaggaggacctgcccgtgaccgaggacaacttcgtgaagctgcaggtgaaggcctgcgccctgagccagatcaacaccaagctgctggccgagatgaagatgaagaaggacctgttccccgtgggcagagagatcgccggcatcgtgctggacgtgggcagcaaggtgagcttcttccagcccgacgacgaggtggtgggcatcctgcccctggacagcgaggaccccggcctgtgcgaggtggtgagagtgcacgagcactacctggtgcacaagcccgagaaggtgacctggaccgaggccgccggcagcatcagagacggcgtgagagcctacaccgccctgcactacctgagccacctgagccccggcaagagcgtgctgatcatggacggcgccagcgccttcggcaccatcgccatccagctggcccaccacagaggcgccaaggtgatcagcaccgcctgcagcctggaggactag

SEQ ID NO: 77825 - DNA, 60 bp, synthetic construct
  misc_feature 1..60: note = Description of Artificial Sequence: Synthetic coding sequence
  source 1..60: mol_type = other DNA
atgaagggcctgtacttccagcagagcagcaccgacgaggagatcaccttcgtgttctag

SEQ ID NO: 77826 - DNA, 597 bp, synthetic construct
  misc_feature 1..597: note = Description of Artificial Sequence: Synthetic coding sequence
  source 1..597: mol_type = other DNA
atgaagggcctgtacttccagcagagcagcaccgacgaggagatcaccttcgtgttccaggagaaggaggacctgcccgtgaccgaggacaacttcgtgaagctgcaggtgaaggcctgcgccctgagccagatcaacaccaagctgctggccgagatgaagatgaagaaggacctgttccccgtgggcagagagatcgccggcatcgtgctggacgtgggcagcaaggtgagcttcttccagcccgacgacgaggtggtgggcatcctgcccctggacagcgaggaccccggcctgtgcgaggtggtgagagtgcacgagcactacctggtgcacaagcccgagaaggtgacctggaccgaggccgccggcagcatcagagacggcgtgagagcctacaccgccctgcactacctgagccacctgagccccggcaagagcgtgctgatcatggacggcgccagcgccttcggcaccatcgccatccagctggcccaccacagaggcgccaaggtgatcagcaccgcctgcagcctggaggacaagcagtgcctggagagattcagaccccccatcgagaacagcaccatcgcctag

SEQ ID NO: 77827 - DNA, 2916 bp, synthetic construct
  misc_feature 1..2916: note = Description of Artificial Sequence: Synthetic coding sequence
  source 1..2916: mol_type = other DNA
atggagctgagcgacgccaacctgcagaccctgaccgagtacctgaagaagaccctggaccccgaccccgccatcagaagacccgccgagaagttcctggagagcgtggagggcaaccagaactaccccctgctgctgctgaccctgctggagaagagccaggacaacgtgatcaaggtgtgcgccagcgtgaccttcaagaactacatcaagagaaactggagaatcgtggaggacgagcccaacaagatctgcgaggccgacagagtggccatcaaggccaacatcgtgcacctgatgctgagcagccccgagcagatccagaagcagctgagcgacgccatcagcatcatcggcagagaggacttcccccagaagtggcccgacctgctgaccgagatggtgaacagattccagagcggcgacttccacgtgatcaacggcgtgctgagaaccgcccacagcctgttcaagagatacagacacgagttcaagagcaacgagctgtggaccgagatcaagctggtgctggacgccttcgccctgcccctgaccaacctgttcaaggccaccatcgagctgtgcagcacccacgccaacgacgccagcgccctgagaatcctgttcagcagcctgatcctgatcagcaagctgttctacagcctgaacttccaggacctgcccgagttcttcgaggacaacatggagacctggatgaacaacttccacaccctgctgaccctggacaacaagctgctgcagaccgacgacgaggaggaggccggcctgctggagctgctgaagagccagatctgcgacaacgccgccctgtacgcccagaagtacgacgaggagttccagagatacctgcccagattcgtgaccgccatctggaacctgctggtgaccaccggccaggaggtgaagtacgacctgctggtgagcaacgccatccagttcctggccagcgtgtgcgagagaccccactacaagaacctgttcgaggaccagaacaccctgaccagcatctgcgagaaggtgatcgtgcccaacatggagttcagagccgccgacgaggaggccttcgaggacaacagcgaggagtacatcagaagagacctggagggcagcgacatcgacaccagaagaagagccgcctgcgacctggtgagaggcctgtgcaagttcttcgagggccccgtgaccggcatcttcagcggctacgtgaacagcatgctgcaggagtacgccaagaaccccagcgtgaactggaagcacaaggacgccgccatctacctggtgaccagcctggccagcaaggcccagacccagaagcacggcatcacccaggccaacgagctggtgaacctgaccgagttcttcgtgaaccacatcctgcccgacctgaagagcgccaacgtgaacgagttccccgtgctgaaggccgacggcatcaagtacatcatgatcttcagaaaccaggtgcccaaggagcacctgctggtgagcatccccctgctgatcaaccacctgcaggccgagagcatcgtggtgcacacctacgccgcccacgccctggagagactgttcaccatgagaggccccaacaacgccaccctgttcaccgccgccgagatcgcccccttcgtggagatcctgctgaccaacctgttcaaggccctgaccctgcccggcagcagcgagaacgagtacatcatgaaggccatcatgagaagcttcagcctgctgcaggaggccatcatcccctacatccccaccctgatcacccagctgacccagaagctgctggccgtgagcaagaaccccagcaagccccacttcaaccactacatgttcgaggccatctgcctgagcatcagaatcacctgcaaggccaaccccgccgccgtggtgaacttcgaggaggccctgttcctggtgttcaccgagatcctgcagaacgacgtgcaggagttcatcccctacgtgttccaggtgatgagcctgctgctggagacccacaagaacgacatccccagcagctacatggccctgttcccccacctgctgcagcccgtgctgtgggagagaaccggcaacatccccgccctggtgagactgctgcaggccttcctggagagaggcagcaacaccatcgccagcgccgccgccgacaagatccccggcctgctgggcgtgttccagaagctgatcgccagcaaggccaacgaccaccagggcttctacctgctgaacagcatcatcgagcacatgccccccgagagcgtggaccagtacagaaagcagatcttcatcctgctgttccagagactgcagaacagcaagaccaccaagttcatcaagagcttcctggtgttcatcaacctgtactgcatcaagtacggcgccctggccctgcaggagatcttcgacggcatccagcccaagatgttcggcatggtgctggagaagatcatcatccccgagatccagaaggtgagcggcaacgtggagaagaagatctgcgccgtgggcatcaccaagctgctgaccgagtgcccccccatgatggacaccgagtacaccaagctgtggacccccctgctgcagagcctgatcggcctgttcgagctgcccgaggacgacaccatccccgacgaggagcacttcatcgacatcgaggacacccccggctaccagaccgccttcagccagctggccttcgccggcaagaaggagcacgaccccgtgggccagatggtgaacaaccccaagatccacctggcccagagcctgcacaagctgagcaccgcctgccccggcagagtgcccagcatggtgagcaccagcctgaacgccgaggccctgcagtacctgcagggctacctgcaggccgccagcgtgaccctgctgtag

SEQ ID NO: 77828 - DNA, 2748 bp, synthetic construct
  misc_feature 1..2748: note = Description of Artificial Sequence: Synthetic coding sequence
  source 1..2748: mol_type = other DNA
atggagctgagcgacgccaacctgcagaccctgaccgagtacctgaagaagaccctggaccccgaccccgccatcagaagacccgccgagaagttcctggagagcgtggagggcaaccagaactaccccctgctgctgctgaccctgctggagaagagccaggacaacgtgatcaaggtgtgcgccagcgtgaccttcaagaactacatcaagagaaactggagaatcgtggaggacgagcccaacaagatctgcgaggccgacagagtggccatcaaggccaacatcgtgcacctgatgctgagcagccccgagcagatccagaagcagctgagcgacgccatcagcatcatcggcagagaggacttcccccagaagtggcccgacctgctgaccgagatggtgaacagattccagagcggcgacttccacgtgatcaacggcgtgctgagaaccgcccacagcctgttcaagagatacagacacgagttcaagagcaacgagctgtggaccgagatcaagctggtgctggacgccttcgccctgcccctgaccaacctgttcaaggccaccatcgagctgtgcagcacccacgccaacgacgccagcgccctgagaatcctgttcagcagcctgatcctgatcagcaagctgttctacagcctgaacttccaggacctgcccgagttcttcgaggacaacatggagacctggatgaacaacttccacaccctgctgaccctggacaacaagctgctgcagaccgacctggtgagcaacgccatccagttcctggccagcgtgtgcgagagaccccactacaagaacctgttcgaggaccagaacaccctgaccagcatctgcgagaaggtgatcgtgcccaacatggagttcagagccgccgacgaggaggccttcgaggacaacagcgaggagtacatcagaagagacctggagggcagcgacatcgacaccagaagaagagccgcctgcgacctggtgagaggcctgtgcaagttcttcgagggccccgtgaccggcatcttcagcggctacgtgaacagcatgctgcaggagtacgccaagaaccccagcgtgaactggaagcacaaggacgccgccatctacctggtgaccagcctggccagcaaggcccagacccagaagcacggcatcacccaggccaacgagctggtgaacctgaccgagttcttcgtgaaccacatcctgcccgacctgaagagcgccaacgtgaacgagttccccgtgctgaaggccgacggcatcaagtacatcatgatcttcagaaaccaggtgcccaaggagcacctgctggtgagcatccccctgctgatcaaccacctgcaggccgagagcatcgtggtgcacacctacgccgcccacgccctggagagactgttcaccatgagaggccccaacaacgccaccctgttcaccgccgccgagatcgcccccttcgtggagatcctgctgaccaacctgttcaaggccctgaccctgcccggcagcagcgagaacgagtacatcatgaaggccatcatgagaagcttcagcctgctgcaggaggccatcatcccctacatccccaccctgatcacccagctgacccagaagctgctggccgtgagcaagaaccccagcaagccccacttcaaccactacatgttcgaggccatctgcctgagcatcagaatcacctgcaaggccaaccccgccgccgtggtgaacttcgaggaggccctgttcctggtgttcaccgagatcctgcagaacgacgtgcaggagttcatcccctacgtgttccaggtgatgagcctgctgctggagacccacaagaacgacatccccagcagctacatggccctgttcccccacctgctgcagcccgtgctgtgggagagaaccggcaacatccccgccctggtgagactgctgcaggccttcctggagagaggcagcaacaccatcgccagcgccgccgccgacaagatccccggcctgctgggcgtgttccagaagctgatcgccagcaaggccaacgaccaccagggcttctacctgctgaacagcatcatcgagcacatgccccccgagagcgtggaccagtacagaaagcagatcttcatcctgctgttccagagactgcagaacagcaagaccaccaagttcatcaagagcttcctggtgttcatcaacctgtactgcatcaagtacggcgccctggccctgcaggagatcttcgacggcatccagcccaagatgttcggcatggtgctggagaagatcatcatccccgagatccagaaggtgagcggcaacgtggagaagaagatctgcgccgtgggcatcaccaagctgctgaccgagtgcccccccatgatggacaccgagtacaccaagctgtggacccccctgctgcagagcctgatcggcctgttcgagctgcccgaggacgacaccatccccgacgaggagcacttcatcgacatcgaggacacccccggctaccagaccgccttcagccagctggccttcgccggcaagaaggagcacgaccccgtgggccagatggtgaacaaccccaagatccacctggcccagagcctgcacaagctgagcaccgcctgccccggcagagtgcccagcatggtgagcaccagcctgaacgccgaggccctgcagtacctgcagggctacctgcaggccgccagcgtgaccctgctgtag

SEQ ID NO: 77829 - DNA, 1710 bp, synthetic construct
  misc_feature 1..1710: note = Description of Artificial Sequence: Synthetic coding sequence
  source 1..1710: mol_type = other DNA
atggagacctggatgaacaacttccacaccctgctgaccctggacaacaagctgctgcagaccgacgacgaggaggaggccggcctgctggagctgctgaagagccagatctgcgacaacgccgccctgtacgcccagaagtacgacgaggagttccagagatacctgcccagattcgtgaccgccatctggaacctgctggtgaccaccggccaggaggtgaagtacgacctgctggtgagcaacgccatccagttcctggccagcgtgtgcgagagaccccactacaagaacctgttcgaggaccagaacaccctgaccagcatctgcgagaagagcatcgtggtgcacacctacgccgcccacgccctggagagactgttcaccatgagaggccccaacaacgccaccctgttcaccgccgccgagatcgcccccttcgtggagatcctgctgaccaacctgttcaaggccctgaccctgcccggcagcagcgagaacgagtacatcatgaaggccatcatgagaagcttcagcctgctgcaggaggccatcatcccctacatccccaccctgatcacccagctgacccagaagctgctggccgtgagcaagaaccccagcaagccccacttcaaccactacatgttcgaggccatctgcctgagcatcagaatcacctgcaaggccaaccccgccgccgtggtgaacttcgaggaggccctgttcctggtgttcaccgagatcctgcagaacgacgtgcaggagttcatcccctacgtgttccaggtgatgagcctgctgctggagacccacaagaacgacatccccagcagctacatggccctgttcccccacctgctgcagcccgtgctgtgggagagaaccggcaacatccccgccctggtgagactgctgcaggccttcctggagagaggcagcaacaccatcgccagcgccgccgccgacaagatccccggcctgctgggcgtgttccagaagctgatcgccagcaaggccaacgaccaccagggcttctacctgctgaacagcatcatcgagcacatgccccccgagagcgtggaccagtacagaaagcagatcttcatcctgctgttccagagactgcagaacagcaagaccaccaagttcatcaagagcttcctggtgttcatcaacctgtactgcatcaagtacggcgccctggccctgcaggagatcttcgacggcatccagcccaagatgttcggcatggtgctggagaagatcatcatccccgagatccagaaggtgagcggcaacgtggagaagaagatctgcgccgtgggcatcaccaagctgctgaccgagtgcccccccatgatggacaccgagtacaccaagctgtggacccccctgctgcagagcctgatcggcctgttcgagctgcccgaggacgacaccatccccgacgaggagcacttcatcgacatcgaggacacccccggctaccagaccgccttcagccagctggccttcgccggcaagaaggagcacgaccccgtgggccagatggtgaacaaccccaagatccacctggcccagagcctgcacaagctgagcaccgcctgccccggcagagtgcccagcatggtgagcaccagcctgaacgccgaggccctgcagtacctgcagggctacctgcaggccgccagcgtgaccctgctgtag

SEQ ID NO: 77830 - DNA, 2265 bp, synthetic construct
  misc_feature 1..2265: note = Description of Artificial Sequence: Synthetic coding sequence
  source 1..2265: mol_type = other DNA
atgctgagcaacctgaacttccaggacctgcccgagttcttcgaggacaacatggagacctggatgaacaacttccacaccctgctgaccctggacaacaagctgctgcagaccgacgacgaggaggaggccggcctgctggagctgctgaagagccagatctgcgacaacgccgccctgtacgcccagaagtacgacgaggagttccagagatacctgcccagattcgtgaccgccatctggaacctgctggtgaccaccggccaggaggtgaagtacgacctgctggtgagcaacgccatccagttcctggccagcgtgtgcgagagaccccactacaagaacctgttcgaggaccagaacaccctgaccagcatctgcgagaaggtgatcgtgcccaacatggagttcagagccgccgacgaggaggccttcgaggacaacagcgaggagtacatcagaagagacctggagggcagcgacatcgacaccagaagaagagccgcctgcgacctggtgagaggcctgtgcaagttcttcgagggccccgtgaccggcatcttcagcggctacgtgaacagcatgctgcaggagtacgccaagaaccccagcgtgaactggaagcacaaggacgccgccatctacctggtgaccagcctggccagcaaggcccagacccagaagcacggcatcacccaggccaacgagctggtgaacctgaccgagttcttcgtgaaccacatcctgcccgacctgaagagcgccaacgtgaacgagttccccgtgctgaaggccgacggcatcaagtacatcatgatcttcagaaaccaggtgcccaaggagcacctgctggtgagcatccccctgctgatcaaccacctgcaggccgagagcatcgtggtgcacacctacgccgcccacgccctggagagactgttcaccatgagaggccccaacaacgccaccctgttcaccgccgccgagatcgcccccttcgtggagatcctgctgaccaacctgttcaaggccctgaccctgcccggcagcagcgagaacgagtacatcatgaaggccatcatgagaagcttcagcctgctgcaggaggccatcatcccctacatccccaccctgatcacccagctgacccagaagctgctggccgtgagcaagaaccccagcaagccccacttcaaccactacatgttcgaggccatctgcctgagcatcagaatcacctgcaaggccaaccccgccgccgtggtgaacttcgaggaggccctgttcctggtgttcaccgagatcctgcagaacgacgtgcaggagttcatcccctacgtgttccaggtgatgagcctgctgctggagacccacaagaacgacatccccagcagctacatggccctgttcccccacctgctgcagcccgtgctgtgggagagaaccggcaacatccccgccctggtgagactgctgcaggccttcctggagagaggcagcaacaccatcgccagcgccgccgccgacaagatccccggcctgctgggcgtgttccagaagctgatcgccagcaaggccaacgaccaccagggcttctacctgctgaacagcatcatcgagcacatgccccccgagagcgtggaccagtacagaaagcagatcttcatcctgctgttccagagactgcagaacagcaagaccaccaagttcatcaagagcttcctggtgttcatcaacctgtactgcatcaagtacggcgccctggccctgcaggagatcttcgacggcatccagcccaagatgttcggcatggtgctggagaagatcatcatccccgagatccagaaggtgagcggcaacgtggagaagaagatctgcgccgtgggcatcaccaagctgctgaccgagtgcccccccatgatggacaccgagtacaccaagctgtggacccccctgctgcagagcctgatcggcctgttcgagctgcccgaggacgacaccatccccgacgaggagcacttcatcgacatcgaggacacccccggctaccagaccgccttcagccagctggccttcgccggcaagaaggagcacgaccccgtgggccagatggtgaacaaccccaagatccacctggcccagagcctgcacaagctgagcaccgcctgccccggcagagtgcccagcatggtgagcaccagcctgaacgccgaggccctgcagtacctgcagggctacctgcaggccgccagcgtgaccctgctgtag

SEQ ID NO: 77831 - DNA, 888 bp, synthetic construct; identical to SEQ ID NO: 73171
  misc_feature 1..888: note = Description of Artificial Sequence: Synthetic coding sequence
  source 1..888: mol_type = other DNA

SEQ ID NO: 77832 - DNA, 1353 bp, synthetic construct
  misc_feature 1..1353: note = Description of Artificial Sequence: Synthetic coding sequence
  source 1..1353: mol_type = other DNA
atgagcgccatccaggccgcctggcccagcggcaccgagtgcatcgccaagtacaacttccacggcaccgccgagcaggacctgcccttctgcaagggcgacgtgctgaccatcgtggccgtgaccaaggaccccaactggtacaaggccaagaacaaggtgggcagagagggcatcatccccgccaactacgtgcagaagagagagggcgtgaaggccggcaccaagctgagcctgatgccctggttccacggcaagatcaccagagagcaggccgagagactgctgtacccccccgagaccggcctgttcctggtgagagagagcaccaactaccccggcgactacaccctgtgcgtgagctgcgacggcaaggtggagcactacagaatcatgtaccacgccagcaagctgagcatcgacgaggaggtgtacttcgagaacctgatgcagctggtggagcactacaccagcgacgccgacggcctgtgcaccagactgatcaagcccaaggtgatggagggcaccgtggccgcccaggacgagttctacagaagcggctgggccctgaacatgaaggagctgaagctgctgcagaccatcggcaagggcgagttcggcgacgtgatgctgggcgactacagaggcaacaaggtggccgtgaagtgcatcaagaacgacgccaccgcccaggccttcctggccgaggccagcgtgatgacccagctgagacacagcaacctggtgcagctgctgggcgtgatcgtggaggagaagggcggcctgtacatcgtgaccgagtacatggccaagggcagcctggtggactacctgagaagcagaggcagaagcgtgctgggcggcgactgcctgctgaagttcagcctggacgtgtgcgaggccatggagtacctggagggcaacaacttcgtgcacagagacctggccgccagaaacgtgctggtgagcgaggacaacgtggccaaggtgagcgacttcggcctgaccaaggaggccagcagcacccaggacaccggcaagctgcccgtgaagtggaccgcccccgaggccctgagagagaagaagttcagcaccaagagcgacgtgtggagcttcggcatcctgctgtgggagatctacagcttcggcagagtgccctaccccagaatccccctgaaggacgtggtgcccagagtggagaagggctacaagatggacgcccccgacggctgcccccccgccgtgtacgaggtgatgaagaactgctggcacctggacgccgccatgagacccagcttcctgcagctgagagagcagctggagcacatcaagacccacgagctgcacctgtag

SEQ ID NO: 77833 - DNA, 1353 bp, synthetic construct; identical to SEQ ID NO: 77832
  misc_feature 1..1353: note = Description of Artificial Sequence: Synthetic coding sequence
  source 1..1353: mol_type = other DNA

SEQ ID NO: 77834 - DNA, 1200 bp, synthetic construct
  misc_feature 1..1200: note = Description of Artificial Sequence: Synthetic coding sequence
  source 1..1200: mol_type = other DNA
atgagcgccatccaggccgcctggcccagcggcaccgagtgcatcgccaagtacaacttccacggcaccgccgagcaggacctgcccttctgcaagggcgacgtgctgaccatcgtggccgtgaccaaggaccccaactggtacaaggccaagaacaaggtgggcagagagggcatcatccccgccaactacgtgcagaagagagagggcgtgaaggccggcaccaagctgagcctgatgccctggttccacggcaagctgagcatcgacgaggaggtgtacttcgagaacctgatgcagctggtggagcactacaccagcgacgccgacggcctgtgcaccagactgatcaagcccaaggtgatggagggcaccgtggccgcccaggacgagttctacagaagcggctgggccctgaacatgaaggagctgaagctgctgcagaccatcggcaagggcgagttcggcgacgtgatgctgggcgactacagaggcaacaaggtggccgtgaagtgcatcaagaacgacgccaccgcccaggccttcctggccgaggccagcgtgatgacccagctgagacacagcaacctggtgcagctgctgggcgtgatcgtggaggagaagggcggcctgtacatcgtgaccgagtacatggccaagggcagcctggtggactacctgagaagcagaggcagaagcgtgctgggcggcgactgcctgctgaagttcagcctggacgtgtgcgaggccatggagtacctggagggcaacaacttcgtgcacagagacctggccgccagaaacgtgctggtgagcgaggacaacgtggccaaggtgagcgacttcggcctgaccaaggaggccagcagcacccaggacaccggcaagctgcccgtgaagtggaccgcccccgaggccctgagagagaagaagttcagcaccaagagcgacgtgtggagcttcggcatcctgctgtgggagatctacagcttcggcagagtgccctaccccagaatccccctgaaggacgtggtgcccagagtggagaagggctacaagatggacgcccccgacggctgcccccccgccgtgtacgaggtgatgaagaactgctggcacctggacgccgccatgagacccagcttcctgcagctgagagagcagctggagcacatcaagacccacgagctgcacctgtag

SEQ ID NO: 77835 - DNA, 783 bp, synthetic construct
  misc_feature 1..783: note = Description of Artificial Sequence: Synthetic coding sequence
  source 1..783: mol_type = other DNA
atggtggccgccccctgggccacccaggagcaggaggagggcagaggcatccagcccggcgacagaggcgaccagaagagcgccgccagccagaagcccagaagcagaggcatcctgcacagcctgttctgctgcgtgtgcagagacgacggcgaggccctgcccgcccacagcggcgcccccctgctggtggaggagaacggcgccatccccaagacccccgtgcagtacctgctgcccgaggccaaggcccaggacagcgacaagatctgcgtggtgatcgacctggacgagaccctggtgcacagcagcttcaagcccgtgaacaacgccgacttcatcatccccgtggagatcgacggcgtggtgcaccaggtgtacgtgctgaagagaccccacgtggacgagttcctgcagagaatgggcgagctgttcgagtgcgtgctgttcaccgccagcctggccaagtacgccgaccccgtggccgacctgctggacaagtggggcgccttcagagccagactgttcagagagagctgcgtgttccacagaggcaactacgtgaaggacctgagcagactgggcagagacctgagaagagtgctgatcctggacaacagccccgccagctacgtgttccaccccgacaacgccgtgcccgtggccagctggttcgacaacatgagcgacaccgagctgcacgacctgctgcccttcttcgagcagctgagcagagtggacgacgtgtacagcgtgctgagacagcccagacccggcagctag

SEQ ID NO: 77836 - DNA, 2604 bp, synthetic construct
  misc_feature 1..2604: note = Description of Artificial Sequence: Synthetic coding sequence
  source 1..2604: mol_type = other DNA
atggaggtgcccgccgccggcagagtgcccgccgagggcgcccccaccgccgccgtggccgaggtgagatgccccggccccgcccccctgagactgctggagtggagagtggccgccggcgccgccgtgagaatcggcagcgtgctggccgtgttcgaggccgccgccagcgcccagagcagcggcgccagccagagcagagtggccagcggcggctgcgtgagacccgccagacccgagagaagactgagaagcgagagagccggcgtggtgagagagctgtgcgcccagcccggccaggtggtggcccccggcgccgtgctggtgagactggagggctgcagccaccccgtggtgatgaagggcctgtgcgccgagtgcggccaggacctgacccagctgcagagcaagaacggcaagcagcaggtgcccctgagcaccgccaccgtgagcatggtgcacagcgtgcccgagctgatggtgagcagcgagcaggccgagcagctgggcagagaggaccagcagagactgcacagaaacagaaagctggtgctgatggtggacctggaccagaccctgatccacaccaccgagcagcactgccagcagatgagcaacaagggcatcttccacttccagctgggcagaggcgagcccatgctgcacaccagactgagaccccactgcaaggacttcctggagaagatcgccaagctgtacgagctgcacgtgttcaccttcggcagcagactgtacgcccacaccatcgccggcttcctggaccccgagaagaagctgttcagccacagaatcctgagcagagacgagtgcatcgaccccttcagcaagaccggcaacctgagaaacctgttcccctgcggcgacagcatggtgtgcatcatcgacgacagagaggacgtgtggaagttcgcccccaacctgatcaccgtgaagaagtacgtgtacttccagggcaccggcgacatgaacgccccccccggcagcagagagagccagaccagaaagaaggtgaaccacagcagaggcaccgaggtgagcgagcccagcccccccgtgagagaccccgagggcgtgacccaggcccccggcgtggagcccagcaacggcctggagaagcccgccagagagctgaacggcagcgaggccgccacccccagagacagccccagacccggcaagcccgacgagagagacatctggccccccgcccaggcccccaccagcagccaggagctggccggcgcccccgagccccagggcagctgcgcccagggcggcagagtggcccccggccagagacccgcccagggcgccaccggcaccgacctggacttcgacctgagcagcgacagcgagagcagcagcgagagcgagggcaccaagagcagcagcagcgccagcgacggcgagagcgagggcaagagaggcagacagaagcccaaggccgcccccgagggcgccggcgccctggcccagggcagcagcctggagcccggcagacccgccgcccccagcctgcccggcgaggccgagcccggcgcccacgcccccgacaaggagcccgagctgggcggccaggaggagggcgagagagacggcctgtgcggcctgggcaacggctgcgccgacagaaaggaggccgagaccgagagccagaacagcgagctgagcggcgtgaccgccggcgagagcctggaccagagcatggaggaggaggaggaggaggacaccgacgaggacgaccacctgatctacctggaggagatcctggtgagagtgcacaccgactactacgccaagtacgacagatacctgaacaaggagatcgaggaggcccccgacatcagaaagatcgtgcccgagctgaagagcaaggtgctggccgacgtggccatcatcttcagcggcctgcaccccaccaacttccccatcgagaagaccagagagcactaccacgccaccgccctgggcgccaagatcctgaccagactggtgctgagccccgacgcccccgacagagccacccacctgatcgccgccagagccggcaccgagaaggtgctgcaggcccaggagtgcggccacctgcacgtggtgaaccccgactggctgtggagctgcctggagagatgggacaaggtggaggagcagctgttccccctgagagacgaccacaccaaggcccagagagagaacagccccgccgccttccccgacagagagggcgtgccccccaccgccctgttccaccccatgcccgtgctgcccaaggcccagcccggccccgaggtgagaatctacgacagcaacaccggcaagctgatcagaaccggcgccagaggcccccccgcccccagcagcagcctgcccatcagacaggagcccagcagcttcagatggaccaccagcctggagaaggccgccaccaccgccaccgccagaagaggcggcctgagaagcagaagaagaagccccagccccggcagccagggccccgccggcagcggcagaagcggccacctgagacccgccagaggcgccagacagggcgccggcggccccgaggccaccagaggcagctag

SEQ ID NO: 77837 - DNA, 2886 bp, synthetic construct
  misc_feature 1..2886: note = Description of Artificial Sequence: Synthetic coding sequence
  source 1..2886: mol_type = other DNA
atggaggtgcccgccgccggcagagtgcccgccgagggcgcccccaccgccgccgtggccgaggtgagatgccccggccccgcccccctgagactgctggagtggagagtggccgccggcgccgccgtgagaatcggcagcgtgctggccgtgttcgaggccgccgccagcgcccagagcagcggcgccagccagagcagagtggccagcggcggctgcgtgagacccgccagacccgagagaagactgagaagcgagagagccggcgtggtgagagagctgtgcgcccagcccggccaggtggtggcccccggcgccgtgctggtgagactggagggctgcagccaccccgtggtgatgaagggcctgtgcgccgagtgcggccaggacctgacccagctgcagagcaagaacggcaagcagcaggtgcccctgagcaccgccaccgtgagcatggtgcacagcgtgcccgagctgatggtgagcagcgagcaggccgagcagctgggcagagaggaccagcagagactgcacagaaacagaaagctggtgctgatggtggacctggaccagaccctgatccacaccaccgagcagcactgccagcagatgagcaacaagggcatcttccacttccagctgggcagaggcgagcccatgctgcacaccagactgagaccccactgcaaggacttcctggagaagatcgccaagctgtacgagctgcacgtgttcaccttcggcagcagactgtacgcccacaccatcgccggcttcctggaccccgagaagaagctgttcagccacagaatcctgagcagagacgagtgcatcgaccccttcagcaagaccggcaacctgagaaacctgttcccctgcggcgacagcatggtgtgcatcatcgacgacagagaggacgtgtggaagttcgcccccaacctgatcaccgtgaagaagtacgtgtacttccagggcaccggcgacatgaacgccccccccggcagcagagagagccagaccagaaagaaggtgaaccacagcagaggcaccgaggtgagcgagcccagcccccccgtgagagaccccgagggcgtgacccaggcccccggcgtggagcccagcaacggcctggagaagcccgccagagagctgaacggcagcgaggccgccacccccagagacagccccagacccggcaagcccgacgagagagacatctggccccccgcccaggcccccaccagcagccaggagctggccggcgcccccgagccccagggcagctgcgcccagggcggcagagtggcccccggccagagacccgcccagggcgccaccggcaccgacctggacttcgacctgagcagcgacagcgagagcagcagcgagagcgagggcaccaagagcagcagcagcgccagcgacggcgagagcgagggcaagagaggcagacagaagcccaaggccgcccccgagggcgccggcgccctggcccagggcagcagcctggagcccggcagacccgccgcccccagcctgcccggcgaggccgagcccggcgcccacgcccccgacaaggagcccgagctgggcggccaggaggagggcgagagagacggcctgtgcggcctgggcaacggctgcgccgacagaaaggaggccgagaccgagagccagaacagcgagctgagcggcgtgaccgccggcgagagcctggaccagagcatggaggaggaggaggaggaggacaccgacgaggacgaccacctgatctacctggaggagatcctggtgagagtgcacaccgactactacgccaagtacgacagatacctgaacaaggagatcgaggaggcccccgacatcagaaagatcgtgcccgagctgaagagcaaggtgctggccgacgtggccatcatcttcagcggcctgcaccccaccaacttccccatcgagaagaccagagagcactaccacgccaccgccctgggcgccaagatcctgaccagactggtgctgagccccgacgcccccgacagagccacccacctgatcgccgccagagccggcaccgagaaggtgctgcaggcccaggagtgcggccacctgcacgtggtgaaccccgactggctgtggagctgcctggagagatgggacaaggtggaggagcagctgttccccctgagagacgaccacaccaaggcccagagagagaacagccccgccgccttccccgacagagagggcgtgccccccaccgccctgttccaccccatgcccgtgctgcccaaggcccagcccggccccgaggtgagaatctacgacagcaacaccggcaagctgatcagaaccggcgccagaggcccccccgcccccagcagcagcctgcccatcagacaggagcccagcagcttcagagccgtgccccccccccagccccagatgttcggcgaggagctgcccgacgcccaggacggcgagcagcccggccccagcagaagaaagagacagcccagcatgagcgagaccatgcccctgtacaccctgtgcaaggaggacctggagagcatggacaaggaggtggacgacatcctgggcgagggcagcgacgacagcgacagcgagaagagaagacccgaggagcaggaggaggagccccagcccagaaagcccggcaccagaagagagagaaccctgggcgcccccgccagcagcgagagaagcgccgccggcggcagaggccccagaggccacaagagaaagctgaacgaggaggacgccgccagcgagagcagcagagagagcagcaacgaggacgagggcagcagcagcgaggccgacgagatggccaaggccctggaggccgagctgaacgacctgatgtag

SEQ ID NO: 77838 - DNA, 786 bp, synthetic construct
  misc_feature 1..786: note = Description of Artificial Sequence: Synthetic coding sequence
  source 1..786: mol_type = other DNA
atggacagcagcgccgtgatcacccagatcagcaaggaggaggccagaggccccctgagaggcaagggcgaccagaagagcgccgccagccagaagcccagaagcagaggcatcctgcacagcctgttctgctgcgtgtgcagagacgacggcgaggccctgcccgcccacagcggcgcccccctgctggtggaggagaacggcgccatccccaagcagacccccgtgcagtacctgctgcccgaggccaaggcccaggacagcgacaagatctgcgtggtgatcgacctggacgagaccctggtgcacagcagcttcaagcccgtgaacaacgccgacttcatcatccccgtggagatcgacggcgtggtgcaccaggtgtacgtgctgaagagaccccacgtggacgagttcctgcagagaatgggcgagctgttcgagtgcgtgctgttcaccgccagcctggccaagtacgccgaccccgtggccgacctgctggacaagtggggcgccttcagagccagactgttcagagagagctgcgtgttccacagaggcaactacgtgaaggacctgagcagactgggcagagacctgagaagagtgctgatcctggacaacagccccgccagctacgtgttccaccccgacaacgccgtgcccgtggccagctggttcgacaacatgagcgacaccgagctgcacgacctgctgcccttcttcgagcagctgagcagagtggacgacgtgtacagcgtgctgagacagcccagacccggcagctag

SEQ ID NO: 77839 - DNA, 2928 bp, synthetic construct
  misc_feature 1..2928: note = Description of Artificial Sequence: Synthetic coding sequence
  source 1..2928: mol_type = other DNA
atggaggactacgagcaggagctgtgcggcgtggaggacgacttccacaaccagttcgccgccgagctggaggtgctggccgagctggagggcgccagcacccccagccccagcggcgtgcccctgttcaccgccggcagaccccccagaaccttcgaggaggccctggccagaggcgacgccgccagcagccccgcccccgccgccagcgtgggcagcagccagggcggcgccagaaagagacaggtggacgccgacctgcagcccgccggcagcctgccccacgcccccagaatcaagagacccagactgcaggtggtgaagagactgaacttcagaagcgaggagatggaggagccccccccccccgacagcagccccaccgacatcacccccccccccagccccgaggacctggccgagctgtggggccacggcgtgagcgaggccgccgccgacgtgggcctgaccagagccagccccgccgccagaaaccccgtgctgagaagaccccccatcctggaggactacgtgcacgtgaccagcaccgagggcgtgagagcctacctggtgctgagagccgaccccatggcccccggcgtgcagggcagcctgctgcacgtgccctggagaggcggcggccagctggacctgctgggcgtgagcctggccagcctgaagaagcaggtggacggcgagagaagagagagactgctgcaggaggcccagaagctgagcgacaccctgcacagcctgagaagcggcgaggaggaggccgcccagcccctgggcgcccccgaggaggagcccaccgacggccaggacgccagcagccactgcctgtgggtggacgagttcgcccccagacactacaccgagctgctgagcgacgacttcaccaacagatgcctgctgaagtggctgaagctgtgggacctggtggtgttcggccacgagagacccagcagaaagcccagacccagcgtggagcccgccagagtgagcaaggaggccaccgcccccggcaagtggaagagccacgagcaggtgctggaggagatgctggaggccggcctggaccccagccagagacccaagcagaaggtggccctgctgtgcggcccccccggcctgggcaagaccaccctggcccacgtgatcgccagacacgccggctacagcgtggtggagatgaacgccagcgacgacagaagccccgaggtgttcagaaccagaatcgaggccgccacccagatggagagcgtgctgggcgccggcggcaagcccaactgcctggtgatcgacgagatcgacggcgcccccgtggccgccatcaacgtgctgctgagcatcctgaacagaaagggcccccaggaggtgggcccccagggccccgccgtgcccagcggcggcggcagaagaagaagagccgagggcggcctgctgatgagacccatcatctgcatctgcaacgaccagttcgcccccagcctgagacagctgaagcagcaggccttcctgctgcacttcccccccaccctgcccagcagactggtgcagagactgcaggaggtgagcctgagacagggcatgagagccgaccccggcgtgctggccgccctgtgcgagaagaccgacaacgacatcagagcctgcatcaacaccctgcagttcctgtacagcagaggccagagagagctgagcgtgagagacgtgcaggccaccagagtgggcctgaaggaccagagaagaggcctgttcagcgtgtggcaggaggtgttccagctgcccagagcccagagaagaagagtgggccaggaccccgccctgcccgccgacaccctgctgctgggcgacggcgacgccggcagcctgaccagcgccagccagagattctacagagtgctgcacgccgccgccagcgccggcgagcacgagaaggtggtgcagggcctgttcgacaacttcctgagactgagactgagagacagcagcctgggcgccgtgtgcgtggccctggactggctggccttcgacgacctgctggccggcgccgcccaccacagccagagcttccagctgctgagatacccccccttcctgcccgtggccttccacgtgctgttcgccagcagccacacccccagaatcaccttccccagcagccagcaggaggcccagaacagaatgagccagatgagaaacctgatccagaccctggtgagcggcatcgcccccgccaccagaagcagagccaccccccaggccctgctgctggacgccctgtgcctgctgctggacatcctggcccccaagctgagacccgtgagcacccagctgtacagcaccagagagaagcagcagctggccagcctggtgggcaccatgctggcctacagcctgacctacagacaggagagaacccccgacggccagtacatctacagactggagcccaacgtggaggagctgtgcagattccccgagctgcccgccagaaagcccctgacctaccagaccaagcagctgatcgccagagagatcgaggtggagaagatgagaagagccgaggccagcgccagagtggagaacagcccccaggtggacggcagcccccccggcctggagggcctgctgggcggcatcggcgagaagggcgtgcacagacccgcccccagaaaccacgagcagagactggagcacatcatgagaagagccgccagagaggagcagcccgagaaggacttcttcggcagagtggtggtgagaagcaccgccgtgcccagcgccggcgacaccgcccccgagcaggacagcgtggagagaagaatgggcaccgccgtgggcagaagcgaggtgtggttcagattcaacgagggcgtgagcaacgccgtgagaagaagcctgtacatcagagacctgctgtag

SEQ ID NO: 77840 - DNA, 3555 bp, synthetic construct
  misc_feature 1..3555: note = Description of Artificial Sequence: Synthetic coding sequence
  source 1..3555: mol_type = other DNA
atgcacgtgaacgccagcgccagaagatggggcagaggcggcgccgccgccctgcccggccccgccgccagccccagaagacccgcccccagaaccggccccgtgggcagacccaccctggcccccagccccagcagagcccacgcccacgccaagaccaacctgctgcccggcagagccgtgcaggcccccgacgccgtgcccggcgccggcagcagcagagcccccgccagatggagacccagagaccccggcagcagcgcccccgacgcctggcagagattcagacccgcccccctgagagcccagcccagacccccccccagacccgcccccggcccccccccccccagaaagggcggctgcggcggccagtggagagccccccaggacagaaccagaggcctgagaagcagaaacagccccagaccccccctggcccagcccagactgagacacgccaaccagtggagagccccccccggcacccccgccgccgactggagaagacccgccagaagcggcagagccgtgagagacggcggcggcggcgccggcggcagcgagagagagctgggcctggccgacggcatggaggactacgagcaggagctgtgcggcgtggaggacgacttccacaaccagttcgccgccgagctggaggtgctggccgagctggagggcgccagcacccccagccccagcggcgtgcccctgttcaccgccggcagaccccccagaaccttcgaggaggccctggccagaggcgacgccgccagcagccccgcccccgccgccagcgtgggcagcagccagggcggcgccagaaagagacaggtggacgccgacctgcagcccgccggcagcctgccccacgcccccagaatcaagagacccagactgcaggtggtgaagagactgaacttcagaagcgaggagatggaggagccccccccccccgacagcagccccaccgacatcacccccccccccagccccgaggacctggccgagctgtggggccacggcttcagcgaggccgccgccgacgtgggcctgaccagagccagccccgccgccagaaaccccgtgctgagaagaccccccatcctggaggactacgtgcacgtgaccagcaccgagggcgtgagagcctacctggtgctgagagccgaccccatggcccccggcgtgcagggcagcctgctgcacgtgccctggagaggcggcggccagctggacctgctgggcgtgagcctggccagcctgaagaagcaggtggacggcgagagaagagagagactgctgcaggaggcccagaagctgagcgacaccctgcacagaagcggcgaggaggaggccgcccagcccctgggcgcccccgaggaggagcccaccgacggccaggacgccagcagccactgcctgtgggtggacgagttcgcccccagacactacaccgagctgctgagcgacgacttcaccaacagatgcctgctgaagtggctgaagctgtgggacctggtggtgttcggccacgagagacccagcagaaagcccagacccagcgtggagcccgccagagtgagcaaggaggccaccgcccccggcaagtggaagagccacgagcaggtgctggaggagatgctggaggccggcctggaccccagccagagacccaagcagaaggtggccctgctgtgcggcccccccggcctgggcaagaccaccctggcccacgtgatcgccagacacgccggctacagcgtggtggagatgaacgccagcgacgacagaagccccgaggtgttcagaaccagaatcgaggccgccacccagatggagagcgtgctgggcgccggcggcaagcccaactgcctggtgatcgacgagatcgacggcgcccccgtggccgccatcaacgtgctgctgagcatcctgaacagaaagggcccccaggaggtgggcccccagggccccgccgtgcccagcggcggcggcagaagaagaagagccgagggcggcctgctgatgagacccatcatctgcatctgcaacgaccagttcgcccccagcctgagacagctgaagcagcaggccttcctgctgcacttcccccccaccctgcccagcagactggtgcagagactgcaggagggcatgagagccgaccccggcgtgctggccgccctgtgcgagaagaccgacaacgacatcagagcctgcatcaacaccctgcagttcctgtacagcagaggccagagagagctgagcgtgagagacgtgcaggccaccagagtgggcctgaaggaccagagaagaggcctgttcagcgtgtggcaggaggtgttccagctgcccagagcccagagaagcagccagcacgtgagcgtgctgacctgccacggcacccccggcgacgccggcctggtggtgctgcaggacatgggcgacgccggcctgggcctgtgggacgtgctgctgctggcctggaccagaagaggcaccttccccggcagattctacagagtgctgcacgccgccgccagcgccggcgagcacgagaaggtggtgcagggcctgttcgacaacttcctgagactgagactgagagacagcagcctgggcgccgtgtgcgtggccctggactggctggccttcgacgacctgctggccggcgccgcccaccacagccagagcttccagctgctgagatacccccccttcctgcccgtggccttccacgtgctgttcgccagcagccacacccccagaatcaccttccccagcagccagcaggaggcccagaacagaatgagccagatgagaaacctgatccagaccctggtgagcggcatcgcccccgccaccagaagcagagccaccccccaggccctgctgctggacgccctgtgcctgctgctggacatcctggcccccaagctgagacccgtgagcacccagctgtacagcaccagagagaagcagcagctggccagcctggtgggcaccatgctggcctacagcctgacctacagacaggagagaacccccgacggccagtacatctacagactggagcccaacgtggaggagctgtgcagattccccgagctgcccgccagaaagcccctgacctaccagaccaagcagctgatcgccagagagatcgaggtggagaagatgagaagagccgaggccagcgccagagtggagaacagcccccaggtggacggcagcccccccggcctggagggcctgctgggcggcatcggcgagaagggcgtgcacagacccgcccccagaaaccacgagcagagactggagcacatcatgagaagagccgccagagaggagcagcccgagaaggacttcttcggcagagtggtggtgagaagcaccgccgtgcccagcgccggcgacaccgcccccgagcaggacagcgtggagagaagaatgggcaccgccgtgggcagaagcgaggtgtggttcagattcaacgagggcgtgagcaacgccgtgagaagaagcctgtacatcagagacctgctgtag

SEQ ID NO: 77841 - DNA, 3012 bp, synthetic construct
  misc_feature 1..3012: note = Description of Artificial Sequence: Synthetic coding sequence
  source 1..3012: mol_type = other DNA
atggaggactacgagcaggagctgtgcggcgtggaggacgacttccacaaccagttcgccgccgagctggaggtgctggccgagctggagggcgccagcacccccagccccagcggcgtgcccctgttcaccgccggcagaccccccagaaccttcgaggaggccctggccagaggcgacgccgccagcagccccgcccccgccgccagcgtgggcagcagccagggcggcgccagaaagagacaggtggacgccgacctgcagcccgccggcagcctgccccacggcagactggccgccctgccccagggcctgagaagcggcagagaggccgaggaggccagcggcagcctgcacgtgagcccccccgcccccagaatcaagagacccagactgcaggtggtgaagagactgaacttcagaagcgaggagatggaggagccccccccccccgacagcagccccaccgacatcacccccccccccagccccgaggacctggccgagctgtggggccacggcgtgagcgaggccgccgccgacgtgggcctgaccagagccagccccgccgccagaaaccccgtgctgagaagaccccccatcctggaggactacgtgcacgtgaccagcaccgagggcgtgagagcctacctggtgctgagagccgaccccatggcccccggcgtgcagggcagcctgctgcacgtgccctggagaggcggcggccagctggacctgctgggcgtgagcctggccagcctgaagaagcaggtggacggcgagagaagagagagactgctgcaggaggcccagaagctgagcgacaccctgcacagcctgagaagcggcgaggaggaggccgcccagcccctgggcgcccccgaggaggagcccaccgacggccaggacgccagcagccactgcctgtgggtggacgagttcgcccccagacactacaccgagctgctgagcgacgacttcaccaacagatgcctgctgaagtggctgaagctgtgggacctggtggtgttcggccacgagagacccagcagaaagcccagacccagcgtggagcccgccagagtgagcaaggaggccaccgcccccggcaagtggaagagccacgagcaggtgctggaggagatgctggaggccggcctggaccccagccagagacccaagcagaaggtggccctgctgtgcggcccccccggcctgggcaagaccaccctggcccacgtgatcgccagacacgccggctacagcgtggtggagatgaacgccagcgacgacagaagccccgaggtgttcagaaccagaatcgaggccgccacccagatggagagcgtgctgggcgccggcggcaagcccaactgcctggtgatcgacgagatcgacggcgcccccgtggccgccatcaacgtgctgctgagcatcctgaacagaaagggcccccaggaggtgggcccccagggccccgccgtgcccagcggcggcggcagaagaagaagagccgagggcggcctgctgatgagacccatcatctgcatctgcaacgaccagttcgcccccagcctgagacagctgaagcagcaggccttcctgctgcacttcccccccaccctgcccagcagactggtgcagagactgcaggaggtgagcctgagacagggcatgagagccgaccccggcgtgctggccgccctgtgcgagaagaccgacaacgacatcagagcctgcatcaacaccctgcagttcctgtacagcagaggccagagagagctgagcgtgagagacgtgcaggccaccagagtgggcctgaaggaccagagaagaggcctgttcagcgtgtggcaggaggtgttccagctgcccagagcccagagaagaagagtgggccaggaccccgccctgcccgccgacaccctgctgctgggcgacggcgacgccggcagcctgaccagcgccagccagagattctacagagtgctgcacgccgccgccagcgccggcgagcacgagaaggtggtgcagggcctgttcgacaacttcctgagactgagactgagagacagcagcctgggcgccgtgtgcgtggccctggactggctggccttcgacgacctgctggccggcgccgcccaccacagccagagcttccagctgctgagatacccccccttcctgcccgtggccttccacgtgctgttcgccagcagccacacccccagaatcaccttccccagcagccagcaggaggcccagaacagaatgagccagatgagaaacctgatccagaccctggtgagcggcatcgcccccgccaccagaagcagagccaccccccaggccctgctgctggacgccctgtgcctgctgctggacatcctggcccccaagctgagacccgtgagcacccagctgtacagcaccagagagaagcagcagctggccagcctggtgggcaccatgctggcctacagcctgacctacagacaggagagaacccccgacggccagtacatctacagactggagcccaacgtggaggagctgtgcagattccccgagctgcccgccagaaagcccctgacctaccagaccaagcagctgatcgccagagagatcgaggtggagaagatgagaagagccgaggccagcgccagagtggagaacagcccccaggtggacggcagcccccccggcctggagggcctgctgggcggcatcggcgagaagggcgtgcacagacccgcccccagaaaccacgagcagagactggagcacatcatgagaagagccgccagagaggagcagcccgagaaggacttcttcggcagagtggtggtgagaagcaccgccgtgcccagcgccggcgacaccgcccccgagcaggacagcgtggagagaagaatgggcaccgccgtgggcagaagcgaggtgtggttcagattcaacgagggcgtgagcaacgccgtgagaagaagcctgtacatcagagacctgctgtag

SEQ ID NO: 77842 - DNA, 1575 bp, synthetic construct
  misc_feature 1..1575: note = Description of Artificial Sequence: Synthetic coding sequence
  source 1..1575: mol_type = other DNA
atgaaggagcccagaatcttccccagagagagacccaccccctggaccagagcccccctgccccccagaggcagactggacggcagcctgggcccccagggcggccccgtgctgaacaccggccaccccctgggcgtgaacagcgaccccttcctgatggccgccggcagcctgggcggcaacctgacccccttccccagaaaccccagccccttccccgccagcagcggcagcctggccagcaaccccgcccccttccccgccggcgccagagaccccagcatggccagcttccccagaggcatgaaccccaccggcaccggcgccgtgagcttccccagacccggcggcctgctgggccccggccccggccccggccccaccctgaaccccagaaccggcgccctgcccggccccggccccctgagcaaccccagactgggcggcctgcccggccccggccccatgagcaaccccagagccggcggcctgctgggcgccggccccgaccccagaggcggcggccccatgggccccggcagcggccccaacctgagagccggcgtgctgctgaccagcggcaacggcccccccaaccccagacccgtgggcctgggccccggccccaaccccaacctgagaagcggcttcctgggcaccaaccccgcccccagaagcggcgtgttccccggccccggcctgggccccaaccccagacccagcggcctgggccccggccccaacctggacgccagagccggcggcctgctgggcaccggcagcggcctgaacctgagaatggccggcccccagggcctggacctggcccccatcctgagagccgccggcctgctgggcgccaacagcgccagcttcagccaggccagcggcaacatgggcaccagccccagcagcatggccagagtgcccggccccatgggccccaacagcggccccagcagcagaggcatcggcctgcccggccccaaccccagccccatgagcagagcccccggccccatcggccccaacagcgcccacttcagcagacccgtgggccccatgggcgtgaacgccaaccccttccccagaggcgccggcagcagcgccttcagccagagcagcggcaccctggccagcaaccccgccaccttccagagaagcgccggcctgcagggcagcaaccccaccatcttccccagagccagcggccccctgggccccaaccccgccaacttccccagagccaccggcctgcagggccccagccccaccaccttccccagaagcaccggccccctgggccccggccaggtgaccttccccagacccgccgccggccacctgggccccagccccgccggccccgtgggcatcaaccccgcccccttcaccagacccaccggcaccctgggcctgaaccccgccagcttccccagaatgaacggccccgccggcaagagcttcgtgcccttccccagagtgggcagcctgcccggcaccaaccccgccgccttccccagacccggcggccccatggccgccatgtaccccaacggcatgctgcccccctag

SEQ ID NO: 77843 - DNA, 366 bp, synthetic construct
  misc_feature 1..366: note = Description of Artificial Sequence: Synthetic coding sequence
  source 1..366: mol_type = other DNA
atggtgcagatcgtgatcagcagcgccagagccggcggcctggccgagtgggtgctgatggagctgcagggcgagatcgaggccagatacagcaccggcctggccggcaacctgctgggcgacctgcactacaccaccgagggcatccccgtgctgatcgtgggccaccacatcctgtacggcaagatcatccacctggagaagcccttcgccgtgctggtgaagcacacccccggcgaccaggactgcgacgagctgggcagagagaccggcaccagatacctggtgaccgccctgatcaaggacaagatcctgttcaagaccagacccaagcccatcatcaccagcgtgcccaagaaggtgtag

SEQ ID NO: 77844 - DNA, 366 bp, synthetic construct; identical to SEQ ID NO: 77843
  misc_feature 1..366: note = Description of Artificial Sequence: Synthetic coding sequence
  source 1..366: mol_type = other DNA

SEQ ID NO: 77845 - DNA, 1776 bp, synthetic construct
  misc_feature 1..1776: note = Description of Artificial Sequence: Synthetic coding sequence
  source 1..1776: mol_type = other DNA
atgaagtacatcctggtgaccggcggcgtgatcagcggcatcggcaagggcatcatcgccagcagcgtgggcaccatcctgaagagctgcggcctgcacgtgaccagcatcaagatcgacccctacatcaacatcgacgccggcaccttcagcccctacgagcacggcgaggtgttcgtgctggacgacggcggcgaggtggacctggacctgggcaactacgagagattcctggacatcagactgaccaaggacaacaacctgaccaccggcaagatctaccagtacgtgatcaacaaggagagaaagggcgactacctgggcaagaccgtgcaggtggtgccccacatcaccgacgccatccaggagtgggtgatgagacaggccctgatccccgtggacgaggacggcctggagccccaggtgtgcgtgatcgagctgggcggcaccgtgggcgacatcgagagcatgcccttcatcgaggccttcagacagttccagttcaaggtgaagagagagaacttctgcaacatccacgtgagcctggtgccccagcccagcagcaccggcgagcagaagaccaagcccacccagaacagcgtgagagagctgagaggcctgggcctgagccccgacctggtggtgtgcagatgcagcaaccccctggacaccagcgtgaaggagaagatcagcatgttctgccacgtggagcccgagcaggtgatctgcgtgcacgacgtgagcagcatctacagagtgcccctgctgctggaggagcagggcgtggtggactacttcctgagaagactggacctgcccatcgagagacagcccagaaagatgctgatgaagtggaaggagatggccgacagatacgacagactgctggagacctgcagcatcgccctggtgggcaagtacaccaagttcagcgacagctacgccagcgtgatcaaggccctggagcacagcgccctggccatcaaccacaagctggagatcaagtacatcgacagcgccgacctggagcccatcaccagccaggaggagcccgtgagataccacgaggcctggcagaagctgtgcagcgcccacggcgtgctggtgcccggcggcttcggcgtgagaggcaccgagggcaagatccaggccatcgcctgggccagaaaccagaagaagcccttcctgggcgtgtgcctgggcatgcagctggccgtggtggagttcagcagaaacgtgctgggctggcaggacgccaacagcaccgagttcgaccccaccaccagccaccccgtggtggtggacatgcccgagcacaaccccggccagatgggcggcaccatgagactgggcaagagaagaaccctgttccagaccaagaacagcgtgatgagaaagctgtacggcgacgccgactacctggaggagagacacagacacagattcgaggtgaaccccgtgtggaagaagtgcctggaggagcagggcctgaagttcgtgggccaggacgtggagggcgagagaatggagatcgtggagctggaggaccaccccttcttcgtgggcgtgcagtaccaccccgagttcctgagcagacccatcaagcccagccccccctacttcggcctgctgctggccagcgtgggcagactgagccactacctgcagaagggctgcagactgagccccagagacacctacagcgacagaagcggcagcagcagccccgacagcgagatcaccgagctgaagttccccagcatcaaccacgactag

SEQ ID NO: 77846 - DNA, 1776 bp, synthetic construct; identical to SEQ ID NO: 77845
  misc_feature 1..1776: note = Description of Artificial Sequence: Synthetic coding sequence
  source 1..1776: mol_type = other DNA

SEQ ID NO: 77847 - DNA, 1083 bp, synthetic construct
  misc_feature 1..1083: note = Description of Artificial Sequence: Synthetic coding sequence
  source 1..1083: mol_type = other DNA
atgttctgccacgtggagcccgagcaggtgatctgcgtgcacgacgtgagcagcatctacagagtgcccctgctgctggaggagcagggcgtggtggactacttcctgagaagactggacctgcccatcgagagacagcccagaaagatgctgatgaagtggaaggagatggccgacagatacgacagactgctggagacctgcagcatcgccctggtgggcaagtacaccaagttcagcgacagctacgccagcgtgatcaaggccctggagcacagcgccctggccatcaaccacaagctggagatcaagtacatcgacagcgccgacctggagcccatcaccagccaggaggagcccgtgagataccacgaggcctggcagaagctgtgcagcgcccacggcgtgctggtgcccggcggcttcggcgtgagaggcaccgagggcaagatccaggccatcgcctgggccagaaaccagaagaagcccttcctgggcgtgtgcctgggcatgcagctggccgtggtggagttcagcagaaacgtgctgggctggcaggacgccaacagcaccgagttcgaccccaccaccagccaccccgtggtggtggacatgcccgagcacaaccccggccagatgggcggcaccatgagactgggcaagagaagaaccctgttccagaccaagaacagcgtgatgagaaagctgtacggcgacgccgactacctggaggagagacacagacacagattcgaggtgaaccccgtgtggaagaagtgcctggaggagcagggcctgaagttcgtgggccaggacgtggagggcgagagaatggagatcgtggagctggaggaccaccccttcttcgtgggcgtgcagtaccaccccgagttcctgagcagacccatcaagcccagccccccctacttcggcctgctgctggccagcgtgggcagactgagccactacctgcagaagggctgcagactgagccccagagacacctacagcgacagaagcggcagcagcagccccgacagcgagatcaccgagctgaagttccccagcatcaaccacgactag

SEQ ID NO: 77848 - DNA, 945 bp, synthetic construct
  misc_feature 1..945: note = Description of Artificial Sequence: Synthetic coding sequence
  source 1..945: mol_type = other DNA
atgcccaagagcaagagcaagatgaagtacatcctggtgaccggcggcgtgatcagcggcatcggcaagggcatcatcgccagcagcgtgggcaccatcctgaagagctgcggcctgcacgtgaccagcatcaagatcgacccctacatcaacatcgacgccggcaccttcagcccctacgagcacggcgaggtgttcgtgctggacgacggcggcgaggtggacctggacctgggcaactacgagagattcctggacatcagactgaccaaggacaacaacctgaccaccggcaagatctaccagtacgtgatcaacaaggagagaaagggcgactacctgggcaagaccgtgcaggtggtgccccacatcaccgacgccatccaggagtgggtgatgagacaggccctgatccccgtggacgaggacggcctggagccccaggtgtgcgtgatcgagctgggcggcaccgtgggcgacatcgagagcatgcccttcatcgaggccttcagacagttccagttcaaggtgaagagagagaacttctgcaacatccacgtgagcctggtgccccagcccagcagcaccggcgagcagaagaccaagcccacccagaacagcgtgagagagctgagaggcctgggcctgagccccgacctggtggtgtgcagatgcagcaaccccctggacaccagcgtgaaggagaagatcagcatgttctgccacgtggagcccgagcaggtgatctgcgtgcacgacgtgagcagcatctacagagtgcccctgctgctggaggagcagggcgtggtggactacttcctgagaagactggacctgcccatcgagagacagcccagaaagatgctgatgaagtggaaggagatggccgacagattcgcctgcaacgaggagctgggcgtgctggccagcttcaccctgctgtag

SEQ ID NO: 77849 - DNA, 1761 bp, synthetic construct
  misc_feature 1..1761: note = Description of Artificial Sequence: Synthetic coding sequence
  source 1..1761: mol_type = other DNA
atgaagtacatcctggtgaccggcggcgtgatcagcggcatcggcaagggcatcatcgccagcagcatcggcaccatcctgaagagctgcggcctgagagtgaccgccatcaagatcgacccctacatcaacatcgacgccggcaccttcagcccctacgagcacggcgaggtgttcgtgctgaacgacggcggcgaggtggacctggacctgggcaactacgagagattcctggacatcaacctgtacaaggacaacaacatcaccaccggcaagatctaccagcacgtgatcaacaaggagagaagaggcgactacctgggcaagaccgtgcaggtggtgccccacatcaccgacgccgtgcaggagtgggtgatgaaccaggccaaggtgcccgtggacggcaacaaggaggagccccagatctgcgtgatcgagctgggcggcaccatcggcgacatcgagggcatgcccttcgtggaggccttcagacagttccagttcaaggccaagagagagaacttctgcaacatccacgtgagcctggtgccccagctgagcgccaccggcgagcagaagaccaagcccacccagaacagcgtgagagccctgagaggcctgggcctgagccccgacctgatcgtgtgcagaagcagcacccccatcgagatggccgtgaaggagaagatcagcatgttctgccacgtgaaccccgagcaggtgatctgcatccacgacgtgagcagcacctacagagtgcccgtgctgctggaggagcagagcatcgtgaagtacttcaaggagagactgcacctgcccatcggcgacagcgccagcaacctgctgttcaagtggagaaacatggccgacagatacgagagactgcagaagatctgcagcatcgccctggtgggcaagtacaccaagctgagagactgctacgccagcgtgttcaaggccctggagcacagcgccctggccatcaaccacaagctgaacctgatgtacatcgacagcatcgacctggagaagatcaccgagaccgaggaccccgtgaagttccacgaggcctggcagaagctgtgcaaggccgacggcatcctggtgcccggcggcttcggcatcagaggcaccctgggcaagctgcaggccatcagctgggccagaaccaagaagatccccttcctgggcgtgtgcctgggcatgcagctggccgtgatcgagttcgccagaaactgcctgaacctgaaggacgccgacagcaccgagttcagacccaacgcccccgtgcccctggtgatcgacatgcccgagcacaaccccggcaacctgggcggcaccatgagactgggcatcagaagaaccgtgttcaagaccgagaacagcatcctgagaaagctgtacggcgacgtgcccttcatcgaggagagacacagacacagattcgaggtgaaccccaacctgatcaagcagttcgagcagaacgacctgagcttcgtgggccaggacgtggacggcgacagaatggagatcatcgagctggccaaccacccctacttcgtgggcgtgcagttccaccccgagttcagcagcagacccatgaagcccagccccccctacctgggcctgctgctggccgccaccggcaacctgaacgcctacctgcagcagggctgcaagctgagcagcagcgacagatacagcgacgccagcgacgacagcttcagcgagcccagaatcgccgagctggagatcagctag

SEQ ID NO: 77850 - DNA, 531 bp, synthetic construct
  misc_feature 1..531: note = Description of Artificial Sequence: Synthetic coding sequence
  source 1..531: mol_type = other DNA
atgtacatcgacagcatcgacctggagaagatcaccgagaccgaggaccccgtgaagttccacgaggcctggcagaagctgtgcaaggccgacggcatcctggtgcccggcggcttcggcatcagaggcaccctgggcaagctgcaggccatcagctgggccagaaccaagaagatccccttcctgggcgtgtgcctgggcatgcagctggccgtgatcgagttcgccagaaactgcctgaacctgaaggacgccgacagcaccgagttcagacccaacgcccccgtgcccctggtgatcgacatgcccgagcacaaccccggcaacctgggcggcaccatgagactgggcatcagaagaaccgtgttcaagaccgagaacagcatcctgatcagcctgagcctgggcctggccagcgtggagcacaccgagtgccccagcgccttcgacctgagagacagcctgttcatcggcctgttctgcgagctgcccatgctgctggagatgaacctggactgggacctggactag

SEQ ID NO: 77851 - DNA, 1761 bp, synthetic construct; identical to SEQ ID NO: 77849
  misc_feature 1..1761: note = Description of Artificial Sequence: Synthetic coding sequence
  source 1..1761: mol_type = other DNA

SEQ ID NO: 77852 - DNA, 1761 bp, synthetic construct; identical to SEQ ID NO: 77849
  misc_feature 1..1761: note = Description of Artificial Sequence: Synthetic coding sequence
  source 1..1761: mol_type = other DNA

SEQ ID NO: 77853 - DNA, 399 bp, synthetic construct
  misc_feature 1..399: note = Description of Artificial Sequence: Synthetic coding sequence
  source 1..399: mol_type = other DNA
tgaggcaagctgcaggccatcagctgggccagaaccaagaagatccccttcctgggcgtgtgcctgggcatgcagctggccgtgatcgagttcgccagaaactgcctgaacctgaaggacgccgacagcaccgagttcagacccaacgcccccgtgcccctggtgatcgacatgcccgagcacaaccccggcaacctgggcggcaccatgagactgggcatcagaagaaccgtgttcaagaccgagaacagcatcctgatcagcctgagcctgggcctggccagcgtggagcacaccgagtgccccagcgccttcgacctgagagacagcctgttcatcggcctgttctgcgagctgcccatgctgctggagatgaacctggactgggacctggactag

SEQ ID NO: 77854 - DNA, 3654 bp, synthetic construct
  misc_feature 1..3654: note = Description of Artificial Sequence: Synthetic coding sequence
  source 1..3654: mol_type = other DNA
atggccgccggcagagcccaggtgcccagcagcgagcaggcctggctggaggacgcccaggtgttcatccagaagaccctgtgccccgccgtgaaggagcccaacgtgcagctgacccccctggtgatcgactgcgtgaagaccgtgtggctgagccagggcagaaaccagggcagcaccctgcccctgagctacagcttcgtgagcgtgcaggacctgaagacccaccagagactgccctgctgcagccacctgagctggagcagcagcgcctaccaggcctgggcccaggaggccggccccaacggcaaccccctgcccagagagcagctgctgctgctgggcaccctgaccgacctgagcgccgacctggagcaggagtgcagaaacggcagcctgtacgtgagagacaacaccggcgtgctgagctgcgagctgatcgacctggacctgagctggctgggccacctgttcctgttccccagatggagctacctgccccccgccagatggaacagcagcggcgagggccacctggagctgtgggacgcccccgtgcccgtgttccccctgaccatcagccccggccccgtgacccccatccccgtgctgtaccccgagagcgccagctgcctgctgagactgagaaacaagctgagaggcgtgcagagaaacctggccggcagcctggtgagactgagcgccctggtgaagagcaagcagaaggcctacttcatcctgagcctgggcagaagccaccccgccgtgacccacgtgagcatcatcgtgcaggtgcccgcccagctggtgtggcacagagccctgagacccggcaccgcctacgtgctgaccgagctgagagtgagcaagatcagaggccagagacagcacgtgtggatgaccagccagagcagcagactgctgctgctgaagcccgagtgcgtgcaggagctggagctggagctggagggccccctgctggaggccgaccccaagcccctgcccatgcccagcaacagcgaggacaagaaggaccccgagagcctggtgagatacagcagactgctgagctacagcggcgccgtgaccggcgtgctgaacgagcccgccggcctgtacgagctggacggccagctgggcctgtgcctggcctaccagcagttcagaggcctgagaagagtgatgagacccggcgtgtgcctgcagctgcaggacgtgcacctgctgcagagcgtgggcggcggcaccagaagacccgtgctggccccctgcctgagaggcgccgtgctgctgcagagcttcagcagacagaagcccggcgcccacagcagcagacaggcctacggcgccagcctgtacgagcagctggtgtgggagagacagctgggcctgcccctgtacctgtgggccaccaaggccctggaggagctggcctgcaagctgtgcccccacgtgctgagacaccaccagttcctgcagcacagcagccccggcagccccagcctgggcctgcagctgctggcccccaccctggacctgctggccccccccggcagccccgtgagaaacgcccacaacgagatcctggaggagccccaccactgccccctgcagaagtacaccagactgcagacccccagcagcttccccaccctggccaccctgaaggaggagggccagagaaaggcctgggccagcttcgaccccaaggccctgctgcccctgcccgaggccagctacctgcccagctgccagctgaacagaagactggcctggagctggctgtgcctgctgcccagcgccttctgccccgcccaggtgctgctgggcgtgctggtggccagcagccacaagggctgcctgcagctgagagaccagagcggcagcctgccctgcctgctgctggccaagcacagccagcccctgagcgaccccagactgatcggctgcctggtgagagccgagagattccagctgatcgtggagagagacgtgagaagcagcttccccagctggaaggagctgagcatgcccggcttcatccagaagcagcaggccagagtgtacgtgcagttcttcctggccgacgccctgatcctgcccgtgcccagaccctgcctgcacagcgccacccccagcaccccccagaccgaccccaccggccccgagggcccccacctgggccagagcagactgttcctgctgtgccacaaggaggccctgatgaagagaaacttctgcgtgccccccggcgccagccccgaggtgcccaagcccgccctgagcttctacgtgctgggcagctggctgggcggcacccagagaaaggagggcaccggctggggcctgcccgagccccagggcaacgacgacaacgaccagaaggtgcacctgatcttcttcggcagcagcgtgagatggttcgagttcctgcaccccggccaggtgtacagactgatcgcccccggccccgccacccccatgctgttcgagaaggacggcagcagctgcatcagcagaagacccctggagctggccggctgcgccagctgcctgaccgtgcaggacaactggaccctggagctggagagcagccaggacatccaggacgtgctggacgccaacaagagcctgcccgagagcagcctgaccgacctgctgagcgacaacttcaccgacagcctggtgagcttcagcgccgagatcctgagcagaaccctgtgcgagcccctggtggccagcctgtggatgaagctgggcaacaccggcgccatgagaagatgcgtgaagctgaccgtggccctggagaccgccgagtgcgagttccccccccacctggacgtgtacatcgaggacccccacctgccccccagcctgggcctgctgcccggcgccagagtgcacttcagccagctggagaagagagtgagcagaagccacaacgtgtactgctgcttcagaagcagcacctacgtgcaggtgctgagcttcccccccgagaccaccatcagcatccccctgccccacatctacctggccgagctgctgcagggcggccagagccccttccaggccaccgccagctgccacatcgtgagcgtgttcagcctgcagctgttctgggtgtgcgcctactgcaccagcatctgcagacagggcaagtgcaccagactgggcagcacctgccccacccagaccgccatcagccaggccatcatcagactgctggtggaggacggcaccgccgaggccgtggtgacctgcagaaaccaccacgtggccgccgccctgggcctgtgccccagagagtgggccagcctgctggacttcgtgcaggtgcccggcagagtggtgctgcagttcgccggccccggcgcccagctggagagcagcgccagagtggacgagcccatgaccatgttcctgtggaccctgtgcaccagccccagcgtgctgagacccatcgtgctgagcttcgagctggagagaaagcccagcaagatcgtgcccctggagccccccagactgcagagattccagtgcggcgagctgcccttcctgacccacgtgaaccccagactgagactgagctgcctgagcatcagagagagcgagtacagcagcagcctgggcatcctggccagcagctgctag

SEQ ID NO: 77855 - DNA, 3096 bp, synthetic construct
  misc_feature 1..3096: note = Description of Artificial Sequence: Synthetic coding sequence
  source 1..3096: mol_type = other DNA
atggccgccggcagagcccaggtgcccagcagcgagcaggcctggctggaggacgcccaggtgttcatccagaagaccctgtgccccgccgtgaaggagcccaacgtgcagctgacccccctggtgatcgactgcgtgaagaccgtgtggctgagccagggcagaaaccagggcagcaccctgcccctgagctacagcttcgtgagcgtgcaggacctgaagacccaccagagactgccctgctgcagccacctgagctggagcagcagcgcctaccaggcctgggcccaggaggccggccccaacggcaaccccctgcccagagagcagctgctgctgctgggcaccctgaccgacctgagcgccgacctggagcaggagtgcagaaacggcagcctgtacgtgagagacaacaccggcgtgctgagctgcgagctgatcgacctggacctgagctggctgggccacctgttcctgttccccagatggagctacctgccccccgccagatggaacagcagcggcgagggccacctggagctgtgggacgcccccgtgcccgtgttccccctgaccatcagccccggccccgtgacccccatccccgtgctgtaccccgagagcgccagctgcctgctgagactgagaagccaccccgccgtgacccacgtgagcatcatcgtgcaggtgcccgcccagctggtgtggcacagagccctgagacccggcaccgcctacgtgctgaccgagctgagagtgagcaagatcagaggccagagacagcacgtgtggatgaccagccagagcagcagactgctgctgctgaagcccgagtgcgtgcaggagctggagctggagctggagggccccctgctggaggccgaccccaagcccctgcccatgcccagcaacagcgaggacaagaaggaccccgagagcctggtgagatacagcagactgctgagctacagcggcgccgtgaccggcgtgctgaacgagcccgccggcctgtacgagctggacggccagctgggcctgtgcctggcctaccagcagttcagaggcctgagaagagtgatgagacccggcgtgtgcctgcagctgcaggacgtgcacctgctgcagagcgtgggcggcggcaccagaagacccgtgctggccccctgcctgagaggcgccgtgctgctgcagagcttcagcagacagaagcccggcgcccacagcagcagacaggcctacggcgccagcctgtacgagcagctggtgtgggagagacagctgggcctgcccctgtacctgtgggccaccaaggccctggaggagctggcctgcaagctgtgcccccacgtgctgagacaccaccagttcctgcagcacagcagccccggcagccccagcctgggcctgcagctgctggcccccaccctggacctgctggccccccccggcagccccgtgagaaacgcccacaacgagatcctggaggagccccaccactgccccctgcagaagtacaccagactgcagacccccagcagcttccccaccctggccaccctgaaggaggagggccagagaaaggcctgggccagcttcgaccccaaggccctgctgcccctgcccgaggccagctacctgcccagctgccagctgaacagaagactggcctggagctggctgtgcctgctgcccagcgccttctgccccgcccaggtgctgctgggcgtgctggtggccagcagccacaagggctgcctgcagctgagagaccagagcggcagcctgccctgcctgctgctggccaagcacagccagcccctgagcgaccccagactgatcggctgcctggtgagagccgagagattccagctgatcgtggagagagacgtgagaagcagcttccccagctggaaggagctgagcatgcccggcttcatccagaagcagcaggccagagtgtacgtgcagttcttcctggccgacgccctgatcctgcccgtgcccagaccctgcctgcacagcgccacccccagcaccccccagaccgaccccaccggccccgagggcccccacctgggccagagcagactgttcctgctgtgccacaaggaggccctgatgaagagaaacttctgcgtgccccccggcgccagccccgaggtgcccaagcccgccctgagcttctacgtgctgggcagctggctgggcggcacccagagaaaggagggcaccggctggggcctgcccgagccccagggcaacgacgacaacgaccagaaggtgcacctgatcttcttcggcagcagcgtgagatggttcgagttcctgcaccccggccaggtgtacagactgatcgcccccggccccgccacccccatgctgttcgagaaggacggcagcagctgcatcagcagaagacccctggagctggccggctgcgccagctgcctgaccgtgcaggacaactggaccctggagctggagagcagccaggacatccaggacgtgctggacgccaacaagagcctgcccgagagcagcctgaccgacctgctgagcgacaacttcaccgacagcctggtgagcttcagcgccgagatcctgagcagaaccctgtgcgagcccctggtggccagcctgtggatgaagctgggcaacaccggcgccatgagaagatgcgtgaagctgaccgtggccctggagaccgccgagtgcgagttccccccccacctggacgtgtacatcgaggacccccacctgccccccagcctgggcctgctgcccggcgccagagtgcacttcagccagctggagaagagagtgagcagaagccacaacgtgtactgctgcttcagaagcagcacctacgtgcaggtgctgagcttcccccccgagaccaccatcagcatccccctgccccacatctacctggccgagctgctgcagggcggccagagccccttccaggccaccgccagctgccacatcgtgagcgtgttcagcctgcagctgttctgggtgtgcgcctactgcaccagcatctgcagacaggcccccggcggcggctgggactgcagaagcagaggcgacctgtag

SEQ ID NO: 77856 - DNA, 843 bp, synthetic construct
  misc_feature 1..843: note = Description of Artificial Sequence: Synthetic coding sequence
  source 1..843: mol_type = other DNA
atgcaggccaagtacagcagcaccagagacatgctggacgacgacggcgacaccaccatgagcctgcacagccagggcagcgccaccaccagacaccccgagcccagaagaaccgagcacagagcccccagcagcacctggagacccgtggccctgaccctgctgaccctgtgcctggtgctgctgatcggcctggccgccctgggcctgctgttcttccagtactaccagctgagcaacaccggccaggacaccatcagccagatggaggagagactgggcaacaccagccaggagctgcagagcctgcaggtgcagaacatcaagctggccggcagcctgcagcacgtggccgagaagctgtgcagagagctgtacaacaaggccggcgcccacagatgcagcccctgcaccgagcagtggaagtggcacggcgacaactgctaccagttctacaaggacagcaagagctgggaggactgcaagtacttctgcctgagcgagaacagcaccatgctgaagatcaacaagcaggaggacctggagttcgccgccagccagagctacagcgagttcttctacagctactggaccggcctgctgagacccgacagcggcaaggcctggctgtggatggacggcacccccttcaccagcgagctgttccacatcatcatcgacgtgaccagccccagaagcagagactgcgtggccatcctgaacggcatgatcttcagcaaggactgcaaggagctgaagagatgcgtgtgcgagagaagagccggcatggtgaagcccgagagcctgcacgtgccccccgagaccctgggcgagggcgactag

SEQ ID NO: 77857 - DNA, 213 bp, synthetic construct
  misc_feature 1..213: note = Description of Artificial Sequence: Synthetic coding sequence
  source 1..213: mol_type = other DNA
atgcaggccaagtacagcagcaccagagacatgctggacgacgacggcgacaccaccatgagcctgcacagccagggcagcgccaccaccagacaccccgagcccagaagaaccgagcacagagcccccagcagcacctggagacccgtggccctgaccctgctgaccctgtgcctggtgctgctgatcggcctggccgccctgggcctgtag

SEQ ID NO: 77858 - DNA, 879 bp, synthetic construct
  misc_feature 1..879: note = Description of Artificial Sequence: Synthetic coding sequence
  source 1..879: mol_type = other DNA
atgaccagaacctacgagaacttccagtacctggagaacaaggtgaaggtgcagggcttcaagaacggccccctgcccctgcagagcctgctgcagagactgtgcagcggcccctgccacctgctgctgagcctgggcctgggcctgctgctgctggtgatcatctgcgtggtgggcttccagaacagcaagttccagagagacctggtgaccctgagaaccgacttcagcaacttcaccagcaacaccgtggccgagatccaggccctgaccagccagggcagcagcctggaggagaccatcgccagcctgaaggccgaggtggagggcttcaagcaggagagacaggccgtgcacagcgagatgctgctgagagtgcagcagctggtgcaggacctgaagaagctgacctgccaggtggccaccctgaacaacaacggcgaggaggccagcaccgagggcacctgctgccccgtgaactgggtggagcaccaggacagctgctactggttcagccacagcggcatgagctgggccgaggccgagaagtactgccagctgaagaacgcccacctggtggtgatcaacagcagagaggagcagaacttcgtgcagaagtacctgggcagcgcctacacctggatgggcctgagcgaccccgagggcgcctggaagtgggtggacggcaccgactacgccaccggcttccagaactggaagcccggccagcccgacgactggcagggccacggcctgggcggcggcgaggactgcgcccacttccaccccgacggcagatggaacgacgacgtgtgccagagaccctaccactgggtgtgcgaggccggcctgggccagaccagccaggagagccactag

SEQ ID NO: 77859 - DNA, 951 bp, synthetic construct
  misc_feature 1..951: note = Description of Artificial Sequence: Synthetic coding sequence
  source 1..951: mol_type = other DNA
atgaccagaacctacgagaacttccagtacctggagaacaaggtgaaggtgcagggcttcaagaacggccccctgcccctgcagagcctgctgcagagactgtgcagcggcccctgccacctgctgctgagcctgggcctgggcctgctgctgctggtgatcatctgcgtggtgggcttccagaacagcaagttccagagagacctggtgaccctgagaaccgacttcagcaacttcaccagcaacaccgtggccgagatccaggccctgaccagccagggcagcagcctggaggagaccatcgccagcctgaaggccgaggtggagggcttcaagcaggagagacaggccggcgtgagcgagctgcaggagcacaccacccagaaggcccacctgggccactgcccccactgccccagcgtgtgcgtgcccgtgcacagcgagatgctgctgagagtgcagcagctggtgcaggacctgaagaagctgacctgccaggtggccaccctgaacaacaacgccagcaccgagggcacctgctgccccgtgaactgggtggagcaccaggacagctgctactggttcagccacagcggcatgagctgggccgaggccgagaagtactgccagctgaagaacgcccacctggtggtgatcaacagcagagaggagcagaacttcgtgcagaagtacctgggcagcgcctacacctggatgggcctgagcgaccccgagggcgcctggaagtgggtggacggcaccgactacgccaccggcttccagaactggaagcccggccagcccgacgactggcagggccacggcctgggcggcggcgaggactgcgcccacttccaccccgacggcagatggaacgacgacgtgtgccagagaccctaccactgggtgtgcgaggccggcctgggccagaccagccaggagagccactag

SEQ ID NO: 77860 - DNA, 879 bp, synthetic construct; identical to SEQ ID NO: 77858
  misc_feature 1..879: note = Description of Artificial Sequence: Synthetic coding sequence
  source 1..879: mol_type = other DNA

SEQ ID NO: 77861 - DNA, 798 bp, synthetic construct
  misc_feature 1..798: note = Description of Artificial Sequence: Synthetic coding sequence
  source 1..798: mol_type = other DNA
atgagcgaggaggtgacctacgccgacctgcagttccagaacagcagcgagatggagaagatccccgagatcggcaagttcggcgagaaggccccccccgcccccagccacgtgtggagacccgccgccctgttcctgaccctgctgtgcctgctgctgctgatcggcctgggcgtgctggccagcatgttccacgtgaccctgaagatcgagatgaagaagatgaacaagctgcagaacatcagcgaggagctgcagagaaacatcagcctgcagctgatgagcaacatgaacatcagcaacaagatcagaaacctgagcaccaccctgcagaccatcgccaccaagctgtgcagagagctgtacagcaaggagcaggagcacaagtgcaagccctgccccagaagatggatctggcacaaggacagctgctacttcctgagcgacgacgtgcagacctggcaggagagcaagatggcctgcgccgcccagaacgccagcctgctgaagatcaacaacaagaacgccctggagttcatcaagagccagagcagaagctacgactactggctgggcctgagccccgaggaggacagcaccagaggcatgagagtggacaacatcatcaacagcagcgcctgggtgatcagaaacgcccccgacctgaacaacatgtactgcggctacatcaacagactgtacgtgcagtactaccactgcacctacaagaagagaatgatctgcgagaagatggccaaccccgtgcagctgggcagcacctacttcagagaggcctag

SEQ ID NO: 77862 - DNA, 699 bp, synthetic construct
  misc_feature 1..699: note = Description of Artificial Sequence: Synthetic coding sequence
  source 1..699: mol_type = other DNA
atgagcgaggaggtgacctacgccgacctgcagttccagaacagcagcgagatggagaagatccccgagatcggcaagttcggcgagaaggtgcacgtgaccctgaagatcgagatgaagaagatgaacaagctgcagaacatcagcgaggagctgcagagaaacatcagcctgcagctgatgagcaacatgaacatcagcaacaagatcagaaacctgagcaccaccctgcagaccatcgccaccaagctgtgcagagagctgtacagcaaggagcaggagcacaagtgcaagccctgccccagaagatggatctggcacaaggacagctgctacttcctgagcgacgacgtgcagacctggcaggagagcaagatggcctgcgccgcccagaacgccagcctgctgaagatcaacaacaagaacgccctggagttcatcaagagccagagcagaagctacgactactggctgggcctgagccccgaggaggacagcaccagaggcatgagagtggacaacatcatcaacagcagcgcctgggtgatcagaaacgcccccgacctgaacaacatgtactgcggctacatcaacagactgtacgtgcagtactaccactgcacctacaagaagagaatgatctgcgagaagatggccaaccccgtgcagctgggcagcacctacttcagagaggcctag

SEQ ID NO: 77863 - DNA, 828 bp, synthetic construct
  misc_feature 1..828: note = Description of Artificial Sequence: Synthetic coding sequence
  source 1..828: mol_type = other DNA
atgtggatcgacttcttcacctacagcagcatgagcgaggaggtgacctacgccgacctgcagttccagaacagcagcgagatggagaagatccccgagatcggcaagttcggcgagaaggccccccccgcccccagccacgtgtggagacccgccgccctgttcctgaccctgctgtgcctgctgctgctgatcggcctgggcgtgctggccagcatgttccacgtgaccctgaagatcgagatgaagaagatgaacaagctgcagaacatcagcgaggagctgcagagaaacatcagcctgcagctgatgagcaacatgaacatcagcaacaagatcagaaacctgagcaccaccctgcagaccatcgccaccaagctgtgcagagagctgtacagcaaggagcaggagcacaagtgcaagccctgccccagaagatggatctggcacaaggacagctgctacttcctgagcgacgacgtgcagacctggcaggagagcaagatggcctgcgccgcccagaacgccagcctgctgaagatcaacaacaagaacgccctggagttcatcaagagccagagcagaagctacgactactggctgggcctgagccccgaggaggacagcaccagaggcatgagagtggacaacatcatcaacagcagcgcctgggtgatcagaaacgcccccgacctgaacaacatgtactgcggctacatcaacagactgtacgtgcagtactaccactgcacctacaagaagagaatgatctgcgagaagatggccaaccccgtgcagctgggcagcacctacttcagagaggcctag

SEQ ID NO: 77864 - DNA, 264 bp, synthetic construct
  misc_feature 1..264: note = Description of Artificial Sequence: Synthetic coding sequence
  source 1..264: mol_type = other DNA
cacaagtgcaagccctgccccagaagatggatctggcacaaggacagctgctacttcctgagcgacgacgtgcagacctggcaggagagcaagatggcctgcgccgcccagaacgccagcctgctgaagatcaacaacaagaacatcttcagcgtgatcaagaagaagaccgagaagttcttctggctgggcctgagctgggacagcagcggcagaagctggttctgggaggacggcagcgtgcccagccccagcctgtactag

SEQ ID NO: 77865 - DNA, 498 bp, synthetic construct
  misc_feature 1..498: note = Description of Artificial Sequence: Synthetic coding sequence
  source 1..498: mol_type = other DNA
atgagcgaggaggtgacctacgccgacctgcagttccagaacagcagcgagatggagaagatccccgagatcggcaagttcggcgagaaggccccccccgcccccagccacgtgtggagacccgccgccctgttcctgaccctgctgtgcctgctgctgctgatcggcctgggcgtgctggccagcatgttccacgtgaccctgaagatcgagatgaagaagatgaacaagctgcagaacatcagcgaggagctgcagagaaacatcagcctgcagctgatgagcaacatgaacatcagcaacaagatcagaaacctgagcaccaccctgcagaccatcgccaccaagctgtgcagagagctgtacagcaaggagcaggagcacaagtgcaagccctgccccagaagatggatctggcacaaggacagctgctacttcctgagcgacgacgtgcagacctggcaggagagcaagatggcctgcgccgcccagaactag

SEQ ID NO: 77866 - DNA, 642 bp, synthetic construct
  misc_feature 1..642: note = Description of Artificial Sequence: Synthetic coding sequence
  source 1..642: mol_type = other DNA
atgagcgaggaggtgacctacgccgacctgcagttccagaacagcagcgagatggagaagatccccgagatcggcaagttcggcgagaaggccccccccgcccccagccacgtgtggagacccgccgccctgttcctgaccctgctgtgcctgctgctgctgatcggcctgggcgtgctggccagcatgttccacgtgaccctgaagatcgagatgaagaagatgaacaagctgcagaacatcagcgaggagctgcagagaaacatcagcctgcagctgatgagcaacatgaacatcagcaacaagatcagaaacctgagcaccaccctgcagaccatcgccaccaagctgtgcagagagctgtacagcaaggagcaggagcacaagtgcaagccctgccccagaagatggatctggcacaaggacagctgctacttcctgagcgacgacgtgcagacctggcaggagagcaagatggcctgcgccgcccagaacgccagcctgctgaagatcaacaacaagaacgccctggagttcatcaagagccagagcagaagctacgactactggctgggcctgagccccgaggaggacagcaccagaggcatgagagtggacaacatcatcaacagcagcgcctag

SEQ ID NO: 77867 - DNA, 423 bp, synthetic construct
  misc_feature 1..423: note = Description of Artificial Sequence: Synthetic coding sequence
  source 1..423: mol_type = other DNA
atggccgccaccggcttcagcgcccccaacggcagctgccacggcaccagcagaaccgtgaacagcgacgcccccatgagccccgagctgcccaagccccacctgcccgaccagctggtgatcgtgaacgagaccgaggccgacagcaagcccagcaagaacgtggccagaagcgccgccgtggagaccgccagcctgagccccagcctggtgcccgccagacagcccaccatcagcctgctgtgcgaggacaccgccgacaccctgagcgtggagagcctgaccctggtgccccccgtggacccccacagcctgagaagcctgaccggcatgccccccctgagcacccccgccgccgcctgcaccgagcccgtgggcgaggaggccgcctgcgccgagcccgtgggcaccgccgaggactag

SEQ ID NO: 77868 - DNA, 2721 bp, synthetic construct
  misc_feature 1..2721: note = Description of Artificial Sequence: Synthetic coding sequence
  source 1..2721: mol_type = other DNA
atgttcggcagaagcagaagctgggtgggcggcggccacggcaagaccagcagaaacatccacagcctggaccacctgaagtacctgtaccacgtgctgaccaagaacaccaccgtgaccgagcagaacagaaacctgctggtggagaccatcagaagcatcaccgagatcctgatctggggcgaccagaacgacagcagcgtgttcgacttcttcctggagaagaacatgttcgtgttcttcctgaacatcctgagacagaagagcggcagatacgtgtgcgtgcagctgctgcagaccctgaacatcctgttcgagaacatcagccacgagaccagcctgtactacctgctgagcaacaactacgtgaacagcatcatcgtgcacaagttcgacttcagcgacgaggagatcatggcctactacatcagcttcctgaagaccctgagcctgaagctgaacaaccacaccgtgcacttcttctacaacgagcacaccaacgacttcgccctgtacaccgaggccatcaagttcttcaaccaccccgagagcatggtgagaatcgccgtgagaaccatcaccctgaacgtgtacaaggtggacaaccaggccatgctgcactacatcagagacaagaccgccgtgccctacttcagcaacctggtgtggttcatcggcagccacgtgatcgagctggacgactgcgtgcagaccgacgaggagcacagaaacagaggcaagctgagcgacctggtggccgagcacctggaccacctgcactacctgaacgacatcctgatcatcaactgcgagttcctgaacgacgtgctgaccgaccacctgctgaacagactgttcctgcccctgtacgtgtacagcctggagaaccaggacaagggcggcgagagacccaagatcagcctgcccgtgagcctgtacctgctgagccaggtgttcctgatcatccaccacgcccccctggtgaacagcctggccgaggtgatcctgaacggcgacctgagcgagatgtacgccaagaccgagcaggacatccagagaagcagcgccaagcccagcatcagatgcttcatcaagcccaccgagaccctggagagaagcctggagatgaacaagcacaagggcaagagaagagtgcagaagagacccaactacaagaacgtgggcgaggaggaggacgaggagaagggccccaccgaggacgcccaggaggacgccgagaaggccaaggagatcgagatggtgatcatggagagaagcaagctgagcgagctggccgccagcaccagcgtgcaggagcagaacaccaccgacgaggagaagagcgccgccgccacctgcagcgagagcacccagtggagcagacccttcctggacatggtgtaccacgccctggacagccccgacgacgactaccacgccctgttcgtgctgtgcctgctgtacgccatgagccacaacaagggcatggaccccgagaagctggagagaatccagctgcccgtgcccaacgccgccgagaagaccacctacaaccaccccctggccgagagactgatcagaatcatgaacaacgccgcccagcccgacggcaagatcagactggccaccctggagctgagctgcctgctgctgaagcagcaggtgctgatgagcgccggctgcatcatgaaggacgtgcacctggcctgcctggagggcgccagagaggagagcgtgcacctggtgagacacttctacaagggcgaggacatcttcctggacatgttcgaggacgagtacagaagcatgaccatgaagcccatgaacgtggagtacctgatgatggacgccagcatcctgctgccccccaccggcacccccctgaccggcatcgacttcgtgaagagactgccctgcggcgacgtggagaagaccagaagagccatcagagtgttcttcatgctgagaagcctgagcctgcagctgagaggcgagcccgagacccagctgcccctgaccagagaggaggacctgatcaagaccgacgacgtgctggacctgaacaacagcgacctgatcgcctgcaccgtgatcaccaaggacggcggcatggtgcagagattcctggccgtggacatctaccagatgagcctggtggagcccgacgtgagcagactgggctggggcgtggtgaagttcgccggcctgctgcaggacatgcaggtgaccggcgtggaggacgacagcagagccctgaacatcaccatccacaagcccgccagcagcccccacagcaagcccttccccatcctgcaggccaccttcatcttcagcgaccacatcagatgcatcatcgccaagcagagactggccaagggcagaatccaggccagaagaatgaagatgcagagaatcgccgccctgctggacctgcccatccagcccaccaccgaggtgctgggcttcggcctgggcagcagcaccagcacccagcacctgcccttcagattctacgaccagggcagaagaggcagcagcgaccccaccgtgcagagaagcgtgttcgccagcgtggacaaggtgcccggcgagcccgcccccagacccgccccccagctggtgcaccacggcggcagaagcagaagcttcagcctgtggagcctgtgcgagctgcccttcctgagccagaagcccagaagactggccgcccccgccagctag

SEQ ID NO: 77869 - DNA, 3162 bp, synthetic construct
  misc_feature 1..3162: note = Description of Artificial Sequence: Synthetic coding sequence
  source 1..3162: mol_type = other DNA
atgttcggcagaagcagaagctgggtgggcggcggccacggcaagaccagcagaaacatccacagcctggaccacctgaagtacctgtaccacgtgctgaccaagaacaccaccgtgaccgagcagaacagaaacctgctggtggagaccatcagaagcatcaccgagatcctgatctggggcgaccagaacgacagcagcgtgttcgacttcttcctggagaagaacatgttcgtgttcttcctgaacatcctgagacagaagagcggcagatacgtgtgcgtgcagctgctgcagaccctgaacatcctgttcgagaacatcagccacgagaccagcctgtactacctgctgagcaacaactacgtgaacagcatcatcgtgcacaagttcgacttcagcgacgaggagatcatggcctactacatcagcttcctgaagaccctgagcctgaagctgaacaaccacaccgtgcacttcttctacaacgagcacaccaacgacttcgccctgtacaccgaggccatcaagttcttcaaccaccccgagagcatggtgagaatcgccgtgagaaccatcaccctgaacgtgtacaaggtgagcctggacaaccaggccatgctgcactacatcagagacaagaccgccgtgccctacttcagcaacctggtgtggttcatcggcagccacgtgatcgagctggacgactgcgtgcagaccgacgaggagcacagaaacagaggcaagctgagcgacctggtggccgagcacctggaccacctgcactacctgaacgacatcctgatcatcaactgcgagttcctgaacgacgtgctgaccgaccacctgctgaacagactgttcctgcccctgtacgtgtacagcctggagaaccaggacaagggcggcgagagacccaagatcagcctgcccgtgagcctgtacctgctgagccaggtgttcctgatcatccaccacgcccccctggtgaacagcctggccgaggtgatcctgaacggcgacctgagcgagatgtacgccaagaccgagcaggacatccagagaagcagcgccaagcccagcatcagatgcttcatcaagcccaccgagaccctggagagaagcctggagatgaacaagcacaagggcaagagaagagtgcagaagagacccaactacaagaacgtgggcgaggaggaggacgaggagaagggccccaccgaggacgcccaggaggacgccgagaaggccaagggcaccgagggcggcagcaagggcatcaagaccagcggcgagagcgaggagatcgagatggtgatcatggagagaagcaagctgagcgagctggccgccagcaccagcgtgcaggagcagaacaccaccgacgaggagaagagcgccgccgccacctgcagcgagagcacccagtggagcagacccttcctggacatggtgtaccacgccctggacagccccgacgacgactaccacgccctgttcgtgctgtgcctgctgtacgccatgagccacaacaagggcatggaccccgagaagctggagagaatccagctgcccgtgcccaacgccgccgagaagaccacctacaaccaccccctggccgagagactgatcagaatcatgaacaacgccgcccagcccgacggcaagatcagactggccaccctggagctgagctgcctgctgctgaagcagcaggtgctgatgagcgccggctgcatcatgaaggacgtgcacctggcctgcctggagggcgccagagaggagagcgtgcacctggtgagacacttctacaagggcgaggacatcttcctggacatgttcgaggacgagtacagaagcatgaccatgaagcccatgaacgtggagtacctgatgatggacgccagcatcctgctgccccccaccggcacccccctgaccggcatcgacttcgtgaagagactgccctgcggcgacgtggagaagaccagaagagccatcagagtgttcttcatgctgagaagcctgagcctgcagctgagaggcgagcccgagacccagctgcccctgaccagagaggaggacctgatcaagaccgacgacgtgctggacctgaacaacagcgacctgatcgcctgcaccgtgatcaccaaggacggcggcatggtgcagagattcctggccgtggacatctaccagatgagcctggtggagcccgacgtgagcagactgggctggggcgtggtgaagttcgccggcctgctgcaggacatgcaggtgaccggcgtggaggacgacagcagagccctgaacatcaccatccacaagcccgccagcagcccccacagcaagcccttccccatcctgcaggccaccttcatcttcagcgaccacatcagatgcatcatcgccaagcagagactggccaagggcagaatccaggccagaagaatgaagatgcagagaatcgccgccctgctggacctgcccatccagcccaccaccgaggtgctgggcttcggcctgggcagcagcaccagcacccagcacctgcccttcagattctacgaccagggcagaagaggcagcagcgaccccaccgtgcagagaagcgtgttcgccagcgtggacaaggtgcccggcttcgccgtggcccagtgcatcaaccagcacagcagccccagcctgagcagccagagcccccccagcgccagcggcagccccagcggcagcggcagcaccagccactgcgacagcggcggcaccagcagcagcagcacccccagcaccgcccagagccccgccgacgcccccatgagccccgagctgcccaagccccacctgcccgaccagctggtgatcgtgaacgagaccgaggccgacagcaagcccagcaagaacgtggccagaagcgccgccgtggagaccgccagcctgagccccagcctggtgcccgccagacagcccaccatcagcctgctgtgcgaggacaccgccgacaccctgagcgtggagagcctgaccctggtgccccccgtggacccccacagcctgagaagcctgaccggcatgccccccctgagcacccccgccgccgcctgcaccgagcccgtgggcgaggaggccgcctgcgccgagcccgtgggcaccgccgaggactag

SEQ ID NO: 77870 - DNA, 3162 bp, synthetic construct
  misc_feature 1..3162: note = Description of Artificial Sequence: Synthetic coding sequence
  source 1..3162: mol_type = other DNA
atgttcggcagaagcagaagctgggtgggcggcggccacggcaagaccagcagaaacatccacagcctggaccacctgaagtacctgtaccacgtgctgaccaagaacaccaccgtgaccgagcagaacagaaacctgctggtggagaccatcagaagcatcaccgagatcctgatctggggcgaccagaacgacagcagcgtgttcgacttcttcctggagaagaacatgttcgtgttcttcctgaacatcctgagacagaagagcggcagatacgtgtgcgtgcagctgctgcagaccctgaacatcctgttcgagaacatcagccacgagaccagcctgtactacctgctgagcaacaactacgtgaacagcatcatcgtgcacaagttcgacttcagcgacgaggagatcatggcctactacatcagcttcctgaagaccctgagcctgaagctgaacaaccacaccgtgcacttcttctacaacgagcacaccaacgacttcgccctgtacaccgaggccatcaagttcttcaaccaccccgagagcatggtgagaatcgccgtgagaaccatcaccctgaacgtgtacaaggtgagcgtggacaaccaggccatgctgcactacatcagagacaagaccgccgtgccctacttcagcaacctggtgtggttcatcggcagccacgtgatcgagctggacgactgcgtgcagaccgacgaggagcacagaaacagaggcaagctgagcgacctggtggccgagcacctggaccacctgcactacctgaacgacatcctgatcatcaactgcgagttcctgaacgacgtgctgaccgaccacctgctgaacagactgttcctgcccctgtacgtgtacagcctggagaaccaggacaagggcggcgagagacccaagatcagcctgcccgtgagcctgtacctgctgagccaggtgttcctgatcatccaccacgcccccctggtgaacagcctggccgaggtgatcctgaacggcgacctgagcgagatgtacgccaagaccgagcaggacatccagagaagcagcgccaagcccagcatcagatgcttcatcaagcccaccgagaccctggagagaagcctggagatgaacaagcacaagggcaagagaagagtgcagaagagacccaactacaagaacgtgggcgaggaggaggacgaggagaagggccccaccgaggacgcccaggaggacgccgagaaggccaagggcaccgagggcggcagcaagggcatcaagaccagcggcgagagcgaggagatcgagatggtgatcatggagagaagcaagctgagcgagctggccgccagcaccagcgtgcaggagcagaacaccaccgacgaggagaagagcgccgccgccacctgcagcgagagcacccagtggagcagacccttcctggacatggtgtaccacgccctggacagccccgacgacgactaccacgccctgttcgtgctgtgcctgctgtacgccatgagccacaacaagggcatggaccccgagaagctggagagaatccagctgcccgtgcccaacgccgccgagaagaccacctacaaccaccccctggccgagagactgatcagaatcatgaacaacgccgcccagcccgacggcaagatcagactggccaccctggagctgagctgcctgctgctgaagcagcaggtgctgatgagcgccggctgcatcatgaaggacgtgcacctggcctgcctggagggcgccagagaggagagcgtgcacctggtgagacacttctacaagggcgaggacatcttcctggacatgttcgaggacgagtacagaagcatgaccatgaagcccatgaacgtggagtacctgatgatggacgccagcatcctgctgccccccaccggcacccccctgaccggcatcgacttcgtgaagagactgccctgcggcgacgtggagaagaccagaagagccatcagagtgttcttcatgctgagaagcctgagcctgcagctgagaggcgagcccgagacccagctgcccctgaccagagaggaggacctgatcaagaccgacgacgtgctggacctgaacaacagcgacctgatcgcctgcaccgtgatcaccaaggacggcggcatggtgcagagattcctggccgtggacatctaccagatgagcctggtggagcccgacgtgagcagactgggctggggcgtggtgaagttcgccggcctgctgcaggacatgcaggtgaccggcgtggaggacgacagcagagccctgaacatcaccatccacaagcccgccagcagcccccacagcaagcccttccccatcctgcaggccaccttcatcttcagcgaccacatcagatgcatcatcgccaagcagagactggccaagggcagaatccaggccagaagaatgaagatgcagagaatcgccgccctgctggacctgcccatccagcccaccaccgaggtgctgggcttcggcctgggcagcagcaccagcacccagcacctgcccttcagattctacgaccagggcagaagaggcagcagcgaccccaccgtgcagagaagcgtgttcgccagcgtggacaaggtgcccggcttcgccgtggcccagtgcatcaaccagcacagcagccccagcctgagcagccagagcccccccagcgccagcggcagccccagcggcagcggcagcaccagccactgcgacagcggcggcaccagcagcagcagcacccccagcaccgcccagagccccgccgacgcccccatgagccccgagctgcccaagccccacctgcccgaccagctggtgatcgtgaacgagaccgaggccgacagcaagcccagcaagaacgtggccagaagcgccgccgtggagaccgccagcctgagccccagcctggtgcccgccagacagcccaccatcagcctgctgtgcgaggacaccgccgacaccctgagcgtggagagcctgaccctggtgccccccgtggacccccacagcctgagaagcctgaccggcatgccccccctgagcacccccgccgccgcctgcaccgagcccgtgggcgaggaggccgcctgcgccgagcccgtgggcaccgccgaggactag

SEQ ID NO: 77871 - DNA, 288 bp, synthetic construct
  misc_feature 1..288: note = Description of Artificial Sequence: Synthetic coding sequence
  source 1..288: mol_type = other DNA
atgcacgacagcaacaacgtggagaaggacatcacccccagcgagctgcccgccaaccccgccatcagagccaactgccaccaggagcccagcgtgtgcctgcaggccgcctgccccgagagctggatcggcttccagagaaagtgcttctacttcagcgacgacaccaagaactggaccagcagccagagattctgcgacagccaggacgccgacctggcccaggtggagagcttccaggagctggtgagctaccccggcagcagaagagtgtgcctgttcgagtag

SEQ ID NO: 77872 - DNA, 525 bp, synthetic construct
  misc_feature 1..525: note = Description of Artificial Sequence: Synthetic coding sequence
  source 1..525: mol_type = other DNA
atgatcaaccccgagctgagagacggcagagccgacggcttcatccacagaatcgtgcccaagctgatccagaactggaagatcggcctgatgtgcttcctgagcatcatcatcaccaccgtgtgcatcatcatgatcgccacctggagcaagcacgccaagcccgtggcctgcagcggcgactggctgggcgtgagagacaagtgcttctacttcagcgacgacaccagaaactggaccgccagcaagatcttctgcagcctgcagaaggccgagctggcccagatcgacacccaggaggacatggagttcctgaagagatacgccggcaccgacatgcactggatcggcctgagcagaaagcagggcgacagctggaagtggaccaacggcaccaccttcaacggctggttcgagatcatcggcaacggcagcttcgccttcctgagcgccgacggcgtgcacagcagcagaggcttcatcgacatcaagtggatctgcagcaagcccaagtacttcctgtag

SEQ ID NO: 77873 - DNA, 2406 bp, synthetic construct
  misc_feature 1..2406: note = Description of Artificial Sequence: Synthetic coding sequence
  source 1..2406: mol_type = other DNA
atgcaccacagaatgaacgagatgaacctgagccccgtgggcatggagcagctgaccagcagcagcgtgagcaacgccctgcccgtgagcggcagccacctgggcctggccgccagccccacccacagcgccatccccgcccccggcctgcccgtggccatccccaacctgggccccagcctgagcagcctgcccagcgccctgagcctgatgctgcccatgggcatcggcgacagaggcgtgatgtgcggcctgcccgagagaaactacaccctgcccccccccccctacccccacctggagagcagctacttcagaaccatcctgcccggcatcctgagctacctggccgacagaccccccccccagtacatccaccccaacagcatcaacgtggacggcaacaccgccctgagcatcaccaacaaccccagcgccctggacccctaccagagcaacggcaacgtgggcctggagcccggcatcgtgagcatcgacagcagaagcgtgaacacccacggcgcccagagcctgcaccccagcgacggccacgaggtggccctggacaccgccatcaccatggagaacgtgagcagagtgaccagccccatcagcaccgacggcatggccgaggagctgaccatggacggcgtggccggcgagcacagccagatccccaacggcagcagaagccacgagcccctgagcgtggacagcgtgagcaacaacctggccgccgacgccgtgggccacggcggcgtgatccccatgcacggcaacggcctggagctgcccgtggtgatggagaccgaccacatcgccagcagagtgaacggcatgagcgacagcgccctgagcgacagcatccacaccgtggccatgagcaccaacagcgtgagcgtggccctgagcaccagccacaacctggccagcctggagagcgtgagcctgcacgaggtgggcctgagcctggagcccgtggccgtgagcagcatcacccaggaggtggccatgggcaccggccacgtggacgtgagcagcgacagcctgagcttcgtgagccccagcctgcagatggaggacagcaacagcaacaaggagaacatggccaccctgttcaccatctggtgcaccctgtgcgacagagcctaccccagcgactgccccgagcacggccccgtgaccttcgtgcccgacacccccatcgagagcagagccagactgagcctgcccaagcagctggtgctgagacagagcatcgtgggcgccgaggtgggcgtgtggaccggcgagaccatccccgtgagaacctgcttcggccccctgatcggccagcagagccacagcatggaggtggccgagtggaccgacaaggccgtgaaccacatctggaagatctaccacaacggcgtgctggagttctgcatcatcaccaccgacgagaacgagtgcaactggatgatgttcgtgagaaaggccagaaacagagaggagcagaacctggtggcctacccccacgacggcaagatcttcttctgcaccagccaggacatcccccccgagaacgagctgctgttctactacagcagagactacgcccagcagatcggcgtgcccgagcaccccgacgtgcacctgtgcaactgcggcaaggagtgcaacagctacaccgagttcaaggcccacctgaccagccacatccacaaccacctgcccacccagggccacagcggcagccacggccccagccacagcaaggagagaaagtggaagtgcagcatgtgcccccaggccttcatcagccccagcaagctgcacgtgcacttcatgggccacatgggcatgaagccccacaagtgcgacttctgcagcaaggccttcagcgaccccagcaacctgagaacccacctgaagatccacaccggccagaagaactacagatgcaccctgtgcgacaagagcttcacccagaaggcccacctggagagccacatggtgatccacaccggcgagaagaacctgaagtgcgactactgcgacaagctgttcatgagaagacaggacctgaagcagcacgtgctgatccacacccaggagagacagatcaagtgccccaagtgcgacaagctgttcctgagaaccaaccacctgaagaagcacctgaacagccacgagggcaagagagactacgtgtgcgagaagtgcaccaaggcctacctgaccaagtaccacctgaccagacacctgaagacctgcaagggccccaccagcagcagcagcgcccccgaggaggaggaggaggacgacagcgaggaggaggacctggccgacagcgtgggcaccgaggactgcagaatcaacagcgccgtgtacagcgccgacgagagcctgagcgcccacaagtag

SEQ ID NO: 77874 - DNA, 465 bp, synthetic construct
  misc_feature 1..465: note = Description of Artificial Sequence: Synthetic coding sequence
  source 1..465: mol_type = other DNA
atgcacgacagcaacaacgtggagaaggacatcacccccagcgagctgcccgccaaccccgccatcagagccaactgccaccaggagcccagcgtgtgcctgcaggccgcctgccccgagagctggatcggcttccagagaaagtgcttctacttcagcgacgacaccaagaactggaccagcagccagagattctgcgacagccaggacgccgacctggcccaggtggagagcttccaggagctgaacttcctgctgagatacaagggccccagcgaccactggatcggcctgagcagagagcagggccagccctggaagtggatcaacggcaccgagtggaccagacagttccccatcctgggcgccggcgagtgcgcctacctgaacgacaagggcgccagcagcgccagacactacaccgagagaaagtggatctgcagcaagagcgacatccacgtgtag

SEQ ID NO: 77875 - DNA, 585 bp, synthetic construct
  misc_feature 1..585: note = Description of Artificial Sequence: Synthetic coding sequence
  source 1..585: mol_type = other DNA
atgcacgacagcaacaacgtggagaaggacatcacccccagcgagctgcccgccaaccccggctgcctgcacagcaaggagcacagcatcaaggccaccctgatctggagactgttcttcctgatcatgttcctgaccatcatcgtgtgcggcatggtggccgccctgagcgccatcagagccaactgccaccaggagcccagcgtgtgcctgcaggccgcctgccccgagagctggatcggcttccagagaaagtgcttctacttcagcgacgacaccaagaactggaccagcagccagagattctgcgacagccaggacgccgacctggcccaggtggagagcttccaggagctgaacttcctgctgagatacaagggccccagcgaccactggatcggcctgagcagagagcagggccagccctggaagtggatcaacggcaccgagtggaccagacagctggtgatgaaggaggacggcgccaacctgtacgtggccaaggtgagccaggtgcccagaatgaaccccagacccgtgatggtgagctaccccggcagcagaagagtgtgcctgttcgagtag

SEQ ID NO: 77876 - DNA, 576 bp, synthetic construct
  misc_feature 1..576: note = Description of Artificial Sequence: Synthetic coding sequence
  source 1..576: mol_type = other DNA
atgcacgacagcaacaacgtggagaaggacatcacccccagcgagctgcccgccaaccccggctgcctgcacagcaaggagcacagcatcaaggccaccctgatctggagactgttcttcctgatcatgttcctgaccatcatcgtgtgcggcatggtggccgccctgagcgccatcagagccaactgccaccaggagcccagcgtgtgcctgcaggccgcctgccccgagagctggatcggcttccagagaaagtgcttctacttcagcgacgacaccaagaactggaccagcagccagagattctgcgacagccaggacgccgacctggcccaggtggagagcttccaggagctgaacttcctgctgagatacaagggccccagcgaccactggatcggcctgagcagagagcagggccagccctggaagtggatcaacggcaccgagtggaccagacagttccccatcctgggcgccggcgagtgcgcctacctgaacgacaagggcgccagcagcgccagacactacaccgagagaaagtggatctgcagcaagagcgacatccacgtgtag

SEQ ID NO: 77877 - DNA, 399 bp, synthetic construct
  misc_feature 1..399: note = Description of Artificial Sequence: Synthetic coding sequence
  source 1..399: mol_type = other DNA
atgcacgacagcaacaacgtggagaaggacatcacccccagcgagctgcccgccaaccccggctgcctgcacagcaaggagcacagcatcaaggccaccctgatctggagactgttcttcctgatcatgttcctgaccatcatcgtgtgcggcatggtggccgccctgagcgccatcagagccaactgccaccaggagcccagcgtgtgcctgcaggccgcctgccccgagagctggatcggcttccagagaaagtgcttctacttcagcgacgacaccaagaactggaccagcagccagagattctgcgacagccaggacgccgacctggcccaggtggagagcttccaggagctggtgagctaccccggcagcagaagagtgtgcctgttcgagtag

SEQ ID NO: 77878 - DNA, 891 bp, synthetic construct
  misc_feature 1..891: note = Description of Artificial Sequence: Synthetic coding sequence
  source 1..891: mol_type = other DNA
atgagcgacagcaaggagcccagagtgcagcagctgggcctgctgggctgcctgggccacggcgccctggtgctgcagctgctgagcttcatgctgctggccggcgtgctggtggccatcctggtgcaggtgagcaaggtgcccagcagcctgagccaggagcagagcgagcaggacgccatctaccagaacctgacccagctgaaggccgccgtgggcgagctgagcgagaagagcaagctgcaggagatctaccaggagctgacccagctgaaggccgccgtgggcgagctgcccgagaagagcaagctgcaggagatctaccaggagctgaccagactgaaggccgccgtgggcgagctgcccgagaagagcaagctgcaggagatctaccaggagctgaccagactgaaggccgccgtgggcgagctgcccgagaagagcaagctgcaggagatctaccaggagctgaccagactgaaggccgccgtgggcgagctgcccgagaagagcaagctgcaggagatctaccaggagctgaccgagctgaaggccgccgtgggcgagctgcccgagaagagcaagctgcaggagatctaccaggagctgacccagctgaaggccgccgtgggcgagctgcccgaccagagcaagcagcagcagatctaccaggagctgaccgacctgaagaccgccttcgagagactgtgcagacactgccccaaggactggaccttcttccagggcaactgctacttcatgagcaacagccagagaaactggcacgacagcgtgaccgcctgccaggaggtgagagcccagctggtggtgatcaagaccgccgaggagcagctgcccgccgtgctggagcagtggagaacccagcagtag

SEQ ID NO: 77879 - DNA, 2379 bp, synthetic construct
  misc_feature 1..2379: note = Description of Artificial Sequence: Synthetic coding sequence
  source 1..2379: mol_type = other DNA
atggccgcccccagcctgctgaactggagaagagtgagcagcttcaccggccccgtgcccagagccagacacggccacagagccgtggccatcagagagctgatgatcatcttcggcggcggcaacgagggcatcgccgacgagctgcacgtgtacaacaccgccaccaaccagtggttcctgcccgccgtgagaggcgacatcccccccggctgcgccgcccacggcttcgtgtgcgacggcaccagaatcctggtgttcggcggcatggtggagtacggcagatacagcaacgagctgtacgagctgcaggccagcagatggctgtggaagaaggtgaagccccaccccccccccagcggcctgcccccctgccccagactgggccacagcttcagcctgtacggcaacaagtgctacctgttcggcggcctggccaacgagagcgaggacagcaacaacaacgtgcccagatacctgaacgacttctacgagctggagctgcagcacggcagcggcgtggtgggctggagcatccccgtgaccaagggcgtggtgcccagccccagagagagccacaccgccgtgatctactgcaagaaggacagcggcagccccaagatgtacgtgttcggcggcatgtgcggcgccagactggacgacctgtggcagctggacctggagaccatgagctggagcaagcccgagaccaagggcaccgtgcccctgcccagaagcctgcacaccgccagcgtgatcggcaacaagatgtacatcttcggcggctgggtgccccacaagggcgagaacaccgagaccagcccccacgactgcgagtggagatgcaccagcagcttcagctacctgaacctggacaccaccgagtggaccaccctggtgagcgacagccaggaggacaagaagaacagcagacccagacccagagccggccactgcgccgtggccatcggcaccagactgtacttctggagcggcagagacggctacaagaaggccctgaacagccaggtgtgctgcaaggacctgtggtacctggacaccgagaagccccccgcccccagccaggtgcagctgatcaaggccaccaccaacagcttccacgtgaagtgggacgaggtgagcaccgtggagggctacctgctgcagctgagcaccgacctgccctaccaggccgccagcagcgacagcagcgccgcccccaacatgcagggcgtgagaatggacccccacagacagggcagcaacaacatcgtgcccaacagcatcaacgacaccatcaacagcaccaagaccgagcagcccgccaccaaggagaccagcatgaagaacaagcccgacttcaaggccctgaccgacagcaacgccatcctgtaccccagcctggccagcaacgccagcaaccacaacagccacgtggtggacatgctgagaaagaacgagggcccccacaccagcgccaacgtgggcgtgctgagcagctgcctggacgtgagaaccgtgatccccgagaccagcgtgagcagcaccgtgagcagcacccagaccatggtgacccagcagaccatcaagaccgagagcagcagcaccaacggcgccgtggtgaaggacgagaccagcctgaccaccttcagcaccaagagcgaggtggacgagacctacgccctgcccgccaccaagatcagcagagtggagacccacgccaccgccacccccttcagcaaggagacccccagcaaccccgtggccaccgtgaaggccggcgagagacagtggtgcgacgtgggcatcttcaagaacaacaccgccctggtgagccagttctacctgctgcccaagggcaagcagagcatcagcaaggtgggcaacgccgacgtgcccgactacagcctgctgaagaagcaggacctggtgcccggcaccggctacagattcagagtggccgccatcaacggctgcggcatcggccccttcagcaagatcagcgagttcaagacctgcatccccggcttccccggcgcccccagcgccgtgagaatcagcaagaacgtggagggcatccacctgagctgggagccccccaccagccccagcggcaacatcctggagtacagcgcctacctggccatcagaaccgcccagatccaggacaaccccagccagctggtgttcatgagaatctactgcggcctgaagaccagctgcatcgtgaccgccggccagctggccaacgcccacatcgactacaccagcagacccgccatcgtgttcagaatcagcgccaagaacgagaagggctacggccccgccacccaggtgagatggctgcagggcaacaacaagaaggcccccctgaactag

SEQ ID NO: 77880 - DNA, 498 bp, synthetic construct
  misc_feature 1..498: note = Description of Artificial Sequence: Synthetic coding sequence
  source 1..498: mol_type = other DNA
atgaccagcgagatcacctacgccgaggtgagattcaagaacgagttcaagagcagcggcatcaacaccgccagcagcgccgagaccgcctggagctgctgccccaagaactggaagagcttcagcagcaactgctacttcatcagcaccgagagcgccagctggcaggacagcgagaaggactgcgccagaatggaggcccacctgctggtgatcaacacccaggaggagcaggacttcatcttccagaacctgcaggaggagagcgcctacttcgtgggcctgagcgaccccgagggccagagacactggcagtgggtggaccagaccccctacaacgagagcagcaccttctggcaccccagagagcccagcgaccccaacgagagatgcgtggtgctgaacttcagaaagagccccaagagatggggctggaacgacgtgaactgcctgggcccccagagaagcgtgtgcgagatgatgaagatccacctgtag

SEQ ID NO: 77881 - DNA, 615 bp, synthetic construct
  misc_feature 1..615: note = Description of Artificial Sequence: Synthetic coding sequence
  source 1..615: mol_type = other DNA
atgaccagcgagatcacctacgccgaggtgagattcaagaacgagttcaagagcagcggcatcaacaccgccagcagcgccgccagcaaggagagaaccgccccccacaagagcaacaccggcttccccaagctgctgtgcgccagcctgctgatcttcttcctgctgctggccatcagcttcttcatcgccttcgtgaagaccgcctggagctgctgccccaagaactggaagagcttcagcagcaactgctacttcatcagcaccgagagcgccagctggcaggacagcgagaaggactgcgccagaatggaggcccacctgctggtgatcaacacccaggaggagcaggacttcatcttccagaacctgcaggaggagagcgcctacttcgtgggcctgagcgaccccgagggccagagacactggcagtgggtggaccagaccccctacaacgagagcagcaccttctggcaccccagagagcccagcgaccccaacgagagatgcgtggtgctgaacttcagaaagagccccaagagatggggctggaacgacgtgaactgcctgggcccccagagaagcgtgtgcgagatgatgaagatccacctgtag

SEQ ID NO: 77882 - DNA, 597 bp, synthetic construct
  misc_feature 1..597: note = Description of Artificial Sequence: Synthetic coding sequence
  source 1..597: mol_type = other DNA
atgaccagcgagatcacctacgccgaggtgagattcaagaacgagttcaagagcagcggcatcaacaccgccagcagcgccgtgttcttccagaagtacagccagctgctggagaagaagaccaccaaggagctggtgcacaccaccctggagtgcgtgaagaagaacatgcccgtggaggagaccgcctggagctgctgccccaagaactggaagagcttcagcagcaactgctacttcatcagcaccgagagcgccagctggcaggacagcgagaaggactgcgccagaatggaggcccacctgctggtgatcaacacccaggaggagcaggacttcatcttccagaacctgcaggaggagagcgcctacttcgtgggcctgagcgaccccgagggccagagacactggcagtgggtggaccagaccccctacaacgagagcagcaccttctggcaccccagagagcccagcgaccccaacgagagatgcgtggtgctgaacttcagaaagagccccaagagatggggctggaacgacgtgaactgcctgggcccccagagaagcgtgtgcgagatgatgaagatccacctgtag

SEQ ID NO: 77883 - DNA, 549 bp, synthetic construct
  misc_feature 1..549: note = Description of Artificial Sequence: Synthetic coding sequence
  source 1..549: mol_type = other DNA
atggtgcccgaggaggagccccaggacagagtgccccacaacttcatgtacagcaagaccgtgaagagactgagcaagctgagagagtaccagcagtaccaccccagcctgacctgcgtgatggagggcaaggacatcgaggactggagctgctgccccaccccctggaccagcttccagagcagctgctacttcatcagcaccggcatgcagagctggaccaagagccagaagaactgcagcgtgatgggcgccgacctggtggtgatcaacaccagagaggagcaggacttcatcatccagaacctgaagagaaacagcagctacttcctgggcctgagcgaccccggcggcagaagacactggcagtgggtggaccagaccccctacaacgagaacgtgaccttctggcacagcggcgagcccaacaacctggacgagagatgcgccatcatcaacttcagaagcagcgaggagtggggctggaacgacatccactgccacgtgccccagaagagcatctgcaagatgaagaagatctacatctag

SEQ ID NO: 77884 - DNA, 642 bp, synthetic construct
  misc_feature 1..642: note = Description of Artificial Sequence: Synthetic coding sequence
  source 1..642: mol_type = other DNA
atggtgcccgaggaggagccccaggacagagagaagggcctgtggtggttccagctgaaggtgtggagcatggccgtggtgagcatcctgctgctgagcgtgtgcttcaccgtgagcagcgtggtgccccacaacttcatgtacagcaagaccgtgaagagactgagcaagctgagagagtaccagcagtaccaccccagcctgacctgcgtgatggagggcaaggacatcgaggactggagctgctgccccaccccctggaccagcttccagagcagctgctacttcatcagcaccggcatgcagagctggaccaagagccagaagaactgcagcgtgatgggcgccgacctggtggtgatcaacaccagagaggagcaggacttcatcatccagaacctgaagagaaacagcagctacttcctgggcctgagcgaccccggcggcagaagacactggcagtgggtggaccagaccccctacaacgagaacgtgaccttctggcacagcggcgagcccaacaacctggacgagagatgcgccatcatcaacttcagaagcagcgaggagtggggctggaacgacatccactgccacgtgccccagaagagcatctgcaagatgaagaagatctacatctag

SEQ ID NO: 77885 - DNA, 549 bp, synthetic construct; identical to SEQ ID NO: 77883
  misc_feature 1..549: note = Description of Artificial Sequence: Synthetic coding sequence
  source 1..549: mol_type = other DNA

SEQ ID NO: 77886 - DNA, 642 bp, synthetic construct; identical to SEQ ID NO: 77884
  misc_feature 1..642: note = Description of Artificial Sequence: Synthetic coding sequence
  source 1..642: mol_type = other DNA

SEQ ID NO: 77887 - DNA, 648 bp, synthetic construct
  misc_feature 1..648: note = Description of Artificial Sequence: Synthetic coding sequence
  source 1..648: mol_type = other DNA
atgggcctggagaagccccagagcaagctggagggcggcatgcacccccagctgatccccagcgtgatcgccgtggtgttcatcctgctgctgagcgtgtgcttcatcgccagctgcctggtgacccaccacaacttcagcagatgcaagagaggcaccggcgtgcacaagctggagcaccacgccaagctgaagtgcatcaaggagaagagcgagctgaagagcgccgagggcagcacctggaactgctgccccatcgactggagagccttccagagcaactgctacttccccctgaccgacaacaagacctgggccgagagcgagagaaactgcagcggcatgggcgcccacctgatgaccatcagcaccgaggccgagcagaacttcatcatccagttcctggacagaagactgagctacttcctgggcctgagagacgagaacgccaagggccagtggagatgggtggaccagacccccttcaaccccagaagagtgttctggcacaagaacgagcccgacaacagccagggcgagaactgcgtggtgctggtgtacaaccaggacaagtgggcctggaacgacgtgccctgcaacttcgaggccagcagaatctgcaagatccccggcaccaccctgaactag

SEQ ID NO: 77888 - DNA, 435 bp, synthetic construct
  misc_feature 1..435: note = Description of Artificial Sequence: Synthetic coding sequence
  source 1..435: mol_type = other DNA
atgggcctggagaagccccagagcaagctggagggcggcatgcacccccagctgatccccagcgtgatcgccgtggtgttcatcctgctgctgagcgtgtgcttcatcgccagctgcctggtgacccaccacaacttcagcagatgcaagagaggcaccggcgtgcacaagctggagcaccacgccaagctgaagtgcatcaaggagaagagcgagctgaagagcgccgagggcagcacctggaactgctgccccatcgactggagagccttccagagcaactgctacttccccctgaccgacaacaagacctgggccgagagcgagagaaactgcagcggcatgggcgcccacctgatgaccatcagcaccgaggccgagcagaacttcatcatccagttcctggacagaagactgagctacttcctgggctag

SEQ ID NO: 77889 - DNA, 660 bp, synthetic construct
  misc_feature 1..660: note = Description of Artificial Sequence: Synthetic coding sequence
  source 1..660: mol_type = other DNA
atgaacagcagcaagagcagcgagacccagtgcaccgagagaggctgcttcagcagccagatgttcctgtggaccgtggccggcatccccatcctgttcctgagcgcctgcttcatcaccagatgcgtggtgaccttcagaatcttccagacctgcgacgagaagaagttccagctgcccgagaacttcaccgagctgagctgctacaactacggcagcggcagcgtgaagaactgctgccccctgaactgggagtacttccagagcagctgctacttcttcagcaccgacaccatcagctgggccctgagcctgaagaactgcagcgccatgggcgcccacctggtggtgatcaacagccaggaggagcaggagttcctgagctacaagaagcccaagatgagagagttcttcatcggcctgagcgaccaggtggtggagggccagtggcagtgggtggacggcacccccctgaccaagagcctgagcttctgggacgtgggcgagcccaacaacatcgccaccctggaggactgcgccaccatgagagacagcagcaaccccagacagaactggaacgacgtgacctgcttcctgaactacttcagaatctgcgagatggtgggcatcaaccccctgaacaagggcaagagcctgtag

SEQ ID NO: 77890 - DNA, 1134 bp, synthetic construct
  misc_feature 1..1134: note = Description of Artificial Sequence: Synthetic coding sequence
  source 1..1134: mol_type = other DNA
atgagcgacagcaaggagcccagagtgcagcagctgggcctgctggaggaggaccccaccaccagcggcatcagactgttccccagagacttccagttccagcagatccacggccacaagagcagcaccggctgcctgggccacggcgccctggtgctgcagctgctgagcttcatgctgctggccggcgtgctggtggccatcctggtgcaggtgagcaaggtgcccagcagcctgagccaggagcagagcgagcaggacgccatctaccagaacctgacccagctgaaggccgccgtgggcgagctgagcgagaagagcaagctgcaggagatctaccaggagctgacccagctgaaggccgccgtggtgggcgagctgcccgagaagagcaagctgcaggagatctaccaggagctgaccagactgaaggccgccgtgggcgagctgcccgagaagagcaagctgcaggagatctaccaggagctgaccagactgaaggccgccgtgggcgagctgcccgagaagagcaagctgcaggagatctaccaggagctgaccgagctgaaggccgccgtgggcgagctgcccgagaagagcaagctgcaggagatctaccaggagctgacccagctgaaggccgccgtgggcgagctgcccgaccagagcaagcagcagcagatctaccaggagctgaccgacctgaagaccgccttcgagagactgtgcagacactgccccaaggactggaccttcttccagggcaactgctacttcatgagcaacagccagagaaactggcacgacagcgtgaccgcctgccaggaggtgagagcccagctggtggtgatcaagaccgccgaggagcagaacttcctgcagctgcagaccagcagaagcaacagattcagctggatgggcctgagcgacctgaaccaggagggcacctggcagtgggtggacggcagccccctgagccccagcttccagagatactggaacagcggcgagcccaacaacagcggcaacgaggactgcgccgagttcagcggcagcggctggaacgacaacagatgcgacgtggacaactactggatctgcaagaagcccgccgcctgcttcagagacgagtag

SEQ ID NO: 77891 - DNA, 1200 bp, synthetic construct
  misc_feature 1..1200: note = Description of Artificial Sequence: Synthetic coding sequence
  source 1..1200: mol_type = other DNA
atgagcgacagcaaggagcccagagtgcagcagctgggcctgctggaggaggaccccaccaccagcggcatcagactgttccccagagacttccagttccagcagatccacggccacaagagcagcaccggctgcctgggccacggcgccctggtgctgcagctgctgagcttcatgctgctggccggcgtgctggtggccatcctggtgcaggtgagcaaggtgcccagcagcctgagccaggagcagagcgagcaggacgccatctaccagaacctgacccagctgaaggccgccgtgggcgagctgagcgagaagagcaagctgcaggagatctaccaggagctgacccagctgaaggccgccgtgggcgagctgcccgagaagagcaagctgcaggagatctaccaggagctgaccagactgaaggccgccgtgggcgagctgcccgagaagagcaagctgcaggagatctaccaggagctgaccagactgaaggccgccgtgggcgagctgcccgagaagagcaagctgcaggagatctaccaggagctgaccagactgaaggccgccgtgggcgagctgcccgagaagagcaagctgcaggagatctaccaggagctgaccgagctgaaggccgccgtgggcgagctgcccgagaagagcaagctgcaggagatctaccaggagctgacccagctgaaggccgccgtgggcgagctgcccgaccagagcaagcagcagcagatctaccaggagctgaccgacctgaagaccgccttcgagagactgtgcagacactgccccaaggactggaccttcttccagggcaactgctacttcatgagcaacagccagagaaactggcacgacagcgtgaccgcctgccaggaggtgagagcccagctggtggtgatcaagaccgccgaggagcagaacttcctgcagctgcagaccagcagaagcaacagattcagctggatgggcctgagcgacctgaaccaggagggcacctggcagtgggtggacggcagccccctgagccccagcttccagagatactggaacagcggcgagcccaacaacagcggcaacgaggactgcgccgagttcagcggcagcggctggaacgacaacagatgcgacgtggacaactactggatctgcaagaagcccgccgcctgcttcagagacgagtag

SEQ ID NO: 77892 - DNA, 1047 bp, synthetic construct
  misc_feature 1..1047: note = Description of Artificial Sequence: Synthetic coding sequence
  source 1..1047: mol_type = other DNA
atgagcgacagcaaggagcccagagtgcagcagctgggcctgctgggctgcctgggccacggcgccctggtgctgcagctgctgagcttcatgctgctggccggcgtgctggtggccatcctggtgcaggtgagcaaggtgcccagcagcctgagccaggagcagagcgagcaggacgccatctaccagaacctgacccagctgaaggccgccgtgggcgagctgagcgagaagagcaagctgcaggagatctaccaggagctgacccagctgaaggccgccgtgggcgagctgcccgagaagagcaagctgcaggagatctaccaggagctgaccagactgaaggccgccgtgggcgagctgcccgagaagagcaagctgcaggagatctaccaggagctgaccagactgaaggccgccgtgggcgagctgcccgagaagagcaagctgcaggagatctaccaggagctgaccgagctgaaggccgccgtgggcgagctgcccgagaagagcaagctgcaggagatctaccaggagctgacccagctgaaggccgccgtgggcgagctgcccgaccagagcaagcagcagcagatctaccaggagctgaccgacctgaagaccgccttcgagagactgtgcagacactgccccaaggactggaccttcttccagggcaactgctacttcatgagcaacagccagagaaactggcacgacagcgtgaccgcctgccaggaggtgagagcccagctggtggtgatcaagaccgccgaggagcagaacttcctgcagctgcagaccagcagaagcaacagattcagctggatgggcctgagcgacctgaaccaggagggcacctggcagtgggtggacggcagccccctgagccccagcttccagagatactggaacagcggcgagcccaacaacagcggcaacgaggactgcgccgagttcagcggcagcggctggaacgacaacagatgcgacgtggacaactactggatctgcaagaagcccgccgcctgcttcagagacgagtag

SEQ ID NO: 77893 - DNA, 975 bp, synthetic construct
  misc_feature 1..975: note = Description of Artificial Sequence: Synthetic coding sequence
  source 1..975: mol_type = other DNA
atgagcgacagcaaggagcccagagtgcagcagctgggcctgctggaggaggaccccaccaccagcggcatcagactgttccccagagacttccagttccagcagatccacggccacaagagcagcaccggctgcctgggccacggcgccctggtgctgcagctgctgagcttcatgctgctggccggcgtgctggtggccatcctggtgcaggtgagcaaggtgcccagcagcctgagccaggagcagagcgagcaggacgccatctaccagaacctgacccagctgaaggccgccgtgggcgagctgagcgagaagagcaagctgcaggagatctaccaggagctgacccagctgaaggccgccgtgggcgagctgcccgagaagagcaagctgcaggagatctaccaggagctgaccagactgaaggccgccgtgggcgagctgcccgagaagagcaagctgcaggagatctaccaggagctgaccagactgaaggccgccgtgggcgagctgcccgagaagagcaagctgcaggagatctaccaggagctgaccagactgaaggccgccgtgggcgagctgcccgagaagagcaagctgcaggagatctaccaggagctgaccgagctgaaggccgccgtgggcgagctgcccgagaagagcaagctgcaggagatctaccaggagctgacccagctgaaggccgccgtgggcgagctgcccgaccagagcaagcagcagcagatctaccaggagctgaccgacctgaagaccgccttcgagagactgtgcagacactgccccaaggactggaccttcttccagggcaactgctacttcatgagcaacagccagagaaactggcacgacagcgtgaccgcctgccaggaggtgagagcccagctggtggtgatcaagaccgccgaggagcagctgcccgccgtgctggagcagtggagaacccagcagtag

SEQ ID NO: 77894 - DNA, 771 bp, synthetic construct
  misc_feature 1..771: note = Description of Artificial Sequence: Synthetic coding sequence
  source 1..771: mol_type = other DNA
atgagcgacagcaaggagcccagagtgcagcagctgggcctgctggtgagcaaggtgcccagcagcctgagccaggagcagagcgagcaggacgccatctaccagaacctgacccagctgaaggccgccgtgggcgagctgagcgagaagagcaagctgcaggagatctaccaggagctgacccagctgaaggccgccgtgggcgagctgcccgagaagagcaagctgcaggagatctaccaggagctgaccagactgaaggccgccgtgggcgagctgcccgagaagagcaagctgcaggagatctaccaggagctgaccagactgaaggccgccgtgggcgagctgcccgagaagagcaagctgcaggagatctaccaggagctgaccagactgaaggccgccgtgggcgagctgcccgagaagagcaagctgcaggagatctaccaggagctgaccgagctgaaggccgccgtgggcgagctgcccgagaagagcaagctgcaggagatctaccaggagctgacccagctgaaggccgccgtgggcgagctgcccgaccagagcaagcagcagcagatctaccaggagctgaccgacctgaagaccgccttcgagagactgtgcagacactgccccaaggactggaccttcttccagggcaactgctacttcatgagcaacagccagagaaactggcacgacagcgtgaccgcctgccaggaggtgagagcccagctggtggtgatcaagaccgccgaggagcagtag

SEQ ID NO: 77895 - DNA, 999 bp, synthetic construct
  misc_feature 1..999: note = Description of Artificial Sequence: Synthetic coding sequence
  source 1..999: mol_type = other DNA
atgagcgacagcaaggagcccagagtgcagcagctgggcctgctggaggaggaccccaccaccagcggcatcagactgttccccagagacttccagttccagcagatccacggccacaagagcagcaccgtgcccttcctgctgggccccgtgagcaaggtgcccagcagcctgagccaggagcagagcgagcaggacgccatctaccagaacctgacccagctgaaggccgccgtgggcgagctgagcgagaagagcaagctgcaggagatctaccaggagctgacccagctgaaggccgccgtgggcgagctgcccgagaagagcaagctgcaggagatctaccaggagctgaccagactgaaggccgccgtgggcgagctgcccgagaagagcaagctgcaggagatctaccaggagctgaccagactgaaggccgccgtgggcgagctgcccgagaagagcaagctgcaggagatctaccaggagctgaccgagctgaaggccgccgtgggcgagctgcccgagaagagcaagctgcaggagatctaccaggagctgacccagctgaaggccgccgtggagagactgtgcagacactgccccaaggactggaccttcttccagggcaactgctacttcatgagcaacagccagagaaactggcacgacagcgtgaccgcctgccaggaggtgagagcccagctggtggtgatcaagaccgccgaggagcagaacttcctgcagctgcagaccagcagaagcaacagattcagctggatgggcctgagcgacctgaaccaggagggcacctggcagtgggtggacggcagccccctgagccccagcttccagagatactggaacagcggcgagcccaacaacagcggcaacgaggactgcgccgagttcagcggcagcggctggaacgacaacagatgcgacgtggacaactactggatctgcaagaagcccgccgcctgcttcagagacgagtag

SEQ ID NO: 77896 - DNA, 1164 bp, synthetic construct
  misc_feature 1..1164: note = Description of Artificial Sequence: Synthetic coding sequence
  source 1..1164: mol_type = other DNA
atgagcgacagcaaggagcccagagtgcagcagctgggcctgctggaggaggaccccaccaccaacttccagttccagcagatccacggccacaagagcagcaccggctgcctgggccacggcgccctggtgctgcagctgctgagcttcatgctgctggccggcgtgctgcccagactgagcaaggtgcccagcagcctgagccaggagcagagcgagcaggacgccatctaccagaacctgacccagctgaaggccgccgtgggcgagctgagcgagaagagcaagctgcaggagatctaccaggagctgacccagctgaaggccgccgtgggcgagctgcccgagaagagcaagctgcaggagatctaccaggagctgaccagactgaaggccgccgtgggcgagctgcccgagaagagcaagctgcaggagatctaccaggagctgaccagactgaaggccgccgtgggcgagctgcccgagaagagcaagctgcaggagatctaccaggagctgaccagactgaaggccgccgtgggcgagctgcccgagaagagcaagctgcaggagatctaccaggagctgaccgagctgaaggccgccgtgggcgagctgcccgagaagagcaagctgcaggagatctaccaggagctgacccagctgaaggccgccgtgggcgagctgcccgaccagagcaagcagcagcagatctaccaggagctgaccgacctgaagaccgccttcgagagactgtgcagacactgccccaaggactggaccttcttccagggcaactgctacttcatgagcaacagccagagaaactggcacgacagcgtgaccgcctgccaggaggtgagagcccagctggtggtgatcaagaccgccgaggagcagaacttcctgcagctgcagaccagcagaagcaacagattcagctggatgggcctgagcgacctgaaccaggagggcacctggcagtgggtggacggcagccccctgagccccagcttccagagatactggaacagcggcgagcccaacaacagcggcaacgaggactgcgccgagttcagcggcagcggctggaacgacaacagatgcgacgtggacaactactggatctgcaagaagcccgccgcctgcttcagagacgagtag

SEQ ID NO: 77897 - DNA, 567 bp, synthetic construct
  misc_feature 1..567: note = Description of Artificial Sequence: Synthetic coding sequence
  source 1..567: mol_type = other DNA
atgaactggcacatgatcatcagcggcctgatcgtggtggtgctgaaggtggtgggcatgaccctgttcctgctgtacttcccccagatcttcaacaagagcaacgacggcttcaccaccaccagaagctacggcaccgtgagccagatcttcggcagcagcagccccagccccaacggcttcatcaccaccagaagctacggcaccgtgtgccccaaggactgggagttctaccaggccagatgcttcttcctgagcaccagcgagagcagctggaacgagagcagagacttctgcaagggcaagggcagcaccctggccatcgtgaacacccccgagaagctgaagttcctgcaggacatcaccgacgccgagaagtacttcatcggcctgatctaccacagagaggagaagagatggagatggatcaacaacagcgtgttcaacggcaacgtgaccaaccagaaccagaacttcaactgcgccaccatcggcctgaccaagaccttcgacgccgccagctgcgacatcagctacagaagaatctgcgagaagaacgccaagtag

SEQ ID NO: 77898 - DNA, 630 bp, synthetic construct
  misc_feature 1..630: note = Description of Artificial Sequence: Synthetic coding sequence
  source 1..630: mol_type = other DNA
atgatgcaggagcagcagccccagagcaccgagaagagaggctggctgagcctgagactgtggagcgtggccggcatcagcatcgccctgctgagcgcctgcttcatcgtgagctgcgtggtgacctaccacttcacctacggcgagaccggcaagagactgagcgagctgcacagctaccacagcagcctgacctgcttcagcgagggcaccaaggtgcccgcctggggctgctgccccgccagctggaagagcttcggcagcagctgctacttcatcagcagcgaggagaaggtgtggagcaagagcgagcagaactgcgtggagatgggcgcccacctggtggtgttcaacaccgaggccgagcagaacttcatcgtgcagcagctgaacgagagcttcagctacttcctgggcctgagcgacccccagggcaacaacaactggcagtggatcgacaagaccccctacgagaagaacgtgagattctggcacctgggcgagcccaaccacagcgccgagcagtgcgccagcatcgtgttctggaagcccaccggctggggctggaacgacgtgatctgcgagaccagaagaaacagcatctgcgagatgaacaagatctacctgtag

SEQ ID NO: 77899 - DNA, 432 bp, synthetic construct
  misc_feature 1..432: note = Description of Artificial Sequence: Synthetic coding sequence
  source 1..432: mol_type = other DNA
atggagtaccaccccgacctggagaacctggacgaggacggctacacccagctgcacttcgacagccagagcaacaccagaatcgccgtggtgagcgagaagggcagctgcgccgccagccccccctggagactgatcgccgtgatcctgggcatcctgtgcctggtgatcctggtgatcgccgtggtgctgggcaccatgggcgtgctgagcagcccctgcccccccaactggatcatctacgagaagagctgctacctgttcagcatgagcctgaacagctgggacggcagcaagagacagtgctggcagctgggcagcaacctgctgaagatcgacagcagcaacgagctgatcagcgaccagaaccacagctaccccagaaagcccatcagcaagctgtgcatggacagcagagtgagccacctgtag

SEQ ID NO: 77900 - DNA, 744 bp, synthetic construct
  misc_feature 1..744: note = Description of Artificial Sequence: Synthetic coding sequence
  source 1..744: mol_type = other DNA
atggagtaccaccccgacctggagaacctggacgaggacggctacacccagctgcacttcgacagccagagcaacaccagaatcgccgtggtgagcgagaagggcagctgcgccgccagccccccctggagactgatcgccgtgatcctgggcatcctgtgcctggtgatcctggtgatcgccgtggtgctgggcaccatggccatctggagaagcaacagcggcagcaacaccctggagaacggctacttcctgagcagaaacaaggagaaccacagccagcccacccagagcagcctggaggacagcgtgacccccaccaaggccgtgaagaccaccggcgtgctgagcagcccctgcccccccaactggatcatctacgagaagagctgctacctgttcagcatgagcctgaacagctgggacggcagcaagagacagtgctggcagctgggcagcaacctgctgaagatcgacagcagcaacgagctgggcttcatcgtgaagcaggtgagcagccagcccgacaacagcttctggatcggcctgagcagaccccagaccgaggtgccctggctgtgggaggacggcagcaccttcagcagcaacctgttccagatcagaaccaccgccacccaggagaaccccagccccaactgcgtgtggatccacgtgagcgtgatctacgaccagctgtgcagcgtgcccagctacagcatctgcgagaagaagttcagcatgtag

SEQ ID NO: 77901 - DNA, 234 bp, synthetic construct
  misc_feature 1..234: note = Description of Artificial Sequence: Synthetic coding sequence
  source 1..234: mol_type = other DNA
atggagtaccaccccgacctggagaacctggacgaggacggctacacccagctgcacttcgacagccagagcaacaccagaatcgccgtggtgagcgagaagggcagctgcgccgccagccccccctggagactgatcgccgtgatcctgggcatcctgtgcctggtgatcctggtgatcgccgtggtgctgggcaccatggccggcttcaaggccgtggagttcaagggctag

SEQ ID NO: 77902 - DNA, 606 bp, synthetic construct
  misc_feature 1..606: note = Description of Artificial Sequence: Synthetic coding sequence
  source 1..606: mol_type = other DNA
atggagtaccaccccgacctggagaacctggacgaggacggctacacccagctgcacttcgacagccagagcaacaccagaatcgccgtggtgagcgagaagggcagctgcgccgccagccccccctggagactgatcgccgtgatcctgggcatcctgtgcctggtgatcctggtgatcgccgtggtgctgggcaccatgggcgtgctgagcagcccctgcccccccaactggatcatctacgagaagagctgctacctgttcagcatgagcctgaacagctgggacggcagcaagagacagtgctggcagctgggcagcaacctgctgaagatcgacagcagcaacgagctgggcttcatcgtgaagcaggtgagcagccagcccgacaacagcttctggatcggcctgagcagaccccagaccgaggtgccctggctgtgggaggacggcagcaccttcagcagcaacctgttccagatcagaaccaccgccacccaggagaaccccagccccaactgcgtgtggatccacgtgagcgtgatctacgaccagctgtgcagcgtgcccagctacagcatctgcgagaagaagttcagcatgtag

SEQ ID NO: 77903 - DNA, 507 bp, synthetic construct
  misc_feature 1..507: note = Description of Artificial Sequence: Synthetic coding sequence
  source 1..507: mol_type = other DNA
atggagtaccaccccgacctggagaacctggacgaggacggctacacccagctgcacttcgacagccagagcaacaccagaatcgccgtggtgagcgagaagggcgtgctgagcagcccctgcccccccaactggatcatctacgagaagagctgctacctgttcagcatgagcctgaacagctgggacggcagcaagagacagtgctggcagctgggcagcaacctgctgaagatcgacagcagcaacgagctgggcttcatcgtgaagcaggtgagcagccagcccgacaacagcttctggatcggcctgagcagaccccagaccgaggtgccctggctgtgggaggacggcagcaccttcagcagcaacctgttccagatcagaaccaccgccacccaggagaaccccagccccaactgcgtgtggatccacgtgagcgtgatctacgaccagctgtgcagcgtgcccagctacagcatctgcgagaagaagttcagcatgtag

SEQ ID NO: 77904 - DNA, 351 bp, synthetic construct
  misc_feature 1..351: note = Description of Artificial Sequence: Synthetic coding sequence
  source 1..351: mol_type = other DNA
atggagtaccaccccgacctggagaacctggacgaggacggctacacccagctgcacttcgacagccagagcaacaccagaatcgccgtggtgagcgagaagggcagctgcgccgccagccccccctggagactgatcgccgtgatcctgggcatcctgtgcctggtgatcctggtgatcgccgtggtgctgggcaccatgggcaccggccagttcctgaaggacctgagcttcctgaacaacagaagaaagctgttcggcgaccccatccaggaggccacccactggagaatggccaccttctaccaggagatcaagagaaccaccgtgaacccccacaaccacctgtag

SEQ ID NO: 77905 - DNA, 744 bp, synthetic construct; identical to SEQ ID NO: 77900
  misc_feature 1..744: note = Description of Artificial Sequence: Synthetic coding sequence
  source 1..744: mol_type = other DNA

SEQ ID NO: 77906 - DNA, 570 bp, synthetic construct
  misc_feature 1..570: note = Description of Artificial Sequence: Synthetic coding sequence
  source 1..570: mol_type = other DNA
atggagtaccaccccgacctggagaacctggacgaggacggctacacccagctgcacttcgacagccagagcaacaccagaatcgccgtggtgagcgagaagggcagctgcgccgccagccccccctggagactgatcgccgtgatcctgggcatcctgtgcctggtgatcctggtgatcgccgtggtgctgggcaccatggccatctggagaagcaacagcggcagcaacaccctggagaacggctacttcctgagcagaaacaaggagaaccacagccagcccacccagagcagcctggaggacagcgtgacccccaccaaggccgtgaagaccaccggcgtgctgagcagcccctgcccccccaactggatcatctacgagaagagctgctacctgttcagcatgagcctgaacagctgggacggcagcaagagacagtgctggcagctgggcagcaacctgctgaagatcgacagcagcaacgagctgatcagcgaccagaaccacagctaccccagaaagcccatcagcaagctgtgcatggacagcagagtgagccacctgtag

SEQ ID NO: 77907 - DNA, 10281 bp, synthetic construct
  misc_feature 1..10281: note = Description of Artificial Sequence: Synthetic coding sequence
  source 1..10281: mol_type = other DNA
gtgctgcccagccacacctgcggcaaccccggcgagatcctgaagggcgtgctgcacggcaccagattcaacatcggcgacaagatcagatacagctgcctgcccggctacatcctggagggccacgccatcctgacctgcatcgtgagccccggcaacggcgccagctgggacttccccgcccccttctgcagagccgagggcgcctgcggcggcaccctgagaggcaccagcagcagcatcagcagcccccacttccccagcgagtacgagaacaacgccgactgcacctggaccatcctggccgagcccggcgacaccatcgccctggtgttcaccgacttccagctggaggagggctacgacttcctggagatcagcggcaccgaggcccccagcatctggctgaccggcatgaacctgcccagccccgtgatcagcagcaagaactggctgagactgcacttcaccagcgacagcaaccacagaagaaagggcttcaacgcccagttccaggtgaagaaggccatcgagctgaagagcagaggcgtgaagatgctgcccagcaaggacggcagccacaagaacagcgtgctgagccagggcggcgtggccctggtgagcgacatgtgccccgaccccggcatccccgagaacggcagaagagccggcagcgacttcagcagagtgggcgccaacgtgcagttcagctgcgaggacaactacgtgctgcagggcagcaagagcatcacctgccagagagtgaccgagaccctggccgcctggagcgaccacagacccatctgcagagccagaacctgcggcagcaacctgagaggccccagcggcgtgatcaccagccccaactaccccgtgcagtacgaggacaacgcccactgcgtgtgggtgatcaccaccaccgaccccgacaaggtgatcaagctggccttcgaggagttcgagctggagagaggctacgacaccctgaccgtgggcgacgccggcaaggtgggcgacaccagaagcgtgctgtacgtgctgaccggcagcagcgtgcccgacctgatcgtgagcatgagcaaccagatgtggctgcacctgcagagcgacgacagcatcggcagccccggcttcaaggccgtgtaccaggagatcgagaagggcggctgcggcgaccccggcatccccgcctacggcaagagaaccggcagcagcttcctgcacggcgacaccctgaccttcgagtgccccgccgccttcgagctggtgggcgagagagtgatcacctgccagcagaacaaccagtggagcggcaacaagcccagctgcgtgttcagctgcttcttcaacttcaccgccagcagcggcatcatcctgagccccaactaccccgaggagtacggcaacaacatgaactgcgtgtggctgatcatcagcgagcccggcagcagaatccacctgatcttcaacgacttcgacgtggagccccagttcgacttcctggccgtgaaggacgacggcatcagcgacatcaccgtgctgggcaccttcagcggcaacgaggtgcccagccagctggccagcagcggccacatcgtgagactggagttccagagcgaccacagcaccaccggcagaggcttcaacatcacctacaccaccttcggccagaacgagtgccacgaccccggcatccccatcaacggcagaagattcggcgacagattcctgctgggcagcagcgtgagcttccactgcgacgacggcttcgtgaagacccagggcagcgagagcatcacctgcatcctgcaggacggcaacgtggtgtggagcagcaccgtgcccagatgcgaggccccctgcggcggccacctgaccgccagcagcggcgtgatcctgccccccggctggcccggctactacaaggacagcctgcactgcgagtggatcatcgaggccaagcccggccacagcatcaagatcaccttcgacagattccagaccgaggtgaactacgacaccctggaggtgagagacggccccgccagcagcagccccctgatcggcgagtaccacggcacccaggccccccagttcctgatcagcaccggcaacttcatgtacctgctgttcaccaccgacaacagcagaagcagcatcggcttcctgatccactacgagagcgtgaccctggagagcgacagctgcctggaccccggcatccccgtgaacggccacagacacggcggcgacttcggcatcagaagcaccgtgaccttcagctgcgaccccggctacaccctgagcgacgacgagcccctggtgtgcgagagaaaccaccagtggaaccacgccctgcccagctgcgacgccctgtgcggcggctacatccagggcaagagcggcaccgtgctgagccccggcttccccgacttctaccccaacagcctgaactgcacctggaccatcgaggtgagccacggcaagggcgtgcagatgatcttccacaccttccacctggagagcagccacgactacctgctgatcaccgaggacggcagcttcagcgagcccgtggccagactgaccggcagcgtgctgccccacaccatcaaggccggcctgttcggcaacttcaccgcccagctgagattcatcagcgacttcagcatcagctacgagggcttcaacatcaccttcagcgagtacgacctggagccctgcgacgaccccggcgtgcccgccttcagcagaagaatcggcttccacttcggcgtgggcgacagcctgaccttcagctgcttcctgggctacagactggagggcgccaccaagctgacctgcctgggcggcggcagaagagtgtggagcgcccccctgcccagatgcgtggccgagtgcggcgccagcgtgaagggcaacgagggcaccctgctgagccccaacttccccagcaactacgacaacaaccacgagtgcatctacaagatcgagaccgaggccggcaagggcatccacctgagaaccagaagcttccagctgttcgagggcgacaccctgaaggtgtacgacggcaaggacagcagcagcagacccctgggcaccttcaccaagaacgagctgctgggcctgatcctgaacagcaccagcaaccacctgtggctggagttcaacaccaacggcagcgacaccgaccagggcttccagctgacctacaccagcttcgacctggtgaagtgcgaggaccccggcatccccaactacggctacagaatcagagacgagggccacttcaccgacaccgtggtgctgtacagctgcaaccccggctacgccatgcacggcagcaacaccctgacctgcctgagcggcgacagaagagtgtgggacaagcccctgcccagctgcatcgccgagtgcggcggccagatccacgccgccaccagcggcagaatcctgagccccggctaccccgccccctacgacaacaacctgcactgcacctggatcatcgaggccgaccccggcaagaccatcagcctgcacttcatcgtgttcgacaccgagatggcccacgacatcctgaaggtgtgggacggccccgtggacagcgacatcctgctgaaggagtggagcggcagcgccctgcccgaggacatccacagcaccttcaacagcctgaccctgcagttcgacagcgacttcttcatcagcaagagcggcttcagcatccagttcagcaccagcatcgccgccacctgcaacgaccccggcatgccccagaacggcaccagatacggcgacagcagagaggccggcgacaccgtgaccttccagtgcgaccccggctaccagctgcagggccaggccaagatcacctgcgtgcagctgaacaacagattcttctggcagcccgacccccccacctgcatcgccgcctgcggcggcaacctgaccggccccgccggcgtgatcctgagccccaactacccccagccctacccccccggcaaggagtgcgactggagagtgaaggtgaaccccgacttcgtgatcgccctgatcttcaagagcttcaacatggagcccagctacgacttcctgcacatctacgagggcgaggacagcaacagccccctgatcggcagctaccagggcagccaggcccccgagagaatcgagagcagcggcaacagcctgttcctggccttcagaagcgacgccagcgtgggcctgagcggcttcgccatcgagttcaaggagaagcccagagaggcctgcttcgaccccggcaacatcatgaacggcaccagagtgggcaccgacttcaagctgggcagcaccatcacctaccagtgcgacagcggctacaagatcctggaccccagcagcatcacctgcgtgatcggcgccgacggcaagcccagctgggaccaggtgctgcccagctgcaacgccccctgcggcggccagtacaccggcagcgagggcgtggtgctgagccccaactacccccacaactacaccgccggccagatctgcctgtacagcatcaccgtgcccaaggagttcgtggtgttcggccagttcgcctacttccagaccgccctgaacgacctggccgagctgttcgacggcacccacgcccaggccagactgctgagcagcctgagcggcagccacagcggcgagaccctgcccctggccaccagcaaccagatcctgctgagattcagcgccaagagcggcgccagcgccagaggcttccacttcgtgtaccaggccgtgcccagaaccagcgacacccagtgcagcagcgtgcccgagcccagatacggcagaagaatcggcagcgagttcagcgccggcagcatcgtgagattcgagtgcaaccccggctacctgctgcagggcagcaccgccctgcactgccagagcgtgcccaacgccctggcccagtggaacgacaccatccccagctgcgtggtgccctgcagcggcaacttcacccagagaagaggcaccatcctgagccccggctaccccgagccctacggcaacaacctgaactgcatctggaagatcatcgtgaccgagggcagcggcatccaggaccccagcgaccagttctgccacggcgccgagctgggcctggagatccacgacggcggcgacgtgaccgcccccagactgggcagcttcagcggcaccaccgtgcccgccctgctgaacagcaccagcaaccagctgtacctgcacttccagagcgacatcagcgtggccgccgccggcttccacctggagtacaagaccgtgggcctggccgcctgccaggagcccgccctgcccagcaacagcatcaagatcggcgacagatacatggtgaacgacgtgctgagcttccagtgcgagcccggctacaccctgcagggcagaagccacatcagctgcatgcccggcaccgtgagaagatggaactaccccagccccctgtgcatcgccacctgcggcggcaccctgagcaccctgggcggcgtgatcctgagccccggcttccccggcagctaccccaacaacctggactgcacctggagaatcagcctgcccatcggctacggcgcccacatccagttcctgaacttcagcaccgaggccaaccacgacttcctggagatccagaacggcccctaccacaccagccccatgatcggccagttcagcggcaccgacctgcccgccgccctgctgagcaccacccacgagaccctgatccacttctacagcgaccacagccagaacagacagggcttcaagctggcctaccaggcctacgagctgcagaactgccccgaccccccccccttccagaacggctacatgatcaacagcgactacagcgtgggccagagcgtgagcttcgagtgctaccccggctacatcctgatcggccaccccgtgctgacctgccagcacggcatcaacagaaactggaactaccccttccccagatgcgacgccccctgcggctacaacgtgaccagccagaacggcaccatctacagccccggcttccccgacgagtaccccatcctgaaggactgcatctggctgatcaccgtgccccccggccacggcgtgtacatcaacttcaccctgctgcagaccgaggccgtgaacgactacatcgccgtgtgggacggccccgaccagaacagcccccagctgggcgtgttcagcggcaacaccgccctggagaccgcctacagcagcaccaaccaggtgctgctgaagttccacagcgacttcagcaacggcggcttcttcgtgctgaacttccacgccttccagctgaagaagtgccagcccccccccgccgtgccccaggccgagatgctgaccgaggacgacgacttcgagatcggcgacttcgtgaagtaccagtgccaccccggctacaccctggtgggcaccgacatcctgacctgcaagctgagcagccagctgcagttcgagggcagcctgcccacctgcgaggcccagtgccccgccaacgaggtgagaaccggcagcagcggcgtgatcctgagccccggctaccccggcaactacttcaacagccagacctgcagctggagcatcaaggtggagcccaactacaacatcaccatcttcgtggacaccttccagagcgagaagcagttcgacgccctggaggtgttcgacggcagcagcggccagagccccctgctggtggtgctgagcggcaaccacaccgagcagagcaacttcaccagcagaagcaaccagctgtacctgagatggagcaccgaccacgccaccagcaagaagggcttcaagatcagatacgccgccccctactgcagcctgacccaccccctgaagaacggcggcatcctgaacagaaccgccggcgccgtgggcagcaaggtgcactacttctgcaagcccggctacagaatggtgggccacagcaacgccacctgcagaagaaaccccctgggcatgtaccagtgggacagcctgacccccctgtgccaggccgtgagctgcggcatccccgagagccccggcaacggcagcttcaccggcaacgagttcaccctggacagcaaggtggtgtacgagtgccacgagggcttcaagctggagagcagccagcaggccaccgccgtgtgccaggaggacggcctgtggagcaacaagggcaagccccccacctgcaagcccgtggcctgccccagcatcgaggcccagctgagcgagcacgtgatctggagactggtgagcggcagcctgaacgagtacggcgcccaggtgctgctgagctgcagccccggctactacctggagggctggagactgctgagatgccaggccaacggcacctggaacatcggcgacgagagacccagctgcagagtgatcagctgcggcagcctgagcttcccccccaacggcaacaagatcggcaccctgaccgtgtacggcgccaccgccatcttcacctgcaacaccggctacaccctggtgggcagccacgtgagagagtgcctggccaacggcctgtggagcggcagcgagaccagatgcctggccggccactgcggcagccccgaccccatcgtgaacggccacatcagcggcgacggcttcagctacagagacaccgtggtgtaccagtgcaaccccggcttcagactggtgggcaccagcgtgagaatctgcctgcaggaccacaagtggagcggccagacccccgtgtgcgtgcccatcacctgcggccaccccggcaaccccgcccacggcttcaccaacggcagcgagttcaacctgaacgacgtggtgaacttcacctgcaacaccggctacctgctgcagggcgtgagcagagcccagtgcagaagcaacggccagtggagcagccccctgcccacctgcagagtggtgaactgcagcgaccccggcttcgtggagaacgccatcagacacggccagcagaacttccccgagagcttcgagtacggcatgagcatcctgtaccactgcaagaagggcttctacctgctgggcagcagcgccctgacctgcatggccaacggcctgtgggacagaagcctgcccaagtgcctggccatcagctgcggccaccccggcgtgcccgccaacgccgtgctgaccggcgagctgttcacctacggcgccgtggtgcactacagctgcagaggcagcgagagcctgatcggcaacgacaccagagtgtgccaggaggacagccactggagcggcgccctgccccactgcaccggcaacaaccccggcttctgcggcgaccccggcacccccgcccacggcagcagactgggcgacgacttcaagaccaagagcctgctgagattcagctgcgagatgggccaccagctgagaggcagccccgagagaacctgcctgctgaacggcagctggagcggcctgcagcccgtgtgcgaggccgtgagctgcggcaaccccggcacccccaccaacggcatgatcgtgagcagcgacggcatcctgttcagcagcagcgtgatctacgcctgctgggagggctacaagaccagcggcctgatgaccagacactgcaccgccaacggcacctggaccggcaccgcccccgactgcaccatcatcagctgcggcgaccccggcaccctggccaacggcatccagttcggcaccgacttcaccttcaacaagaccgtgagctaccagtgcaaccccggctacgtgatggaggccgtgaccagcgccaccatcagatgcaccaaggacggcagatggaaccccagcaagcccgtgtgcaaggccgtgctgtgcccccagcccccccccgtgcagaacggcaccgtggagggcagcgacttcagatggggcagcagcatcagctacagctgcatggacggctaccagctgagccacagcgccatcctgagctgcgagggcagaggcgtgtggaagggcgagatcccccagtgcctgcccgtgttctgcggcgaccccggcatccccgccgagggcagactgagcggcaagagcttcacctacaagagcgaggtgttcttccagtgcaagagccccttcatcctggtgggcagcagcagaagagtgtgccaggccgacggcacctggagcggcatccagcccacctgcatcgaccccgcccacaacacctgccccgaccccggcaccccccacttcggcatccagaacagcagcagaggctacgaggtgggcagcaccgtgttcttcagatgcagaaagggctaccacatccagggcagcaccaccagaacctgcctggccaacctgacctggagcggcatccagaccgagtgcatcccccacgcctgcagacagcccgagacccccgcccacgccgacgtgagagccatcgacctgcccaccttcggctacaccctggtgtacacctgccaccccggcttcttcctggccggcggcagcgagcacagaacctgcaaggccgacatgaagtggaccggcaagagccccgtgtgcaagagcaagggcgtgagagaggtgaacgagaccgtgaccaagacccccgtgcccagcgacgtgttcttcgtgaacagcctgtggaagggctactacgagtacctgggcaagagacagcccgccaccctgaccgtggactggttcaacgccaccagcagcaaggtgaacgccaccttcagcgaggccagccccgtggagctgaagctgaccggcatctacaagaaggaggaggcccacctgctgctgaaggccttccagatcaagggccaggccgacatcttcgtgagcaagttcgagaacgacaactggggcctggacggctacgtgagcagcggcctggagagaggcggcttcaccttccagggcgacatccacggcaaggacttcggcaagttcaagctggagagacaggaccccctgaaccccgaccaggacagcagcagccactaccacggcaccagcagcggcagcgtggccgccgccatcctggtgcccttcttcgccctgatcctgagcggcttcgccttctacctgtacaagcacagaaccagacccaaggtgcagtacaacggctacgccggccacgagaacagcaacggccaggccagcttcgagaaccccatgtacgacaccaacctgaagcccaccgaggccaaggccgtgagattcgacaccaccctgaacaccgtgtgcaccgtggtgtag

SEQ ID NO: 77908 - DNA, 10167 bp, synthetic construct
  misc_feature 1..10167: note = Description of Artificial Sequence: Synthetic coding sequence
  source 1..10167: mol_type = other DNA
atgaccgcctggagaagattccagagcctgctgctgctgctgggcctgctggtgctgtgcgccagactgctgaccgccgccaagggccagaactgcggcggcctggtgcagggccccaacggcaccatcgagagccccggcttcccccacggctaccccaactacgccaactgcacctggatcatcatcaccggcgagagaaacagaatccagctgagcttccacaccttcgccctggaggaggacttcgacatcctgagcgtgtacgacggccagccccagcagggcaacctgaaggtgagactgagcggcttccagctgcccagcagcatcgtgagcaccggcagcatcctgaccctgtggttcaccaccgacttcgccgtgagcgcccagggcttcaaggccctgtacgaggtgctgcccagccacacctgcggcaaccccggcgagatcctgaagggcgtgctgcacggcaccagattcaacatcggcgacaagatcagatacagctgcctgcccggctacatcctggagggccacgccatcctgacctgcatcgtgagccccggcaacggcgccagctgggacttccccgcccccttctgcagagccgagggcgcctgcggcggcaccctgagaggcaccagcagcagcatcagcagcccccacttccccagcgagtacgagaacaacgccgactgcacctggaccatcctggccgagcccggcgacaccatcgccctggtgttcaccgacttccagctggaggagggctacgacttcctggagatcagcggcaccgaggcccccagcatctggctgaccggcatgaacctgcccagccccgtgatcagcagcaagaactggctgagactgcacttcaccagcgacagcaaccacagaagaaagggcttcaacgcccagttccaggtgaagaaggccatcgagctgaagagcagaggcgtgaagatgctgcccagcaaggacggcagccacaagaacagcgtgctgagccagggcggcgtggccctggtgagcgacatgtgccccgaccccggcatccccgagaacggcagaagagccggcagcgacttcagcagagtgggcgccaacgtgcagttcagctgcgaggacaactacgtgctgcagggcagcaagagcatcacctgccagagagtgaccgagaccctggccgcctggagcgaccacagacccatctgcagagccagaacctgcggcagcaacctgagaggccccagcggcgtgatcaccagccccaactaccccgtgcagtacgaggacaacgcccactgcgtgtgggtgatcaccaccaccgaccccgacaaggtgatcaagctggccttcgaggagttcgagctggagagaggctacgacaccctgaccgtgggcgacgccggcaaggtgggcgacaccagaagcgtgctgtacgtgctgaccggcagcagcgtgcccgacctgatcgtgagcatgagcaaccagatgtggctgcacctgcagagcgacgacagcatcggcagccccggcttcaaggccgtgtaccaggagatcgagaagggcggctgcggcgaccccggcatccccgcctacggcaagagaaccggcagcagcttcctgcacggcgacaccctgaccttcgagtgccccgccgccttcgagctggtgggcgagagagtgatcacctgccagcagaacaaccagtggagcggcaacaagcccagctgcgtgttcagctgcttcttcaacttcaccgccagcagcggcatcatcctgagccccaactaccccgaggagtacggcaacaacatgaactgcgtgtggctgatcatcagcgagcccggcagcagaatccacctgatcttcaacgacttcgacgtggagccccagttcgacttcctggccgtgaaggacgacggcatcagcgacatcaccgtgctgggcaccttcagcggcaacgaggtgcccagccagctggccagcagcggccacatcgtgagactggagttccagagcgaccacagcaccaccggcagaggcttcaacatcacctacaccaccttcggccagaacgagtgccacgaccccggcatccccatcaacggcagaagattcggcgacagattcctgctgggcagcagcgtgagcttccactgcgacgacggcttcgtgaagacccagggcagcgagagcatcacctgcatcctgcaggacggcaacgtggtgtggagcagcaccgtgcccagatgcgaggccccctgcggcggccacctgaccgccagcagcggcgtgatcctgccccccggctggcccggctactacaaggacagcctgcactgcgagtggatcatcgaggccaagcccggccacagcatcaagatcaccttcgacagattccagaccgaggtgaactacgacaccctggaggtgagagacggccccgccagcagcagccccctgatcggcgagtaccacggcacccaggccccccagttcctgatcagcaccggcaacttcatgtacctgctgttcaccaccgacaacagcagaagcagcatcggcttcctgatccactacgagagcgtgaccctggagagcgacagctgcctggaccccggcatccccgtgaacggccacagacacggcggcgacttcggcatcagaagcaccgtgaccttcagctgcgaccccggctacaccctgagcgacgacgagcccctggtgtgcgagagaaaccaccagtggaaccacgccctgcccagctgcgacgccctgtgcggcggctacatccagggcaagagcggcaccgtgctgagccccggcttccccgacttctaccccaacagcctgaactgcacctggaccatcgaggtgagccacggcaagggcgtgcagatgatcttccacaccttccacctggagagcagccacgactacctgctgatcaccgaggacggcagcttcagcgagcccgtggccagactgaccggcagcgtgctgccccacaccatcaaggccggcctgttcggcaacttcaccgcccagctgagattcatcagcgacttcagcatcagctacgagggcttcaacatcaccttcagcgagtacgacctggagccctgcgacgaccccggcgtgcccgccttcagcagaagaatcggcttccacttcggcgtgggcgacagcctgaccttcagctgcttcctgggctacagactggagggcgccaccaagctgacctgcctgggcggcggcagaagagtgtggagcgcccccctgcccagatgcgtggccgagtgcggcgccagcgtgaagggcaacgagggcaccctgctgagccccaacttccccagcaactacgacaacaaccacgagtgcatctacaagatcgagaccgaggccggcaagggcatccacctgagaaccagaagcttccagctgttcgagggcgacaccctgaaggtgtacgacggcaaggacagcagcagcagacccctgggcaccttcaccaagaacgagctgctgggcctgatcctgaacagcaccagcaaccacctgtggctggagttcaacaccaacggcagcgacaccgaccagggcttccagctgacctacaccagcttcgacctggtgaagtgcgaggaccccggcatccccaactacggctacagaatcagagacgagggccacttcaccgacaccgtggtgctgtacagctgcaaccccggctacgccatgcacggcagcaacaccctgacctgcctgagcggcgacagaagagtgtgggacaagcccctgcccagctgcatcgccgagtgcggcggccagatccacgccgccaccagcggcagaatcctgagccccggctaccccgccccctacgacaacaacctgcactgcacctggatcatcgaggccgaccccggcaagaccatcagcctgcacttcatcgtgttcgacaccgagatggcccacgacatcctgaaggtgtgggacggccccgtggacagcgacatcctgctgaaggagtggagcggcagcgccctgcccgaggacatccacagcaccttcaacagcctgaccctgcagttcgacagcgacttcttcatcagcaagagcggcttcagcatccagttcagcaccagcatcgccgccacctgcaacgaccccggcatgccccagaacggcaccagatacggcgacagcagagaggccggcgacaccgtgaccttccagtgcgaccccggctaccagctgcagggccaggccaagatcacctgcgtgcagctgaacaacagattcttctggcagcccgacccccccacctgcatcgccgcctgcggcggcaacctgaccggccccgccggcgtgatcctgagccccaactacccccagccctacccccccggcaaggagtgcgactggagagtgaaggtgaaccccgacttcgtgatcgccctgatcttcaagagcttcaacatggagcccagctacgacttcctgcacatctacgagggcgaggacagcaacagccccctgatcggcagctaccagggcagccaggcccccgagagaatcgagagcagcggcaacagcctgttcctggccttcagaagcgacgccagcgtgggcctgagcggcttcgccatcgagttcaaggagaagcccagagaggcctgcttcgaccccggcaacatcatgaacggcaccagagtgggcaccgacttcaagctgggcagcaccatcacctaccagtgcgacagcggctacaagatcctggaccccagcagcatcacctgcgtgatcggcgccgacggcaagcccagctgggaccaggtgctgcccagctgcaacgccccctgcggcggccagtacaccggcagcgagggcgtggtgctgagccccaactacccccacaactacaccgccggccagatctgcctgtacagcatcaccgtgcccaaggagttcgtggtgttcggccagttcgcctacttccagaccgccctgaacgacctggccgagctgttcgacggcacccacgcccaggccagactgctgagcagcctgagcggcagccacagcggcgagaccctgcccctggccaccagcaaccagatcctgctgagattcagcgccaagagcggcgccagcgccagaggcttccacttcgtgtaccaggccgtgcccagaaccagcgacacccagtgcagcagcgtgcccgagcccagatacggcagaagaatcggcagcgagttcagcgccggcagcatcgtgagattcgagtgcaaccccggctacctgctgcagggcagcaccgccctgcactgccagagcgtgcccaacgccctggcccagtggaacgacaccatccccagctgcgtggtgccctgcagcggcaacttcacccagagaagaggcaccatcctgagccccggctaccccgagccctacggcaacaacctgaactgcatctggaagatcatcgtgaccgagggcagcggcatccagatccaggtgatcagcttcgccaccgagcagaactgggacagcctggagatccacgacggcggcgacgtgaccgcccccagactgggcagcttcagcggcaccaccgtgcccgccctgctgaacagcaccagcaaccagctgtacctgcacttccagagcgacatcagcgtggccgccgccggcttccacctggagtacaagaccgtgggcctggccgcctgccaggagcccgccctgcccagcaacagcatcaagatcggcgacagatacatggtgaacgacgtgctgagcttccagtgcgagcccggctacaccctgcagggcagaagccacatcagctgcatgcccggcaccgtgagaagatggaactaccccagccccctgtgcatcgccacctgcggcggcaccctgagcaccctgggcggcgtgatcctgagccccggcttccccggcagctaccccaacaacctggactgcacctggagaatcagcctgcccatcggctacggcgcccacatccagttcctgaacttcagcaccgaggccaaccacgacttcctggagatccagaacggcccctaccacaccagccccatgatcggccagttcagcggcaccgacctgcccgccgccctgctgagcaccacccacgagaccctgatccacttctacagcgaccacagccagaacagacagggcttcaagctggcctaccaggcctacgagctgcagaactgccccgaccccccccccttccagaacggctacatgatcaacagcgactacagcgtgggccagagcgtgagcttcgagtgctaccccggctacatcctgatcggccaccccgtgctgacctgccagcacggcatcaacagaaactggaactaccccttccccagatgcgacgccccctgcggctacaacgtgaccagccagaacggcaccatctacagccccggcttccccgacgagtaccccatcctgaaggactgcatctggctgatcaccgtgccccccggccacggcgtgtacatcaacttcaccctgctgcagaccgaggccgtgaacgactacatcgccgtgtgggacggccccgaccagaacagcccccagctgggcgtgttcagcggcaacaccgccctggagaccgcctacagcagcaccaaccaggtgctgctgaagttccacagcgacttcagcaacggcggcttcttcgtgctgaacttccacgccttccagctgaagaagtgccagcccccccccgccgtgccccaggccgagatgctgaccgaggacgacgacttcgagatcggcgacttcgtgaagtaccagtgccaccccggctacaccctggtgggcaccgacatcctgacctgcaagctgagcagccagctgcagttcgagggcagcctgcccacctgcgaggcccagtgccccgccaacgaggtgagaaccggcagcagcggcgtgatcctgagccccggctaccccggcaactacttcaacagccagacctgcagctggagcatcaaggtggagcccaactacaacatcaccatcttcgtggacaccttccagagcgagaagcagttcgacgccctggaggtgttcgacggcagcagcggccagagccccctgctggtggtgctgagcggcaaccacaccgagcagagcaacttcaccagcagaagcaaccagctgtacctgagatggagcaccgaccacgccaccagcaagaagggcttcaagatcagatacgccgccccctactgcagcctgacccaccccctgaagaacggcggcatcctgaacagaaccgccggcgccgtgggcagcaaggtgcactacttctgcaagcccggctacagaatggtgggccacagcaacgccacctgcagaagaaaccccctgggcatgtaccagtgggacagcctgacccccctgtgccaggccgtgagctgcggcatccccgagagccccggcaacggcagcttcaccggcaacgagttcaccctggacagcaaggtggtgtacgagtgccacgagggcttcaagctggagagcagccagcaggccaccgccgtgtgccaggaggacggcctgtggagcaacaagggcaagccccccacctgcaagcccgtggcctgccccagcatcgaggcccagctgagcgagcacgtgatctggagactggtgagcggcagcctgaacgagtacggcgcccaggtgctgctgagctgcagccccggctactacctggagggctggagactgctgagatgccaggccaacggcacctggaacatcggcgacgagagacccagctgcagagccggccactgcggcagccccgaccccatcgtgaacggccacatcagcggcgacggcttcagctacagagacaccgtggtgtaccagtgcaaccccggcttcagactggtgggcaccagcgtgagaatctgcctgcaggaccacaagtggagcggccagacccccgtgtgcgtgcccatcacctgcggccaccccggcaaccccgcccacggcttcaccaacggcagcgagttcaacctgaacgacgtggtgaacttcacctgcaacaccggctacctgctgcagggcgtgagcagagcccagtgcagaagcaacggccagtggagcagccccctgcccacctgcagagtggtgaactgcagcgaccccggcttcgtggagaacgccatcagacacggccagcagaacttccccgagagcttcgagtacggcatgagcatcctgtaccactgcaagaagggcttctacctgctgggcagcagcgccctgacctgcatggccaacggcctgtgggacagaagcctgcccaagtgcctggccatcagctgcggccaccccggcgtgcccgccaacgccgtgctgaccggcgagctgttcacctacggcgccgtggtgcactacagctgcagaggcagcgagagcctgatcggcaacgacaccagagtgtgccaggaggacagccactggagcggcgccctgccccactgcaccggcaacaaccccggcttctgcggcgaccccggcacccccgcccacggcagcagactgggcgacgacttcaagaccaagagcctgctgagattcagctgcgagatgggccaccagctgagaggcagccccgagagaacctgcctgctgaacggcagctggagcggcctgcagcccgtgtgcgaggccgtgctgtgcccccagcccccccccgtgcagaacggcaccgtggagggcagcgacttcagatggggcagcagcatcagctacagctgcatggacggctaccagctgagccacagcgccatcctgagctgcgagggcagaggcgtgtggaagggcgagatcccccagtgcctgcccgtgttctgcggcgaccccggcatccccgccgagggcagactgagcggcaagagcttcacctacaagagcgaggtgttcttccagtgcaagagccccttcatcctggtgggcagcagcagaagagtgtgccaggccgacggcacctggagcggcatccagcccacctgcatcgaccccgcccacaacacctgccccgaccccggcaccccccacttcggcatccagaacagcagcagaggctacgaggtgggcagcaccgtgttcttcagatgcagaaagggctaccacatccagggcagcaccaccagaacctgcctggccaacctgacctggagcggcatccagaccgagtgcatcccccacgcctgcagacagcccgagacccccgcccacgccgacgtgagagccatcgacctgcccaccttcggctacaccctggtgtacacctgccaccccggcttcttcctggccggcggcagcgagcacagaacctgcaaggccgacatgaagtggaccggcaagagccccgtgtgcaagagcaagggcgtgagagaggtgaacgagaccgtgaccaagacccccgtgcccagcgacgtgttcttcgtgaacagcctgtggaagggctactacgagtacctgggcaagagacagcccgccaccctgaccgtggactggttcaacgccaccagcagcaaggtgaacgccaccttcagcgaggccagccccgtggagctgaagctgaccggcatctacaagaaggaggaggcccacctgctgctgaaggccttccagatcaagggccaggccgacatcttcgtgagcaagttcgagaacgacaactggggcctggacggctacgtgagcagcggcctggagagaggcggcttcaccttccagggcgacatccacggcaaggacttcggcaagttcaagctggagagacaggaccccctgaaccccgaccaggacagcagcagccactaccacggcaccagcagcggcagcgtggccgccgccatcctggtgcccttcttcgccctgatcctgagcggcttcgccttctacctgtacaagcacagaaccagacccaaggtgcagtacaacggctacgccggccacgagaacagcaacggccaggccagcttcgagaaccccatgtacgacaccaacctgaagcccaccgaggccaaggccgtgagattcgacaccaccctgaacaccgtgtgcaccgtggtgtag

SEQ ID NO: 77909 - DNA, 10698 bp, synthetic construct
  misc_feature 1..10698: note = Description of Artificial Sequence: Synthetic coding sequence
  source 1..10698: mol_type = other DNA
atgaccgcctggagaagattccagagcctgctgctgctgctgggcctgctggtgctgtgcgccagactgctgaccgccgccaagggccagaactgcggcggcctggtgcagggccccaacggcaccatcgagagccccggcttcccccacggctaccccaactacgccaactgcacctggatcatcatcaccggcgagagaaacagaatccagctgagcttccacaccttcgccctggaggaggacttcgacatcctgagcgtgtacgacggccagccccagcagggcaacctgaaggtgagactgagcggcttccagctgcccagcagcatcgtgagcaccggcagcatcctgaccctgtggttcaccaccgacttcgccgtgagcgcccagggcttcaaggccctgtacgaggtgctgcccagccacacctgcggcaaccccggcgagatcctgaagggcgtgctgcacggcaccagattcaacatcggcgacaagatcagatacagctgcctgcccggctacatcctggagggccacgccatcctgacctgcatcgtgagccccggcaacggcgccagctgggacttccccgcccccttctgcagagccgagggcgcctgcggcggcaccctgagaggcaccagcagcagcatcagcagcccccacttccccagcgagtacgagaacaacgccgactgcacctggaccatcctggccgagcccggcgacaccatcgccctggtgttcaccgacttccagctggaggagggctacgacttcctggagatcagcggcaccgaggcccccagcatctggctgaccggcatgaacctgcccagccccgtgatcagcagcaagaactggctgagactgcacttcaccagcgacagcaaccacagaagaaagggcttcaacgcccagttccaggtgaagaaggccatcgagctgaagagcagaggcgtgaagatgctgcccagcaaggacggcagccacaagaacagcgtgctgagccagggcggcgtggccctggtgagcgacatgtgccccgaccccggcatccccgagaacggcagaagagccggcagcgacttcagcagagtgggcgccaacgtgcagttcagctgcgaggacaactacgtgctgcagggcagcaagagcatcacctgccagagagtgaccgagaccctggccgcctggagcgaccacagacccatctgcagagccagaacctgcggcagcaacctgagaggccccagcggcgtgatcaccagccccaactaccccgtgcagtacgaggacaacgcccactgcgtgtgggtgatcaccaccaccgaccccgacaaggtgatcaagctggccttcgaggagttcgagctggagagaggctacgacaccctgaccgtgggcgacgccggcaaggtgggcgacaccagaagcgtgctgtacgtgctgaccggcagcagcgtgcccgacctgatcgtgagcatgagcaaccagatgtggctgcacctgcagagcgacgacagcatcggcagccccggcttcaaggccgtgtaccaggagatcgagaagggcggctgcggcgaccccggcatccccgcctacggcaagagaaccggcagcagcttcctgcacggcgacaccctgaccttcgagtgccccgccgccttcgagctggtgggcgagagagtgatcacctgccagcagaacaaccagtggagcggcaacaagcccagctgcgtgttcagctgcttcttcaacttcaccgccagcagcggcatcatcctgagccccaactaccccgaggagtacggcaacaacatgaactgcgtgtggctgatcatcagcgagcccggcagcagaatccacctgatcttcaacgacttcgacgtggagccccagttcgacttcctggccgtgaaggacgacggcatcagcgacatcaccgtgctgggcaccttcagcggcaacgaggtgcccagccagctggccagcagcggccacatcgtgagactggagttccagagcgaccacagcaccaccggcagaggcttcaacatcacctacaccaccttcggccagaacgagtgccacgaccccggcatccccatcaacggcagaagattcggcgacagattcctgctgggcagcagcgtgagcttccactgcgacgacggcttcgtgaagacccagggcagcgagagcatcacctgcatcctgcaggacggcaacgtggtgtggagcagcaccgtgcccagatgcgaggccccctgcggcggccacctgaccgccagcagcggcgtgatcctgccccccggctggcccggctactacaaggacagcctgcactgcgagtggatcatcgaggccaagcccggccacagcatcaagatcaccttcgacagattccagaccgaggtgaactacgacaccctggaggtgagagacggccccgccagcagcagccccctgatcggcgagtaccacggcacccaggccccccagttcctgatcagcaccggcaacttcatgtacctgctgttcaccaccgacaacagcagaagcagcatcggcttcctgatccactacgagagcgtgaccctggagagcgacagctgcctggaccccggcatccccgtgaacggccacagacacggcggcgacttcggcatcagaagcaccgtgaccttcagctgcgaccccggctacaccctgagcgacgacgagcccctggtgtgcgagagaaaccaccagtggaaccacgccctgcccagctgcgacgccctgtgcggcggctacatccagggcaagagcggcaccgtgctgagccccggcttccccgacttctaccccaacagcctgaactgcacctggaccatcgaggtgagccacggcaagggcgtgcagatgatcttccacaccttccacctggagagcagccacgactacctgctgatcaccgaggacggcagcttcagcgagcccgtggccagactgaccggcagcgtgctgccccacaccatcaaggccggcctgttcggcaacttcaccgcccagctgagattcatcagcgacttcagcatcagctacgagggcttcaacatcaccttcagcgagtacgacctggagccctgcgacgaccccggcgtgcccgccttcagcagaagaatcggcttccacttcggcgtgggcgacagcctgaccttcagctgcttcctgggctacagactggagggcgccaccaagctgacctgcctgggcggcggcagaagagtgtggagcgcccccctgcccagatgcgtggccgagtgcggcgccagcgtgaagggcaacgagggcaccctgctgagccccaacttccccagcaactacgacaacaaccacgagtgcatctacaagatcgagaccgaggccggcaagggcatccacctgagaaccagaagcttccagctgttcgagggcgacaccctgaaggtgtacgacggcaaggacagcagcagcagacccctgggcaccttcaccaagaacgagctgctgggcctgatcctgaacagcaccagcaaccacctgtggctggagttcaacaccaacggcagcgacaccgaccagggcttccagctgacctacaccagcttcgacctggtgaagtgcgaggaccccggcatccccaactacggctacagaatcagagacgagggccacttcaccgacaccgtggtgctgtacagctgcaaccccggctacgccatgcacggcagcaacaccctgacctgcctgagcggcgacagaagagtgtgggacaagcccctgcccagctgcatcgccgagtgcggcggccagatccacgccgccaccagcggcagaatcctgagccccggctaccccgccccctacgacaacaacctgcactgcacctggatcatcgaggccgaccccggcaagaccatcagcctgcacttcatcgtgttcgacaccgagatggcccacgacatcctgaaggtgtgggacggccccgtggacagcgacatcctgctgaaggagtggagcggcagcgccctgcccgaggacatccacagcaccttcaacagcctgaccctgcagttcgacagcgacttcttcatcagcaagagcggcttcagcatccagttcagcaccagcatcgccgccacctgcaacgaccccggcatgccccagaacggcaccagatacggcgacagcagagaggccggcgacaccgtgaccttccagtgcgaccccggctaccagctgcagggccaggccaagatcacctgcgtgcagctgaacaacagattcttctggcagcccgacccccccacctgcatcgccgcctgcggcggcaacctgaccggccccgccggcgtgatcctgagccccaactacccccagccctacccccccggcaaggagtgcgactggagagtgaaggtgaaccccgacttcgtgatcgccctgatcttcaagagcttcaacatggagcccagctacgacttcctgcacatctacgagggcgaggacagcaacagccccctgatcggcagctaccagggcagccaggcccccgagagaatcgagagcagcggcaacagcctgttcctggccttcagaagcgacgccagcgtgggcctgagcggcttcgccatcgagttcaaggagaagcccagagaggcctgcttcgaccccggcaacatcatgaacggcaccagagtgggcaccgacttcaagctgggcagcaccatcacctaccagtgcgacagcggctacaagatcctggaccccagcagcatcacctgcgtgatcggcgccgacggcaagcccagctgggaccaggtgctgcccagctgcaacgccccctgcggcggccagtacaccggcagcgagggcgtggtgctgagccccaactacccccacaactacaccgccggccagatctgcctgtacagcatcaccgtgcccaaggagttcgtggtgttcggccagttcgcctacttccagaccgccctgaacgacctggccgagctgttcgacggcacccacgcccaggccagactgctgagcagcctgagcggcagccacagcggcgagaccctgcccctggccaccagcaaccagatcctgctgagattcagcgccaagagcggcgccagcgccagaggcttccacttcgtgtaccaggccgtgcccagaaccagcgacacccagtgcagcagcgtgcccgagcccagatacggcagaagaatcggcagcgagttcagcgccggcagcatcgtgagattcgagtgcaaccccggctacctgctgcagggcagcaccgccctgcactgccagagcgtgcccaacgccctggcccagtggaacgacaccatccccagctgcgtggtgccctgcagcggcaacttcacccagagaagaggcaccatcctgagccccggctaccccgagccctacggcaacaacctgaactgcatctggaagatcatcgtgaccgagggcagcggcatccagatccaggtgatcagcttcgccaccgagcagaactgggacagcctggagatccacgacggcggcgacgtgaccgcccccagactgggcagcttcagcggcaccaccgtgcccgccctgctgaacagcaccagcaaccagctgtacctgcacttccagagcgacatcagcgtggccgccgccggcttccacctggagtacaagaccgtgggcctggccgcctgccaggagcccgccctgcccagcaacagcatcaagatcggcgacagatacatggtgaacgacgtgctgagcttccagtgcgagcccggctacaccctgcagggcagaagccacatcagctgcatgcccggcaccgtgagaagatggaactaccccagccccctgtgcatcgccacctgcggcggcaccctgagcaccctgggcggcgtgatcctgagccccggcttccccggcagctaccccaacaacctggactgcacctggagaatcagcctgcccatcggctacggcgcccacatccagttcctgaacttcagcaccgaggccaaccacgacttcctggagatccagaacggcccctaccacaccagccccatgatcggccagttcagcggcaccgacctgcccgccgccctgctgagcaccacccacgagaccctgatccacttctacagcgaccacagccagaacagacagggcttcaagctggcctaccaggcctacgagctgcagaactgccccgaccccccccccttccagaacggctacatgatcaacagcgactacagcgtgggccagagcgtgagcttcgagtgctaccccggctacatcctgatcggccaccccgtgctgacctgccagcacggcatcaacagaaactggaactaccccttccccagatgcgacgccccctgcggctacaacgtgaccagccagaacggcaccatctacagccccggcttccccgacgagtaccccatcctgaaggactgcatctggctgatcaccgtgccccccggccacggcgtgtacatcaacttcaccctgctgcagaccgaggccgtgaacgactacatcgccgtgtgggacggccccgaccagaacagcccccagctgggcgtgttcagcggcaacaccgccctggagaccgcctacagcagcaccaaccaggtgctgctgaagttccacagcgacttcagcaacggcggcttcttcgtgctgaacttccacgccttccagctgaagaagtgccagcccccccccgccgtgccccaggccgagatgctgaccgaggacgacgacttcgagatcggcgacttcgtgaagtaccagtgccaccccggctacaccctggtgggcaccgacatcctgacctgcaagctgagcagccagctgcagttcgagggcagcctgcccacctgcgaggcccagtgccccgccaacgaggtgagaaccggcagcagcggcgtgatcctgagccccggctaccccggcaactacttcaacagccagacctgcagctggagcatcaaggtggagcccaactacaacatcaccatcttcgtggacaccttccagagcgagaagcagttcgacgccctggaggtgttcgacggcagcagcggccagagccccctgctggtggtgctgagcggcaaccacaccgagcagagcaacttcaccagcagaagcaaccagctgtacctgagatggagcaccgaccacgccaccagcaagaagggcttcaagatcagatacgccgccccctactgcagcctgacccaccccctgaagaacggcggcatcctgaacagaaccgccggcgccgtgggcagcaaggtgcactacttctgcaagcccggctacagaatggtgggccacagcaacgccacctgcagaagaaaccccctgggcatgtaccagtgggacagcctgacccccctgtgccaggccgtgagctgcggcatccccgagagccccggcaacggcagcttcaccggcaacgagttcaccctggacagcaaggtggtgtacgagtgccacgagggcttcaagctggagagcagccagcaggccaccgccgtgtgccaggaggacggcctgtggagcaacaagggcaagccccccacctgcaagcccgtggcctgccccagcatcgaggcccagctgagcgagcacgtgatctggagactggtgagcggcagcctgaacgagtacggcgcccaggtgctgctgagctgcagccccggctactacctggagggctggagactgctgagatgccaggccaacggcacctggaacatcggcgacgagagacccagctgcagagtgatcagctgcggcagcctgagcttcccccccaacggcaacaagatcggcaccctgaccgtgtacggcgccaccgccatcttcacctgcaacaccggctacaccctggtgggcagccacgtgagagagtgcctggccaacggcctgtggagcggcagcgagaccagatgcctggccggccactgcggcagccccgaccccatcgtgaacggccacatcagcggcgacggcttcagctacagagacaccgtggtgtaccagtgcaaccccggcttcagactggtgggcaccagcgtgagaatctgcctgcaggaccacaagtggagcggccagacccccgtgtgcgtgcccatcacctgcggccaccccggcaaccccgcccacggcttcaccaacggcagcgagttcaacctgaacgacgtggtgaacttcacctgcaacaccggctacctgctgcagggcgtgagcagagcccagtgcagaagcaacggccagtggagcagccccctgcccacctgcagagtggtgaactgcagcgaccccggcttcgtggagaacgccatcagacacggccagcagaacttccccgagagcttcgagtacggcatgagcatcctgtaccactgcaagaagggcttctacctgctgggcagcagcgccctgacctgcatggccaacggcctgtgggacagaagcctgcccaagtgcctggccatcagctgcggccaccccggcgtgcccgccaacgccgtgctgaccggcgagctgttcacctacggcgccgtggtgcactacagctgcagaggcagcgagagcctgatcggcaacgacaccagagtgtgccaggaggacagccactggagcggcgccctgccccactgcaccggcaacaaccccggcttctgcggcgaccccggcacccccgcccacggcagcagactgggcgacgacttcaagaccaagagcctgctgagattcagctgcgagatgggccaccagctgagaggcagccccgagagaacctgcctgctgaacggcagctggagcggcctgcagcccgtgtgcgaggccgtgagctgcggcaaccccggcacccccaccaacggcatgatcgtgagcagcgacggcatcctgttcagcagcagcgtgatctacgcctgctgggagggctacaagaccagcggcctgatgaccagacactgcaccgccaacggcacctggaccggcaccgcccccgactgcaccatcatcagctgcggcgaccccggcaccctggccaacggcatccagttcggcaccgacttcaccttcaacaagaccgtgagctaccagtgcaaccccggctacgtgatggaggccgtgaccagcgccaccatcagatgcaccaaggacggcagatggaaccccagcaagcccgtgtgcaaggccgtgctgtgcccccagcccccccccgtgcagaacggcaccgtggagggcagcgacttcagatggggcagcagcatcagctacagctgcatggacggctaccagctgagccacagcgccatcctgagctgcgagggcagaggcgtgtggaagggcgagatcccccagtgcctgcccgtgttctgcggcgaccccggcatccccgccgagggcagactgagcggcaagagcttcacctacaagagcgaggtgttcttccagtgcaagagccccttcatcctggtgggcagcagcagaagagtgtgccaggccgacggcacctggagcggcatccagcccacctgcatcgaccccgcccacaacacctgccccgaccccggcaccccccacttcggcatccagaacagcagcagaggctacgaggtgggcagcaccgtgttcttcagatgcagaaagggctaccacatccagggcagcaccaccagaacctgcctggccaacctgacctggagcggcatccagaccgagtgcatcccccacgcctgcagacagcccgagacccccgcccacgccgacgtgagagccatcgacctgcccaccttcggctacaccctggtgtacacctgccaccccggcttcttcctggccggcggcagcgagcacagaacctgcaaggccgacatgaagtggaccggcaagagccccgtgtgcaagagcaagggcgtgagagaggtgaacgagaccgtgaccaagacccccgtgcccagcgacgtgttcttcgtgaacagcctgtggaagggctactacgagtacctgggcaagagacagcccgccaccctgaccgtggactggttcaacgccaccagcagcaaggtgaacgccaccttcagcgaggccagccccgtggagctgaagctgaccggcatctacaagaaggaggaggcccacctgctgctgaaggccttccagatcaagggccaggccgacatcttcgtgagcaagttcgagaacgacaactggggcctggacggctacgtgagcagcggcctggagagaggcggcttcaccttccagggcgacatccacggcaaggacttcggcaagttcaagctggagagacaggaccccctgaaccccgaccaggacagcagcagccactaccacggcaccagcagcggcagcgtggccgccgccatcctggtgcccttcttcgccctgatcctgagcggcttcgccttctacctgtacaagcacagaaccagacccaaggtgcagtacaacggctacgccggccacgagaacagcaacggccaggccagcttcgagaaccccatgtacgacaccaacctgaagcccaccgaggccaaggccgtgagattcgacaccaccctgaacaccgtgtgcaccgtggtgtag

SEQ ID NO: 77910 - DNA, 10695 bp, synthetic construct
  misc_feature 1..10695: note = Description of Artificial Sequence: Synthetic coding sequence
  source 1..10695: mol_type = other DNA
atgaccgcctggagaagattccagagcctgctgctgctgctgggcctgctggtgctgtgcgccagactgctgaccgccgccaagggccagaactgcggcggcctggtgcagggccccaacggcaccatcgagagccccggcttcccccacggctaccccaactacgccaactgcacctggatcatcatcaccggcgagagaaacagaatccagctgagcttccacaccttcgccctggaggaggacttcgacatcctgagcgtgtacgacggccagccccagcagggcaacctgaaggtgagactgagcggcttccagctgcccagcagcatcgtgagcaccggcagcatcctgaccctgtggttcaccaccgacttcgccgtgagcgcccagggcttcaaggccctgtacgaggtgctgcccagccacacctgcggcaaccccggcgagatcctgaagggcgtgctgcacggcaccagattcaacatcggcgacaagatcagatacagctgcctgcccggctacatcctggagggccacgccatcctgacctgcatcgtgagccccggcaacggcgccagctgggacttccccgcccccttctgcagagccgagggcgcctgcggcggcaccctgagaggcaccagcagcagcatcagcagcccccacttccccagcgagtacgagaacaacgccgactgcacctggaccatcctggccgagcccggcgacaccatcgccctggtgttcaccgacttccagctggaggagggctacgacttcctggagatcagcggcaccgaggcccccagcatctggctgaccggcatgaacctgcccagccccgtgatcagcagcaagaactggctgagactgcacttcaccagcgacagcaaccacagaagaaagggcttcaacgcccagttccaggtgaagaaggccatcgagctgaagagcagaggcgtgaagatgctgcccagcaaggacggcagccacaagaacagcgtgctgagccagggcggcgtggccctggtgagcgacatgtgccccgaccccggcatccccgagaacggcagaagagccggcagcgacttcagagtgggcgccaacgtgcagttcagctgcgaggacaactacgtgctgcagggcagcaagagcatcacctgccagagagtgaccgagaccctggccgcctggagcgaccacagacccatctgcagagccagaacctgcggcagcaacctgagaggccccagcggcgtgatcaccagccccaactaccccgtgcagtacgaggacaacgcccactgcgtgtgggtgatcaccaccaccgaccccgacaaggtgatcaagctggccttcgaggagttcgagctggagagaggctacgacaccctgaccgtgggcgacgccggcaaggtgggcgacaccagaagcgtgctgtacgtgctgaccggcagcagcgtgcccgacctgatcgtgagcatgagcaaccagatgtggctgcacctgcagagcgacgacagcatcggcagccccggcttcaaggccgtgtaccaggagatcgagaagggcggctgcggcgaccccggcatccccgcctacggcaagagaaccggcagcagcttcctgcacggcgacaccctgaccttcgagtgccccgccgccttcgagctggtgggcgagagagtgatcacctgccagcagaacaaccagtggagcggcaacaagcccagctgcgtgttcagctgcttcttcaacttcaccgccagcagcggcatcatcctgagccccaactaccccgaggagtacggcaacaacatgaactgcgtgtggctgatcatcagcgagcccggcagcagaatccacctgatcttcaacgacttcgacgtggagccccagttcgacttcctggccgtgaaggacgacggcatcagcgacatcaccgtgctgggcaccttcagcggcaacgaggtgcccagccagctggccagcagcggccacatcgtgagactggagttccagagcgaccacagcaccaccggcagaggcttcaacatcacctacaccaccttcggccagaacgagtgccacgaccccggcatccccatcaacggcagaagattcggcgacagattcctgctgggcagcagcgtgagcttccactgcgacgacggcttcgtgaagacccagggcagcgagagcatcacctgcatcctgcaggacggcaacgtggtgtggagcagcaccgtgcccagatgcgaggccccctgcggcggccacctgaccgccagcagcggcgtgatcctgccccccggctggcccggctactacaaggacagcctgcactgcgagtggatcatcgaggccaagcccggccacagcatcaagatcaccttcgacagattccagaccgaggtgaactacgacaccctggaggtgagagacggccccgccagcagcagccccctgatcggcgagtaccacggcacccaggccccccagttcctgatcagcaccggcaacttcatgtacctgctgttcaccaccgacaacagcagaagcagcatcggcttcctgatccactacgagagcgtgaccctggagagcgacagctgcctggaccccggcatccccgtgaacggccacagacacggcggcgacttcggcatcagaagcaccgtgaccttcagctgcgaccccggctacaccctgagcgacgacgagcccctggtgtgcgagagaaaccaccagtggaaccacgccctgcccagctgcgacgccctgtgcggcggctacatccagggcaagagcggcaccgtgctgagccccggcttccccgacttctaccccaacagcctgaactgcacctggaccatcgaggtgagccacggcaagggcgtgcagatgatcttccacaccttccacctggagagcagccacgactacctgctgatcaccgaggacggcagcttcagcgagcccgtggccagactgaccggcagcgtgctgccccacaccatcaaggccggcctgttcggcaacttcaccgcccagctgagattcatcagcgacttcagcatcagctacgagggcttcaacatcaccttcagcgagtacgacctggagccctgcgacgaccccggcgtgcccgccttcagcagaagaatcggcttccacttcggcgtgggcgacagcctgaccttcagctgcttcctgggctacagactggagggcgccaccaagctgacctgcctgggcggcggcagaagagtgtggagcgcccccctgcccagatgcgtggccgagtgcggcgccagcgtgaagggcaacgagggcaccctgctgagccccaacttccccagcaactacgacaacaaccacgagtgcatctacaagatcgagaccgaggccggcaagggcatccacctgagaaccagaagcttccagctgttcgagggcgacaccctgaaggtgtacgacggcaaggacagcagcagcagacccctgggcaccttcaccaagaacgagctgctgggcctgatcctgaacagcaccagcaaccacctgtggctggagttcaacaccaacggcagcgacaccgaccagggcttccagctgacctacaccagcttcgacctggtgaagtgcgaggaccccggcatccccaactacggctacagaatcagagacgagggccacttcaccgacaccgtggtgctgtacagctgcaaccccggctacgccatgcacggcagcaacaccctgacctgcctgagcggcgacagaagagtgtgggacaagcccctgcccagctgcatcgccgagtgcggcggccagatccacgccgccaccagcggcagaatcctgagccccggctaccccgccccctacgacaacaacctgcactgcacctggatcatcgaggccgaccccggcaagaccatcagcctgcacttcatcgtgttcgacaccgagatggcccacgacatcctgaaggtgtgggacggccccgtggacagcgacatcctgctgaaggagtggagcggcagcgccctgcccgaggacatccacagcaccttcaacagcctgaccctgcagttcgacagcgacttcttcatcagcaagagcggcttcagcatccagttcagcaccagcatcgccgccacctgcaacgaccccggcatgccccagaacggcaccagatacggcgacagcagagaggccggcgacaccgtgaccttccagtgcgaccccggctaccagctgcagggccaggccaagatcacctgcgtgcagctgaacaacagattcttctggcagcccgacccccccacctgcatcgccgcctgcggcggcaacctgaccggccccgccggcgtgatcctgagccccaactacccccagccctacccccccggcaaggagtgcgactggagagtgaaggtgaaccccgacttcgtgatcgccctgatcttcaagagcttcaacatggagcccagctacgacttcctgcacatctacgagggcgaggacagcaacagccccctgatcggcagctaccagggcagccaggcccccgagagaatcgagagcagcggcaacagcctgttcctggccttcagaagcgacgccagcgtgggcctgagcggcttcgccatcgagttcaaggagaagcccagagaggcctgcttcgaccccggcaacatcatgaacggcaccagagtgggcaccgacttcaagctgggcagcaccatcacctaccagtgcgacagcggctacaagatcctggaccccagcagcatcacctgcgtgatcggcgccgacggcaagcccagctgggaccaggtgctgcccagctgcaacgccccctgcggcggccagtacaccggcagcgagggcgtggtgctgagccccaactacccccacaactacaccgccggccagatctgcctgtacagcatcaccgtgcccaaggagttcgtggtgttcggccagttcgcctacttccagaccgccctgaacgacctggccgagctgttcgacggcacccacgcccaggccagactgctgagcagcctgagcggcagccacagcggcgagaccctgcccctggccaccagcaaccagatcctgctgagattcagcgccaagagcggcgccagcgccagaggcttccacttcgtgtaccaggccgtgcccagaaccagcgacacccagtgcagcagcgtgcccgagcccagatacggcagaagaatcggcagcgagttcagcgccggcagcatcgtgagattcgagtgcaaccccggctacctgctgcagggcagcaccgccctgcactgccagagcgtgcccaacgccctggcccagtggaacgacaccatccccagctgcgtggtgccctgcagcggcaacttcacccagagaagaggcaccatcctgagccccggctaccccgagccctacggcaacaacctgaactgcatctggaagatcatcgtgaccgagggcagcggcatccagatccaggtgatcagcttcgccaccgagcagaactgggacagcctggagatccacgacggcggcgacgtgaccgcccccagactgggcagcttcagcggcaccaccgtgcccgccctgctgaacagcaccagcaaccagctgtacctgcacttccagagcgacatcagcgtggccgccgccggcttccacctggagtacaagaccgtgggcctggccgcctgccaggagcccgccctgcccagcaacagcatcaagatcggcgacagatacatggtgaacgacgtgctgagcttccagtgcgagcccggctacaccctgcagggcagaagccacatcagctgcatgcccggcaccgtgagaagatggaactaccccagccccctgtgcatcgccacctgcggcggcaccctgagcaccctgggcggcgtgatcctgagccccggcttccccggcagctaccccaacaacctggactgcacctggagaatcagcctgcccatcggctacggcgcccacatccagttcctgaacttcagcaccgaggccaaccacgacttcctggagatccagaacggcccctaccacaccagccccatgatcggccagttcagcggcaccgacctgcccgccgccctgctgagcaccacccacgagaccctgatccacttctacagcgaccacagccagaacagacagggcttcaagctggcctaccaggcctacgagctgcagaactgccccgaccccccccccttccagaacggctacatgatcaacagcgactacagcgtgggccagagcgtgagcttcgagtgctaccccggctacatcctgatcggccaccccgtgctgacctgccagcacggcatcaacagaaactggaactaccccttccccagatgcgacgccccctgcggctacaacgtgaccagccagaacggcaccatctacagccccggcttccccgacgagtaccccatcctgaaggactgcatctggctgatcaccgtgccccccggccacggcgtgtacatcaacttcaccctgctgcagaccgaggccgtgaacgactacatcgccgtgtgggacggccccgaccagaacagcccccagctgggcgtgttcagcggcaacaccgccctggagaccgcctacagcagcaccaaccaggtgctgctgaagttccacagcgacttcagcaacggcggcttcttcgtgctgaacttccacgccttccagctgaagaagtgccagcccccccccgccgtgccccaggccgagatgctgaccgaggacgacgacttcgagatcggcgacttcgtgaagtaccagtgccaccccggctacaccctggtgggcaccgacatcctgacctgcaagctgagcagccagctgcagttcgagggcagcctgcccacctgcgaggcccagtgccccgccaacgaggtgagaaccggcagcagcggcgtgatcctgagccccggctaccccggcaactacttcaacagccagacctgcagctggagcatcaaggtggagcccaactacaacatcaccatcttcgtggacaccttccagagcgagaagcagttcgacgccctggaggtgttcgacggcagcagcggccagagccccctgctggtggtgctgagcggcaaccacaccgagcagagcaacttcaccagcagaagcaaccagctgtacctgagatggagcaccgaccacgccaccagcaagaagggcttcaagatcagatacgccgccccctactgcagcctgacccaccccctgaagaacggcggcatcctgaacagaaccgccggcgccgtgggcagcaaggtgcactacttctgcaagcccggctacagaatggtgggccacagcaacgccacctgcagaagaaaccccctgggcatgtaccagtgggacagcctgacccccctgtgccaggccgtgagctgcggcatccccgagagccccggcaacggcagcttcaccggcaacgagttcaccctggacagcaaggtggtgtacgagtgccacgagggcttcaagctggagagcagccagcaggccaccgccgtgtgccaggaggacggcctgtggagcaacaagggcaagccccccacctgcaagcccgtggcctgccccagcatcgaggcccagctgagcgagcacgtgatctggagactggtgagcggcagcctgaacgagtacggcgcccaggtgctgctgagctgcagccccggctactacctggagggctggagactgctgagatgccaggccaacggcacctggaacatcggcgacgagagacccagctgcagagtgatcagctgcggcagcctgagcttcccccccaacggcaacaagatcggcaccctgaccgtgtacggcgccaccgccatcttcacctgcaacaccggctacaccctggtgggcagccacgtgagagagtgcctggccaacggcctgtggagcggcagcgagaccagatgcctggccggccactgcggcagccccgaccccatcgtgaacggccacatcagcggcgacggcttcagctacagagacaccgtggtgtaccagtgcaaccccggcttcagactggtgggcaccagcgtgagaatctgcctgcaggaccacaagtggagcggccagacccccgtgtgcgtgcccatcacctgcggccaccccggcaaccccgcccacggcttcaccaacggcagcgagttcaacctgaacgacgtggtgaacttcacctgcaacaccggctacctgctgcagggcgtgagcagagcccagtgcagaagcaacggccagtggagcagccccctgcccacctgcagagtggtgaactgcagcgaccccggcttcgtggagaacgccatcagacacggccagcagaacttccccgagagcttcgagtacggcatgagcatcctgtaccactgcaagaagggcttctacctgctgggcagcagcgccctgacctgcatggccaacggcctgtgggacagaagcctgcccaagtgcctggccatcagctgcggccaccccggcgtgcccgccaacgccgtgctgaccggcgagctgttcacctacggcgccgtggtgcactacagctgcagaggcagcgagagcctgatcggcaacgacaccagagtgtgccaggaggacagccactggagcggcgccctgccccactgcaccggcaacaaccccggcttctgcggcgaccccggcacccccgcccacggcagcagactgggcgacgacttcaagaccaagagcctgctgagattcagctgcgagatgggccaccagctgagaggcagccccgagagaacctgcctgctgaacggcagctggagcggcctgcagcccgtgtgcgaggccgtgagctgcggcaaccccggcacccccaccaacggcatgatcgtgagcagcgacggcatcctgttcagcagcagcgtgatctacgcctgctgggagggctacaagaccagcggcctgatgaccagacactgcaccgccaacggcacctggaccggcaccgcccccgactgcaccatcatcagctgcggcgaccccggcaccctggccaacggcatccagttcggcaccgacttcaccttcaacaagaccgtgagctaccagtgcaaccccggctacgtgatggaggccgtgaccagcgccaccatcagatgcaccaaggacggcagatggaaccccagcaagcccgtgtgcaaggccgtgctgtgcccccagcccccccccgtgcagaacggcaccgtggagggcagcgacttcagatggggcagcagcatcagctacagctgcatggacggctaccagctgagccacagcgccatcctgagctgcgagggcagaggcgtgtggaagggcgagatcccccagtgcctgcccgtgttctgcggcgaccccggcatccccgccgagggcagactgagcggcaagagcttcacctacaagagcgaggtgttcttccagtgcaagagccccttcatcctggtgggcagcagcagaagagtgtgccaggccgacggcacctggagcggcatccagcccacctgcatcgaccccgcccacaacacctgccccgaccccggcaccccccacttcggcatccagaacagcagcagaggctacgaggtgggcagcaccgtgttcttcagatgcagaaagggctaccacatccagggcagcaccaccagaacctgcctggccaacctgacctggagcggcatccagaccgagtgcatcccccacgcctgcagacagcccgagacccccgcccacgccgacgtgagagccatcgacctgcccaccttcggctacaccctggtgtacacctgccaccccggcttcttcctggccggcggcagcgagcacagaacctgcaaggccgacatgaagtggaccggcaagagccccgtgtgcaagagcaagggcgtgagagaggtgaacgagaccgtgaccaagacccccgtgcccagcgacgtgttcttcgtgaacagcctgtggaagggctactacgagtacctgggcaagagacagcccgccaccctgaccgtggactggttcaacgccaccagcagcaaggtgaacgccaccttcagcgaggccagccccgtggagctgaagctgaccggcatctacaagaaggaggaggcccacctgctgctgaaggccttccagatcaagggccaggccgacatcttcgtgagcaagttcgagaacgacaactggggcctggacggctacgtgagcagcggcctggagagaggcggcttcaccttccagggcgacatccacggcaaggacttcggcaagttcaagctggagagacaggaccccctgaaccccgaccaggacagcagcagccactaccacggcaccagcagcggcagcgtggccgccgccatcctggtgcccttcttcgccctgatcctgagcggcttcgccttctacctgtacaagcacagaaccagacccaaggtgcagtacaacggctacgccggccacgagaacagcaacggccaggccagcttcgagaaccccatgtacgacaccaacctgaagcccaccgaggccaaggccgtgagattcgacaccaccctgaacaccgtgtgcaccgtggtgtag

SEQ ID NO: 77911 - DNA, 6330 bp, synthetic construct
  misc_feature 1..6330: note = Description of Artificial Sequence: Synthetic coding sequence
  source 1..6330: mol_type = other DNA
atgaccgcctggagaagattccagagcctgctgctgctgctgggcctgctggtgctgtgcgccagactgctgaccgccgccaagggccagaactgcggcggcctggtgcagggccccaacggcaccatcgagagccccggcttcccccacggctaccccaactacgccaactgcacctggatcatcatcaccggcgagagaaacagaatccagctgagcttccacaccttcgccctggaggaggacttcgacatcctgagcgtgtacgacggccagccccagcagggcaacctgaaggtgagactgagcggcttccagctgcccagcagcatcgtgagcaccggcagcatcctgaccctgtggttcaccaccgacttcgccgtgagcgcccagggcttcaaggccctgtacgaggtgctgcccagccacacctgcggcaaccccggcgagatcctgaagggcgtgctgcacggcaccagattcaacatcggcgacaagatcagatacagctgcctgcccggctacatcctggagggccacgccatcctgacctgcatcgtgagccccggcaacggcgccagctgggacttccccgcccccttctgcagagccgagggcgcctgcggcggcaccctgagaggcaccagcagcagcatcagcagcccccacttccccagcgagtacgagaacaacgccgactgcacctggaccatcctggccgagcccggcgacaccatcgccctggtgttcaccgacttccagctggaggagggctacgacttcctggagatcagcggcaccgaggcccccagcatctggctgaccggcatgaacctgcccagccccgtgatcagcagcaagaactggctgagactgcacttcaccagcgacagcaaccacagaagaaagggcttcaacgcccagttccaggtgaagaaggccatcgagctgaagagcagaggcgtgaagatgctgcccagcaaggacggcagccacaagaacagcgtgctgagccagggcggcgtggccctggtgagcgacatgtgccccgaccccggcatccccgagaacggcagaagagccggcagcgacttcagagtgggcgccaacgtgcagttcagctgcgaggacaactacgtgctgcagggcagcaagagcatcacctgccagagagtgaccgagaccctggccgcctggagcgaccacagacccatctgcagagccagaacctgcggcagcaacctgagaggccccagcggcgtgatcaccagccccaactaccccgtgcagtacgaggacaacgcccactgcgtgtgggtgatcaccaccaccgaccccgacaaggtgatcaagctggccttcgaggagttcgagctggagagaggctacgacaccctgaccgtgggcgacgccggcaaggtgggcgacaccagaagcgtgctgtacgtgctgaccggcagcagcgtgcccgacctgatcgtgagcatgagcaaccagatgtggctgcacctgcagagcgacgacagcatcggcagccccggcttcaaggccgtgtaccaggagatcgagaagggcggctgcggcgaccccggcatccccgcctacggcaagagaaccggcagcagcttcctgcacggcgacaccctgaccttcgagtgccccgccgccttcgagctggtgggcgagagagtgatcacctgccagcagaacaaccagtggagcggcaacaagcccagctgcgtgttcagctgcttcttcaacttcaccgccagcagcggcatcatcctgagccccaactaccccgaggagtacggcaacaacatgaactgcgtgtggctgatcatcagcgagcccggcagcagaatccacctgatcttcaacgacttcgacgtggagccccagttcgacttcctggccgtgaaggacgacggcatcagcgacatcaccgtgctgggcaccttcagcggcaacgaggtgcccagccagctggccagcagcggccacatcgtgagactggagttccagagcgaccacagcaccaccggcagaggcttcaacatcacctacaccaccttcggccagaacgagtgccacgaccccggcatccccatcaacggcagaagattcggcgacagattcctgctgggcagcagcgtgagcttccactgcgacgacggcttcgtgaagacccagggcagcgagagcatcacctgcatcctgcaggacggcaacgtggtgtggagcagcaccgtgcccagatgcgaggccccctgcggcggccacctgaccgccagcagcggcgtgatcctgccccccggctggcccggctactacaaggacagcctgcactgcgagtggatcatcgaggccaagcccggccacagcatcaagatcaccttcgacagattccagaccgaggtgaactacgacaccctggaggtgagagacggccccgccagcagcagccccctgatcggcgagtaccacggcacccaggccccccagttcctgatcagcaccggcaacttcatgtacctgctgttcaccaccgacaacagcagaagcagcatcggcttcctgatccactacgagagcgtgaccctggagagcgacagctgcctggaccccggcatccccgtgaacggccacagacacggcggcgacttcggcatcagaagcaccgtgaccttcagctgcgaccccggctacaccctgagcgacgacgagcccctggtgtgcgagagaaaccaccagtggaaccacgccctgcccagctgcgacgccctgtgcggcggctacatccagggcaagagcggcaccgtgctgagccccggcttccccgacttctaccccaacagcctgaactgcacctggaccatcgaggtgagccacggcaagggcgtgcagatgatcttccacaccttccacctggagagcagccacgactacctgctgatcaccgaggacggcagcttcagcgagcccgtggccagactgaccggcagcgtgctgccccacaccatcaaggccggcctgttcggcaacttcaccgcccagctgagattcatcagcgacttcagcatcagctacgagggcttcaacatcaccttcagcgagtacgacctggagccctgcgacgaccccggcgtgcccgccttcagcagaagaatcggcttccacttcggcgtgggcgacagcctgaccttcagctgcttcctgggctacagactggagggcgccaccaagctgacctgcctgggcggcggcagaagagtgtggagcgcccccctgcccagatgcgtggccgagtgcggcgccagcgtgaagggcaacgagggcaccctgctgagccccaacttccccagcaactacgacaacaaccacgagtgcatctacaagatcgagaccgaggccggcaagggcatccacctgagaaccagaagcttccagctgttcgagggcgacaccctgaaggtgtacgacggcaaggacagcagcagcagacccctgggcaccttcaccaagaacgagctgctgggcctgatcctgaacagcaccagcaaccacctgtggctggagttcaacaccaacggcagcgacaccgaccagggcttccagctgacctacaccagcttcgacctggtgaagtgcgaggaccccggcatccccaactacggctacagaatcagagacgagggccacttcaccgacaccgtggtgctgtacagctgcaaccccggctacgccatgcacggcagcaacaccctgacctgcctgagcggcgacagaagagtgtgggacaagcccctgcccagctgcatcgccgagtgcggcggccagatccacgccgccaccagcggcagaatcctgagccccggctaccccgccccctacgacaacaacctgcactgcacctggatcatcgaggccgaccccggcaagaccatcagcctgcacttcatcgtgttcgacaccgagatggcccacgacatcctgaaggtgtgggacggccccgtggacagcgacatcctgctgaaggagtggagcggcagcgccctgcccgaggacatccacagcaccttcaacagcctgaccctgcagttcgacagcgacttcttcatcagcaagagcggcttcagcatccagttcagcaccagcatcgccgccacctgcaacgaccccggcatgccccagaacggcaccagatacggcgacagcagagaggccggcgacaccgtgaccttccagtgcgaccccggctaccagctgcagggccaggccaagatcacctgcgtgcagctgaacaacagattcttctggcagcccgacccccccacctgcatcgccgcctgcggcggcaacctgaccggccccgccggcgtgatcctgagccccaactacccccagccctacccccccggcaaggagtgcgactggagagtgaaggtgaaccccgacttcgtgatcgccctgatcttcaagagcttcaacatggagcccagctacgacttcctgcacatctacgagggcgaggacagcaacagccccctgatcggcagctaccagggcagccaggcccccgagagaatcgagagcagcggcaacagcctgttcctggccttcagaagcgacgccagcgtgggcctgagcggcttcgccatcgagttcaaggagaagcccagagaggcctgcttcgaccccggcaacatcatgaacggcaccagagtgggcaccgacttcaagctgggcagcaccatcacctaccagtgcgacagcggctacaagatcctggaccccagcagcatcacctgcgtgatcggcgccgacggcaagcccagctgggaccaggtgctgcccagctgcaacgccccctgcggcggccagtacaccggcagcgagggcgtggtgctgagccccaactacccccacaactacaccgccggccagatctgcctgtacagcatcaccgtgcccaaggagttcgtggtgttcggccagttcgcctacttccagaccgccctgaacgacctggccgagctgttcgacggcacccacgcccaggccagactgctgagcagcctgagcggcagccacagcggcgagaccctgcccctggccaccagcaaccagatcctgctgagattcagcgccaagagcggcgccagcgccagaggcttccacttcgtgtaccaggccgtgcccagaaccagcgacacccagtgcagcagcgtgcccgagcccagatacggcagaagaatcggcagcgagttcagcgccggcagcatcgtgagattcgagtgcaaccccggctacctgctgcagggcagcaccgccctgcactgccagagcgtgcccaacgccctggcccagtggaacgacaccatccccagctgcgtggtgccctgcagcggcaacttcacccagagaagaggcaccatcctgagccccggctaccccgagccctacggcaacaacctgaactgcatctggaagatcatcgtgaccgagggcagcggcatccagatccaggtgatcagcttcgccaccgagcagaactgggacagcctggagatccacgacggcggcgacgtgaccgcccccagactgggcagcttcagcggcaccaccgtgcccgccctgctgaacagcaccagcaaccagctgtacctgcacttccagagcgacatcagcgtggccgccgccggcttccacctggagtacaagaccgtgggcctggccgcctgccaggagcccgccctgcccagcaacagcatcaagatcggcgacagatacatggtgaacgacgtgctgagcttccagtgcgagcccggctacaccctgcagggcagaagccacatcagctgcatgcccggcaccgtgagaagatggaactaccccagccccctgtgcatcgccacctgcggcggcaccctgagcaccctgggcggcgtgatcctgagccccggcttccccggcagctaccccaacaacctggactgcacctggagaatcagcctgcccatcggctacggcgcccacatccagttcctgaacttcagcaccgaggccaaccacgacttcctggagatccagaacggcccctaccacaccagccccatgatcggccagttcagcggcaccgacctgcccgccgccctgctgagcaccacccacgagaccctgatccacttctacagcgaccacagccagaacagacagggcttcaagctggcctaccagggcggcagcggcaacatcggccccgccttcccctgcctggacacccccttccaggccagatgccagggcgaggagagaaccttcaactag

SEQ ID NO: 77912 - DNA, 10164 bp, synthetic construct
  misc_feature 1..10164: note = Description of Artificial Sequence: Synthetic coding sequence
  source 1..10164: mol_type = other DNA
atgaccgcctggagaagattccagagcctgctgctgctgctgggcctgctggtgctgtgcgccagactgctgaccgccgccaagggccagaactgcggcggcctggtgcagggccccaacggcaccatcgagagccccggcttcccccacggctaccccaactacgccaactgcacctggatcatcatcaccggcgagagaaacagaatccagctgagcttccacaccttcgccctggaggaggacttcgacatcctgagcgtgtacgacggccagccccagcagggcaacctgaaggtgagactgagcggcttccagctgcccagcagcatcgtgagcaccggcagcatcctgaccctgtggttcaccaccgacttcgccgtgagcgcccagggcttcaaggccctgtacgaggtgctgcccagccacacctgcggcaaccccggcgagatcctgaagggcgtgctgcacggcaccagattcaacatcggcgacaagatcagatacagctgcctgcccggctacatcctggagggccacgccatcctgacctgcatcgtgagccccggcaacggcgccagctgggacttccccgcccccttctgcagagccgagggcgcctgcggcggcaccctgagaggcaccagcagcagcatcagcagcccccacttccccagcgagtacgagaacaacgccgactgcacctggaccatcctggccgagcccggcgacaccatcgccctggtgttcaccgacttccagctggaggagggctacgacttcctggagatcagcggcaccgaggcccccagcatctggctgaccggcatgaacctgcccagccccgtgatcagcagcaagaactggctgagactgcacttcaccagcgacagcaaccacagaagaaagggcttcaacgcccagttccaggtgaagaaggccatcgagctgaagagcagaggcgtgaagatgctgcccagcaaggacggcagccacaagaacagcgtgctgagccagggcggcgtggccctggtgagcgacatgtgccccgaccccggcatccccgagaacggcagaagagccggcagcgacttcagagtgggcgccaacgtgcagttcagctgcgaggacaactacgtgctgcagggcagcaagagcatcacctgccagagagtgaccgagaccctggccgcctggagcgaccacagacccatctgcagagccagaacctgcggcagcaacctgagaggccccagcggcgtgatcaccagccccaactaccccgtgcagtacgaggacaacgcccactgcgtgtgggtgatcaccaccaccgaccccgacaaggtgatcaagctggccttcgaggagttcgagctggagagaggctacgacaccctgaccgtgggcgacgccggcaaggtgggcgacaccagaagcgtgctgtacgtgctgaccggcagcagcgtgcccgacctgatcgtgagcatgagcaaccagatgtggctgcacctgcagagcgacgacagcatcggcagccccggcttcaaggccgtgtaccaggagatcgagaagggcggctgcggcgaccccggcatccccgcctacggcaagagaaccggcagcagcttcctgcacggcgacaccctgaccttcgagtgccccgccgccttcgagctggtgggcgagagagtgatcacctgccagcagaacaaccagtggagcggcaacaagcccagctgcgtgttcagctgcttcttcaacttcaccgccagcagcggcatcatcctgagccccaactaccccgaggagtacggcaacaacatgaactgcgtgtggctgatcatcagcgagcccggcagcagaatccacctgatcttcaacgacttcgacgtggagccccagttcgacttcctggccgtgaaggacgacggcatcagcgacatcaccgtgctgggcaccttcagcggcaacgaggtgcccagccagctggccagcagcggccacatcgtgagactggagttccagagcgaccacagcaccaccggcagaggcttcaacatcacctacaccaccttcggccagaacgagtgccacgaccccggcatccccatcaacggcagaagattcggcgacagattcctgctgggcagcagcgtgagcttccactgcgacgacggcttcgtgaagacccagggcagcgagagcatcacctgcatcctgcaggacggcaacgtggtgtggagcagcaccgtgcccagatgcgaggccccctgcggcggccacctgaccgccagcagcggcgtgatcctgccccccggctggcccggctactacaaggacagcctgcactgcgagtggatcatcgaggccaagcccggccacagcatcaagatcaccttcgacagattccagaccgaggtgaactacgacaccctggaggtgagagacggccccgccagcagcagccccctgatcggcgagtaccacggcacccaggccccccagttcctgatcagcaccggcaacttcatgtacctgctgttcaccaccgacaacagcagaagcagcatcggcttcctgatccactacgagagcgtgaccctggagagcgacagctgcctggaccccggcatccccgtgaacggccacagacacggcggcgacttcggcatcagaagcaccgtgaccttcagctgcgaccccggctacaccctgagcgacgacgagcccctggtgtgcgagagaaaccaccagtggaaccacgccctgcccagctgcgacgccctgtgcggcggctacatccagggcaagagcggcaccgtgctgagccccggcttccccgacttctaccccaacagcctgaactgcacctggaccatcgaggtgagccacggcaagggcgtgcagatgatcttccacaccttccacctggagagcagccacgactacctgctgatcaccgaggacggcagcttcagcgagcccgtggccagactgaccggcagcgtgctgccccacaccatcaaggccggcctgttcggcaacttcaccgcccagctgagattcatcagcgacttcagcatcagctacgagggcttcaacatcaccttcagcgagtacgacctggagccctgcgacgaccccggcgtgcccgccttcagcagaagaatcggcttccacttcggcgtgggcgacagcctgaccttcagctgcttcctgggctacagactggagggcgccaccaagctgacctgcctgggcggcggcagaagagtgtggagcgcccccctgcccagatgcgtggccgagtgcggcgccagcgtgaagggcaacgagggcaccctgctgagccccaacttccccagcaactacgacaacaaccacgagtgcatctacaagatcgagaccgaggccggcaagggcatccacctgagaaccagaagcttccagctgttcgagggcgacaccctgaaggtgtacgacggcaaggacagcagcagcagacccctgggcaccttcaccaagaacgagctgctgggcctgatcctgaacagcaccagcaaccacctgtggctggagttcaacaccaacggcagcgacaccgaccagggcttccagctgacctacaccagcttcgacctggtgaagtgcgaggaccccggcatccccaactacggctacagaatcagagacgagggccacttcaccgacaccgtggtgctgtacagctgcaaccccggctacgccatgcacggcagcaacaccctgacctgcctgagcggcgacagaagagtgtgggacaagcccctgcccagctgcatcgccgagtgcggcggccagatccacgccgccaccagcggcagaatcctgagccccggctaccccgccccctacgacaacaacctgcactgcacctggatcatcgaggccgaccccggcaagaccatcagcctgcacttcatcgtgttcgacaccgagatggcccacgacatcctgaaggtgtgggacggccccgtggacagcgacatcctgctgaaggagtggagcggcagcgccctgcccgaggacatccacagcaccttcaacagcctgaccctgcagttcgacagcgacttcttcatcagcaagagcggcttcagcatccagttcagcaccagcatcgccgccacctgcaacgaccccggcatgccccagaacggcaccagatacggcgacagcagagaggccggcgacaccgtgaccttccagtgcgaccccggctaccagctgcagggccaggccaagatcacctgcgtgcagctgaacaacagattcttctggcagcccgacccccccacctgcatcgccgcctgcggcggcaacctgaccggccccgccggcgtgatcctgagccccaactacccccagccctacccccccggcaaggagtgcgactggagagtgaaggtgaaccccgacttcgtgatcgccctgatcttcaagagcttcaacatggagcccagctacgacttcctgcacatctacgagggcgaggacagcaacagccccctgatcggcagctaccagggcagccaggcccccgagagaatcgagagcagcggcaacagcctgttcctggccttcagaagcgacgccagcgtgggcctgagcggcttcgccatcgagttcaaggagaagcccagagaggcctgcttcgaccccggcaacatcatgaacggcaccagagtgggcaccgacttcaagctgggcagcaccatcacctaccagtgcgacagcggctacaagatcctggaccccagcagcatcacctgcgtgatcggcgccgacggcaagcccagctgggaccaggtgctgcccagctgcaacgccccctgcggcggccagtacaccggcagcgagggcgtggtgctgagccccaactacccccacaactacaccgccggccagatctgcctgtacagcatcaccgtgcccaaggagttcgtggtgttcggccagttcgcctacttccagaccgccctgaacgacctggccgagctgttcgacggcacccacgcccaggccagactgctgagcagcctgagcggcagccacagcggcgagaccctgcccctggccaccagcaaccagatcctgctgagattcagcgccaagagcggcgccagcgccagaggcttccacttcgtgtaccaggccgtgcccagaaccagcgacacccagtgcagcagcgtgcccgagcccagatacggcagaagaatcggcagcgagttcagcgccggcagcatcgtgagattcgagtgcaaccccggctacctgctgcagggcagcaccgccctgcactgccagagcgtgcccaacgccctggcccagtggaacgacaccatccccagctgcgtggtgccctgcagcggcaacttcacccagagaagaggcaccatcctgagccccggctaccccgagccctacggcaacaacctgaactgcatctggaagatcatcgtgaccgagggcagcggcatccagatccaggtgatcagcttcgccaccgagcagaactgggacagcctggagatccacgacggcggcgacgtgaccgcccccagactgggcagcttcagcggcaccaccgtgcccgccctgctgaacagcaccagcaaccagctgtacctgcacttccagagcgacatcagcgtggccgccgccggcttccacctggagtacaagaccgtgggcctggccgcctgccaggagcccgccctgcccagcaacagcatcaagatcggcgacagatacatggtgaacgacgtgctgagcttccagtgcgagcccggctacaccctgcagggcagaagccacatcagctgcatgcccggcaccgtgagaagatggaactaccccagccccctgtgcatcgccacctgcggcggcaccctgagcaccctgggcggcgtgatcctgagccccggcttccccggcagctaccccaacaacctggactgcacctggagaatcagcctgcccatcggctacggcgcccacatccagttcctgaacttcagcaccgaggccaaccacgacttcctggagatccagaacggcccctaccacaccagccccatgatcggccagttcagcggcaccgacctgcccgccgccctgctgagcaccacccacgagaccctgatccacttctacagcgaccacagccagaacagacagggcttcaagctggcctaccaggcctacgagctgcagaactgccccgaccccccccccttccagaacggctacatgatcaacagcgactacagcgtgggccagagcgtgagcttcgagtgctaccccggctacatcctgatcggccaccccgtgctgacctgccagcacggcatcaacagaaactggaactaccccttccccagatgcgacgccccctgcggctacaacgtgaccagccagaacggcaccatctacagccccggcttccccgacgagtaccccatcctgaaggactgcatctggctgatcaccgtgccccccggccacggcgtgtacatcaacttcaccctgctgcagaccgaggccgtgaacgactacatcgccgtgtgggacggccccgaccagaacagcccccagctgggcgtgttcagcggcaacaccgccctggagaccgcctacagcagcaccaaccaggtgctgctgaagttccacagcgacttcagcaacggcggcttcttcgtgctgaacttccacgccttccagctgaagaagtgccagcccccccccgccgtgccccaggccgagatgctgaccgaggacgacgacttcgagatcggcgacttcgtgaagtaccagtgccaccccggctacaccctggtgggcaccgacatcctgacctgcaagctgagcagccagctgcagttcgagggcagcctgcccacctgcgaggcccagtgccccgccaacgaggtgagaaccggcagcagcggcgtgatcctgagccccggctaccccggcaactacttcaacagccagacctgcagctggagcatcaaggtggagcccaactacaacatcaccatcttcgtggacaccttccagagcgagaagcagttcgacgccctggaggtgttcgacggcagcagcggccagagccccctgctggtggtgctgagcggcaaccacaccgagcagagcaacttcaccagcagaagcaaccagctgtacctgagatggagcaccgaccacgccaccagcaagaagggcttcaagatcagatacgccgccccctactgcagcctgacccaccccctgaagaacggcggcatcctgaacagaaccgccggcgccgtgggcagcaaggtgcactacttctgcaagcccggctacagaatggtgggccacagcaacgccacctgcagaagaaaccccctgggcatgtaccagtgggacagcctgacccccctgtgccaggccgtgagctgcggcatccccgagagccccggcaacggcagcttcaccggcaacgagttcaccctggacagcaaggtggtgtacgagtgccacgagggcttcaagctggagagcagccagcaggccaccgccgtgtgccaggaggacggcctgtggagcaacaagggcaagccccccacctgcaagcccgtggcctgccccagcatcgaggcccagctgagcgagcacgtgatctggagactggtgagcggcagcctgaacgagtacggcgcccaggtgctgctgagctgcagccccggctactacctggagggctggagactgctgagatgccaggccaacggcacctggaacatcggcgacgagagacccagctgcagagccggccactgcggcagccccgaccccatcgtgaacggccacatcagcggcgacggcttcagctacagagacaccgtggtgtaccagtgcaaccccggcttcagactggtgggcaccagcgtgagaatctgcctgcaggaccacaagtggagcggccagacccccgtgtgcgtgcccatcacctgcggccaccccggcaaccccgcccacggcttcaccaacggcagcgagttcaacctgaacgacgtggtgaacttcacctgcaacaccggctacctgctgcagggcgtgagcagagcccagtgcagaagcaacggccagtggagcagccccctgcccacctgcagagtggtgaactgcagcgaccccggcttcgtggagaacgccatcagacacggccagcagaacttccccgagagcttcgagtacggcatgagcatcctgtaccactgcaagaagggcttctacctgctgggcagcagcgccctgacctgcatggccaacggcctgtgggacagaagcctgcccaagtgcctggccatcagctgcggccaccccggcgtgcccgccaacgccgtgctgaccggcgagctgttcacctacggcgccgtggtgcactacagctgcagaggcagcgagagcctgatcggcaacgacaccagagtgtgccaggaggacagccactggagcggcgccctgccccactgcaccggcaacaaccccggcttctgcggcgaccccggcacccccgcccacggcagcagactgggcgacgacttcaagaccaagagcctgctgagattcagctgcgagatgggccaccagctgagaggcagccccgagagaacctgcctgctgaacggcagctggagcggcctgcagcccgtgtgcgaggccgtgctgtgcccccagcccccccccgtgcagaacggcaccgtggagggcagcgacttcagatggggcagcagcatcagctacagctgcatggacggctaccagctgagccacagcgccatcctgagctgcgagggcagaggcgtgtggaagggcgagatcccccagtgcctgcccgtgttctgcggcgaccccggcatccccgccgagggcagactgagcggcaagagcttcacctacaagagcgaggtgttcttccagtgcaagagccccttcatcctggtgggcagcagcagaagagtgtgccaggccgacggcacctggagcggcatccagcccacctgcatcgaccccgcccacaacacctgccccgaccccggcaccccccacttcggcatccagaacagcagcagaggctacgaggtgggcagcaccgtgttcttcagatgcagaaagggctaccacatccagggcagcaccaccagaacctgcctggccaacctgacctggagcggcatccagaccgagtgcatcccccacgcctgcagacagcccgagacccccgcccacgccgacgtgagagccatcgacctgcccaccttcggctacaccctggtgtacacctgccaccccggcttcttcctggccggcggcagcgagcacagaacctgcaaggccgacatgaagtggaccggcaagagccccgtgtgcaagagcaagggcgtgagagaggtgaacgagaccgtgaccaagacccccgtgcccagcgacgtgttcttcgtgaacagcctgtggaagggctactacgagtacctgggcaagagacagcccgccaccctgaccgtggactggttcaacgccaccagcagcaaggtgaacgccaccttcagcgaggccagccccgtggagctgaagctgaccggcatctacaagaaggaggaggcccacctgctgctgaaggccttccagatcaagggccaggccgacatcttcgtgagcaagttcgagaacgacaactggggcctggacggctacgtgagcagcggcctggagagaggcggcttcaccttccagggcgacatccacggcaaggacttcggcaagttcaagctggagagacaggaccccctgaaccccgaccaggacagcagcagccactaccacggcaccagcagcggcagcgtggccgccgccatcctggtgcccttcttcgccctgatcctgagcggcttcgccttctacctgtacaagcacagaaccagacccaaggtgcagtacaacggctacgccggccacgagaacagcaacggccaggccagcttcgagaaccccatgtacgacaccaacctgaagcccaccgaggccaaggccgtgagattcgacaccaccctgaacaccgtgtgcaccgtggtgtag

SEQ ID NO: 77913 - DNA, 10464 bp, synthetic construct
  misc_feature 1..10464: note = Description of Artificial Sequence: Synthetic coding sequence
  source 1..10464: mol_type = other DNA
atgagactgatcagcatcgcccccggccccagatggcaggtgcagagccaccaccccagaagcgccggccagaactgcaccttccagctgcacggccccaacggcaccgtggagagccccggcttcccctacggctaccccaactacgccaactgcacctggaccatcaccgccgaggagcagcacagaatccagctggtgttccagagcttcgccctggaggaggacttcgacgtgctgagcgtgttcgacggccccccccagcccgagaacctgagaaccagactgaccggcttccagctgcccgccaccatcgtgagcgccgccaccaccctgagcctgagactgatcagcgactacgccgtgagcgcccagggcttccacgccacctacgaggtgctgcccagccacacctgcggcaaccccggcagactgcccaacggcatccagcagggcagcaccttcaacctgggcgacaaggtgagatacagctgcaacctgggcttcttcctggagggccacgccgtgctgacctgccacgccggcagcgagaacagcgccacctgggacttccccctgcccagctgcagagccgacgacgcctgcggcggcaccctgagaggccagagcggcatcatcagcagcccccacttccccagcgagtaccacaacaacgccgactgcacctggaccatcctggccgagctgggcgacaccatcgccctggtgttcatcgacttccagctggaggacggctacgacttcctggaggtgaccggcaccgagggcagcagcctgtggttcaccggcgccagcctgcccgcccccgtgatcagcagcaagaactggctgagactgcacttcaccagcgacggcaaccacagacagagaggcttcagcgcccagtaccaggtgaagaagcagatcgagctgaagagcagaggcgtgaagctgatgcccagcaaggacaacagccagaagaccagcgtgctgacccaggtgggcgtgagccagggccacaacatgtgccccgaccccggcatccccgagagaggcaagagactgggcagcgacttcagactgggcagcagcgtgcagttcacctgcaacgagggctacgacctgcagggcagcaagagaatcacctgcatgaaggtgagcgacatgttcgccgcctggagcgaccacagacccgtgtgcagagccagaatgtgcgacgcccacctgagaggccccagcggcatcatcaccagccccaacttccccatccagtacgacaacaacgcccactgcgtgtggatcatcaccgccctgaaccccagcaaggtgatcaagctggccttcgaggagttcgacctggagagaggctacgacaccctgaccgtgggcgacggcggccaggacggcgaccagaagaccgtgctgtacatcctgaccggcaccagcgtgcccgacctgatcgtgagcaccaaccaccagatgtggctgctgttccagaccgacggcagcggcagcagcctgggcttcaaggccagctacgaggagatcgagcagggcagctgcggcgaccccggcatccccgcctacggcagaagagagggcagcagattccaccacggcgacaccctgaagttcgagtgccagcccgccttcgagctggtgggccagaaggccatcacctgccagaagaacaaccagtggagcgccaagaagcccggctgcgtgttcagctgcttcttcaacttcaccagccccagcggcgtggtgctgagccccaactaccccgaggactacggcaaccacctgcactgcgtgtggctgatcctggccagacccgagagcagaatccacctggccttcaacgacatcgacgtggagccccagttcgacttcctggtgatcaaggacggcgccaccgccgaggcccccgtgctgggcaccttcagcggcaaccagctgcccagcagcatcaccagcagcggccacgtggccagactggagttccagaccgaccacagcaccggcaagagaggcttcaacatcaccttcaccaccttcagacacaacgagtgccccgaccccggcgtgcccgtgaacggcaagagattcggcgacagcctgcagctgggcagcagcatcagcttcctgtgcgacgagggcttcctgggcacccagggcagcgagaccatcacctgcgtgctgaaggagggcagcgtggtgtggaacagcgccgtgctgagatgcgaggccccctgcggcggccacctgaccagccccagcggcaccatcctgagccccggctggcccggcttctacaaggacgccctgagctgcgcctgggtgatcgaggcccagcccggctaccccatcaagatcaccttcgacagattcaagaccgaggtgaactacgacaccctggaggtgagagacggcagaacctacagcgcccccctgatcggcgtgtaccacggcacccaggtgccccagttcctgatcagcaccagcaactacctgtacctgctgttcagcaccgacaagagccacagcgacatcggcttccagctgagatacgagaccatcaccctgcagagcgaccactgcctggaccccggcatccccgtgaacggccagagacacggcaacgacttctacgtgggcgccctggtgaccttcagctgcgacagcggctacaccctgagcgacggcgagcccctggagtgcgagcccaacttccagtggagcagagccctgcccagctgcgaggccctgtgcggcggcttcatccagggcagcagcggcaccatcctgagccccggcttccccgacttctaccccaacaacctgaactgcacctggatcatcgagaccagccacggcaagggcgtgttcttcaccttccacaccttccacctggagagcggccacgactacctgctgatcaccgagaacggcagcttcacccagcccctgagacagctgaccggcagcagactgcccgcccccatcagcgccggcctgtacggcaacttcaccgcccaggtgagattcatcagcgacttcagcatgagctacgagggcttcaacatcaccttcagcgagtacgacctggagccctgcgaggagcccgaggtgcccgcctacagcatcagaaagggcctgcagttcggcgtgggcgacaccctgaccttcagctgcttccccggctacagactggagggcaccgccagaatcacctgcctgggcggcagaagaagactgtggagcagccccctgcccagatgcgtggccgagtgcggcaacagcgtgaccggcacccagggcaccctgctgagccccaacttccccgtgaactacaacaacaaccacgagtgcatctacagcatccagacccagcccggcaagggcatccagctgaaggccagagccttcgagctgagcgagggcgacgtgctgaaggtgtacgacggcaacaacaacagcgccagactgctgggcgtgttcagccacagcgagatgatgggcgtgaccctgaacagcaccagcagcagcctgtggctggacttcatcaccgacgccgagaacaccagcaagggcttcgagctgcacttcagcagcttcgagctgatcaagtgcgaggaccccggcacccccaagttcggctacaaggtgcacgacgagggccacttcgccggcagcagcgtgagcttcagctgcgaccccggctacagcctgagaggcagcgaggagctgctgtgcctgagcggcgagagaagaacctgggacagacccctgcccacctgcgtggccgagtgcggcggcaccgtgagaggcgaggtgagcggccaggtgctgagccccggctaccccgccccctacgagcacaacctgaactgcatctggaccatcgaggccgaggccggctgcaccatcggcctgcacttcctggtgttcgacaccgaggaggtgcacgacgtgctgagaatctgggacggccccgtggagagcggcgtgctgctgaaggagctgagcggccccgccctgcccaaggacctgcacagcaccttcaacagcgtggtgctgcagttcagcaccgacttcttcaccagcaagcagggcttcgccatccagttcagcgtgagcaccgccaccagctgcaacgaccccggcatcccccagaacggcagcagaagcggcgacagctgggaggccggcgacagcaccgtgttccagtgcgaccccggctacgccctgcagggcagcgccgagatcagctgcgtgaagatcgagaacagattcttctggcagcccagcccccccacctgcatcgccccctgcggcggcgacctgaccggccccagcggcgtgatcctgagccccaactaccccgagccctacccccccggcaaggagtgcgactggaaggtgaccgtgagccccgactacgtgatcgccctggtgttcaacatcttcaacctggagcccggctacgacttcctgcacatctacgacggcagagacagcctgagccccctgatcggcagcttctacggcagccagctgcccggcagaatcgagagcagcagcaacagcctgttcctggccttcagaagcgacgccagcgtgagcaacgccggcttcgtgatcgactacaccgagaaccccagagagagctgcttcgaccccggcagcatcaagaacggcaccagagtgggcagcgacctgaagctgggcagcagcgtgacctactactgccacggcggctacgaggtggagggcaccagcaccctgagctgcatcctgggccccgacggcaagcccgtgtggaacaaccccagacccgtgtgcaccgccccctgcggcggccagtacgtgggcagcgacggcgtggtgctgagccccaactacccccagaactacaccagcggccagatctgcctgtacttcgtgaccgtgcccaaggactacgtggtgttcggccagttcgccttcttccacaccgccctgaacgacgtggtggaggtgcacgacggccacagccagcacagcagactgctgagcagcctgagcggcagccacaccggcgagagcctgcccctggccaccagcaaccaggtgctgatcaagttcagcgccaagggcctggcccccgccagaggcttccacttcgtgtaccaggccgtgcccagaaccagcgccacccagtgcagcagcgtgcccgagcccagatacggcaagagactgggcagcgacttcagcgtgggcgccatcgtgagattcgagtgcaacagcggctacgccctgcagggcagccccgagatcgagtgcctgcccgtgcccggcgccctggcccagtggaacgtgagcgcccccacctgcgtggtgccctgcggcggcaacctgaccgagagaagaggcaccatcctgagccccggcttccccgagccctacctgaacagcctgaactgcgtgtggaagatcgtggtgcccgagggcgccggcatccagatccaggtggtgagcttcgtgaccgagcagaactgggacagcctggaggtgttcgacggcgccgacaacaccgtgaccatgctgggcagcttcagcggcaccaccgtgcccgccctgctgaacagcaccagcaaccagctgtacctgcacttctacagcgacatcagcgtgagcgccgccggcttccacctggagtacaagaccgtgggcctgagcagctgccccgagcccgccgtgcccagcaacggcgtgaagaccggcgagagatacctggtgaacgacgtggtgagcttccagtgcgagcccggctacgccctgcagggccacgcccacatcagctgcatgcccggcaccgtgagaagatggaactaccccccccccctgtgcatcgcccagtgcggcggcaccgtggaggagatggagggcgtgatcctgagccccggcttccccggcaactaccccagcaacatggactgcagctggaagatcgccctgcccgtgggcttcggcgcccacatccagttcctgaacttcagcaccgagcccaaccacgactacatcgagatcagaaacggcccctacgagaccagcagaatgatgggcagattcagcggcagcgagctgcccagcagcctgctgagcaccagccacgagaccaccgtgtacttccacagcgaccacagccagaacagacccggcttcaagctggagtaccaggacctgacctacagccaccagatcagcagcttcctgagaggcttcgacctgagcgagctggagagaaccaacagcaccccccccgtggccgccagctacgtgtgggacctggaccccggctgcgaggcctacgagctgcaggagtgccccgaccccgagcccttcgccaacggcatcgtgagaggcgccggctacaacgtgggccagagcgtgaccttcgagtgcctgcccggctaccagctgaccggccaccccgtgctgacctgccagcacggcaccaacagaaactgggaccaccccctgcccaagtgcgaggtgccctgcggcggcaacatcaccagcagcaacggcaccgtgtacagccccggcttccccagcccctacagcagcagccaggactgcgtgtggctgatcaccgtgcccatcggccacggcgtgagactgaacctgagcctgctgcagaccgagcccagcggcgacttcatcaccatctgggacggcccccagcagaccgcccccagactgggcgtgttcaccagaagcatggccaagaagaccgtgcagagcagcagcaaccaggtgctgctgaagttccacagagacgccgccaccggcggcatcttcgccatcgccttcagcgcctaccccctgaccaagtgccccccccccaccatcctgcccaacgccgaggtggtgaccgagaacgaggagttcaacatcggcgacatcgtgagatacagatgcctgcccggcttcaccctggtgggcaacgagatcctgacctgcaagctgggcacctacctgcagttcgagggccccccccccatctgcgaggtgcactgccccaccaacgagctgctgaccgacagcaccggcgtgatcctgagccagagctaccccggcagctacccccagttccagacctgcagctggctggtgagagtggagcccgactacaacatcagcctgaccgtggagtacttcctgagcgagaagcagtacgacgagttcgagatcttcgacggccccagcggccagagccccctgctgaaggccctgagcggcaactacagcgcccccctgatcgtgaccagcagcagcaacagcgtgtacctgagatggagcagcgaccacgcctacaacagaaagggcttcaagatcagatacagcgccccctactgcagcctgcccagagcccccctgcacggcttcatcctgggccagaccagcacccagcccggcggcagcatccacttcggctgcaacgccggctacagactggtgggccacagcatggccatctgcaccagacacccccagggctaccacctgtggagcgaggccatccccctgtgccaggccctgagctgcggcctgcccgaggcccccaagaacggcatggtgttcggcaaggagtacaccgtgggcaccaaggccatgtacagctgcagcgagggctaccacctgcaggccggcgccgaggccaccgccgagtgcctggacaccggcctgtggagcaacagaaacgtgcccccccagtgcgtgcccgtgacctgccccgacgtgagcagcatcagcgtggagcacggcagatggagactgatcttcgagacccagtaccagttccaggcccagctgatgctgatctgcgaccccggctactactacaccggccagagagtgatcagatgccaggccaacggcaagtggagcctgggcgacagcacccccacctgcagaatcatcagctgcggcgagctgcccatcccccccaacggccacagaatcggcaccctgagcgtgtacggcgccaccgccatcttcagctgcaacagcggctacaccctggtgggcagcagagtgagagagtgcatggccaacggcctgtggagcggcagcgaggtgagatgcctggccggccactgcggcacccccgagcccatcgtgaacggccacatcaacggcgagaactacagctacagaggcagcgtggtgtaccagtgcaacgccggcttcagactgatcggcatgagcgtgagaatctgccagcaggaccaccactggagcggcaagacccccttctgcgtgctggtgagctgcggccaccccggcagccccccccacagccagatgagcggcgacagctacaccgtgggcgccgtggtgagatacagctgcatcggcaagagaaccctggtgggcaacagcaccagaatgtgcggcctggacggccactggaccggcagcctgccccactgcagcggcaccagcgtgggcgtgtgcggcgaccccggcatccccgcccacggcatcagactgggcgacagcttcgaccccggcaccgtgatgagattcagctgcgaggccggccacgtgctgagaggcagcagcgagagaacctgccaggccaacggcagctggagcggcagccagcccgagtgcggcgtgatcagctgcggcaaccccggcacccccagcaacgccagagtggtgttcagcgacggcctggtgttcagcagcagcatcgtgtacgagtgcagagagggctactacgccaccggcctgctgagcagacactgcagcgtgaacggcacctggaccggcagcgaccccgagtgcctggtgatcaactgcggcgaccccggcatccccgccaacggcctgagactgggcaacgacttcagatacaacaagaccgtgacctaccagtgcgtgcccggctacatgatggagagccacagagtgagcgtgctgagctgcaccaaggacagaacctggaacggcaccaagcccgtgtgcaaggccctgatgtgcaagcccccccccctgatccccaacggcaaggtggtgggcagcgacttcatgtggggcagcagcgtgacctacgcctgcctggagggctaccagctgagcctgcccgccgtgttcacctgcgagggcaacggcagctggaccggcgagctgccccagtgcttccccgtgttctgcggcgaccccggcgtgcccagcagaggcagaagagaggacagaggcttcagctacagaagcagcgtgagcttcagctgccacccccccctggtgctggtgggcagccccagaagattctgccagagcgacggcacctggagcggcacccagcccagctgcatcgaccccaccctgaccacctgcgccgaccccggcgtgccccagttcggcatccagaacaacagccagggctaccaggtgggcagcaccgtgctgttcagatgccagaagggctacctgctgcagggcagcaccaccagaacctgcctgcccaacctgacctggagcggcaccccccccgactgcgtgccccaccactgcagacagcccgagacccccacccacgccaacgtgggcgccctggacctgcccagcatgggctacaccctgatctacagctgccaggagggcttcagcctgaagggcggcagcgagcacagaacctgcaaggccgacggcagctggaccggcaagccccccatctgcctggaggtgagacccagcggcagacccatcaacaccgccagagagccccccctgacccaggccctgatccccggcgacgtgttcgccaagaacagcctgtggaagggcgcctacgagtaccagggcaagaagcagcccgccatgctgagagtgaccggcttccaggtggccaacagcaaggtgaacgccaccatgatcgaccacagcggcgtggagctgcacctggccggcacctacaagaaggaggacttccacctgctgctgcaggtgtaccagatcaccggccccgtggagatcttcatgaacaagttcaaggacgaccactgggccctggacggccacgtgagcagcgagagcagcggcgccaccttcatctaccagggcagcgtgaagggccagggcttcggccagttcggcttccagagactggacctgagactgctggagagcgaccccgagagcatcggcagacacttcgccagcaacagcagcagcgtggccgccgccatcctggtgcccttcatcgccctgatcatcgccggcttcgtgctgtacctgtacaagcacagaagaagacccaaggtgcccttcaacggctacgccggccacgagaacaccaacgtgagagccaccttcgagaaccccatgtacgacagaaacatccagcccaccgacatcatggccagcgaggccgagttcaccgtgagcaccgtgtgcaccgccgtgtag

SEQ ID NO: 77914 - DNA, 678 bp, synthetic construct
  misc_feature 1..678: note = Description of Artificial Sequence: Synthetic coding sequence
  source 1..678: mol_type = other DNA
atgtgcgacgcccacctgagaggccccagcggcatcatcaccagccccaacttccccatccagtacgacaacaacgcccactgcgtgtggatcatcaccgccctgaaccccagcaaggccggcggcgaccccggcaacatccagtgcaacaaggagggcctgagcgtggagacccagagcctgagactgagaaacagaagctgcctgctgggcaacagcaaggacaacggctgctgcgtgcccaaccccgtgcacggcaccggcctgcaggtgatcaagctggccttcgaggagttcgacctggagagaggctacgacaccctgaccgtgggcgacggcggccaggacggcgaccagaagaccgtgctgtacatcctgaccggcaccagcgtgcccgacctgatcgtgagcaccaaccaccagatgtggctgctgttccagaccgacggcagcggcagcagcctgggcttcaaggccagctacgaggagatcgagcagggcagctgcggcgaccccggcatccccgcctacggcagaagagagggcagcagattccaccacggcgacaccctgaagttcgagtgccagcccgccttcgagctggtgggccagaaggccatcacctgccagaagaacaaccagtggagcgccaagaagcccggctgcgtgtgcaagtag

SEQ ID NO: 77915 - DNA, 1281 bp, synthetic construct
  misc_feature 1..1281: note = Description of Artificial Sequence: Synthetic coding sequence
  source 1..1281: mol_type = other DNA
atgctgggcagcttcagcggcaccaccgtgcccgccctgctgaacagcaccagcaaccagctgtacctgcacttctacagcgacatcagcgtgagcgccgccggcttccacctggagtacaagaccgtgggcctgagcagctgccccgagcccgccgtgcccagcaacggcgtgaagaccggcgagagatacctggtgaacgacgtggtgagcttccagtgcgagcccggctacgccctgcagggccacgcccacatcagctgcatgcccggcaccgtgagaagatggaactaccccccccccctgtgcatcgcccagtgcggcggcaccgtggaggagatggagggcgtgatcctgagccccggcttccccggcaactaccccagcaacatggactgcagctggaagatcgccctgcccgtgggcttcggcgcccacatccagttcctgaacttcagcaccgagcccaaccacgactacatcgagatcagaaacggcccctacgagaccagcagaatgatgggcagattcagcggcagcgagctgcccagcagcctgctgagcaccagccacgagaccaccgtgtacttccacagcgaccacagccagaacagacccggcttcaagctggagtaccaggcctacgagctgcaggagtgccccgaccccgagcccttcgccaacggcatcgtgagaggcgccggctacaacgtgggccagagcgtgaccttcgagtgcctgcccggctaccagctgaccggccaccccgtgctgacctgccagcacggcaccaacagaaactgggaccaccccctgcccaagtgcgaggtgccctgcggcggcaacatcaccagcagcaacggcaccgtgtacagccccggcttccccagcccctacagcagcagccaggactgcgtgtggctgatcaccgtgcccatcggccacggcgtgagactgaacctgagcctgctgcagaccgagcccagcggcgacttcatcaccatctgggacggcccccagcagaccgcccccagactgggcgtgttcaccagaagcatggccaagaagaccgtgcagagcagcagcaaccaggtgctgctgaagttccacagagacgccgccaccggcggcatcttcgccatcgccttcagcgaccactgcagatacttcaaccagaagagcggcaagctggacttcacccccagcagcaccctgggccagctgtgcaagaccctgcacagaagcctgccccacctgagactgcagttcctgcacctgtag

SEQ ID NO: 77916 - DNA, 3504 bp, synthetic construct
  misc_feature 1..3504: note = Description of Artificial Sequence: Synthetic coding sequence
  source 1..3504: mol_type = other DNA
atggtgatcgtgatcctgttccccgccgagtgcggcaacagcgtgaccggcacccagggcaccctgctgagccccaacttccccgtgaactacaacaacaaccacgagtgcatctacagcatccagacccagcccggcaagggcatccagctgaaggccagagccttcgagctgagcgagggcgacgtgctgaaggtgtacgacggcaacaacaacagcgccagactgctgggcgtgttcagccacagcgagatgatgggcgtgaccctgaacagcaccagcagcagcctgtggctggacttcatcaccgacgccgagaacaccagcaagggcttcgagctgcacttcagcagcttcgagctgatcaagtgcgaggaccccggcacccccaagttcggctacaaggtgcacgacgagggccacttcgccggcagcagcgtgagcttcagctgcgaccccggctacagcctgagaggcagcgaggagctgctgtgcctgagcggcgagagaagaacctgggacagacccctgcccacctgcgtggccgagtgcggcggcaccgtgagaggcgaggtgagcggccaggtgctgagccccggctaccccgccccctacgagcacaacctgaactgcatctggaccatcgaggccgaggccggctgcaccatcggcctgcacttcctggtgttcgacaccgaggaggtgcacgacgtgctgagaatctgggacggccccgtggagagcggcgtgctgctgaaggagctgagcggccccgccctgcccaaggacctgcacagcaccttcaacagcgtggtgctgcagttcagcaccgacttcttcaccagcaagcagggcttcgccatccagttcagcgtgagcaccgccaccagctgcaacgaccccggcatcccccagaacggcagcagaagcggcgacagctgggaggccggcgacagcaccgtgttccagtgcgaccccggctacgccctgcagggcagcgccgagatcagctgcgtgaagatcgagaacagattcttctggcagcccagcccccccacctgcatcgccccctgcggcggcgacctgaccggccccagcggcgtgatcctgagccccaactaccccgagccctacccccccggcaaggagtgcgactggaaggtgaccgtgagccccgactacgtgatcgccctggtgttcaacatcttcaacctggagcccggctacgacttcctgcacatctacgacggcagagacagcctgagccccctgatcggcagcttctacggcagccagctgcccggcagaatcgagagcagcagcaacagcctgttcctggccttcagaagcgacgccagcgtgagcaacgccggcttcgtgatcgactacaccgagaaccccagagagagctgcttcgaccccggcagcatcaagaacggcaccagagtgggcagcgacctgaagctgggcagcagcgtgacctactactgccacggcggctacgaggtggagggcaccagcaccctgagctgcatcctgggccccgacggcaagcccgtgtggaacaaccccagacccgtgtgcaccgccccctgcggcggccagtacgtgggcagcgacggcgtggtgctgagccccaactacccccagaactacaccagcggccagatctgcctgtacttcgtgaccgtgcccaaggactacgtggtgttcggccagttcgccttcttccacaccgccctgaacgacgtggtggaggtgcacgacggccacagccagcacagcagactgctgagcagcctgagcggcagccacaccggcgagagcctgcccctggccaccagcaaccaggtgctgatcaagttcagcgccaagggcctggcccccgccagaggcttccacttcgtgtaccaggccgtgcccagaaccagcgccacccagtgcagcagcgtgcccgagcccagatacggcaagagactgggcagcgacttcagcgtgggcgccatcgtgagattcgagtgcaacagcggctacgccctgcagggcagccccgagatcgagtgcctgcccgtgcccggcgccctggcccagtggaacgtgagcgcccccacctgcgtggtgccctgcggcggcaacctgaccgagagaagaggcaccatcctgagccccggcttccccgagccctacctgaacagcctgaactgcgtgtggaagatcgtggtgcccgagggcgccggcatccagatccaggtggtgagcttcgtgaccgagcagaactgggacagcctggaggtgttcgacggcgccgacaacaccgtgaccatgctgggcagcttcagcggcaccaccgtgcccgccctgctgaacagcaccagcaaccagctgtacctgcacttctacagcgacatcagcgtgagcgccgccggcttccacctggagtacaagaccgtgggcctgagcagctgccccgagcccgccgtgcccagcaacggcgtgaagaccggcgagagatacctggtgaacgacgtggtgagcttccagtgcgagcccggctacgccctgcagggccacgcccacatcagctgcatgcccggcaccgtgagaagatggaactaccccccccccctgtgcatcgcccagtgcggcggcaccgtggaggagatggagggcgtgatcctgagccccggcttccccggcaactaccccagcaacatggactgcagctggaagatcgccctgcccgtgggcttcggcgcccacatccagttcctgaacttcagcaccgagcccaaccacgactacatcgagatcagaaacggcccctacgagaccagcagaatgatgggcagattcagcggcagcgagctgcccagcagcctgctgagcaccagccacgagaccaccgtgtacttccacagcgaccacagccagaacagacccggcttcaagctggagtaccaggcctacgagctgcaggagtgccccgaccccgagcccttcgccaacggcatcgtgagaggcgccggctacaacgtgggccagagcgtgaccttcgagtgcctgcccggctaccagctgaccggccaccccgtgctgacctgccagcacggcaccaacagaaactgggaccaccccctgcccaagtgcgaggtgccctgcggcggcaacatcaccagcagcaacggcaccgtgtacagccccggcttccccagcccctacagcagcagccaggactgcgtgtggctgatcaccgtgcccatcggccacggcgtgagactgaacctgagcctgctgcagaccgagcccagcggcgacttcatcaccatctgggacggcccccagcagaccgcccccagactgggcgtgttcaccagaagcatggccaagaagaccgtgcagagcagcagcaaccaggtgctgctgaagttccacagagacgccgccaccggcggcatcttcgccatcgccttcagcggccacctggccgccgtgtgcaccctgtag

SEQ ID NO: 77917 - DNA, 10896 bp, synthetic construct
  misc_feature 1..10896: note = Description of Artificial Sequence: Synthetic coding sequence
  source 1..10896: mol_type = other DNA
atgcccagaagcagaggcagagagctgggcagatgcggctgccccgccggcagagccagaggcgagaccggcatcagcgccctggtgcccggcgccggcagcagatggggcagaccccccccccccacccccccccccctgctgctgctgctgggctgcggcctgctgagcgtgagcgccgccgccggccagaactgcaccttccagctgcacggccccaacggcaccgtggagagccccggcttcccctacggctaccccaactacgccaactgcacctggaccatcaccgccgaggagcagcacagaatccagctggtgttccagagcttcgccctggaggaggacttcgacgtgctgagcgtgttcgacggccccccccagcccgagaacctgagaaccagactgaccggcttccagctgcccgccaccatcgtgagcgccgccaccaccctgagcctgagactgatcagcgactacgccgtgagcgcccagggcttccacgccacctacgaggtgctgcccagccacacctgcggcaaccccggcagactgcccaacggcatccagcagggcagcaccttcaacctgggcgacaaggtgagatacagctgcaacctgggcttcttcctggagggccacgccgtgctgacctgccacgccggcagcgagaacagcgccacctgggacttccccctgcccagctgcagagccgacgacgcctgcggcggcaccctgagaggccagagcggcatcatcagcagcccccacttccccagcgagtaccacaacaacgccgactgcacctggaccatcctggccgagctgggcgacaccatcgccctggtgttcatcgacttccagctggaggacggctacgacttcctggaggtgaccggcaccgagggcagcagcctgtggttcaccggcgccagcctgcccgcccccgtgatcagcagcaagaactggctgagactgcacttcaccagcgacggcaaccacagacagagaggcttcagcgcccagtaccaggtgaagaagcagatcgagctgaagagcagaggcgtgaagctgatgcccagcaaggacaacagccagaagaccagcgtgctgacccaggtgggcgtgagccagggccacaacatgtgccccgaccccggcatccccgagagaggcaagagactgggcagcgacttcagactgggcagcagcgtgcagttcacctgcaacgagggctacgacctgcagggcagcaagagaatcacctgcatgaaggtgagcgacatgttcgccgcctggagcgaccacagacccgtgtgcagagccagaatgtgcgacgcccacctgagaggccccagcggcatcatcaccagccccaacttccccatccagtacgacaacaacgcccactgcgtgtggatcatcaccgccctgaaccccagcaaggtgatcaagctggccttcgaggagttcgacctggagagaggctacgacaccctgaccgtgggcgacggcggccaggacggcgaccagaagaccgtgctgtacatcctgaccggcaccagcgtgcccgacctgatcgtgagcaccaaccaccagatgtggctgctgttccagaccgacggcagcggcagcagcctgggcttcaaggccagctacgaggagatcgagcagggcagctgcggcgaccccggcatccccgcctacggcagaagagagggcagcagattccaccacggcgacaccctgaagttcgagtgccagcccgccttcgagctggtgggccagaaggccatcacctgccagaagaacaaccagtggagcgccaagaagcccggctgcgtgttcagctgcttcttcaacttcaccagccccagcggcgtggtgctgagccccaactaccccgaggactacggcaaccacctgcactgcgtgtggctgatcctggccagacccgagagcagaatccacctggccttcaacgacatcgacgtggagccccagttcgacttcctggtgatcaaggacggcgccaccgccgaggcccccgtgctgggcaccttcagcggcaaccagctgcccagcagcatcaccagcagcggccacgtggccagactggagttccagaccgaccacagcaccggcaagagaggcttcaacatcaccttcaccaccttcagacacaacgagtgccccgaccccggcgtgcccgtgaacggcaagagattcggcgacagcctgcagctgggcagcagcatcagcttcctgtgcgacgagggcttcctgggcacccagggcagcgagaccatcacctgcgtgctgaaggagggcagcgtggtgtggaacagcgccgtgctgagatgcgaggccccctgcggcggccacctgaccagccccagcggcaccatcctgagccccggctggcccggcttctacaaggacgccctgagctgcgcctgggtgatcgaggcccagcccggctaccccatcaagatcaccttcgacagattcaagaccgaggtgaactacgacaccctggaggtgagagacggcagaacctacagcgcccccctgatcggcgtgtaccacggcacccaggtgccccagttcctgatcagcaccagcaactacctgtacctgctgttcagcaccgacaagagccacagcgacatcggcttccagctgagatacgagaccatcaccctgcagagcgaccactgcctggaccccggcatccccgtgaacggccagagacacggcaacgacttctacgtgggcgccctggtgaccttcagctgcgacagcggctacaccctgagcgacggcgagcccctggagtgcgagcccaacttccagtggagcagagccctgcccagctgcgaggccctgtgcggcggcttcatccagggcagcagcggcaccatcctgagccccggcttccccgacttctaccccaacaacctgaactgcacctggatcatcgagaccagccacggcaagggcgtgttcttcaccttccacaccttccacctggagagcggccacgactacctgctgatcaccgagaacggcagcttcacccagcccctgagacagctgaccggcagcagactgcccgcccccatcagcgccggcctgtacggcaacttcaccgcccaggtgagattcatcagcgacttcagcatgagctacgagggcttcaacatcaccttcagcgagtacgacctggagccctgcgaggagcccgaggtgcccgcctacagcatcagaaagggcctgcagttcggcgtgggcgacaccctgaccttcagctgcttccccggctacagactggagggcaccgccagaatcacctgcctgggcggcagaagaagactgtggagcagccccctgcccagatgcgtggccgagtgcggcaacagcgtgaccggcacccagggcaccctgctgagccccaacttccccgtgaactacaacaacaaccacgagtgcatctacagcatccagacccagcccggcaagggcatccagctgaaggccagagccttcgagctgagcgagggcgacgtgctgaaggtgtacgacggcaacaacaacagcgccagactgctgggcgtgttcagccacagcgagatgatgggcgtgaccctgaacagcaccagcagcagcctgtggctggacttcatcaccgacgccgagaacaccagcaagggcttcgagctgcacttcagcagcttcgagctgatcaagtgcgaggaccccggcacccccaagttcggctacaaggtgcacgacgagggccacttcgccggcagcagcgtgagcttcagctgcgaccccggctacagcctgagaggcagcgaggagctgctgtgcctgagcggcgagagaagaacctgggacagacccctgcccacctgcgtggccgagtgcggcggcaccgtgagaggcgaggtgagcggccaggtgctgagccccggctaccccgccccctacgagcacaacctgaactgcatctggaccatcgaggccgaggccggctgcaccatcggcctgcacttcctggtgttcgacaccgaggaggtgcacgacgtgctgagaatctgggacggccccgtggagagcggcgtgctgctgaaggagctgagcggccccgccctgcccaaggacctgcacagcaccttcaacagcgtggtgctgcagttcagcaccgacttcttcaccagcaagcagggcttcgccatccagttcagcgtgagcaccgccaccagctgcaacgaccccggcatcccccagaacggcagcagaagcggcgacagctgggaggccggcgacagcaccgtgttccagtgcgaccccggctacgccctgcagggcagcgccgagatcagctgcgtgaagatcgagaacagattcttctggcagcccagcccccccacctgcatcgccccctgcggcggcgacctgaccggccccagcggcgtgatcctgagccccaactaccccgagccctacccccccggcaaggagtgcgactggaaggtgaccgtgagccccgactacgtgatcgccctggtgttcaacatcttcaacctggagcccggctacgacttcctgcacatctacgacggcagagacagcctgagccccctgatcggcagcttctacggcagccagctgcccggcagaatcgagagcagcagcaacagcctgttcctggccttcagaagcgacgccagcgtgagcaacgccggcttcgtgatcgactacaccgagaaccccagagagagctgcttcgaccccggcagcatcaagaacggcaccagagtgggcagcgacctgaagctgggcagcagcgtgacctactactgccacggcggctacgaggtggagggcaccagcaccctgagctgcatcctgggccccgacggcaagcccgtgtggaacaaccccagacccgtgtgcaccgccccctgcggcggccagtacgtgggcagcgacggcgtggtgctgagccccaactacccccagaactacaccagcggccagatctgcctgtacttcgtgaccgtgcccaaggactacgtggtgttcggccagttcgccttcttccacaccgccctgaacgacgtggtggaggtgcacgacggccacagccagcacagcagactgctgagcagcctgagcggcagccacaccggcgagagcctgcccctggccaccagcaaccaggtgctgatcaagttcagcgccaagggcctggcccccgccagaggcttccacttcgtgtaccaggccgtgcccagaaccagcgccacccagtgcagcagcgtgcccgagcccagatacggcaagagactgggcagcgacttcagcgtgggcgccatcgtgagattcgagtgcaacagcggctacgccctgcagggcagccccgagatcgagtgcctgcccgtgcccggcgccctggcccagtggaacgtgagcgcccccacctgcgtggtgccctgcggcggcaacctgaccgagagaagaggcaccatcctgagccccggcttccccgagccctacctgaacagcctgaactgcgtgtggaagatcgtggtgcccgagggcgccggcatccagatccaggtggtgagcttcgtgaccgagcagaactgggacagcctggaggtgttcgacggcgccgacaacaccgtgaccatgctgggcagcttcagcggcaccaccgtgcccgccctgctgaacagcaccagcaaccagctgtacctgcacttctacagcgacatcagcgtgagcgccgccggcttccacctggagtacaagaccgtgggcctgagcagctgccccgagcccgccgtgcccagcaacggcgtgaagaccggcgagagatacctggtgaacgacgtggtgagcttccagtgcgagcccggctacgccctgcagggccacgcccacatcagctgcatgcccggcaccgtgagaagatggaactaccccccccccctgtgcatcgcccagtgcggcggcaccgtggaggagatggagggcgtgatcctgagccccggcttccccggcaactaccccagcaacatggactgcagctggaagatcgccctgcccgtgggcttcggcgcccacatccagttcctgaacttcagcaccgagcccaaccacgactacatcgagatcagaaacggcccctacgagaccagcagaatgatgggcagattcagcggcagcgagctgcccagcagcctgctgagcaccagccacgagaccaccgtgtacttccacagcgaccacagccagaacagacccggcttcaagctggagtaccaggcctacgagctgcaggagtgccccgaccccgagcccttcgccaacggcatcgtgagaggcgccggctacaacgtgggccagagcgtgaccttcgagtgcctgcccggctaccagctgaccggccaccccgtgctgacctgccagcacggcaccaacagaaactgggaccaccccctgcccaagtgcgaggtgccctgcggcggcaacatcaccagcagcaacggcaccgtgtacagccccggcttccccagcccctacagcagcagccaggactgcgtgtggctgatcaccgtgcccatcggccacggcgtgagactgaacctgagcctgctgcagaccgagcccagcggcgacttcatcaccatctgggacggcccccagcagaccgcccccagactgggcgtgttcaccagaagcatggccaagaagaccgtgcagagcagcagcaaccaggtgctgctgaagttccacagagacgccgccaccggcggcatcttcgccatcgccttcagcgcctaccccctgaccaagtgccccccccccaccatcctgcccaacgccgaggtggtgaccgagaacgaggagttcaacatcggcgacatcgtgagatacagatgcctgcccggcttcaccctggtgggcaacgagatcctgacctgcaagctgggcacctacctgcagttcgagggccccccccccatctgcgaggtgcactgccccaccaacgagctgctgaccgacagcaccggcgtgatcctgagccagagctaccccggcagctacccccagttccagacctgcagctggctggtgagagtggagcccgactacaacatcagcctgaccgtggagtacttcctgagcgagaagcagtacgacgagttcgagatcttcgacggccccagcggccagagccccctgctgaaggccctgagcggcaactacagcgcccccctgatcgtgaccagcagcagcaacagcgtgtacctgagatggagcagcgaccacgcctacaacagaaagggcttcaagatcagatacagcgccccctactgcagcctgcccagagcccccctgcacggcttcatcctgggccagaccagcacccagcccggcggcagcatccacttcggctgcaacgccggctacagactggtgggccacagcatggccatctgcaccagacacccccagggctaccacctgtggagcgaggccatccccctgtgccaggccctgagctgcggcctgcccgaggcccccaagaacggcatggtgttcggcaaggagtacaccgtgggcaccaaggccatgtacagctgcagcgagggctaccacctgcaggccggcgccgaggccaccgccgagtgcctggacaccggcctgtggagcaacagaaacgtgcccccccagtgcgtgcccgtgacctgccccgacgtgagcagcatcagcgtggagcacggcagatggagactgatcttcgagacccagtaccagttccaggcccagctgatgctgatctgcgaccccggctactactacaccggccagagagtgatcagatgccaggccaacggcaagtggagcctgggcgacagcacccccacctgcagaatcatcagctgcggcgagctgcccatcccccccaacggccacagaatcggcaccctgagcgtgtacggcgccaccgccatcttcagctgcaacagcggctacaccctggtgggcagcagagtgagagagtgcatggccaacggcctgtggagcggcagcgaggtgagatgcctggccacccagaccaagctgcacagcatcttctacaagctgctgttcgacgtgctgagcagccccagcctgaccaaggccggccactgcggcacccccgagcccatcgtgaacggccacatcaacggcgagaactacagctacagaggcagcgtggtgtaccagtgcaacgccggcttcagactgatcggcatgagcgtgagaatctgccagcaggaccaccactggagcggcaagacccccttctgcgtgcccatcacctgcggccaccccggcaaccccgtgaacggcctgacccagggcaaccagttcaacctgaacgacgtggtgaagttcgtgtgcaaccccggctacatggccgagggcgccgccagaagccagtgcctggccagcggccagtggagcgacatgctgcccacctgcagaatcatcaactgcaccgaccccggccaccaggagaacagcgtgagacaggtgcacgccagcggcccccacagattcagcttcggcaccaccgtgagctacagatgcaaccacggcttctacctgctgggcacccccgtgctgagctgccagggcgacggcacctgggacagacccagaccccagtgcctgctggtgagctgcggccaccccggcagccccccccacagccagatgagcggcgacagctacaccgtgggcgccgtggtgagatacagctgcatcggcaagagaaccctggtgggcaacagcaccagaatgtgcggcctggacggccactggaccggcagcctgccccactgcagcggcaccagcgtgggcgtgtgcggcgaccccggcatccccgcccacggcatcagactgggcgacagcttcgaccccggcaccgtgatgagattcagctgcgaggccggccacgtgctgagaggcagcagcgagagaacctgccaggccaacggcagctggagcggcagccagcccgagtgcggcgtgatcagctgcggcaaccccggcacccccagcaacgccagagtggtgttcagcgacggcctggtgttcagcagcagcatcgtgtacgagtgcagagagggctactacgccaccggcctgctgagcagacactgcagcgtgaacggcacctggaccggcagcgaccccgagtgcctggtgatcaactgcggcgaccccggcatccccgccaacggcctgagactgggcaacgacttcagatacaacaagaccgtgacctaccagtgcgtgcccggctacatgatggagagccacagagtgagcgtgctgagctgcaccaaggacagaacctggaacggcaccaagcccgtgtgcaaggccctgatgtgcaagcccccccccctgatccccaacggcaaggtggtgggcagcgacttcatgtggggcagcagcgtgacctacgcctgcctggagggctaccagctgagcctgcccgccgtgttcacctgcgagggcaacggcagctggaccggcgagctgccccagtgcttccccgtgttctgcggcgaccccggcgtgcccagcagaggcagaagagaggacagaggcttcagctacagaagcagcgtgagcttcagctgccacccccccctggtgctggtgggcagccccagaagattctgccagagcgacggcacctggagcggcacccagcccagctgcatcgaccccaccctgaccacctgcgccgaccccggcgtgccccagttcggcatccagaacaacagccagggctaccaggtgggcagcaccgtgctgttcagatgccagaagggctacctgctgcagggcagcaccaccagaacctgcctgcccaacctgacctggagcggcaccccccccgactgcgtgccccaccactgcagacagcccgagacccccacccacgccaacgtgggcgccctggacctgcccagcatgggctacaccctgatctacagctgccaggagggcttcagcctgaagggcggcagcgagcacagaacctgcaaggccgacggcagctggaccggcaagccccccatctgcctggaggtgagacccagcggcagacccatcaacaccgccagagagccccccctgacccaggccctgatccccggcgacgtgttcgccaagaacagcctgtggaagggcgcctacgagtaccagggcaagaagcagcccgccatgctgagagtgaccggcttccaggtggccaacagcaaggtgaacgccaccatgatcgaccacagcggcgtggagctgcacctggccggcacctacaagaaggaggacttccacctgctgctgcaggtgtaccagatcaccggccccgtggagatcttcatgaacaagttcaaggacgaccactgggccctggacggccacgtgagcagcgagagcagcggcgccaccttcatctaccagggcagcgtgaagggccagggcttcggccagttcggcttccagagactggacctgagactgctggagagcgaccccgagagcatcggcagacacttcgccagcaacagcagcagcgtggccgccgccatcctggtgcccttcatcgccctgatcatcgccggcttcgtgctgtacctgtacaagcacagaagaagacccaaggtgcccttcaacggctacgccggccacgagaacaccaacgtgagagccaccttcgagaaccccatgtacgacagaaacatccagcccaccgacatcatggccagcgaggccgagttcaccgtgagcaccgtgtgcaccgccgtgtag

SEQ ID NO: 77918 - DNA, 1281 bp, synthetic construct; identical to SEQ ID NO: 77915
  misc_feature 1..1281: note = Description of Artificial Sequence: Synthetic coding sequence
  source 1..1281: mol_type = other DNA

SEQ ID NO: 77919 - DNA, 11124 bp, synthetic construct
  misc_feature 1..11124: note = Description of Artificial Sequence: Synthetic coding sequence
  source 1..11124: mol_type = other DNA
atgaagggcatcagaaagggcgagagcagagccaaggagagcaagccctgggagcccggcaagagaagatgcgccaagtgcggcagactggacttcatcctgatgaagaagatgggcatcaagagcggcttcaccttctggaacctggtgttcctgctgaccgtgagctgcgtgaagggcttcatctacacctgcggcggcaccctgaagggcctgaacggcaccatcgagagccccggcttcccctacggctaccccaacggcgccaactgcacctgggtgatcatcgccgaggagagaaacagaatccagatcgtgttccagagcttcgccctggaggaggagtacgactacctgagcctgtacgacggccacccccaccccaccaacttcagaaccagactgaccggcttccacctgcccccccccgtgaccagcaccaagagcgtgttcagcctgagactgaccagcgacttcgccgtgagcgcccacggcttcaaggtgtactacgaggagctgcagagcagcagctgcggcaaccccggcgtgccccccaagggcgtgctgtacggcaccagattcgacgtgggcgacaagatcagatacagctgcgtgaccggctacatcctggacggccacccccagctgacctgcatcgccaacagcgtgaacaccgccagctgggacttccccgtgcccatctgcagagccgaggacgcctgcggcggcaccatgagaggcagcagcggcatcatcagcagccccagcttccccaacgagtaccacaacaacgccgactgcacctggaccatcgtggccgagcccggcgacaccatcagcctgatcttcaccgacttccagatggaggagaagtacgactacctggagatcgagggcagcgagccccccaccatctggctgagcggcatgaacatccccccccccatcatcagcaacaagaactggctgagactgcacttcgtgaccgacagcaaccacagatacagaggcttcagcgccccctaccagggcagcagcaccctgacccacaccaccagcaccggcgagctggaggagcacaacagaaccaccaccggcgccatcgccgtggccagcacccccgccgacgtgaccgtgagcagcgtgaccgccgtgaccatccacagactgagcgaggagcagagagtgcaggtgaccagcctgagaaacagcggcctggaccccaacaccagcaaggacggcctgagcccccaccccgccgacacccagagcaccagaagaagacccagacacgccgagcagatcgagagaaccaaggagctggccgtggtgacccacagagtgaagaaggccatcgacttcaagagcagaggcttcaagctgttccccggcaaggacaacagcaacaagttcagcatcctgaacgagggcggcatcaagaccgccagcaacctgtgccccgaccccggcgagcccgagaacggcaagagaatcggcagcgacttcagcctgggcagcaccgtgcagttcagctgcgacgaggactacgtgctgcagggcgccaagagcatcacctgccagagaatcgccgaggtgttcgccgcctggagcgaccacagacccgtgtgcaaggtgaagacctgcggcagcaacctgcagggccccagcggcaccttcaccagccccaacttccccttccagtacgacagcaacgcccagtgcgtgtgggtgatcaccgccgtgaacaccaacaaggtgatccagatcaacttcgaggagttcgacctggagatcggctacgacaccctgaccatcggcgacggcggcgaggtgggcgaccccagaaccgtgctgcaggtgctgaccggcagcttcgtgcccgacctgatcgtgagcatgagcagccagatgtggctgcacctgcagaccgacgagagcgtgggcagcgtgggcttcaaggtgaactacaaggagatcgagaaggagagctgcggcgaccccggcacccccctgtacggcatcagagagggcgacggcttcagcaacagagacgtgctgagattcgagtgccagttcggcttcgagctgatcggcgagaagagcatcgtgtgccaggagaacaaccagtggagcgccaacatccccatctgcatcttcccctgcctgagcaacttcaccgcccccatgggcaccgtgctgagccccgactaccccgagggctacggcaacaacctgaactgcatctggaccatcatcagcgaccccggcagcagaatccacctgagcttcaacgacttcgacctggagagccagttcgacttcctggccgtgaaggacggcgacagccccgagagccccatcctgggcaccttcaccggcgccgaggtgcccagccacctgaccagcaacagccacatcctgagactggagttccaggccgaccacagcatgagcggcagaggcttcaacatcacctacaacaccttcggccacaacgagtgccccgaccccggcatccccatcaacgccagaagattcggcgacaacttccagctgggcagcagcatcagcgtgatctgcgaggagggcttcatcaagacccagggcaccgagaccatcacctgcatcctgatggacggcaaggtgatgtggagcggcctgatccccaagtgcggcgccccctgcggcggccacttcagcgcccccagcggcgtgatcctgagccccggctggcccggctactacaaggacagcctgaactgcgagtgggtgatcgaggccgagcccggccacagcatcaagatcaccttcgagagattccagaccgagctgaactacgacgtgctggaggtgcacgacggccccaacctgctgagccccctgctgggcagctacaacggcacccaggtgccccagttcctgttcagcagcagcaacttcatctacctgctgttcaccaccgacaacagcagaagcaacaacggcttcaagatccactacgagagcgtgaccgtgaacacctacagctgcctggaccccggcatccccgtgcacggcagaagatacggccacgacttcagcatcggcagcaccgtgagcttcagctgcgacagcggctacagactgagccacgaggagcccctgctgtgcgagaagaaccactggtggagccaccccctgcccacctgcgacgccctgtgcggcggcgacgtgagaggccccagcggcaccatcctgagccccggctaccccgagttctaccccaacagcctgaactgcacctggaccgtggacgtgacccacggcaagggcgtgcagttcaacttccacaccttccacctggaggaccaccacgactacctgctgatcaccgagaacggcagcttcacccagcccctggccagactgaccggcagcgacctgccccccaccatcaacgccggcctgtacggcaacttcagagcccagctgagattcatcagcgacttcagcatcagctacgagggcttcaacatcaccttcagcgagtacaacctggagccctgcgaggaccccggcatcccccagtacggcagcagaatcggcttcaacttcggcatcggcgacaccctgaccttcagctgcagcagcggctacagactggagggcaccagcgagatcatctgcctgggcggcggcagaagagtgtggagcgcccccctgcccagatgcgtggccgagtgcggcgccagcgccaccaacaacgagggcatcctgctgagccccaactaccccctgaactacgagaacaaccacgagtgcatctacagcatccaggtgcaggccggcaagggcatcaacatcagcgccagaaccttccacctggcccagggcgacgtgctgaagatctacgacggcaaggacaagaccacccacctgctgggcgccttcaccggcgccagcatgagaggcctgaccctgagcagcaccagcaaccagctgtggctggagttcaacagcgacaccgagggcaccgacgagggcttccagctggtgtacaccagcttcgagctgagccactgcgaggaccccggcatcccccagttcggctacaagatcagcgaccagggccacttcgccggcagcaccatcatctacggctgcaaccccggctacaccctgcacggcagcagcctgctgaagtgcatgaccggcgagagaagagcctgggactaccccctgcccagctgcatcgccgagtgcggcggcagattcaagggcgagagcagcggcagaatcctgagccccggctaccccttcccctacgacaacaacctgagatgcatgtggatgatcgaggtggaccccggcaacatcgtgagcctgcagttcctggccttcgacaccgaggccagccacgacatcctgagagtgtgggacggcccccccgagaacgacatgctgctgaaggagatcagcggcagcctgatccccgagggcatccacagcaccctgaacatcgtgaccatccagttcgacaccgacttctacatcagcaagagcggcttcgccatccagttcagcagcagcgtggccaccgcctgcagagaccccggcgtgcccatgaacggcaccagaaacggcgacggcagagagcccggcgacaccgtggtgttccagtgcgaccccggctacgagctgcagggcgaggagagaatcacctgcatccaggtggagaacagatacttctggcagcccagcccccccgtgtgcatcgccccctgcggcggcaacctgaccggcagcagcggcttcatcctgagccccaacttcccccacccctacccccacagcagagactgcgactggaccatcaccgtgaacgccgactacgtgatcagcctggccttcatcagcttcagcatcgagcccaactacgacttcctgtacatctacgacggccccgacagcaacagccccctgatcggcagcttccaggacagcaagctgcccgagagaatcgagagcagcagcaacaccatgcacctggccttcagaagcgacggcagcgtgagctacaccggcttccacctggagtacaaggccaagctgagagagagctgcttcgaccccggcaacatcatgaacggcaccagactgggcatggactacaagctgggcagcaccgtgacctactactgcgacgccggctacgtgctgcagggctacagcaccctgacctgcatcatgggcgacgacggcagacccggctggaacagagccctgcccagctgccacgccccctgcggcagcagaagcaccggcagcgagggcaccgtgctgagccccaactaccccaagaactacagcgtgggccacaactgcgtgtacagcatcgccgtgcccaaggagttcgtggtgttcggccagttcgtgttcttccagaccagcctgcacgacgtggtggaggtgtacgacggccccacccagcagagcagcctgctgagcagcctgagcggcagccacagcggcgagagcctgcccctgagcagcggcaaccagatcaccatcagattcaccagcgtgggccccatcaccgccaagggcttccacttcgtgtaccaggccgtgcccagaaccagcagcacccagtgcagcagcgtgcccgagcccagattcggcagaagaatcggcaacgagttcgccgtgggcagcagcgtgctgttcgactgcaaccccggctacatcctgcacggcagcatcgccatcagatgcgagaccgtgcccaacagcctggcccagtggaacgacagcctgcccacctgcatcgtgccctgcggcggcatcctgaccaagagaaagggcaccatcctgagccccggctaccccgagccctacgacaacaacctgaactgcgtgtggaagatcaccgtgcccgagggcgccggcatccaggtgcaggtggtgagcttcgccaccgagcacaactgggacagcctggacttctacgacggcggcgacaacaacgcccccagactgggcagctacagcggcaccaccatcccccacctgctgaacagcaccagcaacaacctgtacctgaacttccagagcgacatcagcgtgagcgccgccggcttccacctggagtacaccgccatcggcctggacagctgccccgagccccagacccccagcagcggcatcaagatcggcgacagatacatggtgggcgacgtggtgagcttccagtgcgaccagggctacagcctgcagggccacagccacatcacctgcatgcccggccccgtgagaagatggaactaccccatccccatctgcctggcccagtgcggcggcgccatgagcgacttcagcggcgtgatcctgagccccggcttccccggcaactaccccagcagcctggactgcacctggaccatcaacctgcccatcggcttcggcgtgcacctgcagttcgtgaacttcagcaccgagaccatccacgactacctggaggtgagaagcggcagcagcgagaccagcaccgtgatcggcagactgagcggcccccagatccccagcagcctgttcagcaccacccacgagaccagcctgtacttccacagcgactacagccagaacaagcagggcttccacatcgtgtaccaggcctaccagctgcagagctgccccgaccccagacccttcagaaacggcttcgtgatcggcaacgacttcaccgtgggccagaccatcagcttcgagtgcttccccggctacaccctgatcggcaacagcgccctgacctgcctgcacggcgtgagcagaaactggaaccaccccctgcccagatgcgaggccctgtgcggcggcaacatcaccgccatgaacggcaccatctacagccccggctaccccgacgagtaccccaacttccaggactgcttctggctggtgagagtgccccccggcaacggcatctacatcaacttcaccgtgctgcagaccgagcccatctacgacttcatcaccgtgtgggacggccccgaccagaacagcccccagatcggccagttcagcggcaacaccgccctggagagcgtgtacagcaccagcaaccagatcctgatcaagttccacagcgacttcaccaccagcggcttcttcgtgctgagctaccacgcctaccagctgagagtgtgccagccccccccccccgtgcccaacgccgagatcctgaccgaggacgacgagttcgagatcggcgacatcatcagataccagtgcctgcccggcttcaccctggtgggcaacgccatcctgacctgcagactgggcgagagactgcagatggacggcgccccccccgtgtgccaggtgctgtgccccgccaacgagctgagactggacagcaccggcgtgatcctgagccccggctaccccgacagctaccccaacctgcagatgtgcgcctggagcatcagcgtggagaagggctacaacatcaccatgttcgtggagttcttccagaccgagaaggagttcgacgtgctgcaggtgtacgacggccccaacatccagagccccgtgctgatcagcctgagcggcgactacagcagcgccttcaacatcaccagcaacggccacgaggtgttcctgcagtggagcgccgaccacggcaacaacaagaagggcttcagaatcagatacatcgccttctactgcagcacccccgagagccccccccacggctacatcatcagccagaccggcggccagctgaacagcgtggtgagatgggcctgcgacagaggcttcagactggtgggcaagagcagcgccgtgtgcagaaagagcagctacggctaccacgcctgggacgcccccgtgcccgcctgccaggccatcagctgcggcatccccaaggcccccaccaacggcggcatcctgaccaccgactacctggtgggcaccagagtgacctacttctgcaacgacggctacagactgagcagcaaggagctgaccaccgccgtgtgccagagcgacggcacctggagcaaccacaacaagacccccagatgcgtggtggtgacctgccccagcatcaacagcttcatcctggagcacggcagatggagaatcgtgaacggcagccactacgagtacaagaccaaggtggtgttcagctgcgaccccggctaccacggcctgggccccgccagcatcgagtgcctgcccaacggcacctggagctggagaaacgagagaccctactgccagatcatcagctgcggcgagctgcccaccccccccaacggcaacaagatcggcacccagaccagctacggcagcaccgccatcttcacctgcgacctgggcttcatgctggtgggcagcgccgtgagagagtgcctgagcagcggcctgtggagcgagagcgagaccagatgcctggccggccactgcggcatccccgagctgatcgtgaacggccaggtgatcggcgagaactacggctacagagacaccgtggtgtaccagtgcaaccccggcttcagactgatcggcagcagcgtgagaatctgccagcaggaccacaactggagcggccagctgcccagctgcgtgcccgtgagctgcggccaccccggcagccccatctacggcagaaccagcggcaacggcttcaacttcaacgacgtggtgaccttcagctgcaacatcggctacctgatgcagggccccaccaaggcccagtgccaggccaacagacagtggagccaccccccccccatgtgcaaggtggtgaactgcagcgaccccggcatccccgccaacagcaagagagagagcaagatcgagcacggcaacttcacctacggcaccgtggtgttctacgactgcaaccccggctacttcctgttcggcagcagcgtgctgatctgccagcccaacggccagtgggacaagcccctgcccgagtgcatcatgatcgactgcggccaccccggcgtgccccccaacgccgtgctgagcggcgagaagtacaccttcggcagcaccgtgcactacagctgcaccggcaagagaagcctgctgggccagagcagcagaacctgccagctgaacggccactggagcggcagccagccccactgcagcggcgacgccaccggcacctgcggcgaccccggcacccccggccacggcagcagacaggagagcaacttcagaaccaagagcaccgtgagatacgcctgcgacaccggctacatcctgcacggcagcgaggagagaacctgcctggccaacggcagctggaccggcagacagcccgagtgcaaggccgtgcagtgcggcaaccccggcaccaccgccaacggcaaggtgttcagaatcgacggcaccaccttcagcagcagcgtgatctacagctgcatggagggctacatcctgagcggccccagcgtgagacagtgcaccgccaacggcacctggagcggcaccctgcccaactgcaccatcatcagctgcggcgaccccggcatccccgccaacggcctgagatacggcgacgactacgtggtgggccagaacgtgagctacatgtgccagcccggctacaccatggagctgaacggcagcagaatcagaacctgcaccatcaacggcacctggagcggcgtgatgcccacctgcagagccgtgacctgccccacccccccccagatcagcaacggcagactggagggcaccaacttcgactggggcttcagcatcagctacatctgcagccccggctacgagctgagcttccccgccgtgctgacctgcgtgggcaacggcacctggagcggcgaggtgccccagtgcctgcccaagttctgcggcgaccccggcatccccgcccagggcaagagagagggcaagagcttcatctaccagagcgaggtgagcttcagctgcaacttccccttcatcctggtgggcagcagcaccagaatctgccaggccgacggcacctggagcggcagcagcccccactgcatcgagcccacccagaccagctgcgagaaccccggcgtgcccagacacggcagccagaacaacaccttcggcttccaggtgggcagcgtggtgcagttccactgcaagaagggccacctgctgcagggcagcaccaccagaacctgcctgcccgacctgacctggagcggcatccagcccgagtgcatcccccacagctgcaagcagcccgagacccccgcccacgccaacgtggtgggcatggacctgcccagccacggctacaccctgatctacacctgccagcccggcttcttcctggccggcggcaccgagcacagagtgtgcagaagcgacaacacctggaccggcaaggtgcccatctgcgaggccggcagcaagatcctggtgaaggaccccagacccgccctgggcacccccagccccaagctgagcgtgcccgacgacgtgttcgcccagaactacatctggaagggcagctacaacttcaagggcagaaagcagcccatgaccctgaccgtgaccagcttcaacgccagcaccggcagagtgaacgccaccctgagcaacagcaacatggagctgctgctgagcggcgtgtacaagagccaggaggccagactgatgctgagaatctacctgatcaaggtgcccgcccacgccagcgtgaagaagatgaaggaggagaactgggccatggacggcttcgtgagcgccgagcccgacggcgccacctacgtgttccagggcttcatccagggcaaggactacggccagttcggcctgcagagactgggcctgaacatgagcgagggcagcaacagcagcaaccagccccacggcaccaacagcagcagcgtggccatcgccatcctggtgcccttcttcgccctgatcttcgccggcttcggcttctacctgtacaagcagagaaccgcccccaagacccagtacaccggctgcagcgtgcacgagaacaacaacggccaggccgccttcgagaaccccatgtacgacaccaacgccaagagcgtggagggcaaggccgtgagattcgaccccaacctgaacaccgtgtgcaccatggtgtag

SEQ ID NO: 77920 - DNA, 11004 bp, synthetic construct
  misc_feature 1..11004: note = Description of Artificial Sequence: Synthetic coding sequence
  source 1..11004: mol_type = other DNA
atgtggagctggttcctgtgctggaagcccgtgcagctggacagacagaccgccagcggcttcatctacacctgcggcggcaccctgaagggcctgaacggcaccatcgagagccccggcttcccctacggctaccccaacggcgccaactgcacctgggtgatcatcgccgaggagagaaacagaatccagatcgtgttccagagcttcgccctggaggaggagtacgactacctgagcctgtacgacggccacccccaccccaccaacttcagaaccagactgaccggcttccacctgcccccccccgtgaccagcaccaagagcgtgttcagcctgagactgaccagcgacttcgccgtgagcgcccacggcttcaaggtgtactacgaggagctgcagagcagcagctgcggcaaccccggcgtgccccccaagggcgtgctgtacggcaccagattcgacgtgggcgacaagatcagatacagctgcgtgaccggctacatcctggacggccacccccagctgacctgcatcgccaacagcgtgaacaccgccagctgggacttccccgtgcccatctgcagagccgaggacgcctgcggcggcaccatgagaggcagcagcggcatcatcagcagccccagcttccccaacgagtaccacaacaacgccgactgcacctggaccatcgtggccgagcccggcgacaccatcagcctgatcttcaccgacttccagatggaggagaagtacgactacctggagatcgagggcagcgagccccccaccatctggctgagcggcatgaacatccccccccccatcatcagcaacaagaactggctgagactgcacttcgtgaccgacagcaaccacagatacagaggcttcagcgccccctaccagggcagcagcaccctgacccacaccaccagcaccggcgagctggaggagcacaacagaaccaccaccggcgccatcgccgtggccagcacccccgccgacgtgaccgtgagcagcgtgaccgccgtgaccatccacagactgagcgaggagcagagagtgcaggtgaccagcctgagaaacagcggcctggaccccaacaccagcaaggacggcctgagcccccaccccgccgacacccagagcaccagaagaagacccagacacgccgagcagatcgagagaaccaaggagctggccgtggtgacccacagagtgaagaaggccatcgacttcaagagcagaggcttcaagctgttccccggcaaggacaacagcaacaagttcagcatcctgaacgagggcggcatcaagaccgccagcaacctgtgccccgaccccggcgagcccgagaacggcaagagaatcggcagcgacttcagcctgggcagcaccgtgcagttcagctgcgacgaggactacgtgctgcagggcgccaagagcatcacctgccagagaatcgccgaggtgttcgccgcctggagcgaccacagacccgtgtgcaaggtgaagacctgcggcagcaacctgcagggccccagcggcaccttcaccagccccaacttccccttccagtacgacagcaacgcccagtgcgtgtgggtgatcaccgccgtgaacaccaacaaggtgatccagatcaacttcgaggagttcgacctggagatcggctacgacaccctgaccatcggcgacggcggcgaggtgggcgaccccagaaccgtgctgcaggtgctgaccggcagcttcgtgcccgacctgatcgtgagcatgagcagccagatgtggctgcacctgcagaccgacgagagcgtgggcagcgtgggcttcaaggtgaactacaaggagatcgagaaggagagctgcggcgaccccggcacccccctgtacggcatcagagagggcgacggcttcagcaacagagacgtgctgagattcgagtgccagttcggcttcgagctgatcggcgagaagagcatcgtgtgccaggagaacaaccagtggagcgccaacatccccatctgcatcttcccctgcctgagcaacttcaccgcccccatgggcaccgtgctgagccccgactaccccgagggctacggcaacaacctgaactgcatctggaccatcatcagcgaccccggcagcagaatccacctgagcttcaacgacttcgacctggagagccagttcgacttcctggccgtgaaggacggcgacagccccgagagccccatcctgggcaccttcaccggcgccgaggtgcccagccacctgaccagcaacagccacatcctgagactggagttccaggccgaccacagcatgagcggcagaggcttcaacatcacctacaacaccttcggccacaacgagtgccccgaccccggcatccccatcaacgccagaagattcggcgacaacttccagctgggcagcagcatcagcgtgatctgcgaggagggcttcatcaagacccagggcaccgagaccatcacctgcatcctgatggacggcaaggtgatgtggagcggcctgatccccaagtgcggcgccccctgcggcggccacttcagcgcccccagcggcgtgatcctgagccccggctggcccggctactacaaggacagcctgaactgcgagtgggtgatcgaggccgagcccggccacagcatcaagatcaccttcgagagattccagaccgagctgaactacgacgtgctggaggtgcacgacggccccaacctgctgagccccctgctgggcagctacaacggcacccaggtgccccagttcctgttcagcagcagcaacttcatctacctgctgttcaccaccgacaacagcagaagcaacaacggcttcaagatccactacgagagcgtgaccgtgaacacctacagctgcctggaccccggcatccccgtgcacggcagaagatacggccacgacttcagcatcggcagcaccgtgagcttcagctgcgacagcggctacagactgagccacgaggagcccctgctgtgcgagaagaaccactggtggagccaccccctgcccacctgcgacgccctgtgcggcggcgacgtgagaggccccagcggcaccatcctgagccccggctaccccgagttctaccccaacagcctgaactgcacctggaccgtggacgtgacccacggcaagggcgtgcagttcaacttccacaccttccacctggaggaccaccacgactacctgctgatcaccgagaacggcagcttcacccagcccctggccagactgaccggcagcgacctgccccccaccatcaacgccggcctgtacggcaacttcagagcccagctgagattcatcagcgacttcagcatcagctacgagggcttcaacatcaccttcagcgagtacaacctggagccctgcgaggaccccggcatcccccagtacggcagcagaatcggcttcaacttcggcatcggcgacaccctgaccttcagctgcagcagcggctacagactggagggcaccagcgagatcatctgcctgggcggcggcagaagagtgtggagcgcccccctgcccagatgcgtggccgagtgcggcgccagcgccaccaacaacgagggcatcctgctgagccccaactaccccctgaactacgagaacaaccacgagtgcatctacagcatccaggtgcaggccggcaagggcatcaacatcagcgccagaaccttccacctggcccagggcgacgtgctgaagatctacgacggcaaggacaagaccacccacctgctgggcgccttcaccggcgccagcatgagaggcctgaccctgagcagcaccagcaaccagctgtggctggagttcaacagcgacaccgagggcaccgacgagggcttccagctggtgtacaccagcttcgagctgagccactgcgaggaccccggcatcccccagttcggctacaagatcagcgaccagggccacttcgccggcagcaccatcatctacggctgcaaccccggctacaccctgcacggcagcagcctgctgaagtgcatgaccggcgagagaagagcctgggactaccccctgcccagctgcatcgccgagtgcggcggcagattcaagggcgagagcagcggcagaatcctgagccccggctaccccttcccctacgacaacaacctgagatgcatgtggatgatcgaggtggaccccggcaacatcgtgagcctgcagttcctggccttcgacaccgaggccagccacgacatcctgagagtgtgggacggcccccccgagaacgacatgctgctgaaggagatcagcggcagcctgatccccgagggcatccacagcaccctgaacatcgtgaccatccagttcgacaccgacttctacatcagcaagagcggcttcgccatccagttcagcagcagcgtggccaccgcctgcagagaccccggcgtgcccatgaacggcaccagaaacggcgacggcagagagcccggcgacaccgtggtgttccagtgcgaccccggctacgagctgcagggcgaggagagaatcacctgcatccaggtggagaacagatacttctggcagcccagcccccccgtgtgcatcgccccctgcggcggcaacctgaccggcagcagcggcttcatcctgagccccaacttcccccacccctacccccacagcagagactgcgactggaccatcaccgtgaacgccgactacgtgatcagcctggccttcatcagcttcagcatcgagcccaactacgacttcctgtacatctacgacggccccgacagcaacagccccctgatcggcagcttccaggacagcaagctgcccgagagaatcgagagcagcagcaacaccatgcacctggccttcagaagcgacggcagcgtgagctacaccggcttccacctggagtacaaggccaagctgagagagagctgcttcgaccccggcaacatcatgaacggcaccagactgggcatggactacaagctgggcagcaccgtgacctactactgcgacgccggctacgtgctgcagggctacagcaccctgacctgcatcatgggcgacgacggcagacccggctggaacagagccctgcccagctgccacgccccctgcggcagcagaagcaccggcagcgagggcaccgtgctgagccccaactaccccaagaactacagcgtgggccacaactgcgtgtacagcatcgccgtgcccaaggagttcgtggtgttcggccagttcgtgttcttccagaccagcctgcacgacgtggtggaggtgtacgacggccccacccagcagagcagcctgctgagcagcctgagcggcagccacagcggcgagagcctgcccctgagcagcggcaaccagatcaccatcagattcaccagcgtgggccccatcaccgccaagggcttccacttcgtgtaccaggccgtgcccagaaccagcagcacccagtgcagcagcgtgcccgagcccagattcggcagaagaatcggcaacgagttcgccgtgggcagcagcgtgctgttcgactgcaaccccggctacatcctgcacggcagcatcgccatcagatgcgagaccgtgcccaacagcctggcccagtggaacgacagcctgcccacctgcatcgtgccctgcggcggcatcctgaccaagagaaagggcaccatcctgagccccggctaccccgagccctacgacaacaacctgaactgcgtgtggaagatcaccgtgcccgagggcgccggcatccaggtgcaggtggtgagcttcgccaccgagcacaactgggacagcctggacttctacgacggcggcgacaacaacgcccccagactgggcagctacagcggcaccaccatcccccacctgctgaacagcaccagcaacaacctgtacctgaacttccagagcgacatcagcgtgagcgccgccggcttccacctggagtacaccgccatcggcctggacagctgccccgagccccagacccccagcagcggcatcaagatcggcgacagatacatggtgggcgacgtggtgagcttccagtgcgaccagggctacagcctgcagggccacagccacatcacctgcatgcccggccccgtgagaagatggaactaccccatccccatctgcctggcccagtgcggcggcgccatgagcgacttcagcggcgtgatcctgagccccggcttccccggcaactaccccagcagcctggactgcacctggaccatcaacctgcccatcggcttcggcgtgcacctgcagttcgtgaacttcagcaccgagaccatccacgactacctggaggtgagaagcggcagcagcgagaccagcaccgtgatcggcagactgagcggcccccagatccccagcagcctgttcagcaccacccacgagaccagcctgtacttccacagcgactacagccagaacaagcagggcttccacatcgtgtaccaggcctaccagctgcagagctgccccgaccccagacccttcagaaacggcttcgtgatcggcaacgacttcaccgtgggccagaccatcagcttcgagtgcttccccggctacaccctgatcggcaacagcgccctgacctgcctgcacggcgtgagcagaaactggaaccaccccctgcccagatgcgaggccctgtgcggcggcaacatcaccgccatgaacggcaccatctacagccccggctaccccgacgagtaccccaacttccaggactgcttctggctggtgagagtgccccccggcaacggcatctacatcaacttcaccgtgctgcagaccgagcccatctacgacttcatcaccgtgtgggacggccccgaccagaacagcccccagatcggccagttcagcggcaacaccgccctggagagcgtgtacagcaccagcaaccagatcctgatcaagttccacagcgacttcaccaccagcggcttcttcgtgctgagctaccacgcctaccagctgagagtgtgccagccccccccccccgtgcccaacgccgagatcctgaccgaggacgacgagttcgagatcggcgacatcatcagataccagtgcctgcccggcttcaccctggtgggcaacgccatcctgacctgcagactgggcgagagactgcagatggacggcgccccccccgtgtgccaggtgctgtgccccgccaacgagctgagactggacagcaccggcgtgatcctgagccccggctaccccgacagctaccccaacctgcagatgtgcgcctggagcatcagcgtggagaagggctacaacatcaccatgttcgtggagttcttccagaccgagaaggagttcgacgtgctgcaggtgtacgacggccccaacatccagagccccgtgctgatcagcctgagcggcgactacagcagcgccttcaacatcaccagcaacggccacgaggtgttcctgcagtggagcgccgaccacggcaacaacaagaagggcttcagaatcagatacatcgccttctactgcagcacccccgagagccccccccacggctacatcatcagccagaccggcggccagctgaacagcgtggtgagatgggcctgcgacagaggcttcagactggtgggcaagagcagcgccgtgtgcagaaagagcagctacggctaccacgcctgggacgcccccgtgcccgcctgccaggccatcagctgcggcatccccaaggcccccaccaacggcggcatcctgaccaccgactacctggtgggcaccagagtgacctacttctgcaacgacggctacagactgagcagcaaggagctgaccaccgccgtgtgccagagcgacggcacctggagcaaccacaacaagacccccagatgcgtggtggtgacctgccccagcatcaacagcttcatcctggagcacggcagatggagaatcgtgaacggcagccactacgagtacaagaccaaggtggtgttcagctgcgaccccggctaccacggcctgggccccgccagcatcgagtgcctgcccaacggcacctggagctggagaaacgagagaccctactgccagatcatcagctgcggcgagctgcccaccccccccaacggcaacaagatcggcacccagaccagctacggcagcaccgccatcttcacctgcgacctgggcttcatgctggtgggcagcgccgtgagagagtgcctgagcagcggcctgtggagcgagagcgagaccagatgcctggccggccactgcggcatccccgagctgatcgtgaacggccaggtgatcggcgagaactacggctacagagacaccgtggtgtaccagtgcaaccccggcttcagactgatcggcagcagcgtgagaatctgccagcaggaccacaactggagcggccagctgcccagctgcgtgcccgtgagctgcggccaccccggcagccccatctacggcagaaccagcggcaacggcttcaacttcaacgacgtggtgaccttcagctgcaacatcggctacctgatgcagggccccaccaaggcccagtgccaggccaacagacagtggagccaccccccccccatgtgcaaggtggtgaactgcagcgaccccggcatccccgccaacagcaagagagagagcaagatcgagcacggcaacttcacctacggcaccgtggtgttctacgactgcaaccccggctacttcctgttcggcagcagcgtgctgatctgccagcccaacggccagtgggacaagcccctgcccgagtgcatcatgatcgactgcggccaccccggcgtgccccccaacgccgtgctgagcggcgagaagtacaccttcggcagcaccgtgcactacagctgcaccggcaagagaagcctgctgggccagagcagcagaacctgccagctgaacggccactggagcggcagccagccccactgcagcggcgacgccaccggcacctgcggcgaccccggcacccccggccacggcagcagacaggagagcaacttcagaaccaagagcaccgtgagatacgcctgcgacaccggctacatcctgcacggcagcgaggagagaacctgcctggccaacggcagctggaccggcagacagcccgagtgcaaggccgtgcagtgcggcaaccccggcaccaccgccaacggcaaggtgttcagaatcgacggcaccaccttcagcagcagcgtgatctacagctgcatggagggctacatcctgagcggccccagcgtgagacagtgcaccgccaacggcacctggagcggcaccctgcccaactgcaccatcatcagctgcggcgaccccggcatccccgccaacggcctgagatacggcgacgactacgtggtgggccagaacgtgagctacatgtgccagcccggctacaccatggagctgaacggcagcagaatcagaacctgcaccatcaacggcacctggagcggcgtgatgcccacctgcagagccgtgacctgccccacccccccccagatcagcaacggcagactggagggcaccaacttcgactggggcttcagcatcagctacatctgcagccccggctacgagctgagcttccccgccgtgctgacctgcgtgggcaacggcacctggagcggcgaggtgccccagtgcctgcccaagttctgcggcgaccccggcatccccgcccagggcaagagagagggcaagagcttcatctaccagagcgaggtgagcttcagctgcaacttccccttcatcctggtgggcagcagcaccagaatctgccaggccgacggcacctggagcggcagcagcccccactgcatcgagcccacccagaccagctgcgagaaccccggcgtgcccagacacggcagccagaacaacaccttcggcttccaggtgggcagcgtggtgcagttccactgcaagaagggccacctgctgcagggcagcaccaccagaacctgcctgcccgacctgacctggagcggcatccagcccgagtgcatcccccacagctgcaagcagcccgagacccccgcccacgccaacgtggtgggcatggacctgcccagccacggctacaccctgatctacacctgccagcccggcttcttcctggccggcggcaccgagcacagagtgtgcagaagcgacaacacctggaccggcaaggtgcccatctgcgaggccggcagcaagatcctggtgaaggaccccagacccgccctgggcacccccagccccaagctgagcgtgcccgacgacgtgttcgcccagaactacatctggaagggcagctacaacttcaagggcagaaagcagcccatgaccctgaccgtgaccagcttcaacgccagcaccggcagagtgaacgccaccctgagcaacagcaacatggagctgctgctgagcggcgtgtacaagagccaggaggccagactgatgctgagaatctacctgatcaaggtgcccgcccacgccagcgtgaagaagatgaaggaggagaactgggccatggacggcttcgtgagcgccgagcccgacggcgccacctacgtgttccagggcttcatccagggcaaggactacggccagttcggcctgcagagactgggcctgaacatgagcgagggcagcaacagcagcaaccagccccacggcaccaacagcagcagcgtggccatcgccatcctggtgcccttcttcgccctgatcttcgccggcttcggcttctacctgtacaagcagagaaccgcccccaagacccagtacaccggctgcagcgtgcacgagaacaacaacggccaggccgccttcgagaaccccatgtacgacaccaacgccaagagcgtggagggcaaggccgtgagattcgaccccaacctgaacaccgtgtgcaccatggtgtag

SEQ ID NO: 77921 - DNA, 10914 bp, synthetic construct
  misc_feature 1..10914: note = Description of Artificial Sequence: Synthetic coding sequence
  source 1..10914: mol_type = other DNA
atgaagggcatcagaaagggcgagagcagagccaaggagagcaagccctgggagcccggcaagagaagatgcgccaagtgcggcagactggacttcatcctgatgaagaagatgggcatcaagagcggcttcaccttctggaacctggtgttcctgctgaccgtgagctgcgtgaagggcttcatctacacctgcggcggcaccctgaagggcctgaacggcaccatcgagagccccggcttcccctacggctaccccaacggcgccaactgcacctgggtgatcatcgccgaggagagaaacagaatccagatcgtgttccagagcttcgccctggaggaggagtacgactacctgagcctgtacgacggccacccccaccccaccaacttcagaaccagactgaccggcttccacctgcccccccccgtgaccagcaccaagagcgtgttcagcctgagactgaccagcgacttcgccgtgagcgcccacggcttcaaggtgtactacgaggagctgcagagcagcagctgcggcaaccccggcgtgccccccaagggcgtgctgtacggcaccagattcgacgtgggcgacaagatcagatacagctgcgtgaccggctacatcctggacggccacccccagctgacctgcatcgccaacagcgtgaacaccgccagctgggacttccccgtgcccatctgcagagccgaggacgcctgcggcggcaccatgagaggcagcagcggcatcatcagcagccccagcttccccaacgagtaccacaacaacgccgactgcacctggaccatcgtggccgagcccggcgacaccatcagcctgatcttcaccgacttccagatggaggagaagtacgactacctggagatcgagggcagcgagccccccaccatctggctgagcggcatgaacatccccccccccatcatcagcaacaagaactggctgagactgcacttcgtgaccgacagcaaccacagatacagaggcttcagcgccccctaccagggcagcagcaccctgacccacaccaccagcaccggcgagctggaggagcacaacagaaccaccaccggcgccatcgccgtggccagcacccccgccgacgtgaccgtgagcagcgtgaccgccgtgaccatccacagactgagcgaggagcagagagtgcaggtgaccagcctgagaaacagcggcctggaccccaacaccagcaaggacggcctgagcccccaccccgccgacacccagagcaccagaagaagacccagacacgccgagcagatcgagagaaccaaggagctggccgtggtgacccacagagtgaagaaggccatcgacttcaagagcagaggcttcaagctgttccccggcaaggacaacagcaacaagttcagcatcctgaacgagggcggcatcaagaccgccagcaacctgtgccccgaccccggcgagcccgagaacggcaagagaatcggcagcgacttcagcctgggcagcaccgtgcagttcagctgcgacgaggactacgtgctgcagggcgccaagagcatcacctgccagagaatcgccgaggtgttcgccgcctggagcgaccacagacccgtgtgcaaggtgaagacctgcggcagcaacctgcagggccccagcggcaccttcaccagccccaacttccccttccagtacgacagcaacgcccagtgcgtgtgggtgatcaccgccgtgaacaccaacaaggtgatccagatcaacttcgaggagttcgacctggagatcggctacgacaccctgaccatcggcgacggcggcgaggtgggcgaccccagaaccgtgctgcaggtgctgaccggcagcttcgtgcccgacctgatcgtgagcatgagcagccagatgtggctgcacctgcagaccgacgagagcgtgggcagcgtgggcttcaaggtgaactacaaggagatcgagaaggagagctgcggcgaccccggcacccccctgtacggcatcagagagggcgacggcttcagcaacagagacgtgctgagattcgagtgccagttcggcttcgagctgatcggcgagaagagcatcgtgtgccaggagaacaaccagtggagcgccaacatccccatctgcatcttcccctgcctgagcaacttcaccgcccccatgggcaccgtgctgagccccgactaccccgagggctacggcaacaacctgaactgcatctggaccatcatcagcgaccccggcagcagaatccacctgagcttcaacgacttcgacctggagagccagttcgacttcctggccgtgaaggacggcgacagccccgagagccccatcctgggcaccttcaccggcgccgaggtgcccagccacctgaccagcaacagccacatcctgagactggagttccaggccgaccacagcatgagcggcagaggcttcaacatcacctacaacaccttcggccacaacgagtgccccgaccccggcatccccatcaacgccagaagattcggcgacaacttccagctgggcagcagcatcagcgtgatctgcgaggagggcttcatcaagacccagggcaccgagaccatcacctgcatcctgatggacggcaaggtgatgtggagcggcctgatccccaagtgcggcgccccctgcggcggccacttcagcgcccccagcggcgtgatcctgagccccggctggcccggctactacaaggacagcctgaactgcgagtgggtgatcgaggccgagcccggccacagcatcaagatcaccttcgagagattccagaccgagctgaactacgacgtgctggaggtgcacgacggccccaacctgctgagccccctgctgggcagctacaacggcacccaggtgccccagttcctgttcagcagcagcaacttcatctacctgctgttcaccaccgacaacagcagaagcaacaacggcttcaagatccactacgagagcgtgaccgtgaacacctacagctgcctggaccccggcatccccgtgcacggcagaagatacggccacgacttcagcatcggcagcaccgtgagcttcagctgcgacagcggctacagactgagccacgaggagcccctgctgtgcgagaagaaccactggtggagccaccccctgcccacctgcgacgccctgtgcggcggcgacgtgagaggccccagcggcaccatcctgagccccggctaccccgagttctaccccaacagcctgaactgcacctggaccgtggacgtgacccacggcaagggcgtgcagttcaacttccacaccttccacctggaggaccaccacgactacctgctgatcaccgagaacggcagcttcacccagcccctggccagactgaccggcagcgacctgccccccaccatcaacgccggcctgtacggcaacttcagagcccagctgagattcatcagcgacttcagcatcagctacgagggcttcaacatcaccttcagcgagtacaacctggagccctgcgaggaccccggcatcccccagtacggcagcagaatcggcttcaacttcggcatcggcgacaccctgaccttcagctgcagcagcggctacagactggagggcaccagcgagatcatctgcctgggcggcggcagaagagtgtggagcgcccccctgcccagatgcgtggccgagtgcggcgccagcgccaccaacaacgagggcatcctgctgagccccaactaccccctgaactacgagaacaaccacgagtgcatctacagcatccaggtgcaggccggcaagggcatcaacatcagcgccagaaccttccacctggcccagggcgacgtgctgaagatctacgacggcaaggacaagaccacccacctgctgggcgccttcaccggcgccagcatgagaggcctgaccctgagcagcaccagcaaccagctgtggctggagttcaacagcgacaccgagggcaccgacgagggcttccagctggtgtacaccagcttcgagctgagccactgcgaggaccccggcatcccccagttcggctacaagatcagcgaccagggccacttcgccggcagcaccatcatctacggctgcaaccccggctacaccctgcacggcagcagcctgctgaagtgcatgaccggcgagagaagagcctgggactaccccctgcccagctgcatcgccgagtgcggcggcagattcaagggcgagagcagcggcagaatcctgagccccggctaccccttcccctacgacaacaacctgagatgcatgtggatgatcgaggtggaccccggcaacatcgtgagcctgcagttcctggccttcgacaccgaggccagccacgacatcctgagagtgtgggacggcccccccgagaacgacatgctgctgaaggagatcagcggcagcctgatccccgagggcatccacagcaccctgaacatcgtgaccatccagttcgacaccgacttctacatcagcaagagcggcttcgccatccagttcagcagcagcgtggccaccgcctgcagagaccccggcgtgcccatgaacggcaccagaaacggcgacggcagagagcccggcgacaccgtggtgttccagtgcgaccccggctacgagctgcagggcgaggagagaatcacctgcatccaggtggagaacagatacttctggcagcccagcccccccgtgtgcatcgccccctgcggcggcaacctgaccggcagcagcggcttcatcctgagccccaacttcccccacccctacccccacagcagagactgcgactggaccatcaccgtgaacgccgactacgtgatcagcctggccttcatcagcttcagcatcgagcccaactacgacttcctgtacatctacgacggccccgacagcaacagccccctgatcggcagcttccaggacagcaagctgcccgagagaatcgagagcagcagcaacaccatgcacctggccttcagaagcgacggcagcgtgagctacaccggcttccacctggagtacaaggccaagctgagagagagctgcttcgaccccggcaacatcatgaacggcaccagactgggcatggactacaagctgggcagcaccgtgacctactactgcgacgccggctacgtgctgcagggctacagcaccctgacctgcatcatgggcgacgacggcagacccggctggaacagagccctgcccagctgccacgccccctgcggcagcagaagcaccggcagcgagggcaccgtgctgagccccaactaccccaagaactacagcgtgggccacaactgcgtgtacagcatcgccgtgcccaaggagttcgccgtgcccagaaccagcagcacccagtgcagcagcgtgcccgagcccagattcggcagaagaatcggcaacgagttcgccgtgggcagcagcgtgctgttcgactgcaaccccggctacatcctgcacggcagcatcgccatcagatgcgagaccgtgcccaacagcctggcccagtggaacgacagcctgcccacctgcatcgtgccctgcggcggcatcctgaccaagagaaagggcaccatcctgagccccggctaccccgagccctacgacaacaacctgaactgcgtgtggaagatcaccgtgcccgagggcgccggcatccaggtgcaggtggtgagcttcgccaccgagcacaactgggacagcctggacttctacgacggcggcgacaacaacgcccccagactgggcagctacagcggcaccaccatcccccacctgctgaacagcaccagcaacaacctgtacctgaacttccagagcgacatcagcgtgagcgccgccggcttccacctggagtacaccgccatcggcctggacagctgccccgagccccagacccccagcagcggcatcaagatcggcgacagatacatggtgggcgacgtggtgagcttccagtgcgaccagggctacagcctgcagggccacagccacatcacctgcatgcccggccccgtgagaagatggaactaccccatccccatctgcctggcccagtgcggcggcgccatgagcgacttcagcggcgtgatcctgagccccggcttccccggcaactaccccagcagcctggactgcacctggaccatcaacctgcccatcggcttcggcgtgcacctgcagttcgtgaacttcagcaccgagaccatccacgactacctggaggtgagaagcggcagcagcgagaccagcaccgtgatcggcagactgagcggcccccagatccccagcagcctgttcagcaccacccacgagaccagcctgtacttccacagcgactacagccagaacaagcagggcttccacatcgtgtaccaggcctaccagctgcagagctgccccgaccccagacccttcagaaacggcttcgtgatcggcaacgacttcaccgtgggccagaccatcagcttcgagtgcttccccggctacaccctgatcggcaacagcgccctgacctgcctgcacggcgtgagcagaaactggaaccaccccctgcccagatgcgaggccctgtgcggcggcaacatcaccgccatgaacggcaccatctacagccccggctaccccgacgagtaccccaacttccaggactgcttctggctggtgagagtgccccccggcaacggcatctacatcaacttcaccgtgctgcagaccgagcccatctacgacttcatcaccgtgtgggacggccccgaccagaacagcccccagatcggccagttcagcggcaacaccgccctggagagcgtgtacagcaccagcaaccagatcctgatcaagttccacagcgacttcaccaccagcggcttcttcgtgctgagctaccacgcctaccagctgagagtgtgccagccccccccccccgtgcccaacgccgagatcctgaccgaggacgacgagttcgagatcggcgacatcatcagataccagtgcctgcccggcttcaccctggtgggcaacgccatcctgacctgcagactgggcgagagactgcagatggacggcgccccccccgtgtgccaggtgctgtgccccgccaacgagctgagactggacagcaccggcgtgatcctgagccccggctaccccgacagctaccccaacctgcagatgtgcgcctggagcatcagcgtggagaagggctacaacatcaccatgttcgtggagttcttccagaccgagaaggagttcgacgtgctgcaggtgtacgacggccccaacatccagagccccgtgctgatcagcctgagcggcgactacagcagcgccttcaacatcaccagcaacggccacgaggtgttcctgcagtggagcgccgaccacggcaacaacaagaagggcttcagaatcagatacatcgccttctactgcagcacccccgagagccccccccacggctacatcatcagccagaccggcggccagctgaacagcgtggtgagatgggcctgcgacagaggcttcagactggtgggcaagagcagcgccgtgtgcagaaagagcagctacggctaccacgcctgggacgcccccgtgcccgcctgccaggccatcagctgcggcatccccaaggcccccaccaacggcggcatcctgaccaccgactacctggtgggcaccagagtgacctacttctgcaacgacggctacagactgagcagcaaggagctgaccaccgccgtgtgccagagcgacggcacctggagcaaccacaacaagacccccagatgcgtggtggtgacctgccccagcatcaacagcttcatcctggagcacggcagatggagaatcgtgaacggcagccactacgagtacaagaccaaggtggtgttcagctgcgaccccggctaccacggcctgggccccgccagcatcgagtgcctgcccaacggcacctggagctggagaaacgagagaccctactgccagatcatcagctgcggcgagctgcccaccccccccaacggcaacaagatcggcacccagaccagctacggcagcaccgccatcttcacctgcgacctgggcttcatgctggtgggcagcgccgtgagagagtgcctgagcagcggcctgtggagcgagagcgagaccagatgcctggccggccactgcggcatccccgagctgatcgtgaacggccaggtgatcggcgagaactacggctacagagacaccgtggtgtaccagtgcaaccccggcttcagactgatcggcagcagcgtgagaatctgccagcaggaccacaactggagcggccagctgcccagctgcgtgcccgtgagctgcggccaccccggcagccccatctacggcagaaccagcggcaacggcttcaacttcaacgacgtggtgaccttcagctgcaacatcggctacctgatgcagggccccaccaaggcccagtgccaggccaacagacagtggagccaccccccccccatgtgcaaggtggtgaactgcagcgaccccggcatccccgccaacagcaagagagagagcaagatcgagcacggcaacttcacctacggcaccgtggtgttctacgactgcaaccccggctacttcctgttcggcagcagcgtgctgatctgccagcccaacggccagtgggacaagcccctgcccgagtgcatcatgatcgactgcggccaccccggcgtgccccccaacgccgtgctgagcggcgagaagtacaccttcggcagcaccgtgcactacagctgcaccggcaagagaagcctgctgggccagagcagcagaacctgccagctgaacggccactggagcggcagccagccccactgcagcggcgacgccaccggcacctgcggcgaccccggcacccccggccacggcagcagacaggagagcaacttcagaaccaagagcaccgtgagatacgcctgcgacaccggctacatcctgcacggcagcgaggagagaacctgcctggccaacggcagctggaccggcagacagcccgagtgcaaggccgtgcagtgcggcaaccccggcaccaccgccaacggcaaggtgttcagaatcgacggcaccaccttcagcagcagcgtgatctacagctgcatggagggctacatcctgagcggccccagcgtgagacagtgcaccgccaacggcacctggagcggcaccctgcccaactgcaccatcatcagctgcggcgaccccggcatccccgccaacggcctgagatacggcgacgactacgtggtgggccagaacgtgagctacatgtgccagcccggctacaccatggagctgaacggcagcagaatcagaacctgcaccatcaacggcacctggagcggcgtgatgcccacctgcagagccgtgacctgccccacccccccccagatcagcaacggcagactggagggcaccaacttcgactggggcttcagcatcagctacatctgcagccccggctacgagctgagcttccccgccgtgctgacctgcgtgggcaacggcacctggagcggcgaggtgccccagtgcctgcccaagttctgcggcgaccccggcatccccgcccagggcaagagagagggcaagagcttcatctaccagagcgaggtgagcttcagctgcaacttccccttcatcctggtgggcagcagcaccagaatctgccaggccgacggcacctggagcggcagcagcccccactgcatcgagcccacccagaccagctgcgagaaccccggcgtgcccagacacggcagccagaacaacaccttcggcttccaggtgggcagcgtggtgcagttccactgcaagaagggccacctgctgcagggcagcaccaccagaacctgcctgcccgacctgacctggagcggcatccagcccgagtgcatcccccacagctgcaagcagcccgagacccccgcccacgccaacgtggtgggcatggacctgcccagccacggctacaccctgatctacacctgccagcccggcttcttcctggccggcggcaccgagcacagagtgtgcagaagcgacaacacctggaccggcaaggtgcccatctgcgaggccggcagcaagatcctggtgaaggaccccagacccgccctgggcacccccagccccaagctgagcgtgcccgacgacgtgttcgcccagaactacatctggaagggcagctacaacttcaagggcagaaagcagcccatgaccctgaccgtgaccagcttcaacgccagcaccggcagagtgaacgccaccctgagcaacagcaacatggagctgctgctgagcggcgtgtacaagagccaggaggccagactgatgctgagaatctacctgatcaaggtgcccgcccacgccagcgtgaagaagatgaaggaggagaactgggccatggacggcttcgtgagcgccgagcccgacggcgccacctacgtgttccagggcttcatccagggcaaggactacggccagttcggcctgcagagactgggcctgaacatgagcgagggcagcaacagcagcaaccagccccacggcaccaacagcagcagcgtggccatcgccatcctggtgcccttcttcgccctgatcttcgccggcttcggcttctacctgtacaagcagagaaccgcccccaagacccagtacaccggctgcagcgtgcacgagaacaacaacggccaggccgccttcgagaaccccatgtacgacaccaacgccaagagcgtggagggcaaggccgtgagattcgaccccaacctgaacaccgtgtgcaccatggtgtag

SEQ ID NO: 77922 - DNA, 10617 bp, synthetic construct
  misc_feature 1..10617: note = Description of Artificial Sequence: Synthetic coding sequence
  source 1..10617: mol_type = other DNA
atgaagggcatcagaaagggcgagagcagagccaaggagagcaagccctgggagcccggcaagagaagatgcgccaagtgcggcagactggacttcatcctgatgaagaagatgggcatcaagagcggcttcaccttctggaacctggtgttcctgctgaccgtgagctgcgtgaagggcttcatctacacctgcggcggcaccctgaagggcctgaacggcaccatcgagagccccggcttcccctacggctaccccaacggcgccaactgcacctgggtgatcatcgccgaggagagaaacagaatccagatcgtgttccagagcttcgccctggaggaggagtacgactacctgagcctgtacgacggccacccccaccccaccaacttcagaaccagactgaccggcttccacctgcccccccccgtgaccagcaccaagagcgtgttcagcctgagactgaccagcgacttcgccgtgagcgcccacggcttcaaggtgtactacgaggagctgcagagcagcagctgcggcaaccccggcgtgccccccaagggcgtgctgtacggcaccagattcgacgtgggcgacaagatcagatacagctgcgtgaccggctacatcctggacggccacccccagctgacctgcatcgccaacagcgtgaacaccgccagctgggacttccccgtgcccatctgcagagccgaggacgcctgcggcggcaccatgagaggcagcagcggcatcatcagcagccccagcttccccaacgagtaccacaacaacgccgactgcacctggaccatcgtggccgagcccggcgacaccatcagcctgatcttcaccgacttccagatggaggagaagtacgactacctggagatcgagggcagcgagccccccaccatctggctgagcggcatgaacatccccccccccatcatcagcaacaagaactggctgagactgcacttcgtgaccgacagcaaccacagatacagaggcttcagcgccccctaccaggtgaagaaggccatcgacttcaagagcagaggcttcaagctgttccccggcaaggacaacagcaacaagttcagcatcctgaacgagggcggcatcaagaccgccagcaacctgtgccccgaccccggcgagcccgagaacggcaagagaatcggcagcgacttcagcctgggcagcaccgtgcagttcagctgcgacgaggactacgtgctgcagggcgccaagagcatcacctgccagagaatcgccgaggtgttcgccgcctggagcgaccacagacccgtgtgcaaggtgaagacctgcggcagcaacctgcagggccccagcggcaccttcaccagccccaacttccccttccagtacgacagcaacgcccagtgcgtgtgggtgatcaccgccgtgaacaccaacaaggtgatccagatcaacttcgaggagttcgacctggagatcggctacgacaccctgaccatcggcgacggcggcgaggtgggcgaccccagaaccgtgctgcaggtgctgaccggcagcttcgtgcccgacctgatcgtgagcatgagcagccagatgtggctgcacctgcagaccgacgagagcgtgggcagcgtgggcttcaaggtgaactacaaggagatcgagaaggagagctgcggcgaccccggcacccccctgtacggcatcagagagggcgacggcttcagcaacagagacgtgctgagattcgagtgccagttcggcttcgagctgatcggcgagaagagcatcgtgtgccaggagaacaaccagtggagcgccaacatccccatctgcatcttcccctgcctgagcaacttcaccgcccccatgggcaccgtgctgagccccgactaccccgagggctacggcaacaacctgaactgcatctggaccatcatcagcgaccccggcagcagaatccacctgagcttcaacgacttcgacctggagagccagttcgacttcctggccgtgaaggacggcgacagccccgagagccccatcctgggcaccttcaccggcgccgaggtgcccagccacctgaccagcaacagccacatcctgagactggagttccaggccgaccacagcatgagcggcagaggcttcaacatcacctacaacaccttcggccacaacgagtgccccgaccccggcatccccatcaacgccagaagattcggcgacaacttccagctgggcagcagcatcagcgtgatctgcgaggagggcttcatcaagacccagggcaccgagaccatcacctgcatcctgatggacggcaaggtgatgtggagcggcctgatccccaagtgcggcgccccctgcggcggccacttcagcgcccccagcggcgtgatcctgagccccggctggcccggctactacaaggacagcctgaactgcgagtgggtgatcgaggccgagcccggccacagcatcaagatcaccttcgagagattccagaccgagctgaactacgacgtgctggaggtgcacgacggccccaacctgctgagccccctgctgggcagctacaacggcacccaggtgccccagttcctgttcagcagcagcaacttcatctacctgctgttcaccaccgacaacagcagaagcaacaacggcttcaagatccactacgagagcgtgaccgtgaacacctacagctgcctggaccccggcatccccgtgcacggcagaagatacggccacgacttcagcatcggcagcaccgtgagcttcagctgcgacagcggctacagactgagccacgaggagcccctgctgtgcgagaagaaccactggtggagccaccccctgcccacctgcgacgccctgtgcggcggcgacgtgagaggccccagcggcaccatcctgagccccggctaccccgagttctaccccaacagcctgaactgcacctggaccgtggacgtgacccacggcaagggcgtgcagttcaacttccacaccttccacctggaggaccaccacgactacctgctgatcaccgagaacggcagcttcacccagcccctggccagactgaccggcagcgacctgccccccaccatcaacgccggcctgtacggcaacttcagagcccagctgagattcatcagcgacttcagcatcagctacgagggcttcaacatcaccttcagcgagtacaacctggagccctgcgaggaccccggcatcccccagtacggcagcagaatcggcttcaacttcggcatcggcgacaccctgaccttcagctgcagcagcggctacagactggagggcaccagcgagatcatctgcctgggcggcggcagaagagtgtggagcgcccccctgcccagatgcgtggccgagtgcggcgccagcgccaccaacaacgagggcatcctgctgagccccaactaccccctgaactacgagaacaaccacgagtgcatctacagcatccaggtgcaggccggcaagggcatcaacatcagcgccagaaccttccacctggcccagggcgacgtgctgaagatctacgacggcaaggacaagaccacccacctgctgggcgccttcaccggcgccagcatgagaggcctgaccctgagcagcaccagcaaccagctgtggctggagttcaacagcgacaccgagggcaccgacgagggcttccagctggtgtacaccagcttcgagctgagccactgcgaggaccccggcatcccccagttcggctacaagatcagcgaccagggccacttcgccggcagcaccatcatctacggctgcaaccccggctacaccctgcacggcagcagcctgctgaagtgcatgaccggcgagagaagagcctgggactaccccctgcccagctgcatcgccgagtgcggcggcagattcaagggcgagagcagcggcagaatcctgagccccggctaccccttcccctacgacaacaacctgagatgcatgtggatgatcgaggtggaccccggcaacatcgtgagcctgcagttcctggccttcgacaccgaggccagccacgacatcctgagagtgtgggacggcccccccgagaacgacatgctgctgaaggagatcagcggcagcctgatccccgagggcatccacagcaccctgaacatcgtgaccatccagttcgacaccgacttctacatcagcaagagcggcttcgccatccagttcagcagcagcgtggccaccgcctgcagagaccccggcgtgcccatgaacggcaccagaaacggcgacggcagagagcccggcgacaccgtggtgttccagtgcgaccccggctacgagctgcagggcgaggagagaatcacctgcatccaggtggagaacagatacttctggcagcccagcccccccgtgtgcatcgccccctgcggcggcaacctgaccggcagcagcggcttcatcctgagccccaacttcccccacccctacccccacagcagagactgcgactggaccatcaccgtgaacgccgactacgtgatcagcctggccttcatcagcttcagcatcgagcccaactacgacttcctgtacatctacgacggccccgacagcaacagccccctgatcggcagcttccaggacagcaagctgcccgagagaatcgagagcagcagcaacaccatgcacctggccttcagaagcgacggcagcgtgagctacaccggcttccacctggagtacaaggccaagctgagagagagctgcttcgaccccggcaacatcatgaacggcaccagactgggcatggactacaagctgggcagcaccgtgacctactactgcgacgccggctacgtgctgcagggctacagcaccctgacctgcatcatgggcgacgacggcagacccggctggaacagagccctgcccagctgccacgccccctgcggcagcagaagcaccggcagcgagggcaccgtgctgagccccaactaccccaagaactacagcgtgggccacaactgcgtgtacagcatcgccgtgcccaaggagttcgtggtgttcggccagttcgtgttcttccagaccagcctgcacgacgtggtggaggtgtacgacggccccacccagcagagcagcctgctgagcagcctgagcggcagccacagcggcgagagcctgcccctgagcagcggcaaccagatcaccatcagattcaccagcgtgggccccatcaccgccaagggcttccacttcgtgtaccaggccgtgcccagaaccagcagcacccagtgcagcagcgtgcccgagcccagattcggcagaagaatcggcaacgagttcgccgtgggcagcagcgtgctgttcgactgcaaccccggctacatcctgcacggcagcatcgccatcagatgcgagaccgtgcccaacagcctggcccagtggaacgacagcctgcccacctgcatcgtgccctgcggcggcatcctgaccaagagaaagggcaccatcctgagccccggctaccccgagccctacgacaacaacctgaactgcgtgtggaagatcaccgtgcccgagggcgccggcatccaggtgcaggtggtgagcttcgccaccgagcacaactgggacagcctggacttctacgacggcggcgacaacaacgcccccagactgggcagctacagcggcaccaccatcccccacctgctgaacagcaccagcaacaacctgtacctgaacttccagagcgacatcagcgtgagcgccgccggcttccacctggagtacaccgccatcggcctggacagctgccccgagccccagacccccagcagcggcatcaagatcggcgacagatacatggtgggcgacgtggtgagcttccagtgcgaccagggctacagcctgcagggccacagccacatcacctgcatgcccggccccgtgagaagatggaactaccccatccccatctgcctggcccagtgcggcggcgccatgagcgacttcagcggcgtgatcctgagccccggcttccccggcaactaccccagcagcctggactgcacctggaccatcaacctgcccatcggcttcggcgtgcacctgcagttcgtgaacttcagcaccgagaccatccacgactacctggaggtgagaagcggcagcagcgagaccagcaccgtgatcggcagactgagcggcccccagatccccagcagcctgttcagcaccacccacgagaccagcctgtacttccacagcgactacagccagaacaagcagggcttccacatcgtgtaccaggcctaccagctgcagagctgccccgaccccagacccttcagaaacggcttcgtgatcggcaacgacttcaccgtgggccagaccatcagcttcgagtgcttccccggctacaccctgatcggcaacagcgccctgacctgcctgcacggcgtgagcagaaactggaaccaccccctgcccagatgcgaggccctgtgcggcggcaacatcaccgccatgaacggcaccatctacagccccggctaccccgacgagtaccccaacttccaggactgcttctggctggtgagagtgccccccggcaacggcatctacatcaacttcaccgtgctgcagaccgagcccatctacgacttcatcaccgtgtgggacggccccgaccagaacagcccccagatcggccagttcagcggcaacaccgccctggagagcgtgtacagcaccagcaaccagatcctgatcaagttccacagcgacttcaccaccagcggcttcttcgtgctgagctaccacgcctaccagctgagagtgtgccagccccccccccccgtgcccaacgccgagatcctgaccgaggacgacgagttcgagatcggcgacatcatcagataccagtgcctgcccggcttcaccctggtgggcaacgccatcctgacctgcagactgggcgagagactgcagatggacggcgccccccccgtgtgccaggtgctgtgccccgccaacgagctgagactggacagcaccggcgtgatcctgagccccggctaccccgacagctaccccaacctgcagatgtgcgcctggagcatcagcgtggagaagggctacaacatcaccatgttcgtggagttcttccagaccgagaaggagttcgacgtgctgcaggtgtacgacggccccaacatccagagccccgtgctgatcagcctgagcggcgactacagcagcgccttcaacatcaccagcaacggccacgaggtgttcctgcagtggagcgccgaccacggcaacaacaagaagggcttcagaatcagatacatcgccttctactgcagcacccccgagagccccccccacggctacatcatcagccagaccggcggccagctgaacagcgtggtgagatgggcctgcgacagaggcttcagactggtgggcaagagcagcgccgtgtgcagaaagagcagctacggctaccacgcctgggacgcccccgtgcccgcctgccaggccatcagctgcggcatccccaaggcccccaccaacggcggcatcctgaccaccgactacctggtgggcaccagagtgacctacttctgcaacgacggctacagactgagcagcaaggagctgaccaccgccgtgtgccagagcgacggcacctggagcaaccacaacaagacccccagatgcgtggtgatcagctgcggcgagctgcccaccccccccaacggcaacaagatcggcacccagaccagctacggcagcaccgccatcttcacctgcgacctgggcttcatgctggtgggcagcgccgtgagagagtgcctgagcagcggcctgtggagcgagagcgagaccagatgcctggccggccactgcggcatccccgagctgatcgtgaacggccaggtgatcggcgagaactacggctacagagacaccgtggtgtaccagtgcaaccccggcttcagactgatcggcagcagcgtgagaatctgccagcaggaccacaactggagcggccagctgcccagctgcgtgcccgtgagctgcggccaccccggcagccccatctacggcagaaccagcggcaacggcttcaacttcaacgacgtggtgaccttcagctgcaacatcggctacctgatgcagggccccaccaaggcccagtgccaggccaacagacagtggagccaccccccccccatgtgcaaggtggtgaactgcagcgaccccggcatccccgccaacagcaagagagagagcaagatcgagcacggcaacttcacctacggcaccgtggtgttctacgactgcaaccccggctacttcctgttcggcagcagcgtgctgatctgccagcccaacggccagtgggacaagcccctgcccgagtgcatcatgatcgactgcggccaccccggcgtgccccccaacgccgtgctgagcggcgagaagtacaccttcggcagcaccgtgcactacagctgcaccggcaagagaagcctgctgggccagagcagcagaacctgccagctgaacggccactggagcggcagccagccccactgcagcggcgacgccaccggcacctgcggcgaccccggcacccccggccacggcagcagacaggagagcaacttcagaaccaagagcaccgtgagatacgcctgcgacaccggctacatcctgcacggcagcgaggagagaacctgcctggccaacggcagctggaccggcagacagcccgagtgcaaggccgtgcagtgcggcaaccccggcaccaccgccaacggcaaggtgttcagaatcgacggcaccaccttcagcagcagcgtgatctacagctgcatggagggctacatcctgagcggccccagcgtgagacagtgcaccgccaacggcacctggagcggcaccctgcccaactgcaccatcatcagctgcggcgaccccggcatccccgccaacggcctgagatacggcgacgactacgtggtgggccagaacgtgagctacatgtgccagcccggctacaccatggagctgaacggcagcagaatcagaacctgcaccatcaacggcacctggagcggcgtgatgcccacctgcagagccgtgacctgccccacccccccccagatcagcaacggcagactggagggcaccaacttcgactggggcttcagcatcagctacatctgcagccccggctacgagctgagcttccccgccgtgctgacctgcgtgggcaacggcacctggagcggcgaggtgccccagtgcctgcccaagttctgcggcgaccccggcatccccgcccagggcaagagagagggcaagagcttcatctaccagagcgaggtgagcttcagctgcaacttccccttcatcctggtgggcagcagcaccagaatctgccaggccgacggcacctggagcggcagcagcccccactgcatcgagcccacccagaccagctgcgagaaccccggcgtgcccagacacggcagccagaacaacaccttcggcttccaggtgggcagcgtggtgcagttccactgcaagaagggccacctgctgcagggcagcaccaccagaacctgcctgcccgacctgacctggagcggcatccagcccgagtgcatcccccacagctgcaagcagcccgagacccccgcccacgccaacgtggtgggcatggacctgcccagccacggctacaccctgatctacacctgccagcccggcttcttcctggccggcggcaccgagcacagagtgtgcagaagcgacaacacctggaccggcaaggtgcccatctgcgaggccggcagcaagatcctggtgaaggaccccagacccgccctgggcacccccagccccaagctgagcgtgcccgacgacgtgttcgcccagaactacatctggaagggcagctacaacttcaagggcagaaagcagcccatgaccctgaccgtgaccagcttcaacgccagcaccggcagagtgaacgccaccctgagcaacagcaacatggagctgctgctgagcggcgtgtacaagagccaggaggccagactgatgctgagaatctacctgatcaaggtgcccgcccacgccagcgtgaagaagatgaaggaggagaactgggccatggacggcttcgtgagcgccgagcccgacggcgccacctacgtgttccagggcttcatccagggcaaggactacggccagttcggcctgcagagactgggcctgaacatgagcgagggcagcaacagcagcaaccagccccacggcaccaacagcagcagcgtggccatcgccatcctggtgcccttcttcgccctgatcttcgccggcttcggcttctacctgtacaagcagagaaccgcccccaagacccagtacaccggctgcagcgtgcacgagaacaacaacggccaggccgccttcgagaaccccatgtacgacaccaacgccaagagcgtggagggcaaggccgtgagattcgaccccaacctgaacaccgtgtgcaccatggtgtag

SEQ ID NO: 77923 - DNA, 2511 bp, synthetic construct
  misc_feature 1..2511: note = Description of Artificial Sequence: Synthetic coding sequence
  source 1..2511: mol_type = other DNA
atggccggcctgaactgcggcgtgagcatcgccctgctgggcgtgctgctgctgggcgccgccagactgcccagaggcgccgaggccttcgagatcgccctgcccagagagagcaacatcaccgtgctgatcaagctgggcacccccaccctgctggccaagccctgctacatcgtgatcagcaagagacacatcaccatgctgagcatcaagagcggcgagagaatcgtgttcaccttcagctgccagagccccgagaaccacttcgtgatcgagatccagaagaacatcgactgcatgagcggcccctgccccttcggcgaggtgcagctgcagcccagcaccagcctgctgcccaccctgaacagaaccttcatctgggacgtgaaggcccacaagagcatcggcctggagctgcagttcagcatccccagactgagacagatcggccccggcgagagctgccccgacggcgtgacccacagcatcagcggcagaatcgacgccaccgtggtgagaatcggcaccttctgcagcaacggcaccgtgagcagaatcaagatgcaggagggcgtgaagatggccctgcacctgccctggttccaccccagaaacgtgagcggcttcagcatcgccaacagaagcagcatcaagagactgtgcatcatcgagagcgtgttcgagggcgagggcagcgccaccctgatgagcgccaactaccccgagggcttccccgaggacgagctgatgacctggcagttcgtggtgcccgcccacctgagagccagcgtgagcttcctgaacttcaacctgagcaactgcgagagaaaggaggagagagtggagtactacatccccggcagcaccaccaaccccgaggtgttcaagctggaggacaagcagcccggcaacatggccggcaacttcaacctgagcctgcagggctgcgaccaggacgcccagagccccggcatcctgagactgcagttccaggtgctggtgcagcacccccagaacgagagcaacaagatctacgtggtggacctgagcaacgagagagccatgagcctgaccatcgagcccagacccgtgaagcagagcagaaagttcgtgcccggctgcttcgtgtgcctggagagcagaacctgcagcagcaacctgaccctgaccagcggcagcaagcacaagatcagcttcctgtgcgacgacctgaccagactgtggatgaacgtggagaagaccatcagctgcaccgaccacagatactgccagagaaagagctacagcctgcaggtgcccagcgacatcctgcacctgcccgtggagctgcacgacttcagctggaagctgctggtgcccaaggacagactgagcctggtgctggtgcccgcccagaagctgcagcagcacacccacgagaagccctgcaacaccagcttcagctacctggtggccagcgccatccccagccaggacctgtacttcggcagcttctgccccggcggcagcatcaagcagatccaggtgaagcagaacatcagcgtgaccctgagaaccttcgcccccagcttccagcaggaggccagcagacagggcctgaccgtgagcttcatcccctacttcaaggaggagggcgtgttcaccgtgacccccgacaccaagagcaaggtgtacctgagaacccccaactgggacagaggcctgcccagcctgaccagcgtgagctggaacatcagcgtgcccagagaccaggtggcctgcctgaccttcttcaaggagagaagcggcgtggtgtgccagaccggcagagccttcatgatcatccaggagcagagaaccagagccgaggagatcttcagcctggacgaggacgtgctgcccaagcccagcttccaccaccacagcttctgggtgaacatcagcaactgcagccccaccagcggcaagcagctggacctgctgttcagcgtgaccctgacccccagaaccgtggacctgaccgtgatcctgatcgccgccgtgggcggcggcgtgctgctgctgagcgccctgggcctgatcatctgctgcgtgaagaagaagaagaagaagaccaacaagggccccgccgtgggcatctacaacgacaacatcaacaccgagatgcccagacagcccaagaagttccagaagggcagaaaggacaacgacagccacgtgtacgccgtgatcgaggacaccatggtgtacggccacctgctgcaggacagcagcggcagcttcctgcagcccgaggtggacacctacagacccttccagggcaccatgggcgtgtgcccccccagcccccccaccatctgcagcagagcccccaccgccaagctggccaccgaggagcccccccccagaagcccccccgagagcgagagcgagccctacaccttcagccaccccaacaacggcgacgtgagcagcaaggacaccgacatccccctgctgaacacccaggagcccatggagcccgccgagtag

SEQ ID NO: 77924 - DNA, 1032 bp, synthetic construct
  misc_feature 1..1032: note = Description of Artificial Sequence: Synthetic coding sequence
  source 1..1032: mol_type = other DNA
atggccggcctgaactgcggcgtgagcatcgccctgctgggcgtgctgctgctgggcgccgccagactgcccagaggcgccgaggccttcgagatcgccctgcccagagagagcaacatcaccgtgctgatcaagctgggcacccccaccctgctggccaagccctgctacatcgtgatcagcaagagacacatcaccatgctgagcatcaagagcggcgagagaatcgtgttcaccttcagctgccagagccccgagaaccacttcgtgatcgagatccagaagaacatcgactgcatgagcggcccctgccccttcggcgaggtgcagctgcagcccagcaccagcctgctgcccaccctgaacagaaccttcatctgggacgtgaaggcccacaagagcatcggcctggagctgcagttcagcatccccagactgagacagatcggccccggcgagagctgccccgacggcgtgacccacagcatcagcggcagaatcgacgccaccgtggtgagaatcggcaccttctgcagcaacggcaccgtgagcagaatcaagatgcaggagggcgtgaagatggccctgcacctgccctggttccaccccagaaacgtgagcggcttcagcatcgccaacagaagcagcatcaagagactgtgcatcatcgagagcgtgttcgagggcgagggcagcgccaccctgatgagcgccaactaccccgagggcttccccgaggacgagctgatgacctggcagttcgtggtgcccgcccacctgagagccagcgtgagcttcctgaacttcaacctgagcaactgcgagagaaaggaggagagagtggagtactacatccccggcagcaccaccaaccccgaggtgttcaagctggaggacaagcagcccggcaacatggccggcaacttcaacctgagcctgcagggctgcgaccaggacgcccagagccccggcatcctgagactgcagttccaggtgctggtgcagcacccccagaacgagagcagcgagtag

SEQ ID NO: 77925 - DNA, 513 bp, synthetic construct
  misc_feature 1..513: note = Description of Artificial Sequence: Synthetic coding sequence
  source 1..513: mol_type = other DNA
atgatgaacatgagcctgcccttcctgtggagcctgctgaccctgctgatcttcgccgaggtgaacggcgaggccggcgagctggagctgcagagacagaagagaagcatcaacctgcagcagcccagaatggccaccgagagaggcaacctggtgttcctgaccggcagcgcccagaacatcgagttcagaaccggcagcctgggcaagatcaagctgaacgacgaggacctgagcgagtgcctgcaccagatccagaagaacaaggaggacatcatcgagctgaagggcagcgccatcggcctgccccagaacatcagcagccagatctaccagctgaacagcaagctggtggacctggagagaaagttccagggcctgcagcagaccgtggacaagaaggtgtgcagcagcaacccctgccagaacggcggcacctgcctgaacctgcacgacagcttcttctgcatctgccccccccagtggaaggtgagccacctgctgttcggctag

SEQ ID NO: 77926 - DNA, 10872 bp, synthetic construct
  misc_feature 1..10872: note = Description of Artificial Sequence: Synthetic coding sequence
  source 1..10872: mol_type = other DNA
atgatgaacatgagcctgcccttcctgtggagcctgctgaccctgctgatcttcgccgaggtgaacggcgaggccggcgagctggagctgcagagacagaagagaagcatcaacctgcagcagcccagaatggccaccgagagaggcaacctggtgttcctgaccggcagcgcccagaacatcgagttcagaaccggcagcctgggcaagatcaagctgaacgacgaggacctgagcgagtgcctgcaccagatccagaagaacaaggaggacatcatcgagctgaagggcagcgccatcggcctgccccagaacatcagcagccagatctaccagctgaacagcaagctggtggacctggagagaaagttccagggcctgcagcagaccgtggacaagaaggtgtgcagcagcaacccctgccagaacggcggcacctgcctgaacctgcacgacagcttcttctgcatctgccccccccagtggaagggccccctgtgcagcgccgacgtgaacgagtgcgagatctacagcggcacccccctgagctgccagaacggcggcacctgcgtgaacaccatgggcagctacagctgccactgcccccccgagacctacggcccccagtgcgccagcaagtacgacgactgcgagggcggcagcgtggccagatgcgtgcacggcatctgcgaggacctgatgagagagcaggccggcgagcccaagtacagctgcgtgtgcgacgccggctggatgttcagccccaacagccccgcctgcaccctggacagagacgagtgcagcttccagcccggcccctgcagcaccctggtgcagtgcttcaacacccagggcagcttctactgcggcgcctgccccaccggctggcagggcaacggctacatctgcgaggacatcaacgagtgcgagatcaacaacggcggctgcagcgtggccccccccgtggagtgcgtgaacacccccggcagcagccactgccaggcctgcccccccggctaccagggcgacggcagagtgtgcaccctgaccgacatctgcagcgtgagcaacggcggctgccaccccgacgccagctgcagcagcaccctgggcagcctgcccctgtgcacctgcctgcccggctacaccggcaacggctacggccccaacggctgcgtgcagctgagcaacatctgcctgagccacccctgcctgaacggccagtgcatcgacaccgtgagcggctacttctgcaagtgcgacagcggctggaccggcgtgaactgcaccgagaacatcaacgagtgcctgagcaacccctgcctgaacggcggcacctgcgtggacggcgtggacagcttcagctgcgagtgcaccagactgtggaccggcgccctgtgccaggtgccccagcaggtgtgcggcgagagcctgagcggcatcaacggcagcttcagctacagaagccccgacgtgggctacgtgcacgacgtgaactgcttctgggtgatcaagaccgagatgggcaaggtgctgagaatcaccttcaccttcttcagactggagagcatggacaactgcccccacgagttcctgcaggtgtacgacggcgacagcagcagcgccttccagctgggcagattctgcggcagcagcctgccccacgagctgctgagcagcgacaacgccctgtacttccacctgtacagcgagcacctgagaaacggcagaggcttcaccgtgagatgggagacccagcagcccgagtgcggcggcatcctgaccggcccctacggcagcatcaagagccccggctaccccggcaactacccccccggcagagactgcgtgtggatcgtggtgaccagccccgacctgctggtgaccttcaccttcggcaccctgagcctggagcaccacgacgactgcaacaaggactacctggagatcagagacggccccctgtaccaggaccccctgctgggcaagttctgcaccaccttcagcgtgccccccctgcagaccaccggccccttcgccagaatccacttccacagcgacagccagatcagcgaccagggcttccacatcacctacctgaccagccccagcgacctgagatgcggcggcaactacaccgaccccgagggcgagctgttcctgcccgagctgagcggccccttcacccacaccagacagtgcgtgtacatgatgaagcagccccagggcgagcagatccagatcaacttcacccacgtggagctgcagtgccagagcgacagcagccagaactacatcgaggtgagagacggcgagaccctgctgggcaaggtgtgcggcaacggcaccatcagccacatcaagagcatcaccaacagcgtgtggatcagattcaagatcgacgccagcgtggagaaggccagcttcagagccgtgtaccaggtggcctgcggcgacgagctgaccggcgagggcgtgatcagaagccccttcttccccaacgtgtaccccggcgagagaacctgcagatggaccatccaccagccccagagccaggtgatcctgctgaacttcaccgtgttcgagatcggcagcagcgcccactgcgagaccgactacgtggagatcggcagcagcagcatcctgggcagccccgagaacaagaagtactgcggcaccgacatccccagcttcatcaccagcgtgtacaacttcctgtacgtgaccttcgtgaagagcagcagcaccgagaaccacggcttcatggccaagttcagcgccgaggacctggcctgcggcgagatcctgaccgagagcaccggcaccatccagagccccggccaccccaacgtgtacccccacggcatcaactgcacctggcacatcctggtgcagcccaaccacctgatccacctgatgttcgagaccttccacctggagttccactacaactgcaccaacgactacctggaggtgtacgacaccgacagcgagaccagcctgggcagatactgcggcaagagcatcccccccagcctgaccagcagcggcaacagcctgatgctggtgttcgtgaccgacagcgacctggcctacgagggcttcctgatcaactacgaggccatcagcgccgccaccgcctgcctgcaggactacaccgacgacctgggcaccttcaccagccccaacttccccaacaactaccccaacaactgggagtgcatctacagaatcaccgtgagaaccggccagctgatcgccgtgcacttcaccaacttcagcctggaggaggccatcggcaactactacaccgacttcctggagatcagagacggcggctacgagaagagccccctgctgggcatcttctacggcagcaacctgccccccaccatcatcagccacagcaacaagctgtggctgaagttcaagagcgaccagatcgacaccagaagcggcttcagcgcctactgggacggcagcagcaccggctgcggcggcaacctgaccaccagcagcggcaccttcatcagccccaactaccccatgccctactaccacagcagcgagtgctactggtggctgaagagcagccacggcagcgccttcgagctggagttcaaggacttccacctggagcaccaccccaactgcaccctggactacctggccgtgtacgacggccccagcagcaacagccacctgctgacccagctgtgcggcgacgagaagccccccctgatcagaagcagcggcgacagcatgttcatcaagctgagaaccgacgagggccagcagggcagaggcttcaaggccgagtacagacagacctgcgagaacgtggtgatcgtgaaccagacctacggcatcctggagagcatcggctaccccaacccctacagcgagaaccagcactgcaactggaccatcagagccaccaccggcaacaccgtgaactacaccttcctggccttcgacctggagcaccacatcaactgcagcaccgactacctggagctgtacgacggccccagacagatgggcagatactgcggcgtggacctgcccccccccggcagcaccaccagcagcaagctgcaggtgctgctgctgaccgacggcgtgggcagaagagagaagggcttccagatgcagtggttcgtgtacggctgcggcggcgagctgagcggcgccaccggcagcttcagcagccccggcttccccaacagatacccccccaacaaggagtgcatctggtacatcagaaccgaccccggcagcagcatccagctgaccatccacgacttcgacgtggagtaccacagcagatgcaacttcgacgtgctggagatctacggcggccccgacttccacagccccagaatcgcccagctgtgcacccagagaagccccgagaaccccatgcaggtgagcagcaccggcaacgagctggccatcagattcaagaccgacctgagcatcaacggcagaggcttcaacgccagctggcaggccgtgaccggcggctgcggcggcatcttccaggcccccagcggcgagatccacagccccaactaccccagcccctacagaagcaacaccgactgcagctgggtgatcagagtggacagaaaccacagagtgctgctgaacttcaccgacttcgacctggagccccaggacagctgcatcatggcctacgacggcctgagcagcaccatgagcagactggccagaacctgcggcagagagcagctggccaaccccatcgtgagcagcggcaacagcctgttcctgagattccagagcggccccagcagacagaacagaggcttcagagcccagttcagacaggcctgcggcggccacatcctgaccagcagcttcgacaccgtgagcagccccagattccccgccaactaccccaacaaccagaactgcagctggatcatccaggcccagccccccctgaaccacatcaccctgagcttcacccacttcgagctggagagaagcaccacctgcgccagagacttcgtggagatcctggacggcggccacgaggacgcccccctgagaggcagatactgcggcaccgacatgccccaccccatcaccagcttcagcagcgccctgaccctgagattcgtgagcgacagcagcatcagcgccggcggcttccacaccaccgtgaccgccagcgtgagcgcctgcggcggcaccttctacatggccgagggcatcttcaacagccccggctaccccgacatctacccccccaacgtggagtgcgtgtggaacatcgtgagcagccccggcaacagactgcagctgagcttcatcagcttccagctggaggacagccaggactgcagcagagacttcgtggagatcagagagggcaacgccaccggccacctggtgggcagatactgcggcaacagcttccccctgaactacagcagcatcgtgggccacaccctgtgggtgagattcatcagcgacggcagcggcagcggcaccggcttccaggccaccttcatgaagatcttcggcaacgacaacatcgtgggcacccacggcaaggtggccagccccttctggcccgagaactacccccacaacagcaactaccagtggaccgtgaacgtgaacgccagccacgtggtgcacggcagaatcctggagatggacatcgaggagatccagaactgctactacgacaagctgagaatctacgacggccccagcatccacgccagactgatcggcgcctactgcggcacccagaccgagagcttcagcagcaccggcaacagcctgaccttccacttctacagcgacagcagcatcagcggcaagggcttcctgctggagtggttcgccgtggacgcccccgacggcgtgctgcccaccatcgcccccggcgcctgcggcggcttcctgagaaccggcgacgcccccgtgttcctgttcagccccggctggcccgacagctacagcaacagagtggactgcacctggctgatccaggcccccgacagcaccgtggagctgaacatcctgagcctggacatcgagagccacagaacctgcgcctacgacagcctggtgatcagagacggcgacaacaacctggcccagcagctggccgtgctgtgcggcagagagatccccggccccatcagaagcaccggcgagtacatgttcatcagattcaccagcgacagcagcgtgaccagagccggcttcaacgccagcttccacaagagctgcggcggctacctgcacgccgacagaggcatcatcaccagccccaagtaccccgagacctaccccagcaacctgaactgcagctggcacgtgctggtgcagagcggcctgaccatcgccgtgcacttcgagcagcccttccagatccccaacggcgacagcagctgcaaccagggcgactacctggtgctgagaaacggccccgacatctgcagcccccccctgggcccccccggcggcaacggccacttctgcggcagccacgccagcagcaccctgttcaccagcgacaaccagatgttcgtgcagttcatcagcgaccacagcaacgagggccagggcttcaagatcaagtacgaggccaagagcctggcctgcggcggcaacgtgtacatccacgacgccgacagcgccggctacgtgaccagccccaaccacccccacaactaccccccccacgccgactgcatctggatcctggccgccccccccgagaccagaatccagctgcagttcgaggacagattcgacatcgaggtgacccccaactgcaccagcaactacctggagctgagagacggcgtggacagcgacgcccccatcctgagcaagttctgcggcaccagcctgcccagcagccagtggagcagcggcgaggtgatgtacctgagattcagaagcgacaacagccccacccacgtgggcttcaaggccaagtacagcatcgcccagtgcggcggcagagtgcccggccagagcggcgtggtggagagcatcggccaccccaccctgccctacagagacaacctgttctgcgagtggcacctgcagggcctgagcggccactacctgaccatcagcttcgaggacttcaacctgcagaacagcagcggctgcgagaaggacttcgtggagatctgggacaaccacaccagcggcaacatcctgggcagatactgcggcaacaccatccccgacagcatcgacaccagcagcaacaccgccgtggtgagattcgtgaccgacggcagcgtgaccgccagcggcttcagactgagattcgagagcagcatggaggagtgcggcggcgacctgcagggcagcatcggcaccttcaccagccccaactaccccaaccccaacccccacggcagaatctgcgagtggagaatcaccgcccccgagggcagaagaatcaccctgatgttcaacaacctgagactggccacccaccccagctgcaacaacgagcacgtgatcgtgttcaacggcatcagaagcaacagcccccagctggagaagctgtgcagcagcgtgaacgtgagcaacgagatcaagagcagcggcaacaccatgaaggtgatcttcttcaccgacggcagcagaccctacggcggcttcaccgccagctacaccagcagcgaggacgccgtgtgcggcggcagcctgcccaacacccccgagggcaacttcaccagccccggctacgacggcgtgagaaactacagcagaaacctgaactgcgagtggaccctgagcaaccccaaccagggcaacagcagcatcagcatccacttcgaggacttctacctggagagccaccaggactgccagttcgacgtgctggagttcagagtgggcgacgccgacggccccctgatgtggagactgtgcggccccagcaagcccaccctgcccctggtgatcccctacagccaggtgtggatccacttcgtgaccaacgagagagtggagcacatcggcttccacgccaagtacagcttcaccgactgcggcggcatccagatcggcgacagcggcgtgatcaccagccccaactaccccaacgcctacgacagcctgacccactgcagcagcctgctggaggccccccagggccacaccatcaccctgaccttcagcgacttcgacatcgagccccacaccacctgcgcctgggacagcgtgaccgtgagaaacggcggcagccccgagagccccatcatcggccagtactgcggcaacagcaaccccagaaccatccagagcggcagcaaccagctggtggtgaccttcaacagcgaccacagcctgcagggcggcggcttctacgccacctggaacacccagaccctgggctgcggcggcatcttccacagcgacaacggcaccatcagaagcccccactggccccagaacttccccgagaacagcagatgcagctggaccgccatcacccacaagagcaagcacctggagatcagcttcgacaacaacttcctgatccccagcggcgacggccagtgccagaacagcttcgtgaaggtgtgggccggcaccgaggaggtggacaaggccctgctggccaccggctgcggcaacgtggcccccggccccgtgatcacccccagcaacaccttcaccgccgtgttccagagccaggaggcccccgcccagggcttcagcgccagcttcgtgagcagatgcggcagcaacttcaccggccccagcggctacatcatcagccccaactaccccaagcagtacgacaacaacatgaactgcacctacgtgatcgaggccaaccccctgagcgtggtgctgctgaccttcgtgagcttccacctggaggccagaagcgccgtgaccggcagctgcgtgaacgacggcgtgcacatcatcagaggctacagcgtgatgagcacccccttcgccaccgtgtgcggcgacgagatgcccgcccccctgaccatcgccggccccgtgctgctgaacttctacagcaacgagcagatcaccgacttcggcttcaagttcagctacagaatcatcagctgcggcggcgtgttcaacttcagcagcggcatcatcaccagccccgcctacagctacgccgactaccccaacgacatgcactgcctgtacaccatcaccgtgagcgacgacaaggtgatcgagctgaagttcagcgacttcgacgtggtgcccagcaccagctgcagccacgactacctggccatctacgacggcgccaacaccagcgaccccctgctgggcaagttctgcggcagcaagagaccccccaacgtgaagagcagcaacaacagcatgctgctggtgttcaagaccgacagcttccagaccgccaagggctggaagatgagcttcagacagaccctgggcccccagcagggctgcggcggctacctgaccggcagcaacaacaccttcgccagccccgacagcgacagcaacggcatgtacgacaagaacctgaactgcgtgtggatcatcatcgcccccgtgaacaaggtgatccacctgaccttcaacaccttcgccctggaggccgccagcaccagacagagatgcctgtacgactacgtgaagctgtacgacggcgacagcgagaacgccaacctggccggcaccttctgcggcagcaccgtgcccgcccccttcatcagcagcggcaacttcctgaccgtgcagttcatcagcgacctgaccctggagagagagggcttcaacgccacctacaccatcatggacatgccctgcggcggcacctacaacgccacctggaccccccagaacatcagcagccccaacagcagcgaccccgacgtgcccttcagcatctgcacctgggtgatcgacagccccccccaccagcaggtgaagatcaccgtgtgggccctgcagctgaccagccaggactgcacccagaactacctgcagctgcaggacagcccccagggccacggcaacagcagattccagttctgcggcagaaacgccagcgccgtgcccgtgttctacagcagcatgagcaccgccatggtgatcttcaagagcggcgtggtgaacagaaacagcagaatgagcttcacctaccagatcgccgactgcaacagagactaccacaaggccttcggcaacctgagaagccccggctggcccgacaactacgacaacgacaaggactgcaccgtgaccctgaccgccccccagaaccacaccatcagcctgttcttccacagcctgggcatcgagaacagcgtggagtgcagaaacgacttcctggaggtgagaaacggcagcaacagcaacagccccctgctgggcaagtactgcggcaccctgctgcccaaccccgtgttcagccagaacaacgagctgtacctgagattcaagagcgacagcgtgaccagcgacagaggctacgagatcatctggaccagcagccccagcggctgcggcggcaccctgtacggcgacagaggcagcttcaccagccccggctaccccggcacctaccccaacaacacctactgcgagtgggtgctggtggcccccgccggcagactggtgaccatcaacttctacttcatcagcatcgacgaccccggcgactgcgtgcagaactacctgaccctgtacgacggccccaacgccagcagccccagcagcggcccctactgcggcggcgacaccagcatcgcccccttcgtggccagcagcaaccaggtgttcatcaagttccacgccgactacgccagaagacccagcgccttcagactgacctgggacagctag

SEQ ID NO: 77927 - DNA, 318 bp, synthetic construct
  misc_feature 1..318: note = Description of Artificial Sequence: Synthetic coding sequence
  source 1..318: mol_type = other DNA
aacagcaagctggtggacctggagagaaagttccagggcctgcagcagaccgtggacaagaaggtgtgcagcagcaacccctgccagaacggcggcacctgcctgaacctgcacgacagcttcttctgcatctgccccccccagtggaagggccccctgtgcagcgccgacgtgaacgagtgcgagatctacagcggcacccccctgagctgccagaacggcggcacctgcgtgaacaccatgggcagctacagaaacccctgcagcaacatccccaaggagcccgaggagggcagcagagactggcacagagagtag

SEQ ID NO: 77928 - DNA, 267 bp, synthetic construct
  misc_feature 1..267: note = Description of Artificial Sequence: Synthetic coding sequence
  source 1..267: mol_type = other DNA
agcaccggcaacgagctggccatcagattcaagaccgacctgagcatcaacggcagaggcttcaacgccagctggcaggccgtgaccggcggctgcggcggcatcttccaggcccccagcggcgagatccacagccccaactaccccagcccctacagaagcaacaccgactgcagctgggtgatcagagtggacagaaaccacagagtgctgctgaacttcaccgacttcgacctggagccccaggacagctgcatcatggtgtag

SEQ ID NO: 77929 - DNA, 1395 bp, synthetic construct
  misc_feature 1..1395: note = Description of Artificial Sequence: Synthetic coding sequence
  source 1..1395: mol_type = other DNA
atgagccacagctggaacgtgctgtggctgaccttctgcagcgacagcaacggcatgtacgacaagaacctgaactgcgtgtggatcatcatcgcccccgtgaacaaggtgatccacctgaccttcaacaccttcgccctggaggccgccagcaccagacagagatgcctgtacgactacgtgaagctgtacgacggcgacagcgagaacgccaacctggccggcaccttctgcggcagcaccgtgcccgcccccttcatcagcagcggcaacttcctgaccgtgcagttcatcagcgacctgaccctggagagagagggcttcaacgccacctacaccatcatggacatgccctgcggcggcacctacaacgccacctggaccccccagaacatcagcagccccaacagcagcgaccccgacgtgcccttcagcatctgcacctgggtgatcgacagccccccccaccagcaggtgaagatcaccgtgtgggccctgcagctgaccagccaggactgcacccagaactacctgcagctgcaggacagcccccagggccacggcaacagcagattccagttctgcggcagaaacgccagcgccgtgcccgtgttctacagcagcatgagcaccgccatggtgatcttcaagagcggcgtggtgaacagaaacagcagaatgagcttcacctaccagatcgccgactgcaacagagactaccacaaggccttcggcaacctgagaagccccggctggcccgacaactacgacaacgacaaggactgcaccgtgaccctgaccgccccccagaaccacaccatcagcctgttcttccacagcctgggcatcgagaacagcgtggagtgcagaaacgacttcctggaggtgagaaacggcagcaacagcaacagccccctgctgggcaagtactgcggcaccctgctgcccaaccccgtgttcagccagaacaacgagctgtacctgagattcaagagcgacagcgtgaccagcgacagaggctacgagatcatctggaccagcagccccagcggctgcggcggcaccctgtacggcgacagaggcagcttcaccagccccggctaccccggcacctaccccaacaacacctactgcgagtgggtgctggtggcccccgccggcagactggtgaccatcaacttctacttcatcagcatcgacgaccccggcgactgcgtgcagaactacctgaccctgtacgacggccccaacgccagcagccccagcagcggcccctactgcggcggcgacaccagcatcgcccccttcgtggccagcagcaaccaggtgttcatcaagttccacgccgactacgccagaagacccagcgccttcagactgacctgggacagctag

SEQ ID NO: 77930 - DNA, 864 bp, synthetic construct
  misc_feature 1..864: note = Description of Artificial Sequence: Synthetic coding sequence
  source 1..864: mol_type = other DNA
atggagctggagagaatcgtgagcgccgccctgctggccttcgtgcagacccacctgcccgaggccgacctgagcggcctggacgaggtgatcttcagctacgtgctgggcgtgctggaggacctgggccccagcggccccagcgaggagaacttcgacatggaggccttcaccgagatgatggaggcctacgtgcccggcttcgcccacatccccagaggcaccatcggcgacatgatgcagaagctgagcggccagctgagcgacgccagaaacaaggagaacctgcagccccagagcagcggcgtgcagggccaggtgcccatcagccccgagcccctgcagagacccgagatgctgaaggaggagaccagaagcagcgccgccgccgccgccgacacccaggacgaggccaccggcgccgaggaggagctgctgcccggcgtggacgtgctgctggaggtgttccccacctgcagcgtggagcaggcccagtgggtgctggccaaggccagaggcgacctggaggaggccgtgcagatgctggtggagggcaaggaggagggccccgccgcctgggagggccccaaccaggacctgcccagaagactgagaggcccccagaaggacgagctgaagagcttcatcctgcagaagtacatgatggtggacagcgccgaggaccagaagatccacagacccatggcccccaaggaggcccccaagaagctgatcagatacatcgacaaccaggtggtgagcaccaagggcgagagattcaaggacgtgagaaaccccgaggccgaggagatgaaggccacctacatcaacctgaagcccgccagaaagtacagattccactag

SEQ ID NO: 77931 - DNA, 1365 bp, synthetic construct
  misc_feature 1..1365: note = Description of Artificial Sequence: Synthetic coding sequence
  source 1..1365: mol_type = other DNA
atggccgccgcccccggcggcagcgcccagcccgccggccccggccccagactgggcttcagcaccgccgacagcggcgtgggcatgagcggcctgaaccccggccccgccgtgcccatgaaggaccacgacgccatcaagctgttcgtgggccagatccccagaggcctggacgagcaggacctgaagcccctgttcgaggagttcggcagaatctacgagctgaccgtgctgaaggacagactgaccggcctgcacaagggctgcgccttcctgacctactgcgccagagacagcgccctgaaggcccagagcgccctgcacgagcagaagaccctgcccggcatgaacagacccatccaggtgaagcccgccgccagcgagggcagaggcgaggacagaaagctgttcgtgggcatgctgggcaagcagcagggcgaggaggacgtgagaagactgttccagcccttcggccacatcgaggagtgcaccgtgctgagaagccccgacggcaccagcaagggctgcgccttcgtgaagttcggcagccagggcgaggcccaggccgccatcagaggcctgcacggcagcagaaccatggccggcgccagcagcagcctggtggtgaagctggccgacaccgacagagagagagccctgagaagaatgcagcagatggccggccacctgggcgccttccaccccgcccccctgcccctgggcgcctgcggcgcctacaccaccgccatcctgcagcaccaggccgccctgctggccgccgcccagggccccggcctgggccccgtggccgccgtggccgcccagatgcagcacgtggccgccttcagcctggtggccgcccccctgctgcccgccgccgccgccaacagcccccccggcagcggccccggcaccctgcccggcctgcccgcccccatcggcgtgaacggcttcggccccctgaccccccagaccaacggccagcccggcagcgacaccctgtacaacaacggcctgagcccctaccccgcccagagccccggcgtggccgaccccctgcagcaggcctacgccggcatgcaccactacgccggccccgagggctgcaacctgttcatctaccacctgccccaggagttcggcgacgccgagctgatccagaccttcctgcccttcggcgccgtggtgagcgccaaggtgttcgtggacagagccaccaaccagagcaagtgcttcggcttcgtgagcttcgacaaccccaccagcgcccagaccgccatccaggccatgaacggcttccagatcggcatgaagagactgaaggtgcagctgaagagacccaaggacgccaacagaccctactag

SEQ ID NO: 77932 - DNA, 1398 bp, synthetic construct
  misc_feature 1..1398: note = Description of Artificial Sequence: Synthetic coding sequence
  source 1..1398: mol_type = other DNA
atgaaggagcccgacgccatcaagctgttcgtgggccagatccccagacacctggaggagaaggacctgaagcccatcttcgagcagttcggcagaatcttcgagctgaccgtgatcaaggacaagtacaccggcctgcacaagggctgcgccttcctgacctactgcgccagagacagcgccctgaaggcccagagcgccctgcacgagcagaagaccctgcccggcatgaacagacccatccaggtgaagcccgccgacagcgagagcagaggcgaggacagaaagctgttcgtgggcatgctgggcaagcagcagaccgacgaggacgtgagaaagatgttcgagcccttcggcaccatcgacgagtgcaccgtgctgagaggccccgacggcaccagcaagggctgcgccttcgtgaagttccagacccacgccgaggcccaggccgccatcaacaccctgcacagcagcagaaccctgcccggcgccagcagcagcctggtggtgaagttcgccgacaccgagaaggagagaggcctgagaagaatgcagcaggtggccacccagctgggcatgttcagccccatcgccctgcagttcggcgcctacagcgcctacacccaggccctgatgcagcagcaggccgccctggtggccgcccacagcgcctacctgagccccatggccaccatggccgccgtgcagatgcagcacatggccgccatcaacgccaacggcctgatcgccacccccatcacccccagcagcggcaccagcaccccccccgccatcgccgccacccccgtgagcgccatccccgccgccctgggcgtgaacggctacagccccgtgcccacccagcccaccggccagcccgcccccgacgccctgtaccccaacggcgtgcacccctaccccgcccagagccccgccgcccccgtggaccccctgcagcaggcctacgccggcatgcagcactacaccgccgcctaccccgccgcctacagcctggtggcccccgccttcccccagccccccgccctggtggcccagcagccccccccccccccccagcagcagcagcagcagcagcagcagcagcagcagcagcagcagagagagggccccgacggctgcaacatcttcatctaccacctgccccaggagttcaccgacagcgagatcctgcagatgttcgtgcccttcggccacgtgatcagcgccaaggtgttcgtggacagagccaccaaccagagcaagtgcttcggcttcgtgagcttcgacaaccccgccagcgcccaggccgccatccaggccatgaacggcttccagatcggcatgaagagactgaaggtgcagctgaagagacccaaggacgccaacagaccctactag

SEQ ID NO: 77933 - DNA, 1248 bp, synthetic construct
  misc_feature 1..1248: note = Description of Artificial Sequence: Synthetic coding sequence
  source 1..1248: mol_type = other DNA
atgaaggagcccgacgccatcaagctgttcgtgggccagatccccagacacctggaggagaaggacctgaagcccatcttcgagcagttcggcagaatcttcgagctgaccgtgatcaaggacaagtacaccggcctgcacaagggctgcgccttcctgacctactgcgccagagacagcgccctgaaggcccagagcgccctgcacgagcagaagaccctgcccggcatgaacagacccatccaggtgaagcccgccgacagcgagagcagaggcgaggacagaaagctgttcgtgggcatgctgggcaagcagcagaccgacgaggacgtgagaaagatgttcgagcccttcggcaccatcgacgagtgcaccgtgctgagaggccccgacggcaccagcaagggctgcgccttcgtgaagttccagacccacgccgaggcccaggccgccatcaacaccctgcacagcagcagaaccctgcccggcgccagcagcagcctggtggtgaagttcgccgacaccgagaaggagagaggcctgagaagaatgcagcaggtggccacccagctgggcatgttcagccccatcgccctgcagttcggcgcctacagcgcctacacccaggccctgatgcagcagcaggccgccctggtggccgcccacagcgcctacctgagccccatggccaccatggccgccgtgcagatgcagcacatggccgccatcaacgccaacggcctgatcgccacccccatcacccccagcagcgcccagagccccgccgcccccgtggaccccctgcagcaggcctacgccggcatgcagcactacaccgccgcctaccccgccgcctacagcctggtggcccccgccttcccccagccccccgccctggtggcccagcagccccccccccccccccagcagcagcagcagcagcagcagcagcagcagcagcagcagcagagagagggccccgacggctgcaacatcttcatctaccacctgccccaggagttcaccgacagcgagatcctgcagatgttcgtgcccttcggccacgtgatcagcgccaaggtgttcgtggacagagccaccaaccagagcaagtgcttcggcttcgtgagcttcgacaaccccgccagcgcccaggccgccatccaggccatgaacggcttccagatcggcatgaagagactgaaggtgcagctgaagagacccaaggacgccaacagaccctactag

SEQ ID NO: 77934 - DNA, 900 bp, synthetic construct
  misc_feature 1..900: note = Description of Artificial Sequence: Synthetic coding sequence
  source 1..900: mol_type = other DNA
atgaaggagcccgacgccatcaagctgttcgtgggccagatccccagacacctggaggagaaggacctgaagcccatcttcgagcagttcggcagaatcttcgagctgaccgtgatcaaggacaagtacaccggcctgcacaagggctgcgccttcctgacctactgcgccagagacagcgccctgaaggcccagagcgccctgcacgagcagaagaccctgcccggcatgaacagacccatccaggtgaagcccgccgacagcgagagcagaggcgacagaaagctgttcgtgggcatgctgggcaagcagcagaccgacgaggacgtgagaaagatgttcgagcccttcggcaccatcgacgagtgcaccgtgctgagaggccccgacggcaccagcaagggctgcgccttcgtgaagttccagacccacgccgaggcccaggccgccatcaacaccctgcacagcagcagaaccctgcccggcgccagcagcagcctggtggtgaagttcgccgacaccgagaaggagagaggcctgagaagaatgcagcaggtggccacccagctgggcatgttcagccccatcgccctgcagttcggcgcctacagcgcctacacccaggccctgatgcagcagcaggccgccctggtggccgcccacagcgcctacctgagccccatggccaccatggccgccgtgcagatgcagcacatggccgccatcaacgccaacggcctgatcgccacccccatcacccccagcagcgccaagggccacggctacgccagcctggcccccagagcccacttcctgctggacgccctgctggccttcgtgagagagagaggcaccggcagcaaggcccccggctacctgcccagcgccggcctgctgtag

SEQ ID NO: 77935 - DNA, 783 bp, synthetic construct
  misc_feature 1..783: note = Description of Artificial Sequence: Synthetic coding sequence
  source 1..783: mol_type = other DNA
atgcagcaggtggccacccagctgggcatgttcagccccatcgccctgcagttcggcgcctacagcgcctacacccaggccctgatgcagcagcaggccgccctggtggccgcccacagcgcctacctgagccccatggccaccatggccgccgtgcagatgcagcacatggccgccatcaacgccaacggcctgatcgccacccccatcacccccagcagcggcaccagcaccccccccgccatcgccgccacccccgtgagcgccatccccgccgccctgggcgtgaacggctacagccccgtgcccacccagcccaccggccagcccgcccccgacgccctgtaccccaacggcgtgcacccctaccccgccgcctaccccgccgcctacagcctggtggcccccgccttcccccagccccccgccctggtggcccagcagccccccccccccccccagcagcagcagcagcagcagcagcagcagcagcagcagcagcagagagagggccccgacggctgcaacatcttcatctaccacctgccccaggagttcaccgacagcgagatcctgcagatgttcgtgcccttcggccacgtgatcagcgccaaggtgttcgtggacagagccaccaaccagagcaagtgcttcggcttcgtgagcttcgacaaccccgccagcgcccaggccgccatccaggccatgaacggcttccagatcggcatgaagagactgaaggtgcagctgaagagacccaaggacgccaacagaccctactag

SEQ ID NO: 77936 - DNA, 1401 bp, synthetic construct
  misc_feature 1..1401: note = Description of Artificial Sequence: Synthetic coding sequence
  source 1..1401: mol_type = other DNA
tgagtggaggagagcgccgccggcgagcagagcagcggcacccagatccccagacacctggaggagaaggacctgaagcccatcttcgagcagttcggcagaatcttcgagctgaccgtgatcaaggacaagtacaccggcctgcacaagggctgcgccttcctgacctactgcgccagagacagcgccctgaaggcccagagcgccctgcacgagcagaagaccctgcccggcatgaacagacccatccaggtgaagcccgccgacagcgagagcagaggcgacagaaagctgttcgtgggcatgctgggcaagcagcagaccgacgaggacgtgagaaagatgttcgagcccttcggcaccatcgacgagtgcaccgtgctgagaggccccgacggcaccagcaagggctgcgccttcgtgaagttccagacccacgccgaggcccaggccgccatcaacaccctgcacagcagcagaaccctgcccggcgccagcagcagcctggtggtgaagttcgccgacaccgagaaggagagaggcctgagaagaatgcagcaggtggccacccagctgggcatgttcagccccatcgccctgcagttcggcgcctacagcgcctacacccaggccctgatgcagcagcaggccgccctggtggccgcccacagcgcctacctgagccccatggccaccatggccgccgtgcagatgcagcacatggccgccatcaacgccaacggcctgatcgccacccccatcacccccagcagcggcaccagcaccccccccgccatcgccgccacccccgtgagcgccatccccgccgccctgggcgtgaacggctacagccccgtgcccacccagcccaccggccagcccgcccccgacgccctgtaccccaacggcgtgcacccctaccccgcccagagccccgccgcccccgtggaccccctgcagcaggcctacgccggcatgcagcactacaccgccgcctaccccgccgcctacagcctggtggcccccgccttcccccagccccccgccctggtggcccagcagccccccccccccccccagcagcagcagcagcagcagcagcagcagcagcagcagcagcagagagagggccccgacggctgcaacatcttcatctaccacctgccccaggagttcaccgacagcgagatcctgcagatgttcgtgcccttcggccacgtgatcagcgccaaggtgttcgtggacagagccaccaaccagagcaagtgcttcggcttcgtgagcttcgacaaccccgccagcgcccaggccgccatccaggccatgaacggcttccagatcggcatgaagagactgaaggtgcagctgaagagacccaaggacgccaacagaccctactag

SEQ ID NO: 77937 - DNA, 1347 bp, synthetic construct
  misc_feature 1..1347: note = Description of Artificial Sequence: Synthetic coding sequence
  source 1..1347: mol_type = other DNA
atgtacatcaagatggccaccctggccaacggccaggccgacaacgccagcctgagcaccaacggcctgggcagcagccccggcagcgccggccacatgaacggcctgagccacagccccggcaaccccagcaccatccccatgaaggaccacgacgccatcaagctgttcatcggccagatccccagaaacctggacgagaaggacctgaagcccctgttcgaggagttcggcaagatctacgagctgaccgtgctgaaggacagattcaccggcatgcacaagggctgcgccttcctgacctactgcgagagagagagcgccctgaaggcccagagcgccctgcacgagcagaagaccctgcccggcatgaacagacccatccaggtgaagcccgccgacagcgagagcagaggcgaggacagaaagctgttcgtgggcatgctgaacaagcagcagagcgaggacgacgtgagaagactgttcgaggccttcggcaacatcgaggagtgcaccatcctgagaggccccgacggcaacagcaagggctgcgccttcgtgaagtacagcagccacgccgaggcccaggccgccatcaacgccctgcacggcagccagaccatgcccggcgccagcagcagcctggtggtgaagttcgccgacaccgacaaggagagaaccatgagaagaatgcagcagatggccggccagatgggcatgttcaaccccatggccatccccttcggcgcctacggcgcctacgcccaggccctgatgcagcagcaggccgccctgatggccagcgtggcccagggcggctacctgaaccccatggccgccttcgccgccgcccagatgcagcagatggccgccctgaacatgaacggcctggccgccgcccccatgacccccaccagcggcggcagcaccccccccggcatcaccgcccccgccgtgcccagcatccccagccccatcggcgtgaacggcttcaccggcctgcccccccaggccaacggccagcccgccgccgaggccgtgttcgccaacggcatccacccctaccccgcccagagccccaccgccgccgaccccctgcagcaggcctacgccggcgtgcagcagtacgccggccccgccgcctaccccgccgcctacggccagatcagccaggccttcccccagcccccccccatgatcccccagcagcagagagagggcttcgtgagcttcgacaaccccgccagcgcccagaccgccatccaggccatgaacggcttccagatcggcatgaagagactgaaggtgcagctgaagagacccaaggacgccaacagaccctactag

SEQ ID NO: 77938 - DNA, 639 bp, synthetic construct
  misc_feature 1..639: note = Description of Artificial Sequence: Synthetic coding sequence
  source 1..639: mol_type = other DNA
gtgagcgccgagggccccgagagagccgccagagccgaggacagcgccagagacgagcccgccgaccccggcgaggcctgcggccagagagagcccaaggacagaaagctgttcgtgggcatgctgaacaagcagcagagcgaggacgacgtgagaagactgttcgaggccttcggcaacatcgaggagtgcaccatcctgagaggccccgacggcaacagcaagggctgcgccttcgtgaagtacagcagccacgccgaggcccaggccgccatcaacgccctgcacggcagccagaccatgcccggcgccagcagcagcctggtggtgaagttcgccgacaccgacaaggagagaaccatgagaagaatgcagcagatggccggccagatgggcatgttcaaccccatggccatccccttcggcgcctacggcgcctacgcccaggccctgatgcagcagcaggccgccctgatggccagcgtggcccagggcggctacctgaaccccatggccgccttcgccgccgcccagatgcagcagatggccgccctgaacatgtggcccggcggcagaacctacgaccccaacctgagatggcagcaccccagcggccaccactgcaccagcagagcctag

SEQ ID NO: 77939 - DNA, 1461 bp, synthetic construct
  misc_feature 1..1461: note = Description of Artificial Sequence: Synthetic coding sequence
  source 1..1461: mol_type = other DNA
atgtacatcaagatggccaccctggccaacggccaggccgacaacgccagcctgagcaccaacggcctgggcagcagccccggcagcgccggccacatgaacggcctgagccacagccccggcaaccccagcaccatccccatgaaggaccacgacgccatcaagctgttcatcggccagatccccagaaacctggacgagaaggacctgaagcccctgttcgaggagttcggcaagatctacgagctgaccgtgctgaaggacagattcaccggcatgcacaagggctgcgccttcctgacctactgcgagagagagagcgccctgaaggcccagagcgccctgcacgagcagaagaccctgcccggcatgaacagacccatccaggtgaagcccgccgacagcgagagcagaggcggcagcagctgcctgagacagccccccagccaggacagaaagctgttcgtgggcatgctgaacaagcagcagagcgaggacgacgtgagaagactgttcgaggccttcggcaacatcgaggagtgcaccatcctgagaggccccgacggcaacagcaagggctgcgccttcgtgaagtacagcagccacgccgaggcccaggccgccatcaacgccctgcacggcagccagaccatgcccggcgccagcagcagcctggtggtgaagttcgccgacaccgacaaggagagaaccatgagaagaatgcagcagatggccggccagatgggcatgttcaaccccatggccatccccttcggcgcctacggcgcctacgcccaggccctgatgcagcagcaggccgccctgatggccagcgtggcccagggcggctacctgaaccccatggccgccttcgccgccgcccagatgcagcagatggccgccctgaacatgaacggcctggccgccgcccccatgacccccaccagcggcggcagcaccccccccggcatcaccgcccccgccgtgcccagcatccccagccccatcggcgtgaacggcttcaccggcctgcccccccaggccaacggccagcccgccgccgaggccgtgttcgccaacggcatccacccctaccccgcccagagccccaccgccgccgaccccctgcagcaggcctacgccggcgtgcagcagtacgccggccccgccgcctaccccgccgcctacggccagatcagccaggccttcccccagcccccccccatgatcccccagcagcagagagagggccccgagggctgcaacctgttcatctaccacctgccccaggagttcggcgacgccgagctgatgcagatgttcctgcccttcggcttcgtgagcttcgacaaccccgccagcgcccagaccgccatccaggccatgaacggcttccagatcggcatgaagagactgaaggtgcagctgaagagacccaaggacgccaacagaccctactag

SEQ ID NO: 77940 - DNA, 1458 bp, synthetic construct
  misc_feature 1..1458: note = Description of Artificial Sequence: Synthetic coding sequence
  source 1..1458: mol_type = other DNA
atgtacatcaagatggccaccctggccaacggccaggccgacaacgccagcctgagcaccaacggcctgggcagcagccccggcagcgccggccacatgaacggcctgagccacagccccggcaaccccagcaccatccccatgaaggaccacgacgccatcaagctgttcatcggccagatccccagaaacctggacgagaaggacctgaagcccctgttcgaggagttcggcaagatctacgagctgaccgtgctgaaggacagattcaccggcatgcacaagggctgcgccttcctgacctactgcgagagagagagcgccctgaaggcccagagcgccctgcacgagcagaagaccctgcccggcatgaacagacccatccaggtgaagcccgccgacagcgagagcagaggcggcagcagctgcctgagacagccccccagccaggacagaaagctgttcgtgggcatgctgaacaagcagcagagcgaggacgacgtgagaagactgttcgaggccttcggcaacatcgaggagtgcaccatcctgagaggccccgacggcaacagcaagggctgcgccttcgtgaagtacagcagccacgccgaggcccaggccgccatcaacgccctgcacggcagccagaccatgcccggcgccagcagcagcctggtggtgaagttcgccgacaccgacaaggagagaaccatgagaagaatgcagcagatggccggccagatgggcatgttcaaccccatggccatccccttcggcgcctacggcgcctacgcccaggccatgcagcagcaggccgccctgatggccagcgtggcccagggcggctacctgaaccccatggccgccttcgccgccgcccagatgcagcagatggccgccctgaacatgaacggcctggccgccgcccccatgacccccaccagcggcggcagcaccccccccggcatcaccgcccccgccgtgcccagcatccccagccccatcggcgtgaacggcttcaccggcctgcccccccaggccaacggccagcccgccgccgaggccgtgttcgccaacggcatccacccctaccccgcccagagccccaccgccgccgaccccctgcagcaggcctacgccggcgtgcagcagtacgccggccccgccgcctaccccgccgcctacggccagatcagccaggccttcccccagcccccccccatgatcccccagcagcagagagagggccccgagggctgcaacctgttcatctaccacctgccccaggagttcggcgacgccgagctgatgcagatgttcctgcccttcggcttcgtgagcttcgacaaccccgccagcgcccagaccgccatccaggccatgaacggcttccagatcggcatgaagagactgaaggtgcagctgaagagacccaaggacgccaacagaccctactag

SEQ ID NO: 77941 - DNA, 1455 bp, synthetic construct
  misc_feature 1..1455: note = Description of Artificial Sequence: Synthetic coding sequence
  source 1..1455: mol_type = other DNA
atgtacatcaagatggccaccctggccaacggccaggccgacaacgccagcctgagcaccaacggcctgggcagcagccccggcagcgccggccacatgaacggcctgagccacagccccggcaaccccagcaccatccccatgaaggaccacgacgccatcaagctgttcatcggccagatccccagaaacctggacgagaaggacctgaagcccctgttcgaggagttcggcaagatctacgagctgaccgtgctgaaggacagattcaccggcatgcacaagggctgcgccttcctgacctactgcgagagagagagcgccctgaaggcccagagcgccctgcacgagcagaagaccctgcccggcatgaacagacccatccaggtgaagcccgccgacagcgagagcagaggcggcagcagctgcctgagacagccccccagccacagaaagctgttcgtgggcatgctgaacaagcagcagagcgaggacgacgtgagaagactgttcgaggccttcggcaacatcgaggagtgcaccatcctgagaggccccgacggcaacagcaagggctgcgccttcgtgaagtacagcagccacgccgaggcccaggccgccatcaacgccctgcacggcagccagaccatgcccggcgccagcagcagcctggtggtgaagttcgccgacaccgacaaggagagaaccatgagaagaatgcagcagatggccggccagatgggcatgttcaaccccatggccatccccttcggcgcctacggcgcctacgcccaggccatgcagcagcaggccgccctgatggccagcgtggcccagggcggctacctgaaccccatggccgccttcgccgccgcccagatgcagcagatggccgccctgaacatgaacggcctggccgccgcccccatgacccccaccagcggcggcagcaccccccccggcatcaccgcccccgccgtgcccagcatccccagccccatcggcgtgaacggcttcaccggcctgcccccccaggccaacggccagcccgccgccgaggccgtgttcgccaacggcatccacccctaccccgcccagagccccaccgccgccgaccccctgcagcaggcctacgccggcgtgcagcagtacgccggccccgccgcctaccccgccgcctacggccagatcagccaggccttcccccagcccccccccatgatcccccagcagcagagagagggccccgagggctgcaacctgttcatctaccacctgccccaggagttcggcgacgccgagctgatgcagatgttcctgcccttcggcttcgtgagcttcgacaaccccgccagcgcccagaccgccatccaggccatgaacggcttccagatcggcatgaagagactgaaggtgcagctgaagagacccaaggacgccaacagaccctactag

SEQ ID NO: 77942 - DNA, 1458 bp, synthetic construct
  misc_feature 1..1458: note = Description of Artificial Sequence: Synthetic coding sequence
  source 1..1458: mol_type = other DNA
atggccagactgaccgagagcgaggccagaagacagcagcagcagctgctgcagcccagacccagccccgtgggcagcagcggccccgagccccccggcggccagcccgacggcatgaaggacctggacgccatcaagctgttcgtgggccagatccccagacacctggacgagaaggacctgaagcccctgttcgagcagttcggcagaatctacgagctgaccgtgctgaaggacccctacaccggcatgcacaagggctgcgccttcctgacctactgcgccagagacagcgccatcaaggcccagaccgccctgcacgagcagaagaccctgcccggcatggccagacccatccaggtgaagcccgccgacagcgagagcagaggcggcagagacagaaagctgttcgtgggcatgctgaacaagcagcagagcgaggaggacgtgctgagactgttccagcccttcggcgtgatcgacgagtgcaccgtgctgagaggccccgacggcagcagcaagggctgcgccttcgtgaagttcagcagccacaccgaggcccaggccgccatccacgccctgcacggcagccagaccatgcccggcgccagcagcagcctggtggtgaagttcgccgacaccgacaaggagagaaccctgagaagaatgcagcagatggtgggccagctgggcatcctgacccccagcctgaccctgcccttcagcccctacagcgcctacgcccaggccctgatgcagcagcagaccaccgtgctgagcaccagcggcagctacctgagccccggcgtggccttcagcccctgccacatccagcagatcggcgccgtgagcctgaacggcctgcccgccacccccatcgcccccgccagcggcctgcacagcccccccctgctgggcaccaccgccgtgcccggcctggtggcccccatcaccaacggcttcgccggcgtggtgcccttccccggcggccaccccgccctggagaccgtgtacgccaacggcctggtgccctaccccgcccagagccccaccgtggccgagaccctgcaccccgccttcagcggcgtgcagcagtacaccgccatgtaccccaccgccgccatcacccccatcgcccacagcgtgccccagcccccccccctgctgcagcagcagcagagagagggccccgagggctgcaacctgttcatctaccacctgccccaggagttcggcgacaccgagctgacccagatgttcctgcccttcggcaacatcatcagcagcaaggtgttcatggacagagccaccaaccagagcaagtgcttcggcttcgtgagcttcgacaaccccgccagcgcccaggccgccatccaggccatgaacggcttccagatcggcatgaagagactgaaggtgcagctgaagagacccaaggaccccggccacccctactag

SEQ ID NO: 77943 - DNA, 963 bp, synthetic construct
  misc_feature 1..963: note = Description of Artificial Sequence: Synthetic coding sequence
  source 1..963: mol_type = other DNA
atggccagacccatccaggtgaagcccgccgacagcgagagcagaggcggcagagacagaaagctgttcgtgggcatgctgaacaagcagcagagcgaggaggacgtgctgagactgttccagcccttcggcgtgatcgacgagtgcaccgtgctgagaggccccgacggcagcagcaagggctgcgccttcgtgaagttcagcagccacaccgaggcccaggccgccatccacgccctgcacggcagccagaccatgcccggcgccagcagcagcctggtggtgaagttcgccgacaccgacaaggagagaaccctgagaagaatgcagcagatggtgggccagctgggcatcctgacccccagcctgaccctgcccttcagcccctacagcgcctacgcccaggccctgatgcagcagcagaccaccgtgctgagcaccagcggcagctacctgagccccggcgtggccttcagcccctgccacatccagcagatcggcgccgtgagcctgaacggcctgcccgccacccccatcgcccccgccagcggcctgcacagcccccccctgctgggcaccaccgccgtgcccggcctggtggcccccatcaccaacggcttcgccggcgtggtgcccttccccggcggccaccccgccctggagaccgtgtacgccaacggcctggtgccctaccccgcccagagccccaccgtggccgagaccctgcaccccgccttcagcggcgtgcagcagtacaccgccatgtaccccaccgccgccatcacccccatcgcccacagcgtgccccagcccccccccctgctgcagcagcagcagagagagggcgtgtggagacacggcgccgacgccgacgtgcccaccctgagacagtaccacttcctgcagggcgtgtacggcagcagctaccagcccgagcaggtgttcagactgagagagctgtag

SEQ ID NO: 77944 - DNA, 1230 bp, synthetic construct
  misc_feature 1..1230: note = Description of Artificial Sequence: Synthetic coding sequence
  source 1..1230: mol_type = other DNA
atggccagactgaccgagagcgaggccagaagacagcagcagcagctgctgcagcccagacccagccccgtgggcagcagcggccccgagccccccggcggccagcccgacggcatgaaggacctggacgccatcaagctgttcgtgggccagatccccagacacctggacgagaaggacctgaagcccctgttcgagcagttcggcagaatctacgagctgaccgtgctgaaggacccctacaccggcatgcacaagggctgcgccttcctgacctactgcgccagagacagcgccatcaaggcccagaccgccctgcacgagcagaagaccctgcccggcatggccagacccatccaggtgaagcccgccgacagcgagagcagaggcggcagagacagaaagctgttcgtgggcatgctgaacaagcagcagagcgaggaggacgtgctgagactgttccagcccttcggcgtgatcgacgagtgcaccgtgctgagaggccccgacggcagcagcaagggctgcgccttcgtgaagttcagcagccacaccgaggcccaggccgccatccacgccctgcacggcagccagaccatgcccggcgccagcagcagcctggtggtgaagttcgccgacaccgacaaggagagaaccctgagaagaatgcagcagatggtgggccagctgggcatcctgacccccagcctgaccctgcccttcagcccctacagcgcctacgcccaggccctgatgcagcagcagaccaccgtgctgagcaccagcggcagctacctgagccccggcgtggccttcagcccctgccacatccagcagatcggcgccgtgagcctgaacggcctgcccgccacccccatcgcccccgccagcggcgtggtgcccttccccggcggccaccccgccctggagaccgtgtacgccaacggcctggtgccctaccccgcccagagccccaccgtggccgagaccctgcaccccgccttcagcggcgtgcagcagtacaccgccatgtaccccaccgccgccatcacccccatcgcccacagcgtgccccagcccccccccctgctgcagcagcagcagagagagggcgtgtggagacacggcgccgacgccgacgtgcccaccctgagacagtaccacttcctgcagggcgtgtacggcagcagctaccagcccgagcaggtgttcagactgagagagctgtag

SEQ ID NO: 77945 - DNA, 1446 bp, synthetic construct
  misc_feature 1..1446: note = Description of Artificial Sequence: Synthetic coding sequence
  source 1..1446: mol_type = other DNA
atggccgccgcccccggcggcagcgcccagcccgccggccccggccccagactgggcttcagcaccgccgacagcggcgtgggcatgagcggcctgaaccccggccccgccgtgcccatgaaggaccacgacgccatcaagctgttcgtgggccagatccccagaggcctggacgagcaggacctgaagcccctgttcgaggagttcggcagaatctacgagctgaccgtgctgaaggacagactgaccggcctgcacaagggctgcgccttcctgacctactgcgccagagacagcgccctgaaggcccagagcgccctgcacgagcagaagaccctgcccggcatgaacagacccatccaggtgaagcccgccgccagcgagggcagaggcgaggacagaaagctgttcgtgggcatgctgggcaagcagcagggcgaggaggacgtgagaagactgttccagcccttcggccacatcgaggagtgcaccgtgctgagaagccccgacggcaccagcaagggctgcgccttcgtgaagttcggcagccagggcgaggcccaggccgccatcagaggcctgcacggcagcagaaccatggccggcgccagcagcagcctggtggtgaagctggccgacaccgacagagagagagccctgagaagaatgcagcagatggccggccacctgggcgccttccaccccgcccccctgcccctgggcgcctgcggcgcctacaccaccgccatcctgcagcaccaggccgccctgctggccgccgcccagggccccggcctgggccccgtggccgccgtggccgcccagatgcagcacgtggccgccttcagcctggtggccgcccccctgctgcccgccgccgccgccaacagcccccccggcagcggccccggcaccctgcccggcctgcccgcccccatcggcgtgaacggcttcggccccctgaccccccagaccaacggccagcccggcagcgacaccctgtacaacaacggcctgagcccctaccccgcccagagccccggcgtggccgaccccctgcagcaggcctacgccggcatgcaccactacgccgccgcctaccccagcgcctacgcccccgtgagcaccgccttcccccagcagcccagcgccctgccccagcagcagagagagggccccgagggctgcaacctgttcatctaccacctgccccaggagttcggcgacgccgagctgatccagaccttcctgcccttcggcgccgtggtgagcgccaaggtgttcgtggacagagccaccaaccagagcaagtgcttcggcttcgtgagcttcgacaaccccaccagcgcccagaccgccatccaggccatgaacggcttccagatcggcatgaagagactgaaggtgcagctgaagagacccaaggacgccaacagaccctactag

SEQ ID NO: 77946 - DNA, 1107 bp, synthetic construct
  misc_feature 1..1107: note = Description of Artificial Sequence: Synthetic coding sequence
  source 1..1107: mol_type = other DNA
atgatcagcgacccccccagcaacaacagctggaacagcgtgctgtacctgctggaggacagaaagctgttcgtgggcatgctgggcaagcagcagggcgaggaggacgtgagaagactgttccagcccttcggccacatcgaggagtgcaccgtgctgagaagccccgacggcaccagcaagggctgcgccttcgtgaagttcggcagccagggcgaggcccaggccgccatcagaggcctgcacggcagcagaaccatggccggcgccagcagcagcctggtggtgaagctggccgacaccgacagagagagagccctgagaagaatgcagcagatggccggccacctgggcgccttccaccccgcccccctgcccctgggcgcctgcggcgcctacaccaccgccatcctgcagcaccaggccgccctgctggccgccgcccagggccccggcctgggccccgtggccgccgtggccgcccagatgcagcacgtggccgccttcagcctggtggccgcccccctgctgcccgccgccgccgccaacagcccccccggcagcggccccggcaccctgcccggcctgcccgcccccatcggcgtgaacggcttcggccccctgaccccccagaccaacggccagcccggcagcgacaccctgtacaacaacggcctgagcccctaccccgcccagagccccggcgtggccgaccccctgcagcaggcctacgccggcatgcaccactacgccgccgcctaccccagcgcctacgcccccgtgagcaccgccttcccccagcagcccagcgccctgccccagcagcagagagagggccccgagggctgcaacctgttcatctaccacctgccccaggagttcggcgacgccgagctgatccagaccttcctgcccttcggcgccgtggtgagcgccaaggtgttcgtggacagagccaccaaccagagcaagtgcttcggcttcgtgagcttcgacaaccccaccagcgcccagaccgccatccaggccatgaacggcttccagatcggcatgaagagactgaaggtgcagctgaagagacccaaggacgccaacagaccctactag

SEQ ID NO: 77947 - DNA, 1365 bp, synthetic construct; identical to SEQ ID NO: 77931
  misc_feature 1..1365: note = Description of Artificial Sequence: Synthetic coding sequence
  source 1..1365: mol_type = other DNA

SEQ ID NO: 77948 - DNA, 1029 bp, synthetic construct
  misc_feature 1..1029: note = Description of Artificial Sequence: Synthetic coding sequence
  source 1..1029: mol_type = other DNA
atgctgggcaagcagcagggcgaggaggacgtgagaagactgttccagcccttcggccacatcgaggagtgcaccgtgctgagaagccccgacggcaccagcaagggctgcgccttcgtgaagttcggcagccagggcgaggcccaggccgccatcagaggcctgcacggcagcagaaccatggccggcgccagcagcagcctggtggtgaagctggccgacaccgacagagagagagccctgagaagaatgcagcagatggccggccacctgggcgccttccaccccgcccccctgcccctgggcgcctgcggcgcctacaccaccgccatcctgcagcaccaggccgccctgctggccgccgcccagggccccggcctgggccccgtggccgccgtggccgcccagatgcagcacgtggccgccttcagcctggtggccgcccccctgctgcccgccgccgccgccaacagcccccccggcagcggccccggcaccctgcccggcctgcccgcccccatcggcgtgaacggcttcggccccctgaccccccagaccaacggccagcccggcagcgacaccctgtacaacaacggcctgagcccctaccccgcccagagccccggcgtggccgaccccctgcagcaggcctacgccggcatgcaccactacgccgccgcctaccccagcgcctacgcccccgtgagcaccgccttcccccagcagcccagcgccctgccccagcagcagagagagggccccgagggctgcaacctgttcatctaccacctgccccaggagttcggcgacgccgagctgatccagaccttcctgcccttcggcgccgtggtgagcgccaaggtgttcgtggacagagccaccaaccagagcaagtgcttcggcttcgtgagcttcgacaaccccaccagcgcccagaccgccatccaggccatgaacggcttccagatcggcatgaagagactgaaggtgcagctgaagagacccaaggacgccaacagaccctactag

SEQ ID NO: 77949 - DNA, 1035 bp, synthetic construct
  misc_feature 1..1035: note = Description of Artificial Sequence: Synthetic coding sequence
  source 1..1035: mol_type = other DNA
atgaacagacccatccaggtgaagcccgccgccagcgagggcagaggcgaggacagaaagctgttcgtgggcatgctgggcaagcagcagggcgaggaggacgtgagaagactgttccagcccttcggccacatcgaggagtgcaccgtgctgagaagccccgacggcaccagcaagggctgcgccttcgtgaagttcggcagccagggcgaggcccaggccgccatcagaggcctgcacggcagcagaaccatggccggcgccagcagcagcctggtggtgaagctggccgacaccgacagagagagagccctgagaagaatgcagcagatggccggccacctgggcgccttccaccccgcccccctgcccctgggcgcctgcggcgcctacaccaccgccatcctgcagcaccaggccgccctgctggccgccgcccagggccccggcctgggccccgtggccgccgtggccgcccagatgcagcacgtggccgccttcagcctggtggccgcccccctgctgcccgccgccgccaacagcccccccggcagcggccccggcaccctgcccggcctgcccgcccccatcggcgtgaacggcttcggccccctgaccccccagaccaacggccagcccggcagcgacaccctgtacaacaacggcctgagcccctaccccgccgcctaccccagcgcctacgcccccgtgagcaccgccttcccccagcagcccagcgccctgccccagcagcagagagagggccccgagggctgcaacctgttcatctaccacctgccccaggagttcggcgacgccgagctgatccagaccttcctgcccttcggcgccgtggtgagcgccaaggtgttcgtggacagagccaccaaccagagcaagtgcttcggcttcgtgagcttcgacaaccccaccagcgcccagaccgccatccaggccatgaacggcttccagatcggcatgaagagactgaaggtgcagctgaagagacccaaggacgccaacagaccctactag

SEQ ID NO: 77950 - DNA, 1980 bp, synthetic construct
  misc_feature 1..1980: note = Description of Artificial Sequence: Synthetic coding sequence
  source 1..1980: mol_type = other DNA
atgctgtacaagcagctgagacaggcctgcgaggaccacgtgcaggcccagatcctgcccttcagagaggacagcctggacagcgtgctgttcctgaagaagatcaacacctgctggcaggaccactgcagacagatgatcatgatcagaagcatcttcctgttcctggacagaacctacgtgctgcagaacagcaccctgcccagcatctgggacatgggcctggagctgttcagaacccacatcatcagcgacaagatggtgcagagcaagaccatcgacggcatcctgctgctgatcgagagagagagaagcggcgaggccgtggacagaagcctgctgagaagcctgctgggcatgctgagcgacctgcaggtgtacaaggacagcttcgagctgaagttcctggaggagaccaactgcctgtacgccgccgagggccagagactgatgcaggagagagaggtgcccgagtacctgaaccacgtgagcaagagactggaggaggagggcgacagagtgatcacctacctggaccacagcacccagaagcccctgatcgcctgcgtggagaagcagctgctgggcgagcacctgaccgccatcctgcagaagggcctggaccacctgctggacgagaacagagtgcccgacctggcccagatgtaccagctgttcagcagagtgagaggcggccagcaggccctgctgcagcactggagcgagtacatcaagaccttcggcaccgccatcgtgatcaaccccgagaaggacaaggacatggtgcaggacctgctggacttcaaggacaaggtggaccacgtgatcgaggtgtgcttccagaagaacgagagattcgtgaacctgatgaaggagagcttcgagaccttcatcaacaagagacccaacaagcccgccgagctgatcgccaagcacgtggacagcaagctgagagccggcaacaaggaggccaccgacgaggagctggagagaaccctggacaagatcatgatcctgttcagattcatccacggcaaggacgtgttcgaggccttctacaagaaggacctggccaagagactgctggtgggcaagagcgccagcgtggacgccgagaagagcatgctgagcaagctgaagcacgagtgcggcgccgccttcaccagcaagctggagggcatgttcaaggacatggagctgagcaaggacatcatggtgcacttcaagcagcacatgcagaaccagagcgacagcggccccatcgacctgaccgtgaacatcctgaccatgggctactggcccacctacacccccatggaggtgcacctgacccccgagatgatcaagctgcaggaggtgttcaaggccttctacctgggcaagcacagcggcagaaagctgcagtggcagaccaccctgggccacgccgtgctgaaggccgagttcaaggagggcaagaaggagttccaggtgagcctgttccagaccctggtgctgctgatgttcaacgagggcgacggcttcagcttcgaggagatcaagatggccaccggcatcgaggacagcgagctgagaagaaccctgcagagcctggcctgcggcaaggccagagtgctgatcaagagccccaagggcaaggaggtggaggacggcgacaagttcatcttcaacggcgagttcaagcacaagctgttcagaatcaagatcaaccagatccagatgaaggagaccgtggaggagcaggtgagcaccaccgagagagtgttccaggacagacagtaccagatcgacgccgccatcgtgagaatcatgaagatgagaaagaccctgggccacaacctgctggtgagcgagctgtacaaccagctgaagttccccgtgaagcccggcgacctgaagaagagaatcgagagcctgatcgacagagactacatggagagagacaaggacaaccccaaccagtaccactacgtggcctag

SEQ ID NO: 77951 - DNA, 2280 bp, synthetic construct
  misc_feature 1..2280: note = Description of Artificial Sequence: Synthetic coding sequence
  source 1..2280: mol_type = other DNA
atggccgacgaggcccccagaaagggcagcttcagcgccctggtgggcagaaccaacggcctgaccaagcccgccgccctggccgccgcccccgccaagcccggcggcgccggcggcagcaagaagctggtgatcaagaacttcagagacagacccagactgcccgacaactacacccaggacacctggagaaagctgcacgaggccgtgagagccgtgcagagcagcaccagcatcagatacaacctggaggagctgtaccaggccgtggagaacctgtgcagccacaaggtgagccccatgctgtacaagcagctgagacaggcctgcgaggaccacgtgcaggcccagatcctgcccttcagagaggacagcctggacagcgtgctgttcctgaagaagatcaacacctgctggcaggaccactgcagacagatgatcatgatcagaagcatcttcctgttcctggacagaacctacgtgctgcagaacagcaccctgcccagcatctgggacatgggcctggagctgttcagaacccacatcatcagcgacaagatggtgcagagcaagaccatcgacggcatcctgctgctgatcgagagagagagaagcggcgaggccgtggacagaagcctgctgagaagcctgctgggcatgctgagcgacctgcaggtgtacaaggacagcttcgagctgaagttcctggaggagaccaactgcctgtacgccgccgagggccagagactgatgcaggagagagaggtgcccgagtacctgaaccacgtgagcaagagactggaggaggagggcgacagagtgatcacctacctggaccacagcacccagaagcccctgatcgcctgcgtggagaagcagctgctgggcgagcacctgaccgccatcctgcagaagggcctggaccacctgctggacgagaacagagtgcccgacctggcccagatgtaccagctgttcagcagagtgagaggcggccagcaggccctgctgcagcactggagcgagtacatcaagaccttcggcaccgccatcgtgatcaaccccgagaaggacaaggacatggtgcaggacctgctggacttcaaggacaaggtggaccacgtgatcgaggtgtgcttccagaagaacgagagattcgtgaacctgatgaaggagagcttcgagaccttcatcaacaagagacccaacaagcccgccgagctgatcgccaagcacgtggacagcaagctgagagccggcaacaaggaggccaccgacgaggagctggagagaaccctggacaagatcatgatcctgttcagattcatccacggcaaggacgtgttcgaggccttctacaagaaggacctggccaagagactgctggtgggcaagagcgccagcgtggacgccgagaagagcatgctgagcaagctgaagcacgagtgcggcgccgccttcaccagcaagctggagggcatgttcaaggacatggagctgagcaaggacatcatggtgcacttcaagcagcacatgcagaaccagagcgacagcggccccatcgacctgaccgtgaacatcctgaccatgggctactggcccacctacacccccatggaggtgcacctgacccccgagatgatcaagctgcaggaggtgttcaaggccttctacctgggcaagcacagcggcagaaagctgcagtggcagaccaccctgggccacgccgtgctgaaggccgagttcaaggagggcaagaaggagttccaggtgagcctgttccagaccctggtgctgctgatgttcaacgagggcgacggcttcagcttcgaggagatcaagatggccaccggcatcgaggacagcgagctgagaagaaccctgcagagcctggcctgcggcaaggccagagtgctgatcaagagccccaagggcaaggaggtggaggacggcgacaagttcatcttcaacggcgagttcaagcacaagctgttcagaatcaagatcaaccagatccagatgaaggagaccgtggaggagcaggtgagcaccaccgagagagtgttccaggacagacagtaccagatcgacgccgccatcgtgagaatcatgaagatgagaaagaccctgggccacaacctgctggtgagcgagctgtacaaccagctgaagttccccgtgaagcccggcgacctgaagaagagaatcgagagcctgatcgacagagactacatggagagagacaaggacaaccccaaccagtaccactacgtggcctag

SEQ ID NO: 77952 - DNA, 1980 bp, synthetic construct; identical to SEQ ID NO: 77950
  misc_feature 1..1980: note = Description of Artificial Sequence: Synthetic coding sequence
  source 1..1980: mol_type = other DNA

SEQ ID NO: 77953 - DNA, 1980 bp, synthetic construct; identical to SEQ ID NO: 77950
  misc_feature 1..1980: note = Description of Artificial Sequence: Synthetic coding sequence
  source 1..1980: mol_type = other DNA

SEQ ID NO: 77954 - DNA, 2703 bp, synthetic construct
  misc_feature 1..2703: note = Description of Artificial Sequence: Synthetic coding sequence
  source 1..2703: mol_type = other DNA
atgaagagcgtgtgccccgtgaccagcggcttcagcagccccagccccagcgccgccgccgccgcccaggaggtgagaagcgccaccgacggcaacaccagcaccaccccccccaccagcgccaagaagagaaagctgaacagcagcagcagcagcagcagcaacagcagcaacgagagagaggacttcgacagcaccagcagcagcagcagcaccccccccctgcagcccagagacagcgccagccccagcaccagcagcttctgcctgggcgtgagcgtggccgccagcagccacgtgcccatccagaagaagctgagattcgaggacaccctggagttcgtgggcttcgacgccaagatggccgaggagagcagcagcagcagcagcagcagcagccccaccgccgccaccagccagcagcagcagctgaagaacaagagcatcctgatcagcagcgtggccagcgtgcaccacgccaacggcctggccaagagcagcaccaccgtgagcagcttcgccaacagcaagcccggcagcgccaagaagctggtgatcaagaacttcaaggacaagcccaagctgcccgagaactacaccgacgagacctggcagaagctgaaggaggccgtggaggccatccagaacagcaccagcatcaagtacaacctggaggagctgtaccaggccgtggagaacctgtgcagctacaagatcagcgccaacctgtacaagcagctgagacagatctgcgaggaccacatcaaggcccagatccaccagttcagagaggacagcctggacagcgtgctgttcctgaagaagatcgacagatgctggcagaaccactgcagacagatgatcatgatcagaagcatcttcctgttcctggacagaacctacgtgctgcagaacagcatgctgcccagcatctgggacatgggcctggagctgttcagagcccacatcatcagcgaccagaaggtgcagaacaagaccatcgacggcatcctgctgctgatcgagagagagagaaacggcgaggccatcgacagaagcctgctgagaagcctgctgagcatgctgagcgacctgcagatctaccaggacagcttcgagcagagattcctggaggagaccaacagactgtacgccgccgagggccagaagctgatgcaggagagagaggtgcccgagtacctgcaccacgtgaacaagagactggaggaggaggccgacagactgatcacctacctggaccagaccacccagaagagcctgatcgccaccgtggagaagcagctgctgggcgagcacctgaccgccatcctgcagaagggcctgaacaacctgctggacgagaacagaatccaggacctgagcctgctgtaccagctgttcagcagagtgagaggcggcgtgcaggtgctgctgcagcagtggatcgagtacatcaaggccttcggcagcaccatcgtgatcaaccccgagaaggacaagaccatggtgcaggagctgctggacttcaaggacaaggtggaccacatcatcgacatctgcttcctgaagaacgagaagttcatcaacgccatgaaggaggccttcgagaccttcatcaacaagagacccaacaagcccgccgagctgatcgccaagtacgtggacagcaagctgagagccggcaacaaggaggccaccgacgaggagctggagaagatgctggacaagatcatgatcatcttcagattcatctacggcaaggacgtgttcgaggccttctacaagaaggacctggccaagagactgctggtgggcaagagcgccagcgtggacgccgagaagagcatgctgagcaagctgaagcacgagtgcggcgccgccttcaccagcaagctggagggcatgttcaaggacatggagctgagcaaggacatcatgatccagttcaagcagtacatgcagaaccagaacgtgcccggcaacatcgagctgaccgtgaacatcctgaccatgggctactggcccacctacgtgcccatggaggtgcacctgccccccgagatggtgaagctgcaggagatcttcaagaccttctacctgggcaagcacagcggcagaaagctgcagtggcagagcaccctgggccactgcgtgctgaaggccgagttcaaggagggcaagaaggagctgcaggtgagcctgttccagaccctggtgctgctgatgttcaacgagggcgaggagttcagcctggaggagatcaagcaggccaccggcatcgaggacggcgagctgagaagaaccctgcagagcctggcctgcggcaaggccagagtgctggccaagaaccccaagggcaaggacatcgaggacggcgacaagttcatctgcaacgacgacttcaagcacaagctgttcagaatcaagatcaaccagatccagatgaaggagaccgtggaggagcaggccagcaccaccgagagagtgttccaggacagacagtaccagatcgacgccgccatcgtgagaatcatgaagatgagaaagaccctgagccacaacctgctggtgagcgaggtgtacaaccagctgaagttccccgtgaagcccgccgacctgaagaagagaatcgagagcctgatcgacagagactacatggagagagacaaggagaaccccaaccagtacaactacatcgcctag

SEQ ID NO: 77955 - DNA, 2688 bp, synthetic construct
  misc_feature 1..2688: note = Description of Artificial Sequence: Synthetic coding sequence
  source 1..2688: mol_type = other DNA
atgttccccaccggcttcagcagccccagccccagcgccgccgccgccgcccaggaggtgagaagcgccaccgacggcaacaccagcaccaccccccccaccagcgccaagaagagaaagctgaacagcagcagcagcagcagcagcaacagcagcaacgagagagaggacttcgacagcaccagcagcagcagcagcaccccccccctgcagcccagagacagcgccagccccagcaccagcagcttctgcctgggcgtgagcgtggccgccagcagccacgtgcccatccagaagaagctgagattcgaggacaccctggagttcgtgggcttcgacgccaagatggccgaggagagcagcagcagcagcagcagcagcagccccaccgccgccaccagccagcagcagcagctgaagaacaagagcatcctgatcagcagcgtggccagcgtgcaccacgccaacggcctggccaagagcagcaccaccgtgagcagcttcgccaacagcaagcccggcagcgccaagaagctggtgatcaagaacttcaaggacaagcccaagctgcccgagaactacaccgacgagacctggcagaagctgaaggaggccgtggaggccatccagaacagcaccagcatcaagtacaacctggaggagctgtaccaggccgtggagaacctgtgcagctacaagatcagcgccaacctgtacaagcagctgagacagatctgcgaggaccacatcaaggcccagatccaccagttcagagaggacagcctggacagcgtgctgttcctgaagaagatcgacagatgctggcagaaccactgcagacagatgatcatgatcagaagcatcttcctgttcctggacagaacctacgtgctgcagaacagcatgctgcccagcatctgggacatgggcctggagctgttcagagcccacatcatcagcgaccagaaggtgcagaacaagaccatcgacggcatcctgctgctgatcgagagagagagaaacggcgaggccatcgacagaagcctgctgagaagcctgctgagcatgctgagcgacctgcagatctaccaggacagcttcgagcagagattcctggaggagaccaacagactgtacgccgccgagggccagaagctgatgcaggagagagaggtgcccgagtacctgcaccacgtgaacaagagactggaggaggaggccgacagactgatcacctacctggaccagaccacccagaagagcctgatcgccaccgtggagaagcagctgctgggcgagcacctgaccgccatcctgcagaagggcctgaacaacctgctggacgagaacagaatccaggacctgagcctgctgtaccagctgttcagcagagtgagaggcggcgtgcaggtgctgctgcagcagtggatcgagtacatcaaggccttcggcagcaccatcgtgatcaaccccgagaaggacaagaccatggtgcaggagctgctggacttcaaggacaaggtggaccacatcatcgacatctgcttcctgaagaacgagaagttcatcaacgccatgaaggaggccttcgagaccttcatcaacaagagacccaacaagcccgccgagctgatcgccaagtacgtggacagcaagctgagagccggcaacaaggaggccaccgacgaggagctggagaagatgctggacaagatcatgatcatcttcagattcatctacggcaaggacgtgttcgaggccttctacaagaaggacctggccaagagactgctggtgggcaagagcgccagcgtggacgccgagaagagcatgctgagcaagctgaagcacgagtgcggcgccgccttcaccagcaagctggagggcatgttcaaggacatggagctgagcaaggacatcatgatccagttcaagcagtacatgcagaaccagaacgtgcccggcaacatcgagctgaccgtgaacatcctgaccatgggctactggcccacctacgtgcccatggaggtgcacctgccccccgagatggtgaagctgcaggagatcttcaagaccttctacctgggcaagcacagcggcagaaagctgcagtggcagagcaccctgggccactgcgtgctgaaggccgagttcaaggagggcaagaaggagctgcaggtgagcctgttccagaccctggtgctgctgatgttcaacgagggcgaggagttcagcctggaggagatcaagcaggccaccggcatcgaggacggcgagctgagaagaaccctgcagagcctggcctgcggcaaggccagagtgctggccaagaaccccaagggcaaggacatcgaggacggcgacaagttcatctgcaacgacgacttcaagcacaagctgttcagaatcaagatcaaccagatccagatgaaggagaccgtggaggagcaggccagcaccaccgagagagtgttccaggacagacagtaccagatcgacgccgccatcgtgagaatcatgaagatgagaaagaccctgagccacaacctgctggtgagcgaggtgtacaaccagctgaagttccccgtgaagcccgccgacctgaagaagagaatcgagagcctgatcgacagagactacatggagagagacaaggagaaccccaaccagtacaactacatcgcctag

SEQ ID NO: 77956 - DNA, 705 bp, synthetic construct
  misc_feature 1..705: note = Description of Artificial Sequence: Synthetic coding sequence
  source 1..705: mol_type = other DNA
atgatcgaccccgacttcgccgacaagcccaagctgcccgagaactacaccgacgagacctggcagaagctgaaggaggccgtggaggccatccagaacagcaccagcatcaagtacaacctggaggagctgtaccaggccgtggagaacctgtgcagctacaagatcagcgccaacctgtacaagcagctgagacagatctgcgaggaccacatcaaggcccagatccaccagttcagagaggacagcctggacagcgtgctgttcctgaagaagatcgacagatgctggcagaaccactgcagacagatgatcatgatcagaagcatcttcctgttcctggacagaacctacgtgctgcagaacagcatgctgcccagcatctgggacatgggcctggagctgttcagagcccacatcatcagcgaccagaaggtgcagaacaagaccatcgacggcatcctgctgctgatcgagagagagagaaacggcgaggccatcgacagaagcctgctgagaagcctgctgagcatgctgagcgacctgcagatctaccaggacagcttcgagcagagattcctggaggagaccaacagactgtacgccgccgagggccagaagctgatgcaggagagagaggtgcccgagtacctgcaccacgtgaacaagagactggaggaggaggccgacagactgatcacctag

SEQ ID NO: 77957 - DNA, 2742 bp, synthetic construct
  misc_feature 1..2742: note = Description of Artificial Sequence: Synthetic coding sequence
  source 1..2742: mol_type = other DNA
atgatgagccagagcagcggcagcggcgacggcaacgacgacgaggccaccaccagcaaggacggcggcttcagcagccccagccccagcgccgccgccgccgcccaggaggtgagaagcgccaccgacggcaacaccagcaccaccccccccaccagcgccaagaagagaaagctgaacagcagcagcagcagcagcagcaacagcagcaacgagagagaggacttcgacagcaccagcagcagcagcagcaccccccccctgcagcccagagacagcgccagccccagcaccagcagcttctgcctgggcgtgagcgtggccgccagcagccacgtgcccatccagaagaagctgagattcgaggacaccctggagttcgtgggcttcgacgccaagatggccgaggagagcagcagcagcagcagcagcagcagccccaccgccgccaccagccagcagcagcagctgaagaacaagagcatcctgatcagcagcgtggccagcgtgcaccacgccaacggcctggccaagagcagcaccaccgtgagcagcttcgccaacagcaagcccggcagcgccaagaagctggtgatcaagaacttcaaggacaagcccaagctgcccgagaactacaccgacgagacctggcagaagctgaaggaggccgtggaggccatccagaacagcaccagcatcaagtacaacctggaggagctgtaccaggccgtggagaacctgtgcagctacaagatcagcgccaacctgtacaagcagctgagacagatctgcgaggaccacatcaaggcccagatccaccagttcagagaggacagcctggacagcgtgctgttcctgaagaagatcgacagatgctggcagaaccactgcagacagatgatcatgatcagaagcatcttcctgttcctggacagaacctacgtgctgcagaacagcatgctgcccagcatctgggacatgggcctggagctgttcagagcccacatcatcagcgaccagaaggtgcagaacaagaccatcgacggcatcctgctgctgatcgagagagagagaaacggcgaggccatcgacagaagcctgctgagaagcctgctgagcatgctgagcgacctgcagatctaccaggacagcttcgagcagagattcctggaggagaccaacagactgtacgccgccgagggccagaagctgatgcaggagagagaggtgcccgagtacctgcaccacgtgaacaagagactggaggaggaggccgacagactgatcacctacctggaccagaccacccagaagagcctgatcgccaccgtggagaagcagctgctgggcgagcacctgaccgccatcctgcagaagggcctgaacaacctgctggacgagaacagaatccaggacctgagcctgctgtaccagctgttcagcagagtgagaggcggcgtgcaggtgctgctgcagcagtggatcgagtacatcaaggccttcggcagcaccatcgtgatcaaccccgagaaggacaagaccatggtgcaggagctgctggacttcaaggacaaggtggaccacatcatcgacatctgcttcctgaagaacgagaagttcatcaacgccatgaaggaggccttcgagaccttcatcaacaagagacccaacaagcccgccgagctgatcgccaagtacgtggacagcaagctgagagccggcaacaaggaggccaccgacgaggagctggagaagatgctggacaagatcatgatcatcttcagattcatctacggcaaggacgtgttcgaggccttctacaagaaggacctggccaagagactgctggtgggcaagagcgccagcgtggacgccgagaagagcatgctgagcaagctgaagcacgagtgcggcgccgccttcaccagcaagctggagggcatgttcaaggacatggagctgagcaaggacatcatgatccagttcaagcagtacatgcagaaccagaacgtgcccggcaacatcgagctgaccgtgaacatcctgaccatgggctactggcccacctacgtgcccatggaggtgcacctgccccccgagatggtgaagctgcaggagatcttcaagaccttctacctgggcaagcacagcggcagaaagctgcagtggcagagcaccctgggccactgcgtgctgaaggccgagttcaaggagggcaagaaggagctgcaggtgagcctgttccagaccctggtgctgctgatgttcaacgagggcgaggagttcagcctggaggagatcaagcaggccaccggcatcgaggacggcgagctgagaagaaccctgcagagcctggcctgcggcaaggccagagtgctggccaagaaccccaagggcaaggacatcgaggacggcgacaagttcatctgcaacgacgacttcaagcacaagctgttcagaatcaagatcaaccagatccagatgaaggagaccgtggaggagcaggccagcaccaccgagagagtgttccaggacagacagtaccagatcgacgccgccatcgtgagaatcatgaagatgagaaagaccctgagccacaacctgctggtgagcgaggtgtacaaccagctgaagttccccgtgaagcccgccgacctgaagaagagaatcgagagcctgatcgacagagactacatggagagagacaaggagaaccccaaccagtacaactacatcgcctag

SEQ ID NO: 77958 - DNA, 2343 bp, synthetic construct
  misc_feature 1..2343: note = Description of Artificial Sequence: Synthetic coding sequence
  source 1..2343: mol_type = other DNA
atggccaccagcaacctgctgaagaacaagggcagcctgcagttcgaggacaagtgggacttcatgagacccatcgtgctgaagctgctgagacaggagagcgtgaccaagcagcagtggttcgacctgttcagcgacgtgcacgccgtgtgcctgtgggacgacaagggccccgccaagatccaccaggccctgaaggaggacatcctggagttcatcaagcaggcccaggccagagtgctgagccaccaggacgacaccgccctgctgaaggcctacatcgtggagtggagaaagttcttcacccagtgcgacatcctgcccaagcccttctgccagctggagatcaccctgatgggcaagcagggcagcaacaagaagagcaacgtggaggacagcatcgtgagaaagctgatgctggacacctggaacgagagcatcttcagcaacatcaagaacagactgcaggacagcgccatgaagctggtgcacgccgagagactgggcgaggccttcgacagccagctggtgatcggcgtgagagagagctacgtgaacctgtgcagcaaccccgaggacaagctgcagatctacagagacaacttcgagaaggcctacctggacagcaccgagagattctacagaacccaggcccccagctacctgcagcagaacggcgtgcagaactacatgaagtacgccgacgccaagctgaaggaggaggagaagagagccctgagatacctggagaccagaagagagtgcaacagcgtggaggccctgatggagtgctgcgtgaacgccctggtgaccagcttcaaggagaccatcctggccgagtgccagggcatgatcaagagaaacgagaccgagaagctgcacctgatgttcagcctgatggacaaggtgcccaacggcatcgagcccatgctgaaggacctggaggagcacatcatcagcgccggcctggccgacatggtggccgccgccgagaccatcaccaccgacagcgagaagtacgtggagcagctgctgaccctgttcaacagattcagcaagctggtgaaggaggccttccaggacgaccccagattcctgaccgccagagacaaggcctacaaggccgtggtgaacgacgccaccatcttcaagctggagctgcccctgaagcagaagggcgtgggcctgaagacccagcccgagagcaagtgccccgagctgctggccaactactgcgacatgctgctgagaaagacccccctgagcaagaagctgaccagcgaggagatcgaggccaagctgaaggaggtgctgctggtgctgaagtacgtgcagaacaaggacgtgttcatgagataccacaaggcccacctgaccagaagactgatcctggacatcagcgccgacagcgagatcgaggagaacatggtggagtggctgagagaggtgggcatgcccgccgactacgtgaacaagctggccagaatgttccaggacatcaaggtgagcgaggacctgaaccaggccttcaaggagatgcacaagaacaacaagctggccctgcccgccgacagcgtgaacatcaagatcctgaacgccggcgcctggagcagaagcagcgagaaggtgttcgtgagcctgcccaccgagctggaggacctgatccccgaggtggaggagttctacaagaagaaccacagcggcagaaagctgcactggcaccacctgatgagcaacggcatcatcaccttcaagaacgaggtgggccagtacgacctggaggtgaccaccttccagctggccgtgctgttcgcctggaaccagagacccagagagaagatcagcttcgagaacctgaagctggccaccgagctgcccgacgccgagctgagaagaaccctgtggagcctggtggccttccccaagctgaagagacaggtgctgctgtacgagccccaggtgaacagccccaaggacttcaccgagggcaccctgttcagcgtgaaccaggagttcagcctgatcaagaacgccaaggtgcagaagagaggcaagatcaacctgatcggcagactgcagctgaccaccgagagaatgagagaggaggagaacgagggcatcgtgcagctgagaatcctgagaacccaggaggccatcatccagatcatgaagatgagaaagaagatcagcaacgcccagctgcagaccgagctggtggagatcctgaagaacatgttcctgccccagaagaagatgatcaaggagcagatcgagtggctgatcgagcacaagtacatcagaagagacgagagcgacatcaacaccttcatctacatggcctag

SEQ ID NO: 77959 - DNA, 2343 bp, synthetic construct; identical to SEQ ID NO: 77958
  misc_feature 1..2343: note = Description of Artificial Sequence: Synthetic coding sequence
  source 1..2343: mol_type = other DNA

SEQ ID NO: 77960 - DNA, 5097 bp, synthetic construct
  misc_feature 1..5097: note = Description of Artificial Sequence: Synthetic coding sequence
  source 1..5097: mol_type = other DNA
atggtgggcgagctgagatacagagagttcagagtgcccctgggccccggcctgcacgcctaccccgacgagctgatcagacagagagtgggccacgacggccaccccgagtaccagatcagatggctgatcctgagaagaggcgacgagggcgacggcggcagcggccaggtggactgcaaggccgagcacatcctgctgtggatgagcaaggacgagatctacgccaactgccacaagatgctgggcgaggacggccaggtgatcggccccagccaggagagcgccggcgaggtgggcgccctggacaagagcgtgctggaggagatggagaccgacgtgaagagcctgatccagagagccctgagacagctggaggagtgcgtgggcaccatcccccccgcccccctgctgcacaccgtgcacgtgctgagcgcctacgccagcatcgagcccctgaccggcgtgttcaaggaccccagagtgctggacctgctgatgcacatgctgagcagccccgactaccagatcagatggagcgccggcagaatgatccaggccctgagcagccacgacgccggcaccagaacccagatcctgctgagcctgagccagcaggaggccatcgagaagcacctggacttcgacagcagatgcgccctgctggccctgttcgcccaggccaccctgagcgagcaccccatgagcttcgagggcatccagctgccccaggtgcccggcagagtgctgttcagcctggtgaagagatacctgcacgtgaccagcctgctggaccagctgaacgacagcgccgccgagcccggcgcccagaacaccagcgcccccgaggagctgagcggcgagagaggccagctggagctggagttcagcatggccatgggcaccctgatcagcgagctggtgcaggccatgagatgggaccaggccagcgacagacccagaagcagcgccagaagccccggcagcatcttccagccccagctggccgacgtgagccccggcctgcccgccgcccaggcccagcccagcttcagaagaagcagaagattcagacccagaagcgagttcgccagcggcaacacctacgccctgtacgtgagagacaccctgcagcccggcatgagagtgagaatgctggacgactacgaggagatcagcgccggcgacgagggcgagttcagacagagcaacaacggcgtgccccccgtgcaggtgttctgggagagcaccggcagaacctactgggtgcactggcacatgctggagatcctgggcttcgaggaggacatcgaggacatggtggaggccgacgagtaccagggcgccgtggccagcagagtgctgggcagagccctgcccgcctggagatggagacccatgaccgagctgtacgccgtgccctacgtgctgcccgaggacgaggacaccgaggagtgcgagcacctgaccctggccgagtggtgggagctgctgttcttcatcaagaagctggacggccccgaccaccaggaggtgctgcagatcctgcaggagaacctggacggcgagatcctggacgacgagatcctggccgagctggccgtgcccatcgagctggcccaggacctgctgctgaccctgccccagagactgaacgacagcgccctgagagacctgatcaactgccacgtgtacaagaagtacggccccgaggccctggccggcaaccaggcctaccccagcctgctggaggcccaggaggacgtgctgctgctggacgcccaggcccaggccaaggacagcgaggacgccgccaaggtggaggccaaggagccccccagccagagccccaacacccccctgcagagactggtggagggctacggccccgccggcaagatcctgctggacctggagcaggccctgagcagcgagggcacccaggagaacaaggtgaagcccctgctgctgcagctgcagagacagccccagcccttcctggccctgatgcagagcctggacacccccgagaccaacagaaccctgcacctgaccgtgctgagaatcctgaagcagctggtggacttccccgaggccctgctgctgccctggcacgaggccgtggacgcctgcatggcctgcctgagaagccccaacaccgacagagaggtgctgcaggagctgatcttcttcctgcacagactgaccagcgtgagcagagactacgccgtggtgctgaaccagctgggcgccagagacgccatcagcaaggccctggagaagcacctgggcaagctggagctggcccaggagctgagagacatggtgttcaagtgcgagaagcacgcccacctgtacagaaagctgatcaccaacatcctgggcggctgcatccagatggtgctgggccagatcgaggaccacagaagaacccaccagcccatcaacatccccttcttcgacgtgttcctgagatacctgtgccagggcagcagcgtggaggtgaaggaggacaagtgctgggagaaggtggaggtgagcagcaacccccacagagccagcaagctgaccgaccacaaccccaagacctactgggagagcaacggcagcgccggcagccactacatcaccctgcacatgagaagaggcatcctgatcagacagctgaccctgctggtggccagcgaggacagcagctacatgcccgccagagtggtggtgtgcggcggcgacagcaccagcagcctgcacaccgagctgaacagcgtgaacgtgatgcccagcgccagcagagtgatcctgctggagaacctgaccagattctggcccatcatccagatcagaatcaagagatgccagcagggcggcatcgacaccagaatcagaggcctggagatcctgggccccaagcccaccttctggcccgtgttcagagagcagctgtgcagacacaccagactgttctacatggtgagagcccaggcctggagccaggacatggccgaggacagaagaagcctgctgcacctgagcagcagactgaacggcgccctgagacaggagcagaacttcgccgacagattcctgcccgacgacgaggccgcccaggccctgggcaagacctgctgggaggccctggtgagccccgtggtgcagaacatcaccagccccgacgaggacggcatcagccccctgggctggctgctggaccagtacctggagtgccaggaggccgtgttcaacccccagagcagaggccccgccttcttcagcagagtgagaagactgacccacctgctggtgcacgtggagccctgcgaggcccccccccccgtggtggccacccccagacccaagggcagaaacagaagccacgactggagcagcctggccaccagaggcctgcccagcagcatcatgagaaacctgaccagatgctggagagccgtggtggagaagcaggtgaacaacttcctgaccagcagctggagagacgacgacttcgtgcccagatactgcgagcacttcaacatcctgcagaacagcagcagcgagctgttcggccccagagccgccttcctgctggccctgcagaacggctgcgccggcgccctgctgaagctgcccttcctgaaggccgcccacgtgagcgagcagttcgccagacacatcgaccagcagatccagggcagcagaatcggcggcgcccaggagatggagagactggcccagctgcagcagtgcctgcaggccgtgctgatcttcagcggcctggagatcgccaccaccttcgagcactactaccagcactacatggccgacagactgctgggcgtggtgagcagctggctggagggcgccgtgctggagcagatcggcccctgcttccccaacagactgccccagcagatgctgcagagcctgagcaccagcaaggagctgcagagacagttccacgtgtaccagctgcagcagctggaccaggagctgctgaagctggaggacaccgagaagaagatccaggtgggcctgggcgccagcggcaaggagcacaagagcgagaaggaggaggaggccggcgccgccgccgtggtggacgtggccgagggcgaggaggaggaggaggagaacgaggacctgtactacgagggcgccatgcccgaggtgagcgtgctggtgctgagcagacacagctggcccgtggccagcatctgccacaccctgaaccccagaacctgcctgcccagctacctgagaggcaccctgaacagatacagcaacttctacaacaagagccagagccaccccgccctggagagaggcagccagagaagactgcagtggacctggctgggctgggccgagctgcagttcggcaaccagaccctgcacgtgagcaccgtgcagatgtggctgctgctgtacctgaacgacctgaaggccgtgagcgtggagagcctgctggccttcagcggcctgagcgccgacatgctgaaccaggccatcggccccctgaccagcagcagaggccccctggacctgcacgagcagaaggacatccccggcggcgtgctgaagatcagagacggcagcaaggagcccagaagcagatgggacatcgtgagactgatccccccccagacctacctgcaggccgagggcgaggacggccagaacctggagaagagaagaaacctgctgaactgcctgatcgtgagaatcctgaaggcccacggcgacgagggcctgcacatcgaccagctggtgtgcctggtgctggaggcctggcagaagggcccctgcccccccagaggcctggtgagcagcctgggcaagggcagcgcctgcagcagcaccgacgtgctgagctgcatcctgcacctgctgggcaagggcaccctgagaagacacgacgacagaccccaggtgctgagctacgccgtgcccgtgaccgtgatggagccccacaccgagagcctgaaccccggcagcagcggccccaacccccccctgaccttccacaccctgcagatcagaagcagaggcgtgccctacgccagctgcaccgccacccagagcttcagcaccttcagatag

SEQ ID NO: 77961 - DNA, 5349 bp, synthetic construct
  misc_feature 1..5349: note = Description of Artificial Sequence: Synthetic coding sequence
  source 1..5349: mol_type = other DNA
atgagcagaggcttctggctggccgagcccctggccggcaccggcccccaccccgcccccgtggccgccgacagcagaggctgcagcagcgtgcccagaagacacgcccccagcagactgagcgtgagcacccccagcagaggccccggcgccagaatggtgggcgagctgagatacagagagttcagagtgcccctgggccccggcctgcacgcctaccccgacgagctgatcagacagagagtgggccacgacggccaccccgagtaccagatcagatggctgatcctgagaagaggcgacgagggcgacggcggcagcggccaggtggactgcaaggccgagcacatcctgctgtggatgagcaaggacgagatctacgccaactgccacaagatgctgggcgaggacggccaggtgatcggccccagccaggagagcgccggcgaggtgggcgccctggacaagagcgtgctggaggagatggagaccgacgtgaagagcctgatccagagagccctgagacagctggaggagtgcgtgggcaccatcccccccgcccccctgctgcacaccgtgcacgtgctgagcgcctacgccagcatcgagcccctgaccggcgtgttcaaggaccccagagtgctggacctgctgatgcacatgctgagcagccccgactaccagatcagatggagcgccggcagaatgatccaggccctgagcagccacgacgccggcgagggccagtgcggcgaggagggcaaggccggcgagggcctgggcagactgagagacagccaggacaccgtggccggcgccagcgacctgatcagaaccagaacccagatcctgctgagcctgagccagcaggaggccatcgagaagcacctggacttcgacagcagatgcgccctgctggccctgttcgcccaggccaccctgagcgagcaccccatgagcttcgagggcatccagctgccccaggtgcccggcagagtgctgttcagcctggtgaagagatacctgcacgtgaccagcctgctggaccagctgaacgacagcgccgccgagcccggcgcccagaacaccagcgcccccgaggagctgagcggcgagagaggccagctggagctggagttcagcatggccatgggcaccctgatcagcgagctggtgcaggccatgagatgggaccaggccagcgacagacccagaagcagcgccagaagccccggcagcatcttccagccccagctggccgacgtgagccccggcctgcccgccgcccaggcccagcccagcttcagaagaagcagaagattcagacccagaagcgagttcgccagcggcaacacctacgccctgtacgtgagagacaccctgcagcccggcatgagagtgagaatgctggacgactacgaggagatcagcgccggcgacgagggcgagttcagacagagcaacaacggcgtgccccccgtgcaggtgttctgggagagcaccggcagaacctactgggtgcactggcacatgctggagatcctgggcttcgaggaggacatcgaggacatggtggaggccgacgagtaccagggcgccgtggccagcagagtgctgggcagagccctgcccgcctggagatggagacccatgaccgagctgtacgccgtgccctacgtgctgcccgaggacgaggacaccgaggagtgcgagcacctgaccctggccgagtggtgggagctgctgttcttcatcaagaagctggacggccccgaccaccaggaggtgctgcagatcctgcaggagaacctggacggcgagatcctggacgacgagatcctggccgagctggccgtgcccatcgagctggcccaggacctgctgctgaccctgccccagagactgaacgacagcgccctgagagacctgatcaactgccacgtgtacaagaagtacggccccgaggccctggccggcaaccaggcctaccccagcctgctggaggcccaggaggacgtgctgctgctggacgcccaggcccaggccaaggacagcgaggacgccgccaaggtggaggccaaggagccccccagccagagccccaacacccccctgcagagactggtggagggctacggccccgccggcaagatcctgctggacctggagcaggccctgagcagcgagggcacccaggagaacaaggtgaagcccctgctgctgcagctgcagagacagccccagcccttcctggccctgatgcagagcctggacacccccgagaccaacagaaccctgcacctgaccgtgctgagaatcctgaagcagctggtggacttccccgaggccctgctgctgccctggcacgaggccgtggacgcctgcatggcctgcctgagaagccccaacaccgacagagaggtgctgcaggagctgatcttcttcctgcacagactgaccagcgtgagcagagactacgccgtggtgctgaaccagctgggcgccagagacgccatcagcaaggccctggagaagcacctgggcaagctggagctggcccaggagctgagagacatggtgttcaagtgcgagaagcacgcccacctgtacagaaagctgatcaccaacatcctgggcggctgcatccagatggtgctgggccagatcgaggaccacagaagaacccaccagcccatcaacatccccttcttcgacgtgttcctgagatacctgtgccagggcagcagcgtggaggtgaaggaggacaagtgctgggagaaggtggaggtgagcagcaacccccacagagccagcaagctgaccgaccacaaccccaagacctactgggagagcaacggcagcgccggcagccactacatcaccctgcacatgagaagaggcatcctgatcagacagctgaccctgctggtggccagcgaggacagcagctacatgcccgccagagtggtggtgtgcggcggcgacagcaccagcagcctgcacaccgagctgaacagcgtgaacgtgatgcccagcgccagcagagtgatcctgctggagaacctgaccagattctggcccatcatccagatcagaatcaagagatgccagcagggcggcatcgacaccagaatcagaggcctggagatcctgggccccaagcccaccttctggcccgtgttcagagagcagctgtgcagacacaccagactgttctacatggtgagagcccaggcctggagccaggacatggccgaggacagaagaagcctgctgcacctgagcagcagactgaacggcgccctgagacaggagcagaacttcgccgacagattcctgcccgacgacgaggccgcccaggccctgggcaagacctgctgggaggccctggtgagccccgtggtgcagaacatcaccagccccgacgaggacggcatcagccccctgggctggctgctggaccagtacctggagtgccaggaggccgtgttcaacccccagagcagaggccccgccttcttcagcagagtgagaagactgacccacctgctggtgcacgtggagccctgcgaggcccccccccccgtggtggccacccccagacccaagggcagaaacagaagccacgactggagcagcctggccaccagaggcctgcccagcagcatcatgagaaacctgaccagatgctggagagccgtggtggagaagcaggtgaacaacttcctgaccagcagctggagagacgacgacttcgtgcccagatactgcgagcacttcaacatcctgcagaacagcagcagcgagctgttcggccccagagccgccttcctgctggccctgcagaacggctgcgccggcgccctgctgaagctgcccttcctgaaggccgcccacgtgagcgagcagttcgccagacacatcgaccagcagatccagggcagcagaatcggcggcgcccaggagatggagagactggcccagctgcagcagtgcctgcaggccgtgctgatcttcagcggcctggagatcgccaccaccttcgagcactactaccagcactacatggccgacagactgctgggcgtggtgagcagctggctggagggcgccgtgctggagcagatcggcccctgcttccccaacagactgccccagcagatgctgcagagcctgagcaccagcaaggagctgcagagacagttccacgtgtaccagctgcagcagctggaccaggagctgctgaagctggaggacaccgagaagaagatccaggtgggcctgggcgccagcggcaaggagcacaagagcgagaaggaggaggaggccggcgccgccgccgtggtggacgtggccgagggcgaggaggaggaggaggagaacgaggacctgtactacgagggcgccatgcccgaggtgagcgtgctggtgctgagcagacacagctggcccgtggccagcatctgccacaccctgaaccccagaacctgcctgcccagctacctgagaggcaccctgaacagatacagcaacttctacaacaagagccagagccaccccgccctggagagaggcagccagagaagactgcagtggacctggctgggctgggccgagctgcagttcggcaaccagaccctgcacgtgagcaccgtgcagatgtggctgctgctgtacctgaacgacctgaaggccgtgagcgtggagagcctgctggccttcagcggcctgagcgccgacatgctgaaccaggccatcggccccctgaccagcagcagaggccccctggacctgcacgagcagaaggacatccccggcggcgtgctgaagatcagagacggcagcaaggagcccagaagcagatgggacatcgtgagactgatccccccccagacctacctgcaggccgagggcgaggacggccagaacctggagaagagaagaaacctgctgaactgcctgatcgtgagaatcctgaaggcccacggcgacgagggcctgcacatcgaccagctggtgtgcctggtgctggaggcctggcagaagggcccctgcccccccagaggcctggtgagcagcctgggcaagggcagcgcctgcagcagcaccgacgtgctgagctgcatcctgcacctgctgggcaagggcaccctgagaagacacgacgacagaccccaggtgctgagctacgccgtgcccgtgaccgtgatggagccccacaccgagagcctgaaccccggcagcagcggccccaacccccccctgaccttccacaccctgcagatcagaagcagaggcgtgccctacgccagctgcaccgccacccagagcttcagcaccttcagatag

SEQ ID NO: 77962 - DNA, 435 bp, synthetic construct
  misc_feature 1..435: note = Description of Artificial Sequence: Synthetic coding sequence
  source 1..435: mol_type = other DNA
atgggcgtgctgcaggtggtgaagcagagcgtgcagatccccgtgttcgtgatgatcagacccagaggcggcgacttcctgtacagcgacagagagatcgaggtgatgaaggccgacatcagactggccaagctgtacggcgccgacggcctggtgttcggcgccctgaccgaggacggccacatcgacaaggagctgtgcatgagcctgatggccatctgcagacccctgcccgtgaccttccacagagccttcgacatggtgcacgaccccatggccgccctggagaccctgctgaccctgggcttcgagagagtgctgaccagcggctgcgacagcagcgccctggagggcctgcccctgatcaagagactgatcgagcaggccaagggcagaatcgtggtgatgcccggcggcggcatcaccgacagatag

SEQ ID NO: 77963 - DNA, 822 bp, synthetic construct
  misc_feature 1..822: note = Description of Artificial Sequence: Synthetic coding sequence
  source 1..822: mol_type = other DNA
atgaagagacagggcgccagcagcgagagaaagagagccagaatccccagcggcaaggccggcgccgccaacggcttcctgatggaggtgtgcgtggacagcgtggagagcgccgtgaacgccgagagaggcggcgccgacagaatcgagctgtgcagcggcctgagcgagggcggcaccacccccagcatgggcgtgctgcaggtggtgaagcagagcgtgcagatccccgtgttcgtgatgatcagacccagaggcggcgacttcctgtacagcgacagagagatcgaggtgatgaaggccgacatcagactggccaagctgtacggcgccgacggcctggtgttcggcgccctgaccgaggacggccacatcgacaaggagctgtgcatgagcctgatggccatctgcagacccctgcccgtgaccttccacagagccttcgacatggtgcacgaccccatggccgccctggagaccctgctgaccctgggcttcgagagagtgctgaccagcggctgcgacagcagcgccctggagggcctgcccctgatcaagagactgatcgagcaggccaagggcagaatcgtggtgatgcccggcggcggcatcaccgacagaaacctgcagagaatcctggagggcagcggcgccaccgagttccactgcagcgccagaagcaccagagacagcggcatgaagttcagaaacagcagcgtggccatgggcgccagcctgagctgcagcgagtacagcctgaaggtgaccgacgtgaccaaggtgagaaccctgaacgccatcgccaagaacatcctggtgtag

SEQ ID NO: 77964 - DNA, 1122 bp, synthetic construct
  misc_feature 1..1122: note = Description of Artificial Sequence: Synthetic coding sequence
  source 1..1122: mol_type = other DNA
atgagcctgctgctgctgctgctgctggtgagctactacgtgggcaccctgggcacccacaccgagatcaagagagtggccgaggagaaggtgaccctgccctgccaccaccagctgggcctgcccgagaaggacaccctggacatcgagtggctgctgaccgacaacgagggcaaccagaaggtggtgatcacctacagcagcagacacgtgtacaacaacctgaccgaggagcagaagggcagagtggccttcgccagcaacttcctggccggcgacgccagcctgcagatcgagcccctgaagcccagcgacgagggcagatacacctgcaaggtgaagaacagcggcagatacgtgtggagccacgtgatcctgaaggtgctggtgagacccagcaagcccaagtgcgagctggagggcgagctgaccgagggcagcgacctgaccctgcagtgcgagagcagcagcggcaccgagcccatcgtgtactactggcagagaatcagagagaaggagggcgaggacgagagactgccccccaagagcagaatcgactacaaccaccccggcagagtgctgctgcagaacctgaccatgagctacagcggcctgtaccagtgcaccgccggcaacgaggccggcaaggagagctgcgtggtgagagtgaccgtgcagtacgtgcagagcatcggcatggtggccggcgccgtgaccggcatcgtggccggcgccctgctgatcttcctgctggtgtggctgctgatcagaagaaaggacaaggagagatacgaggaggaggagagacccaacgagatcagagaggacgccgaggcccccaaggccagactggtgaagcccagcagcagcagcagcggcagcagaagcagcagaagcggcagcagcagcaccagaagcaccgccaacagcgccagcagaagccagagaaccctgagcaccgacgccgccccccagcccggcctggccacccaggcctacagcctggtgggccccgaggtgagaggcagcgagcccaagaaggtgcaccacgccaacctgaccaaggccgagaccacccccagcatgatccccagccagagcagagccttccagaccgtgtag

SEQ ID NO: 77965 - DNA, 597 bp, synthetic construct
  misc_feature 1..597: note = Description of Artificial Sequence: Synthetic coding sequence
  source 1..597: mol_type = other DNA
atgcaccacagaaacgacagccagagactgggcaaggccggctgcccccccgagcccagcctgcagatggccaacaccaacttcctgagcaccctgagccccgagcactgcagacccctggccggcgagtgcatgaacaagctgaagtgcggcgccgccgaggccgagatcatgaacctgcccgagagagtgggcaccttcagcgccatccccgccctgggcggcatcagcctgccccccggcgtgatcgtgatgaccgccctgcacagccccgccgccgccagcgccgccgtgaccgacagcgccttccagatcgccaacctggccgactgcccccagaaccacagcagcagcagcagcagcagcagcggcggcgccggcggcgccaaccccgccaagaagaagagaaagagatgcggcgtgtgcgtgccctgcaagagactgatcaactgcggcgtgtgcagcagctgcagaaacagaaagaccggccaccagatctgcaagttcagaaagtgcgaggagctgaagaagaagcccggcaccagcctggagagaacccccgtgcccagcgccgaggccttcagatggttcttctag

SEQ ID NO: 77966 - DNA, 597 bp, synthetic construct; identical to SEQ ID NO: 77965
  misc_feature 1..597: note = Description of Artificial Sequence: Synthetic coding sequence
  source 1..597: mol_type = other DNA

SEQ ID NO: 77967 - DNA, 969 bp, synthetic construct
  misc_feature 1..969: note = Description of Artificial Sequence: Synthetic coding sequence
  source 1..969: mol_type = other DNA
atgagcagcctgggcggcggcagccaggacgccggcggcagcagcagcagcagcaccaacggcagcggcggcagcggcagcagcggccccaaggccggcgccgccgacaagagcgccgtggtggccgccgccgcccccgccagcgtggccgacgacacccccccccccgagagaagaaacaagagcggcatcatcagcgagcccctgaacaagagcctgagaagaagcagacccctgagccactacagcagcttcggcagcagcggcggcagcggcggcggcagcatgatgggcggcgagagcgccgacaaggccaccgccgccgccgccgccgccagcctgctggccaacggccacgacctggccgccgccatggccgtggacaagagcaaccccaccagcaagcacaagagcggcgccgtggccagcctgctgagcaaggccgagagagccaccgagctggccgccgagggccagctgaccctgcagcagttcgcccagagcaccgagatgctgaagagagtggtgcaggagcacctgcccctgatgagcgaggccggcgccggcctgcccgacatggaggccgtggccggcgccgaggccctgaacggccagagcgacttcccctacctgggcgccttccccatcaaccccggcctgttcatcatgacccccgccggcgtgttcctggccgagagcgccctgcacatggccggcctggccgagtaccccatgcagggcgagctggccagcgccatcagcagcggcaagaagaagagaaagagatgcggcatgtgcgccccctgcagaagaagaatcaactgcgagcagtgcagcagctgcagaaacagaaagaccggccaccagatctgcaagttcagaaagtgcgaggagctgaagaagaagcccagcgccgccctggagaaggtgatgctgcccaccggcgccgccttcagatggttccagtag

SEQ ID NO: 77968 - DNA, 210 bp, synthetic construct
  misc_feature 1..210: note = Description of Artificial Sequence: Synthetic coding sequence
  source 1..210: mol_type = other DNA
atgagcagcctgggcggcggcagccaggacgccggcggcagcagcagcagcagcaccaacggcagcggcggcagcggcagcagcggccccaaggccggcgccgccgacaagagcgccgtggtggccgccgccgcccccgccagcgtggccgacgacacccccccccccgagagaagaaacaagagcggcatcatcagcgagcccctgtag

SEQ ID NO: 77969 - DNA, 243 bp, synthetic construct
  misc_feature 1..243: note = Description of Artificial Sequence: Synthetic coding sequence
  source 1..243: mol_type = other DNA
atgagcagcctgggcggcggcagccaggacgccggcggcagcagcagcagcagcaccaacggcagcggcggcagcggcagcagcggccccaaggccggcgccgccgacaagagcgccgtggtggccgccgccgcccccgccagcgtggccgacgacacccccccccccgagagaagaaacaagagcggcatcatcagcgagcccctgaacaagagcctgagaagaagcagacccctgagctag

SEQ ID NO: 77970 - DNA, 546 bp, synthetic construct
  misc_feature 1..546: note = Description of Artificial Sequence: Synthetic coding sequence
  source 1..546: mol_type = other DNA
atgagcagcctgggcggcggcagccaggacgccggcggcagcagcagcagcagcaccaacggcagcggcggcagcggcagcagcggccccaaggccggcgccgccgacaagagcgccgtggtggccgccgccgcccccgccagcgtggccgacgacacccccccccccgagagaagaaacaagagcggcatcatcagcgagcccctgaacaagagcctgagaagaagcagacccctgagccactacagcagcttcggcagcagcggcggcagcggcggcggcagcatgatgggcggcgagagcgccgacaaggccaccgccgccgccgccgccgccagcctgctggccaacggccacgacctggccgccgccatggccgtggacaagagcaaccccaccagcaagcacaagagcggcgccgtggccagcctgctgagcaaggccgagagagccaccgagctggccgccgagggccagctgaccctgcagcagttcgcccagagcaccgagatgctgaagagagtggtgcaggagcacctgccctag

SEQ ID NO: 77971 - DNA, 252 bp, synthetic construct
  misc_feature 1..252: note = Description of Artificial Sequence: Synthetic coding sequence
  source 1..252: mol_type = other DNA
atgagcagcctgggcggcggcagccaggacgccggcggcagcagcagcagcagcaccaacggcagcggcggcagcggcagcagcggccccaaggccggcgccgccgacaagagcgccgtggtggccgccgccgcccccgccagcgtggccgacgacacccccccccccgagagaagaaacaagagcggcatcatcagcgagcccctgaacaagagcctgagaagaagcagacccctgagccactacagctag

SEQ ID NO: 77972 - DNA, 486 bp, synthetic construct
  misc_feature 1..486: note = Description of Artificial Sequence: Synthetic coding sequence
  source 1..486: mol_type = other DNA
atgagcagcctgggcggcggcagccaggacgccggcggcagcagcagcagcagcaccaacggcagcggcggcagcggcagcagcggccccaaggccggcgccgccgacaagagcgccgtggtggccgccgccgcccccgccagcgtggccgacgacacccccccccccgagagaagaaacaagagcggcatcatcagcgagcccctgaacaagagcctgagaagaagcagacccctgagccactacagcagcttcggcagcagcggcggcagcggcggcggcagcatgatgggcggcgagagcgccgacaaggccaccgccgccgccgccgccgccagcctgctggccaacggccacgacctggccgccgccatggccgtggacaagagcaaccccaccagcaagcacaagagcggcgccgtggccagcctgctgagcaaggccgagagagccaccgagctggccgccgagggccagctgacctag

SEQ ID NO: 77973 - DNA, 309 bp, synthetic construct
  misc_feature 1..309: note = Description of Artificial Sequence: Synthetic coding sequence
  source 1..309: mol_type = other DNA
atgagcagcctgggcggcggcagccaggacgccggcggcagcagcagcagcagcaccaacggcagcggcggcagcggcagcagcggccccaaggccggcgccgccgacaagagcgccgtggtggccgccgccgcccccgccagcgtggccgacgacacccccccccccgagagaagaaacaagagcggcatcatcagcgagcccctgaacaagagcctgagaagaagcagacccctgagccactacagcagcttcggcagcagcggcggcagcggcggcggcagcatgatgggcggcgagagcgcctag

SEQ ID NO: 77974 - DNA, 36 bp, synthetic construct
  misc_feature 1..36: note = Description of Artificial Sequence: Synthetic coding sequence
  source 1..36: mol_type = other DNA
atgagcagcctgggcggcggcagccaggacgcctag

SEQ ID NO: 77975 - DNA, 297 bp, synthetic construct
  misc_feature 1..297: note = Description of Artificial Sequence: Synthetic coding sequence
  source 1..297: mol_type = other DNA
atgagcagcctgggcggcggcagccaggacgccggcggcagcagcagcagcagcaccaacggcagcggcggcagcggcagcagcggccccaaggccggcgccgccgacaagagcgccgtggtggccgccgccgcccccgccagcgtggccgacgacacccccccccccgagagaagaaacaagagcggcatcatcagcgagcccctgaacaagagcctgagaagaagcagacccctgagccactacagcagcttcggcagcagcggcggcagcggcggcggcagcatgatgggctag

SEQ ID NO: 77976 - DNA, 969 bp, synthetic construct; identical to SEQ ID NO: 77967
  misc_feature 1..969: note = Description of Artificial Sequence: Synthetic coding sequence
  source 1..969: mol_type = other DNA

SEQ ID NO: 77977 - DNA, 594 bp, synthetic construct
  misc_feature 1..594: note = Description of Artificial Sequence: Synthetic coding sequence
  source 1..594: mol_type = other DNA
atgagcagcctgggcggcggcagccaggacgccggcggcagcagcagcagcagcaccaacggcagcggcggcagcggcagcagcggccccaaggccggcgccgccgacaagagcgccgtggtggccgccgccgcccccgccagcgtggccgacgacacccccccccccgagagaagaaacaagagcggcatcatcagcgagcccctgaacaagagcctgagaagaagcagacccctgagccactacagcagcttcggcagcagcggcggcagcggcggcggcagcatgatgggcggcgagagcgccgacaaggccaccgccgccgccgccgccgccagcctgctggccaacggccacgacctggccgccgccatggccgtggacaagagcaaccccaccagcaagcacaagagcggcgccgtggccagcctgctgagcaaggccgagagagccaccgagctggccgccgagggccagctgaccctgcagcagttcgcccagagcaccgagatgctgaagagagtggtgcaggagcacctgcccctgatgagcgaggccggcgccggcctgcccgacatggaggccgtggcctag

SEQ ID NO: 77978 - DNA, 27 bp, synthetic construct
  misc_feature 1..27: note = Description of Artificial Sequence: Synthetic coding sequence
  source 1..27: mol_type = other DNA
atgagcagcctgggcggcggcagctag

SEQ ID NO: 77979 - DNA, 222 bp, synthetic construct
  misc_feature 1..222: note = Description of Artificial Sequence: Synthetic coding sequence
  source 1..222: mol_type = other DNA
atgagcagcctgggcggcggcagccaggacgccggcggcagcagcagcagcagcaccaacggcagcggcggcagcggcagcagcggccccaaggccggcgccgccgacaagagcgccgtggtggccgccgccgcccccgccagcgtggccgacgacacccccccccccgagagaagaaacaagagcggcatcatcagcgagcccctgaacaagagcctgtag

SEQ ID NO: 77980 - DNA, 414 bp, synthetic construct
  misc_feature 1..414: note = Description of Artificial Sequence: Synthetic coding sequence
  source 1..414: mol_type = other DNA
atgagcagcctgggcggcggcagccaggacgccggcggcagcagcagcagcagcaccaacggcagcggcggcagcggcagcagcggccccaaggccggcgccgccgacaagagcgccgtggtggccgccgccgcccccgccagcgtggccgacgacacccccccccccgagagaagaaacaagagcggcatcatcagcgagcccctgaacaagagcctgagaagaagcagacccctgagccactacagcagcttcggcagcagcggcggcagcggcggcggcagcatgatgggcggcgagagcgccgacaaggccaccgccgccgccgccgccgccagcctgctggccaacggccacgacctggccgccgccatggccgtggacaagagcaaccccaccagcaagcacaagtag

SEQ ID NO: 77981 - DNA, 2073 bp, synthetic construct
  misc_feature 1..2073: note = Description of Artificial Sequence: Synthetic coding sequence
  source 1..2073: mol_type = other DNA
atgaagctgagcatgaagaacaacatcatcaacacccagcagagcttcgtgaccatgcccaacgtgatcgtgcccgacatcgagaaggagatcagaagaatggagaacggcgcctgcagcagcttcagcgaggacgacgacagcgccagcaccagcgaggagagcgagaacgagaacccccacgccagaggcagcttcagctacaagagcctgagaaagggcggccccagccagagagagcagtacctgcccggcgccatcgccctgttcaacgtgaacaacagcagcaacaaggaccaggagcccgaggagaagaagaagaagaagaaggagaagaagagcaagagcgacgacaagaacgagaacaagaacgaccccgagaagaagaagaagaagaaggacaaggagaagaagaagaaggaggagaagagcaaggacaagaaggaggaggagaagaaggaggtggtggtgatcgaccccagcggcaacacctactacaactggctgttctgcatcaccctgcccgtgatgtacaactggaccatggtgatcgccagagcctgcttcgacgagctgcagagcgactacctggagtactggctgatcctggactacgtgagcgacatcgtgtacctgatcgacatgttcgtgagaaccagaaccggctacctggagcagggcctgctggtgaaggaggagctgaagctgatcaacaagtacaagagcaacctgcagttcaagctggacgtgctgagcctgatccccaccgacctgctgtacttcaagctgggctggaactaccccgagatcagactgaacagactgctgagattcagcagaatgttcgagttcttccagagaaccgagaccagaaccaactaccccaacatcttcagaatcagcaacctggtgatgtacatcgtgatcatcatccactggaacgcctgcgtgttctacagcatcagcaaggccatcggcttcggcaacgacacctgggtgtaccccgacatcaacgaccccgagttcggcagactggccagaaagtacgtgtacagcctgtactggagcaccctgaccctgaccaccatcggcgagacccccccccccgtgagagacagcgagtacgtgttcgtggtggtggacttcctgatcggcgtgctgatcttcgccaccatcgtgggcaacatcggcagcatgatcagcaacatgaacgccgccagagccgagttccaggccagaatcgacgccatcaagcagtacatgcacttcagaaacgtgagcaaggacatggagaagagagtgatcaagtggttcgactacctgtggaccaacaagaagaccgtggacgagaaggaggtgctgaagtacctgcccgacaagctgagagccgagatcgccatcaacgtgcacctggacaccctgaagaaggtgagaatcttcgccgactgcgaggccggcctgctggtggagctggtgctgaagctgcagccccaggtgtacagccccggcgactacatctgcaagaagggcgacatcggcagagagatgtacatcatcaaggagggcaagctggccgtggtggccgacgacggcgtgacccagttcgtggtgctgagcgacggcagctacttcggcgagatcagcatcctgaacatcaagggcagcaaggccggcaacagaagaaccgccaacatcaagagcatcggctacagcgacctgttctgcctgagcaaggacgacctgatggaggccctgaccgagtaccccgacgccaagaccatgctggaggagaagggcaagcagatcctgatgaaggacggcctgctggacctgaacatcgccaacgccggcagcgaccccaaggacctggaggagaaggtgaccagaatggagggcagcgtggacctgctgcagaccagattcgccagaatcctggccgagtacgagagcatgcagcagaagctgaagcagagactgaccaaggtggagaagttcctgaagcccctgatcgacaccgagttcagcagcatcgagggccccggcgccgagagcggccccatcgacagcacctag

SEQ ID NO: 77982 - DNA, 2280 bp, synthetic construct
  misc_feature 1..2280: note = Description of Artificial Sequence: Synthetic coding sequence
  source 1..2280: mol_type = other DNA
atggagagcagaagcagccccagactggagtgcagcggcgccatcagcgcccactgcagcctgcacctgcccgacagcagcgacttccagctgatcttcgtgttcctggtggagatgggcttccaccacgtgggccaggccggcctggagctgctgatcagcagcgacctgcccaccagcgccagccagagcgccggcatcaccgacatgaagctgagcatgaagaacaacatcatcaacacccagcagagcttcgtgaccatgcccaacgtgatcgtgcccgacatcgagaaggagatcagaagaatggagaacggcgcctgcagcagcttcagcgaggacgacgacagcgccagcaccagcgaggagagcgagaacgagaacccccacgccagaggcagcttcagctacaagagcctgagaaagggcggccccagccagagagagcagtacctgcccggcgccatcgccctgttcaacgtgaacaacagcagcaacaaggaccaggagcccgaggagaagaagaagaagaagaaggagaagaagagcaagagcgacgacaagaacgagaacaagaacgaccccgagaagaagaagaagaagaaggacaaggagaagaagaagaaggaggagaagagcaaggacaagaaggaggaggagaagaaggaggtggtggtgatcgaccccagcggcaacacctactacaactggctgttctgcatcaccctgcccgtgatgtacaactggaccatggtgatcgccagagcctgcttcgacgagctgcagagcgactacctggagtactggctgatcctggactacgtgagcgacatcgtgtacctgatcgacatgttcgtgagaaccagaaccggctacctggagcagggcctgctggtgaaggaggagctgaagctgatcaacaagtacaagagcaacctgcagttcaagctggacgtgctgagcctgatccccaccgacctgctgtacttcaagctgggctggaactaccccgagatcagactgaacagactgctgagattcagcagaatgttcgagttcttccagagaaccgagaccagaaccaactaccccaacatcttcagaatcagcaacctggtgatgtacatcgtgatcatcatccactggaacgcctgcgtgttctacagcatcagcaaggccatcggcttcggcaacgacacctgggtgtaccccgacatcaacgaccccgagttcggcagactggccagaaagtacgtgtacagcctgtactggagcaccctgaccctgaccaccatcggcgagacccccccccccgtgagagacagcgagtacgtgttcgtggtggtggacttcctgatcggcgtgctgatcttcgccaccatcgtgggcaacatcggcagcatgatcagcaacatgaacgccgccagagccgagttccaggccagaatcgacgccatcaagcagtacatgcacttcagaaacgtgagcaaggacatggagaagagagtgatcaagtggttcgactacctgtggaccaacaagaagaccgtggacgagaaggaggtgctgaagtacctgcccgacaagctgagagccgagatcgccatcaacgtgcacctggacaccctgaagaaggtgagaatcttcgccgactgcgaggccggcctgctggtggagctggtgctgaagctgcagccccaggtgtacagccccggcgactacatctgcaagaagggcgacatcggcagagagatgtacatcatcaaggagggcaagctggccgtggtggccgacgacggcgtgacccagttcgtggtgctgagcgacggcagctacttcggcgagatcagcatcctgaacatcaagggcagcaaggccggcaacagaagaaccgccaacatcaagagcatcggctacagcgacctgttctgcctgagcaaggacgacctgatggaggccctgaccgagtaccccgacgccaagaccatgctggaggagaagggcaagcagatcctgatgaaggacggcctgctggacctgaacatcgccaacgccggcagcgaccccaaggacctggaggagaaggtgaccagaatggagggcagcgtggacctgctgcagaccagattcgccagaatcctggccgagtacgagagcatgcagcagaagctgaagcagagactgaccaaggtggagaagttcctgaagcccctgatcgacaccgagttcagcagcatcgagggccccggcgccgagagcggccccatcgacagcacctag

SEQ ID NO: 77983 - DNA, 2073 bp, synthetic construct; identical to SEQ ID NO: 77981
  misc_feature 1..2073: note = Description of Artificial Sequence: Synthetic coding sequence
  source 1..2073: mol_type = other DNA

SEQ ID NO: 77984 - DNA, 387 bp, synthetic construct
  misc_feature 1..387: note = Description of Artificial Sequence: Synthetic coding sequence
  source 1..387: mol_type = other DNA
atgaagctgagcatgaagaacaacatcatcaacacccagcagagcttcgtgaccatgcccaacgtgatcgtgcccgacatcgagaaggagatcagaagaatggagaacggcgcctgcagcagcttcagcgaggacgacgacagcgccagcaccagcgaggagagcgagaacgagaacccccacgccagaggcagcttcagctacaagagcctgagaaagggcggccccagccagagagagcagtacctgcccggcgccatcgccctgttcaacgtgaacaacagcagcaacaaggaccaggagcccgaggagaagaagaagaagaagaaggagaagaagagcaagagcgacgacaagaacgagaacaagaacgaccccgagaagtag

SEQ ID NO: 77985 - DNA, 300 bp, synthetic construct
  misc_feature 1..300: note = Description of Artificial Sequence: Synthetic coding sequence
  source 1..300: mol_type = other DNA
atgaagctgagcatgaagaacaacatcatcaacacccagcagagcttcgtgaccatgcccaacgtgatcgtgcccgacatcgagaaggagatcagaagaatggagaacggcgcctgcagcagcttcagcgaggacgacgacagcgccagcaccagcgaggagagcgagaacgagaacccccacgccagaggcagcttcagctacaagagcctgagaaagggcggccccagccagagagagcagtacctgcccggcgccatcgccctgttcaacgtgaacaacagcagcaacaaggactag

SEQ ID NO: 77986 - DNA, 2073 bp, synthetic construct; identical to SEQ ID NO: 77981
  misc_feature 1..2073: note = Description of Artificial Sequence: Synthetic coding sequence
  source 1..2073: mol_type = other DNA

SEQ ID NO: 77987 - DNA, 300 bp, synthetic construct; identical to SEQ ID NO: 77985
  misc_feature 1..300: note = Description of Artificial Sequence: Synthetic coding sequence
  source 1..300: mol_type = other DNA

SEQ ID NO: 77988 - DNA, 2073 bp, synthetic construct; identical to SEQ ID NO: 77981
  misc_feature 1..2073: note = Description of Artificial Sequence: Synthetic coding sequence
  source 1..2073: mol_type = other DNA

SEQ ID NO: 77989 - DNA, 1995 bp, synthetic construct
  misc_feature 1..1995: note = Description of Artificial Sequence: Synthetic coding sequence
  source 1..1995: mol_type = other DNA
atgaccgagaagaccaacggcgtgaagagcagccccgccaacaaccacaaccaccacgccccccccgccatcaaggccaacggcaaggacgaccacagaaccagcagcagaccccacagcgccgccgacgacgacaccagcagcgagctgcagagactggccgacgtggacgccccccagcagggcagaagcggcttcagaagaatcgtgagactggtgggcatcatcagagagtgggccaacaagaacttcagagaggaggagcccagacccgacagcttcctggagagattcagaggccccgagctgcagaccgtgaccacccaggagggcgacggcaagggcgacaaggacggcgaggacaagggcaccaagaagaagttcgagctgttcgtgctggaccccgccggcgactggtactactgctggctgttcgtgatcgccatgcccgtgctgtacaactggtgcctgctggtggccagagcctgcttcagcgacctgcagaagggctactacctggtgtggctggtgctggactacgtgagcgacgtggtgtacatcgccgacctgttcatcagactgagaaccggcttcctggagcagggcctgctggtgaaggacaccaagaagctgagagacaactacatccacaccctgcagttcaagctggacgtggccagcatcatccccaccgacctgatctacttcgccgtggacatccacagccccgaggtgagattcaacagactgctgcacttcgccagaatgttcgagttcttcgacagaaccgagaccagaaccaactaccccaacatcttcagaatcagcaacctggtgctgtacatcctggtgatcatccactggaacgcctgcatctactacgccatcagcaagagcatcggcttcggcgtggacacctgggtgtaccccaacatcaccgaccccgagtacggctacctggccagagagtacatctactgcctgtactggagcaccctgaccctgaccaccatcggcgagacccccccccccgtgaaggacgaggagtacctgttcgtgatcttcgacttcctgatcggcgtgctgatcttcgccaccatcgtgggcaacgtgggcagcatgatcagcaacatgaacgccaccagagccgagttccaggccaagatcgacgccgtgaagcactacatgcagttcagaaaggtgagcaagggcatggaggccaaggtgatcagatggttcgactacctgtggaccaacaagaagaccgtggacgagagagagatcctgaagaacctgcccgccaagctgagagccgagatcgccatcaacgtgcacctgagcaccctgaagaaggtgagaatcttccacgactgcgaggccggcctgctggtggagctggtgctgaagctgagaccccaggtgttcagccccggcgactacatctgcagaaagggcgacatcggcaaggagatgtacatcatcaaggagggcaagctggccgtggtggccgacgacggcgtgacccagtacgccctgctgagcgccggcagctgcttcggcgagatcagcatcctgaacatcaagggcagcaagatgggcaacagaagaaccgccaacatcagaagcctgggctacagcgacctgttctgcctgagcaaggacgacctgatggaggccgtgaccgagtaccccgacgccaagaaggtgctggaggagagaggcagagagatcctgatgaaggagggcctgctggacgagaacgaggtggccaccagcatggaggtggacgtgcaggagaagctgggccagctggagaccaacatggagaccctgtacaccagattcggcagactgctggccgagtacaccggcgcccagcagaagctgaagcagagaatcaccgtgctggagaccaagatgaagcagaacaacgaggacgactacctgagcgacggcatgaacagccccgagctggccgccgccgacgagccctag

SEQ ID NO: 77990 - DNA, 2085 bp, synthetic construct
  misc_feature 1..2085: note = Description of Artificial Sequence: Synthetic coding sequence
  source 1..2085: mol_type = other DNA
atggccaagatcaacacccagtacagccaccccagcagaacccacctgaaggtgaagaccagcgacagagacctgaacagagccgagaacggcctgagcagagcccacagcagcagcgaggagaccagcagcgtgctgcagcccggcatcgccatggagaccagaggcctggccgacagcggccagggcagcttcaccggccagggcatcgccagactgagcagactgatcttcctgctgagaagatgggccgccagacacgtgcaccaccaggaccagggccccgacagcttccccgacagattcagaggcgccgagctgaaggaggtgagcagccaggagagcaacgcccaggccaacgtgggcagccaggagcccgccgacagaggcagaagcgcctggcccctggccaagtgcaacaccaacaccagcaacaacaccgaggaggagaagaagaccaagaagaaggacgccatcgtggtggaccccagcagcaacctgtactacagatggctgaccgccatcgccctgcccgtgttctacaactggtacctgctgatctgcagagcctgcttcgacgagctgcagagcgagtacctgatgctgtggctggtgctggactacagcgccgacgtgctgtacgtgctggacgtgctggtgagagccagaaccggcttcctggagcagggcctgatggtgagcgacaccaacagactgtggcagcactacaagaccaccacccagttcaagctggacgtgctgagcctggtgcccaccgacctggcctacctgaaggtgggcaccaactaccccgaggtgagattcaacagactgctgaagttcagcagactgttcgagttcttcgacagaaccgagaccagaaccaactaccccaacatgttcagaatcggcaacctggtgctgtacatcctgatcatcatccactggaacgcctgcatctacttcgccatcagcaagttcatcggcttcggcaccgacagctgggtgtaccccaacatcagcatccccgagcacggcagactgagcagaaagtacatctacagcctgtactggagcaccctgaccctgaccaccatcggcgagacccccccccccgtgaaggacgaggagtacctgttcgtggtggtggacttcctggtgggcgtgctgatcttcgccaccatcgtgggcaacgtgggcagcatgatcagcaacatgaacgccagcagagccgagttccaggccaagatcgacagcatcaagcagtacatgcagttcagaaaggtgaccaaggacctggagaccagagtgatcagatggttcgactacctgtgggccaacaagaagaccgtggacgagaaggaggtgctgaagagcctgcccgacaagctgaaggccgagatcgccatcaacgtgcacctggacaccctgaagaaggtgagaatcttccaggactgcgaggccggcctgctggtggagctggtgctgaagctgagacccaccgtgttcagccccggcgactacatctgcaagaagggcgacatcggcaaggagatgtacatcatcaacgagggcaagctggccgtggtggccgacgacggcgtgacccagttcgtggtgctgagcgacggcagctacttcggcgagatcagcatcctgaacatcaagggcagcaagagcggcaacagaagaaccgccaacatcagaagcatcggctacagcgacctgttctgcctgagcaaggacgacctgatggaggccctgaccgagtaccccgaggccaagaaggccctggaggagaagggcagacagatcctgatgaaggacaacctgatcgacgaggagctggccagagccggcgccgaccccaaggacctggaggagaaggtggagcagctgggcagcagcctggacaccctgcagaccagattcgccagactgctggccgagtacaacgccacccagatgaagatgaagcagagactgagccagctggagagccaggtgaagggcggcggcgacaagcccctggccgacggcgaggtgcccggcgacgccaccaagaccgaggacaagcagcagtag

SEQ ID NO: 77991 - DNA, 2085 bp, synthetic construct; identical to SEQ ID NO: 77990
  misc_feature 1..2085: note = Description of Artificial Sequence: Synthetic coding sequence
  source 1..2085: mol_type = other DNA

SEQ ID NO: 77992 - DNA, 2031 bp, synthetic construct
  misc_feature 1..2031: note = Description of Artificial Sequence: Synthetic coding sequence
  source 1..2031: mol_type = other DNA
atggccaagatcaacacccagtacagccaccccagcagaacccacctgaaggtgaagaccagcgacagagacctgaacagagccgagaacggcctgagcagagcccacagcagcagcgaggagaccagcagcgtgctgcagcccggcatcgccatggagaccagaggcctggccgacagcggccagggcagcttcaccggccagggcatcgccagactgagcagactgatcttcctgctgagaagatgggccgccagacacgtgcaccaccaggaccagggccccgacagcttccccgacagattcagaggcgccgagctgaaggaggtgagcagccaggagagcaacgcccaggccaacgtgggcagccaggagcccgccgacagaggcagaagaaagaagaccaagaagaaggacgccatcgtggtggaccccagcagcaacctgtactacagatggctgaccgccatcgccctgcccgtgttctacaactggtacctgctgatctgcagagcctgcttcgacgagctgcagagcgagtacctgatgctgtggctggtgctggactacagcgccgacgtgctgtacgtgctggacgtgctggtgagagccagaaccggcttcctggagcagggcctgatggtgagcgacaccaacagactgtggcagcactacaagaccaccacccagttcaagctggacgtgctgagcctggtgcccaccgacctggcctacctgaaggtgggcaccaactaccccgaggtgagattcaacagactgctgaagttcagcagactgttcgagttcttcgacagaaccgagaccagaaccaactaccccaacatgttcagaatcggcaacctggtgctgtacatcctgatcatcatccactggaacgcctgcatctacttcgccatcagcaagttcatcggcttcggcaccgacagctgggtgtaccccaacatcagcatccccgagcacggcagactgagcagaaagtacatctacagcctgtactggagcaccctgaccctgaccaccatcggcgagacccccccccccgtgaaggacgaggagtacctgttcgtggtggtggacttcctggtgggcgtgctgatcttcgccaccatcgtgggcaacgtgggcagcatgatcagcaacatgaacgccagcagagccgagttccaggccaagatcgacagcatcaagcagtacatgcagttcagaaaggtgaccaaggacctggagaccagagtgatcagatggttcgactacctgtgggccaacaagaagaccgtggacgagaaggaggtgctgaagagcctgcccgacaagctgaaggccgagatcgccatcaacgtgcacctggacaccctgaagaaggtgagaatcttccaggactgcgaggccggcctgctggtggagctggtgctgaagctgagacccaccgtgttcagccccggcgactacatctgcaagaagggcgacatcggcaaggagatgtacatcatcaacgagggcaagctggccgtggtggccgacgacggcgtgacccagttcgtggtgctgagcgacggcagctacttcggcgagatcagcatcctgaacatcaagggcagcaagagcggcaacagaagaaccgccaacatcagaagcatcggctacagcgacctgttctgcctgagcaaggacgacctgatggaggccctgaccgagtaccccgaggccaagaaggccctggaggagaagggcagacagatcctgatgaaggacaacctgatcgacgaggagctggccagagccggcgccgaccccaaggacctggaggagaaggtggagcagctgggcagcagcctggacaccctgcagaccagattcgccagactgctggccgagtacaacgccacccagatgaagatgaagcagagactgagccagctggagagccaggtgaagggcggcggcgacaagcccctggccgacggcgaggtgcccggcgacgccaccaagaccgaggacaagcagcagtag

SEQ ID NO: 77993 - DNA, 3756 bp, synthetic construct
  misc_feature 1..3756: note = Description of Artificial Sequence: Synthetic coding sequence
  source 1..3756: mol_type = other DNA
atgctgggctgggtgcagagagtgctgccccagccccccggcacccccagaaagaccaagatgcaggaggaggaggaggtggagcccgagcccgagatggaggccgaggtggagcccgagcccaaccccgaggaggccgagaccgagagcgagagcatgccccccgaggagagcttcaaggaggaggaggtggccgtggccgaccccagcccccaggagaccaaggaggccgccctgaccagcaccatcagcctgagagcccagggcgccgagatcagcgagatgaacagccccagcagaagagtgctgacctggctgatgaagggcgtggagaaggtgatcccccagcccgtgcacagcatcaccgaggaccccgcccagatcctgggccacggcagcaccggcgacaccggctgcaccgacgagcccaacgaggccctggaggcccaggacaccagacccggcctgagactgctgctgtggctggagcagaacctggagagagtgctgccccagccccccaagagcagcgaggtgtggagagacgagcccgccgtggccaccggcgccgccagcgaccccgccccccccggcagaccccaggagatgggccccaagctgcaggccagagagacccccagcctgcccacccccatccccctgcagcccaaggaggagcccaaggaggcccccgcccccgagccccagcccggcagccaggcccagaccagcagcctgccccccaccagagaccccgccagactggtggcctgggtgctgcacagactggagatggccctgccccagcccgtgctgcacggcaagatcggcgagcaggagcccgacagccccggcatctgcgacgtgcagaccatcagcatcctgcccggcggccaggtggagcccgacctggtgctggaggaggtggagcccccctgggaggacgcccaccaggacgtgagcaccagcccccagggcaccgaggtggtgcccgcctacgaggaggagaacaaggccgtggagaagatgcccagagagctgagcagaatcgaggaggagaaggaggacgaggaggaggaggaggaggaggaggaggaggaggaggaggaggaggtgaccgaggtgctgctggacagctgcgtggtgagccaggtgggcgtgggccagagcgaggaggacggcaccagaccccagagcaccagcgaccagaagctgtgggaggaggtgggcgaggaggccaagaaggaggccgaggagaaggccaaggaggaggccgaggaggtggccgaggaggaggccgagaaggagccccaggactgggccgagaccaaggaggagcccgaggccgaggccgaggccgccagcagcggcgtgcccgccaccaagcagcaccccgaggtgcaggtggaggacaccgacgccgacagctgccccctgatggccgaggagaacccccccagcaccgtgctgcccccccccagccccgccaagagcgacaccctgatcgtgcccagcagcgccagcggcacccacagaaagaagctgcccagcgaggacgacgaggccgaggagctgaaggccctgagccccgccgagagccccgtggtggcctggagcgaccccaccacccccaaggacaccgacggccaggacagagccgccagcaccgccagcaccaacagcgccatcatcaacgacagactgcaggagctggtgaagctgttcaaggagagaaccgagaaggtgaaggagaagctgatcgaccccgacgtgaccagcgacgaggagagccccaagcccagccccgccaagaaggcccccgagcccgcccccgacaccaagcccgccgaggccgagcccgtggaggaggagcactactgcgacatgctgtgctgcaagttcaagcacagaccctggaagaagtaccagttcccccagagcatcgaccccctgaccaacctgatgtacgtgctgtggctgttcttcgtggtgatggcctggaactggaactgctggctgatccccgtgagatgggccttcccctaccagacccccgacaacatccaccactggctgctgatggactacctgtgcgacctgatctacttcctggacatcaccgtgttccagaccagactgcagttcgtgagaggcggcgacatcatcaccgacaagaaggacatgagaaacaactacctgaagagcagaagattcaagatggacctgctgagcctgctgcccctggacttcctgtacctgaaggtgggcgtgaaccccctgctgagactgcccagatgcctgaagtacatggccttcttcgagttcaacagcagactggagagcatcctgagcaaggcctacgtgtacagagtgatcagaaccaccgcctacctgctgtacagcctgcacctgaacagctgcctgtactactgggccagcgcctaccagggcctgggcagcacccactgggtgtacgacggcgtgggcaacagctacatcagatgctactacttcgccgtgaagaccctgatcaccatcggcggcctgcccgaccccaagaccctgttcgagatcgtgttccagctgctgaactacttcaccggcgtgttcgccttcagcgtgatgatcggccagatgagagacgtggtgggcgccgccaccgccggccagacctactacagaagctgcatggacagcaccgtgaagtacatgaacttctacaagatccccaagagcgtgcagaacagagtgaagacctggtacgagtacacctggcacagccagggcatgctggacgagagcgagctgatggtgcagctgcccgacaagatgagactggacctggccatcgacgtgaactacaacatcgtgagcaaggtggccctgttccagggctgcgacagacagatgatcttcgacatgctgaagagactgagaagcgtggtgtacctgcccaacgactacgtgtgcaagaagggcgagatcggcagagagatgtacatcatccaggccggccaggtgcaggtgctgggcggccccgacggcaagagcgtgctggtgaccctgaaggccggcagcgtgttcggcgagatcagcctgctggccgtgggcggcggcaacagaagaaccgccaacgtggtggcccacggcttcaccaacctgttcatcctggacaagaaggacctgaacgagatcctggtgcactaccccgagagccagaagctgctgagaaagaaggccagaagaatgctgagaagcaacaacaagcccaaggaggagaagagcgtgctgatcctgccccccagagccggcacccccaagctgttcaacgccgccctggccatgaccggcaagatgggcggcaagggcgccaagggcggcaagctggcccacctgagagccagactgaaggagctggccgccctggaggccgccgccaagcagcaggagctggtggagcaggccaagagcagccaggacgtgaagggcgaggagggcagcgccgcccccgaccagcacacccaccccaaggaggccgccaccgacccccccgcccccagaaccccccccgagccccccggcagcccccccagcagccccccccccgccagcctgggcagacccgagggcgaggaggagggccccgccgagcccgaggagcacagcgtgagaatctgcatgagccccggccccgagcccggcgagcagatcctgagcgtgaagatgcccgaggagagagaggagaaggccgagtag

SEQ ID NO: 77994 - DNA, 900 bp, synthetic construct
  misc_feature 1..900: note = Description of Artificial Sequence: Synthetic coding sequence
  source 1..900: mol_type = other DNA
atgctgggctgggtgcagagagtgctgccccagccccccggcacccccagaaagaccaagatgcaggaggaggaggaggtggagcccgagcccgagatggaggccgaggtggagcccgagcccaaccccgaggaggccgagaccgagagcgagagcatgccccccgaggagagcttcaaggaggaggaggtggccgtggccgaccccagcccccaggagaccaaggaggccgccctgaccagcaccatcagcctgagagcccagggcgccgagatcagcgagatgaacagccccagcagaagagtgctgacctggctgatgaagggcgtggagaaggtgatcccccagcccgtgcacagcatcaccgaggaccccgcccagatcctgggccacggcagcaccggcgacaccggctgcaccgacgagcccaacgaggccctggaggcccaggacaccagacccggcctgagactgctgctgtggctggagcagaacctggagagagtgctgccccagccccccaagagcagcgaggtgtggagagacgagcccgccgtggccaccggcgccgccagcgaccccgccccccccggcagaccccaggagatgggccccaagctgcaggccagagagacccccagcctgcccacccccatccccctgcagcccaaggaggagcccaaggaggcccccgcccccgagccccagcccggcagccaggcccagaccagcagcctgccccccaccagagaccccgccagactggtggcctgggtgctgcacagactggagatggccctgccccagcccgtgctgcacggcaagatcggcgagcaggagcccgacagccccggcatctgcgacgtgcagaccagagtgatgggcgccggcggcctgtag

SEQ ID NO: 77995 - DNA, 2430 bp, synthetic construct
  misc_feature 1..2430: note = Description of Artificial Sequence: Synthetic coding sequence
  source 1..2430: mol_type = other DNA
atgttcaagagcctgaccaaggtgaacaaggtgaagcccatcggcgagaacaacgagaacgagcagagcagcagaagaaacgaggagggcagccaccccagcaaccagagccagcagaccaccgcccaggaggagaacaagggcgaggagaagagcctgaagaccaagagcacccccgtgaccagcgaggagccccacaccaacatccaggacaagctgagcaagaagaacagcagcggcgacctgaccaccaaccccgacccccagaacgccgccgagcccaccggcaccgtgcccgagcagaaggagatggaccccggcaaggagggccccaacagcccccagaacaagccccccgccgcccccgtgatcaacgagtacgccgacgcccagctgcacaacctggtgaagagaatgagacagagaaccgccctgtacaagaagaagctggtggagggcgacctgagcagccccgaggccagcccccagaccgccaagcccaccgccgtgccccccgtgaaggagagcgacgacaagcccaccgagcactactacagactgctgtggttcaaggtgaagaagatgcccctgaccgagtacctgaagagaatcaagctgcccaacagcatcgacagctacaccgacagactgtacctgctgtggctgctgctggtgaccctggcctacaactggaactgctgcttcatccccctgagactggtgttcccctaccagaccgccgacaacatccactactggctgatcgccgacatcatctgcgacatcatctacctgtacgacatgctgttcatccagcccagactgcagttcgtgagaggcggcgacatcatcgtggacagcaacgagctgagaaagcactacagaaccagcaccaagttccagctggacgtggccagcatcatccccttcgacatctgctacctgttcttcggcttcaaccccatgttcagagccaacagaatgctgaagtacaccagcttcttcgagttcaaccaccacctggagagcatcatggacaaggcctacatctacagagtgatcagaaccaccggctacctgctgttcatcctgcacatcaacgcctgcgtgtactactgggccagcaactacgagggcatcggcaccaccagatgggtgtacgacggcgagggcaacgagtacctgagatgctactactgggccgtgagaaccctgatcaccatcggcggcctgcccgagccccagaccctgttcgagatcgtgttccagctgctgaacttcttcagcggcgtgttcgtgttcagcagcctgatcggccagatgagagacgtgatcggcgccgccaccgccaaccagaactacttcagagcctgcatggacgacaccatcgcctacatgaacaactacagcatccccaagctggtgcagaagagagtgagaacctggtacgagtacacctgggacagccagagaatgctggacgagagcgacctgctgaagaccctgcccaccaccgtgcagctggccctggccatcgacgtgaacttcagcatcatcagcaaggtggacctgttcaagggctgcgacacccagatgatctacgacatgctgctgagactgaagagcgtgctgtacctgcccggcgacttcgtgtgcaagaagggcgagatcggcaaggagatgtacatcatcaagcacggcgaggtgcaggtgctgggcggccccgacggcaccaaggtgctggtgaccctgaaggccggcagcgtgttcggcgagatcagcctgctggccgccggcggcggcaacagaagaaccgccaacgtggtggcccacggcttcgccaacctgctgaccctggacaagaagaccctgcaggagatcctggtgcactaccccgacagcgagagaatcctgatgaagaaggccagagtgctgctgaagcagaaggccaagaccgccgaggccaccccccccagaaaggacctggccctgctgttcccccccaaggaggagacccccaagctgttcaagaccctgctgggcggcaccggcaaggccagcctggccagactgctgaagctgaagagagagcaggccgcccagaagaaggagaacagcgagggcggcgaggaggagggcaaggagaacgaggacaagcagaaggagaacgaggacaagcagaaggagaacgaggacaagggcaaggagaacgaggacaaggacaagggcagagagcccgaggagaagcccctggacagacccgagtgcaccgccagccccatcgccgtggaggaggagccccacagcgtgagaagaaccgtgctgcccagaggcaccagcagacagagcctgatcatcagcatggcccccagcgccgagggcggcgaggaggtgctgaccatcgaggtgaaggagaaggccaagcagtag

SEQ ID NO: 77996 - DNA, 4188 bp, synthetic construct
  misc_feature 1..4188: note = Description of Artificial Sequence: Synthetic coding sequence
  source 1..4188: mol_type = other DNA
atgctgctgcccctgcccccccagagcagcaagcccgtgcccaagaagagccagagcagcaagatcgtgcccagccaccacgaccccagcgagaagaccggcgagaactgccagaccaagatcagccccagcagcctgcaggagagccccagcagcctgcagggcgccctgaagaagagaagcgccttcgaggacctgaccaacgccagccagtgccagcccgtgcagcccaagaaggaggccaacaaggagttcgtgaaggtggtgagcaagaagatcaacagaaacacccacgccctgggcctggccaagaagaacaagagaaacctgaagtggcacaagctggaggtgacccccgtggtggccagcaccaccgtggtgcccaacatcatggagaagcccctgatcctggacatcagcaccaccagcaagacccccaacaccgaggaggccagcctgttcagaaagcccctggtgctgaaggaggagcccaccatcgaggacgagaccctgatcaacaagagcctgagcctgaagaagtgcagcaaccacgaggaggtgagcctgctggagaagctgcagcccctgcaggaggagagcgacagcgacgacgccttcgtgatcgagcccatgaccttcaagaagacccacaagaccgaggaggccgccatcaccaagaagaccctgagcctgaagaagaagatgtgcgccagccagagaaagcagagctgccaggaggagagcctggccgtgcaggacgtgaacatggaggaggacagcttcttcatggagagcatgagcttcaagaagaagcccaagaccgaggagagcatccccacccacaagctgagcagcctgaagaagaagtgcaccatctacggcaagatctgccacttcagaaagccccccgtgctgcagaccaccatctgcggcgccatgagcagcatcaagaagcccaccaccgagaaggagaccctgttccaggagctgagcgtgctgcaggagaagcacaccaccgagcacgagatgagcatcctgaagaagagcctggccctgcagaagaccaacttcaaggaggacagcctggtgaaggagagcctggccttcaagaagaagcccagcaccgaggaggccatcatgatgcccgtgatcctgaaggagcagtgcatgaccgagggcaagagaagcagactgaagcccctggtgctgcaggagatcaccagcggcgagaagagcctgatcatgaagcccctgagcatcaaggagaagcccagcaccgagaaggagagcttcagccaggagcccagcgccctgcagaagaagcacaccacccaggaggaggtgagcatcctgaaggagcccagcagcctgctgaagagccccaccgaggagagccccttcgacgaggccctggccttcaccaagaagtgcaccatcgaggaggccccccccaccaagaagcccctgatcctgaagagaaagcacgccacccagggcaccatgagccacctgaagaagcccctgatcctgcagaccaccagcggcgagaagagcctgatcaaggagcccctgcccttcaaggaggagaaggtgagcctgaagaagaagtgcaccacccaggagatgatgagcatctgccccgagctgctggacttccaggacatgatcggcgaggacaagaacagcttcttcatggagcccatgagcttcagaaagaaccccaccaccgaggagaccgtgctgaccaagaccagcctgagcctgcaggagaagaagatcacccagggcaagatgagccacctgaagaagcccctggtgctgcagaagatcaccagcgaggaggagagcttctacaagaagctgctgcccttcaagatgaagagcaccaccgaggagaagttcctgagccaggagcccagcgccctgaaggagaagcacaccaccctgcaggaggtgagcctgagcaaggagagcctggccatccaggagaaggccaccaccgaggaggagttcagccaggagctgttcagcctgcacgtgaagcacaccaacaagagcggcagcctgttccaggaggccctggtgctgcaggagaagaccgacgccgaggaggacagcctgaagaacctgctggccctgcaggagaagagcaccatggaggaggagagcctgatcaacaagctgctggccctgaaggaggagctgagcgccgaggccgccaccaacatccagacccagctgagcctgaagaagaagagcaccagccacggcaaggtgttcttcctgaagaagcagctggccctgaacgagaccatcaacgaggaggagttcctgaacaagcagcccctggccctggagggctaccccagcatcgccgagggcgagaccctgttcaagaagctgctggccatgcaggaggagcccagcatcgagaaggaggccgtgctgaaggagcccaccatcgacaccgaggcccacttcaaggagcccctggccctgcaggaggagcccagcaccgagaaggaggccgtgctgaaggagcccagcgtggacaccgaggcccacttcaaggagaccctggccctgcaggagaagcccagcatcgagcaggaggccctgttcaagagacacagcgccctgtgggagaagcccagcaccgagaaggagaccatcttcaaggagagcctggacctgcaggagaagcccagcatcaagaaggagaccctgctgaagaagcccctggccctgaagatgagcaccatcaacgaggccgtgctgttcgaggacatgatcgccctgaacgagaagcccaccaccggcaaggagctgagcttcaaggagcccctggccctgcaggagagccccacctacaaggaggacaccttcctgaagaccctgctggtgccccaggtgggcaccagccccaacgtgagcagcaccgcccccgagagcatcaccagcaagagcagcatcgccaccatgaccagcgtgggcaagagcggcaccatcaacgaggccttcctgttcgaggacatgatcaccctgaacgagaagcccaccaccggcaaggagctgagcttcaaggagcccctggccctgcaggagagccccacctgcaaggaggacaccttcctggagaccttcctgatcccccagatcggcaccagcccctacgtgttcagcaccacccccgagagcatcaccgagaagagcagcatcgccaccatgaccagcgtgggcaagagcagaaccaccaccgagagcagcgcctgcgagagcgccagcgacaagcccgtgagcccccaggccaagggcacccccaaggagatcacccccagagaggacatcgacgaggacagcagcgaccccagcttcaaccccatgtacgccaaggagatcttcagctacatgaaggagagagaggagcagttcatcctgaccgactacatgaacagacagatcgagatcaccagcgacatgagagccatcctggtggactggctggtggaggtgcaggtgagcttcgagatgacccacgagaccctgtacctggccgtgaagctggtggacctgtacctgatgaaggccgtgtgcaagaaggacaagctgcagctgctgggcgccaccgccttcatgatcgccgccaagttcgaggagcacaacagccccagagtggacgacttcgtgtacatctgcgacgacaactaccagagaagcgaggtgctgagcatggagatcaacatcctgaacgtgctgaagtgcgacatcaacatccccatcgcctaccacttcctgagaagatacgccagatgcatccacaccaacatgaagaccctgaccctgagcagatacatctgcgagatgaccctgcaggagtaccactacgtgcaggagaaggccagcaagctggccgccgccagcctgctgctggccctgtacatgaagaagctgggctactgggtgcccttcctggagcactacagcggctacagcatcagcgagctgcaccccctggtgagacagctgaacaagctgctgaccttcagcagctacgacagcctgaaggccgtgtactacaagtacagccaccccgtgttcttcgaggtggccaagatccccgccctggacatgctgaagctggaggagatcctgaactgcgactgcgaggcccagggcctggtgctgtag

SEQ ID NO: 77997 - DNA, 876 bp, synthetic construct
  misc_feature 1..876: note = Description of Artificial Sequence: Synthetic coding sequence
  source 1..876: mol_type = other DNA
atgctgctgcccctgcccccccagagcagcaagcccgtgcccaagaagagccagagcagcaagatcgtgcccagccaccacgaccccagcgagaagaccggcgagaactgccagaccaagatcagccccagcagcctgcaggagagccccagcagcctgcagggcgccctgaagaagagaagcgccttcgaggacctgaccaacgtgagcttcgagatgacccacgagaccctgtacctggccgtgaagctggtggacctgtacctgatgaaggccgtgtgcaagaaggacaagctgcagctgctgggcgccaccgccttcatgatcgccgccaagttcgaggagcacaacagccccagagtggacgacttcgtgtacatctgcgacgacaactaccagagaagcgaggtgctgagcatggagatcaacatcctgaacgtgctgaagtgcgacatcaacatccccatcgcctaccacttcctgagaagatacgccagatgcatccacaccaacatgaagaccctgaccctgagcagatacatctgcgagatgaccctgcaggagtaccactacgtgcaggagaaggccagcaagctggccgccgccagcctgctgctggccctgtacatgaagaagctgggctactgggtgcccttcctggagcactacagcggctacagcatcagcgagctgcaccccctggtgagacagctgaacaagctgctgaccttcagcagctacgacagcctgaaggccgtgtactacaagtacagccaccccgtgttcttcgaggtggccaagatccccgccctggacatgctgaagctggaggagatcctgaactgcgactgcgaggcccagggcctggtgctgtag

SEQ ID NO: 77998 - DNA, 876 bp, synthetic construct; identical to SEQ ID NO: 77997
  misc_feature 1..876: note = Description of Artificial Sequence: Synthetic coding sequence
  source 1..876: mol_type = other DNA

SEQ ID NO: 77999 - DNA, 4188 bp, synthetic construct; identical to SEQ ID NO: 77996
  misc_feature 1..4188: note = Description of Artificial Sequence: Synthetic coding sequence
  source 1..4188: mol_type = other DNA

SEQ ID NO: 78000 - DNA, 336 bp, synthetic construct
  misc_feature 1..336: note = Description of Artificial Sequence: Synthetic coding sequence
  source 1..336: mol_type = other DNA
atgctgctgcccctgcccccccagagcagcaagcccgtgcccaagaagagccagagcagcaagatcgtgcccagccaccacgaccccagcgagaagaccggcgagaactgccagaccaagatcagccccagcagcctgcaggagagccccagcagcctgcagggcgccctgaagaagagaagcgccttcgaggacctgaccaacgccagccagtgccagcccgtgcagcccaagaaggaggccaacaaggagttcgtgaaggtggtgagcaagaagatcaacagaaacacccacgccctgggcctggccaagaagaacaagagaaacctgaagtag

SEQ ID NO: 78001 - DNA, 1083 bp, synthetic construct
  misc_feature 1..1083: note = Description of Artificial Sequence: Synthetic coding sequence
  source 1..1083: mol_type = other DNA
atggccagcgccaccgcccccgccgccgccgtgcccaccctggccagccccctggagcagctgagacacctggccgaggagctgagactgctgctgcccagagtgagagtgggcgaggcccaggagaccaccgaggagttcaacagagagatgttctggagaagactgaacgaggccgccgtgaccgtgagcagagaggccaccaccctgaccatcgtgttcagccagctgcccctgcccagcccccaggagacccagaagttctgcgagcaggtgcacgccgccatcaaggccttcatcgccgtgtactacctgctgcccaaggaccagggcatcaccctgagaaagctggtgagaggcgccaccctggacatcgtggacggcatggcccagctgatggaggtgctgagcgtgacccccacccagagccccgagaacaacgacctgatcagctacaacagcgtgtgggtggcctgccagcagatgccccagatccccagagacaacaaggccgccgccctgctgatgctgaccaagaacgtggacttcgtgaaggacgcccacgaggagatggagcaggccgtggaggagtgcgacccctacagcggcctgctgaacgacaccgaggagaacaacagcgacaaccacaaccacgaggacgacgtgctgggcttccccagcaaccaggacctgtactggagcgaggacgaccaggagctgatcatcccctgcctggccctggtgagagccagcaaggcctgcctgaagaagatcagaatgctggtggccgagaacggcaagaaggaccaggtggcccagctggacgacatcgtggacatcagcgacgagatcagccccagcgtggacgacctggccctgagcatctacccccccatgtgccacctgaccgtgagaatcaacagcgccaagctggtgagcgtgctgaagaaggccctggagatcaccaaggccagccacgtgaccccccagcccgaggacagctggatccccctgctgatcaacgccatcgaccactgcatgaacagaatcaaggagctgacccagagcgagctggagctgtag

SEQ ID NO: 78002 - DNA, 600 bp, synthetic construct
  misc_feature 1..600: note = Description of Artificial Sequence: Synthetic coding sequence
  source 1..600: mol_type = other DNA
atgccccagatccccagagacaacaaggccgccgccctgctgatgctgaccaagaacgtggacttcgtgaaggacgcccacgaggagatggagcaggccgtggaggagtgcgacccctacagcggcctgctgaacgacaccgaggagaacaacagcgacaaccacaaccacgaggacgacgtgctgggcttccccagcaaccaggacctgtactggagcgaggacgaccaggagctgatcatcccctgcctggccctggtgagagccagcaaggcctgcctgaagaagatcagaatgctggtggccgagaacggcaagaaggaccaggtggcccagctggacgacatcgtggacatcagcgacgagatcagccccagcgtggacgacctggccctgagcatctacccccccatgtgccacctgaccgtgagaatcaacagcgccaagctggtgagcgtgctgaagaaggccctggagatcaccaaggccagccacgtgaccccccagcccgaggacagctggatccccctgctgatcaacgccatcgaccactgcatgaacagaatcaaggagctgacccagagcgagctggagctgtag

SEQ ID NO: 78003 - DNA, 699 bp, synthetic construct
  misc_feature 1..699: note = Description of Artificial Sequence: Synthetic coding sequence
  source 1..699: mol_type = other DNA
atggcccagctgatggaggtgctgagcgtgacccccacccagagccccgagaacaacgacctgatcagctacaacagcgtgtgggtggcctgccagcagatgccccagatccccagagacaacaaggccgccgccctgctgatgctgaccaagaacgtggacttcgtgaaggacgcccacgaggagatggagcaggccgtggaggagtgcgacccctacagcggcctgctgaacgacaccgaggagaacaacagcgacaaccacaaccacgaggacgacgtgctgggcttccccagcaaccaggacctgtactggagcgaggacgaccaggagctgatcatcccctgcctggccctggtgagagccagcaaggcctgcctgaagaagatcagaatgctggtggccgagaacggcaagaaggaccaggtggcccagctggacgacatcgtggacatcagcgacgagatcagccccagcgtggacgacctggccctgagcatctacccccccatgtgccacctgaccgtgagaatcaacagcgccaagctggtgagcgtgctgaagaaggccctggagatcaccaaggccagccacgtgaccccccagcccgaggacagctggatccccctgctgatcaacgccatcgaccactgcatgaacagaatcaaggagctgacccagagcgagctggagctgtag

SEQ ID NO: 78004 - DNA, 3936 bp, synthetic construct
  misc_feature 1..3936: note = Description of Artificial Sequence: Synthetic coding sequence
  source 1..3936: mol_type = other DNA
atgagcctgctgcagagcgccctggacttcctggccggccccggcagcctgggcggcgccagcggcagagaccagagcgacttcgtgggccagaccgtggagctgggcgagctgagactgagagtgagaagagtgctggccgagggcggcttcgccttcgtgtacgaggcccaggacgtgggcagcggcagagagtacgccctgaagagactgctgagcaacgaggaggagaagaacagagccatcatccaggaggtgtgcttcatgaagaagctgagcggccaccccaacatcgtgcagttctgcagcgccgccagcatcggcaaggaggagagcgacaccggccaggccgagttcctgctgctgaccgagctgtgcaagggccagctggtggagttcctgaagaagatggagagcagaggccccctgagctgcgacaccgtgctgaagatcttctaccagacctgcagagccgtgcagcacatgcacagacagaagccccccatcatccacagagacctgaaggtggagaacctgctgctgagcaaccagggcaccatcaagctgtgcgacttcggcagcgccaccaccatcagccactaccccgactacagctggagcgcccagagaagagccctggtggaggaggagatcaccagaaacaccacccccatgtacagaacccccgagatcatcgacctgtacagcaacttccccatcggcgagaagcaggacatctgggccctgggctgcatcctgtacctgctgtgcttcagacagcaccccttcgaggacggcgccaagctgagaatcgtgaacggcaagtacagcatccccccccacgacacccagtacaccgtgttccacagcctgatcagagccatgctgcaggtgaaccccgaggagagactgagcatcgccgaggtggtgcaccagctgcaggagatcgccgccgccagaaacgtgaaccccaagagccccatcaccgagctgctggagcagaacggcggctacggcagcgccaccctgagcagaggcccccccccccccgtgggccccgccggcagcggctacagcggcggcctggccctggccgagtacgaccagccctacggcggcttcctggacatcctgagaggcggcaccgagagactgttcaccaacctgaaggacaccagcagcaaggtgatccagagcgtggccaactacgccaagggcgacctggacatcagctacatcaccagcagaatcgccgtgatgagcttccccgccgagggcgtggagagcgccctgaagaacaacatcgaggacgtgagactgttcctggacagcaagcaccccggccactacgccgtgtacaacctgagccccagaacctacagacccagcagattccacaacagagtgagcgagtgcggctgggccgccagaagagccccccacctgcacaccctgtacaacatctgcagaaacatgcacgcctggctgagacaggaccacaagaacgtgtgcgtggtgcactgcatggacggcagagccgccagcgccgtggccgtgtgcagcttcctgtgcttctgcagactgttcagcaccgccgaggccgccgtgtacatgttcagcatgaagagatgcccccccggcatctggcccagccacaagagatacatcgagtacatgtgcgacatggtggccgaggagcccatcaccccccacagcaagcccatcctggtgagagccgtggtgatgacccccgtgcccctgttcagcaagcagagaagcggctgcagacccttctgcgaggtgtacgtgggcgacgagagagtggccagcaccagccaggagtacgacaagatgagagacttcaagatcgaggacggcaaggccgtgatccccctgggcgtgaccgtgcagggcgacgtgctgatcgtgatctaccacgccagaagcaccctgggcggcagactgcaggccaagatggccagcatgaagatgttccagatccagttccacaccggcttcgtgcccagaaacgccaccaccgtgaagttcgccaagtacgacctggacgcctgcgacatccaggagaagtaccccgacctgttccaggtgaacctggaggtggaggtggagcccagagacagacccagcagagaggcccccccctgggagaacagcagcatgagaggcctgaaccccaagatcctgttcagcagcagagaggagcagcaggacatcctgagcaagttcggcaagcccgagctgcccagacagcccggcagcaccgcccagtacgacgccggcgccggcagccccgaggccgagcccaccgacagcgacagcccccccagcagcagcgccgacgccagcagattcctgcacaccctggactggcaggaggagaaggaggccgagaccggcgccgagaacgccagcagcaaggagagcgagagcgccctgatggaggacagagacgagagcgaggtgagcgacgagggcggcagccccatcagcagcgagggccaggagcccagagccgaccccgagccccccggcctggccgccggcctggtgcagcaggacctggtgttcgaggtggagacccccgccgtgctgcccgagcccgtgccccaggaggacggcgtggacctgctgggcctgcacagcgaggtgggcgccggccccgccgtgcccccccaggcctgcaaggcccccagcagcaacaccgacctgctgagctgcctgctgggcccccccgaggccgccagccagggcccccccgaggacctgctgagcgaggaccccctgctgctggccagccccgccccccccctgagcgtgcagagcacccccagaggcggcccccccgccgccgccgaccccttcggccccctgctgcccagcagcggcaacaacagccagccctgcagcaaccccgacctgttcggcgagttcctgaacagcgacagcgtgaccgtgccccccagcttccccagcgcccacagcgcccccccccccagctgcagcgccgacttcctgcacctgggcgacctgcccggcgagcccagcaagatgaccgccagcagcagcaaccccgacctgctgggcggctgggccgcctggaccgagaccgccgccagcgccgtggcccccacccccgccaccgagggccccctgttcagccccggcggccagcccgccccctgcggcagccaggccagctggaccaagagccagaaccccgaccccttcgccgacctgggcgacctgagcagcggcctgcagggcagccccgccggcttcccccccggcggcttcatccccaagaccgccaccacccccaagggcagcagcagctggcagaccagcagaccccccgcccagggcgccagctggcccccccaggccaagcccccccccaaggcctgcacccagcccagacccaactacgccagcaacttcagcgtgatcggcgccagagaggagagaggcgtgagagcccccagcttcgcccagaagcccaaggtgagcgagaacgacttcgaggacctgctgagcaaccagggcttcagcagcagaagcgacaagaagggccccaagaccatcgccgagatgagaaagcaggacctggccaaggacaccgaccccctgaagctgaagctgctggactggatcgagggcaaggagagaaacatcagagccctgctgagcaccctgcacaccgtgctgtgggacggcgagagcagatggacccccgtgggcatggccgacctggtggcccccgagcaggtgaagaagcactacagaagagccgtgctggccgtgcaccccgacaaggccgccggccagccctacgagcagcacgccaagatgatcttcatggagctgaacgacgcctggagcgagttcgagaaccagggcagcagacccctgttctag

SEQ ID NO: 78005 - DNA, 1764 bp, synthetic construct
  misc_feature 1..1764: note = Description of Artificial Sequence: Synthetic coding sequence
  source 1..1764: mol_type = other DNA
atgagcctgctgcagagcgccctggacttcctggccggccccggcagcctgggcggcgccagcggcagagaccagagcgacttcgtgggccagaccgtggagctgggcgagctgagactgagagtgagaagagtgctggccgagggcggcttcgccttcgtgtacgaggcccaggacgtgggcagcggcagagagtacgccctgaagagactgctgagcaacgaggaggagaagaacagagccatcatccaggaggtgtgcttcatgaagaagctgagcggccaccccaacatcgtgcagttctgcagcgccgccagcatcggcaaggaggagagcgacaccggccaggccgagttcctgctgctgaccgagccccccggcctggccgccggcctggtgcagcaggacctggtgttcgaggtggagacccccgccgtgctgcccgagcccgtgccccaggaggacggcgtggacctgctgggcctgcacagcgaggtgggcgccggccccgccgtgcccccccaggcctgcaaggcccccagcagcaacaccgacctgctgagctgcctgctgggcccccccgaggccgccagccagggcccccccgaggacctgctgagcgaggaccccctgctgctggccagccccgccccccccctgagcgtgcagagcacccccagaggcggcccccccgccgccgccgaccccttcggccccctgctgcccagcagcggcaacaacagccagccctgcagcaaccccgacctgttcggcgagttcctgaacagcgacagcgtgaccgtgccccccagcttccccagcgcccacagcgcccccccccccagctgcagcgccgacttcctgcacctgggcgacctgcccggcgagcccagcaagatgaccgccagcagcagcaaccccgacctgctgggcggctgggccgcctggaccgagaccgccgccagcgccgtggcccccacccccgccaccgagggccccctgttcagccccggcggccagcccgccccctgcggcagccaggccagctggaccaagagccagaaccccgaccccttcgccgacctgggcgacctgagcagcggcctgcagggcagccccgccggcttcccccccggcggcttcatccccaagaccgccaccacccccaagggcagcagcagctggcagaccagcagaccccccgcccagggcgccagctggcccccccaggccaagcccccccccaaggcctgcacccagcccagacccaactacgccagcaacttcagcgtgatcggcgccagagaggagagaggcgtgagagcccccagcttcgcccagaagcccaaggtgagcgagaacgacttcgaggacctgctgagcaaccagggcttcagcagcagaagcgacaagaagggccccaagaccatcgccgagatgagaaagcaggacctggccaaggacaccgaccccctgaagctgaagctgctggactggatcgagggcaaggagagaaacatcagagccctgctgagcaccctgcacaccgtgctgtgggacggcgagagcagatggacccccgtgggcatggccgacctggtggcccccgagcaggtgaagaagcactacagaagagccgtgctggccgtgcaccccgacaaggccgccggccagccctacgagcagcacgccaagatgatcttcatggagctgaacgacgcctggagcgagttcgagaaccagggcagcagacccctgttctag

SEQ ID NO: 78006 - DNA, 2238 bp, synthetic construct
  misc_feature 1..2238: note = Description of Artificial Sequence: Synthetic coding sequence
  source 1..2238: mol_type = other DNA
atgcccttccccgtgaccacccagggcagccagcagacccagcccccccagaagcactacggcatcaccagccccatcagcctggccgcccccaaggagaccgactgcgtgctgacccagaagctgatcgagaccctgaagcccttcggcgtgttcgaggaggaggaggagctgcagagaagaatcctgatcctgggcaagctgaacaacctggtgaaggagtggatcagagagatcagcgagagcaagaacctgccccagagcgtgatcgagaacgtgggcggcaagatcttcaccttcggcagctacagactgggcgtgcacaccaagggcgccgacatcgacgccctgtgcgtggcccccagacacgtggacagaagcgacttcttcaccagcttctacgacaagctgaagctgcaggaggaggtgaaggacctgagagccgtggaggaggccttcgtgcccgtgatcaagctgtgcttcgacggcatcgagatcgacatcctgttcgccagactggccctgcagaccatccccgaggacctggacctgagagacgacagcctgctgaagaacctggacatcagatgcatcagaagcctgaacggctgcagagtgaccgacgagatcctgcacctggtgcccaacatcgacaacttcagactgaccctgagagccatcaagctgtgggccaagagacacaacatctacagcaacatcctgggcttcctgggcggcgtgagctgggccatgctggtggccagaacctgccagctgtaccccaacgccatcgccagcaccctggtgcacaagttcttcctggtgttcagcaagtgggagtggcccaaccccgtgctgctgaagcagcccgaggagtgcaacctgaacctgcccgtgtgggaccccagagtgaaccccagcgacagataccacctgatgcccatcatcacccccgcctacccccagcagaacagcacctacaacgtgagcgtgagcaccagaatggtgatggtggaggagttcaagcagggcctggccatcaccgacgagatcctgctgagcaaggccgagtggagcaagctgttcgaggcccccaacttcttccagaagtacaagcactacatcgtgctgctggccagcgcccccaccgagaagcagagactggagtgggtgggcctggtggagagcaagatcagaatcctggtgggcagcctggagaagaacgagttcatcaccctggcccacgtgaacccccagagcttccccgcccccaaggagaaccccgacaaggaggagttcagaaccatgtgggtgatcggcctggtgttcaagaagaccgagaacagcgagaacctgagcgtggacctgacctacgacatccagagcttcaccgacaccgtgtacagacaggccatcaacagcaagatgttcgaggtggacatgaagatcgccgccatgcacgtgaagagaaagcagctgcaccagctgctgcccaaccacgtgctgcagaagaagaagaagcacagcaccgagggcgtgaagctgaccgccctgaacgacagcagcctggacctgagcatggacagcgacaacagcatgagcgtgcccagccccaccagcgccaccaagaccagccccctgaacagcagcggcagcagccagggcagaaacagccccgcccccgccgtgaccgccgccagcgtgaccaacatccaggccaccgaggtgagcgtgccccaggtgaacagcagcgagagcagcggcggcaccagcagcgagagcatcccccagaccgccacccagcccgccatcagccccccccccaagcccaccgtgagcagagtggtgagcagcaccagactggtgaaccccccccccagaagcagcggcaacgccgccaccagcggcaacgccgccaccaagatccccacccccatcgtgggcgtgaagagaaccagcagcccccacaaggaggagagccccaagaagaccaagaccgaggaggacgagaccagcgaggacgccaactgcctggccctgagcggccacgacaagaccgaggccaaggagcagctggacaccgagaccagcaccacccagagcgagaccatccagaccgccgccagcctgctggccagccagaagaccagcagcaccgacctgagcgacatccccgccctgcccgccaaccccatccccgtgatcaagaacagcatcaagctgagactgaacagatag

SEQ ID NO: 78007 - DNA, 1080 bp, synthetic construct
  misc_feature 1..1080: note = Description of Artificial Sequence: Synthetic coding sequence
  source 1..1080: mol_type = other DNA
atgaaggagaacaaggagaacagcagccccagcgtgaccagcgccaacctggaccacaccaagccctgctggtactgggacaagaaggacctggcccacacccccagccagctggagggcctggaccccgccaccgaggccagatacagaagagagggcgccagattcatcttcgacgtgggcaccagactgggcctgcactacgacaccctggccaccggcatcatctacttccacagattctacatgttccacagcttcaagcagttccccagatacgtgaccggcgcctgctgcctgttcctggccggcaaggtggaggagacccccaagaagtgcaaggacatcatcaagaccgccagaagcctgctgaacgacgtgcagttcggccagttcggcgacgaccccaaggaggaggtgatggtgctggagagaatcctgctgcagaccatcaagttcgacctgcaggtggagcacccctaccagttcctgctgaagtacgccaagcagctgaagggcgacaagaacaagatccagaagctggtgcagatggcctggaccttcgtgaacgacagaaccagcctgtgcaccaccctgagcctgcagtgggagcccgagatcatcgccgtggccgtgatgtacctggccggcagactgtgcaagttcgagatccaggagtggaccagcaagcccatgtacagaagatggtgggagcagttcgtgcaggacgtgcccgtggacgtgctggaggacatctgccaccagatcctggacctgtacagccagggcaagcagcagatgccccaccacaccccccaccagctgcagcagccccccagcctgcagcccaccccccaggtgccccaggtgcagcagagccagcccagccagagcagcgagcccagccagccccagcagaaggacccccagcagcccgcccagcagcagcagcccgcccagcagcccaagaagcccagcccccagcccagcagccccagacaggtgaagagagccgtggtggtgagccccaaggaggagaacaaggccgccggcaaggccagcctgaagcacacctggtag

SEQ ID NO: 78008 - DNA, 1743 bp, synthetic construct
  misc_feature 1..1743: note = Description of Artificial Sequence: Synthetic coding sequence
  source 1..1743: mol_type = other DNA
atgaaggagaacaaggagaacagcagccccagcgtgaccagcgccaacctggaccacaccaagccctgctggtactgggacaagaaggacctggcccacacccccagccagctggagggcctggaccccgccaccgaggccagatacagaagagagggcgccagattcatcttcgacgtgggcaccagactgggcctgcactacgacaccctggccaccggcatcatctacttccacagattctacatgttccacagcttcaagcagttccccagatacgtgaccggcgcctgctgcctgttcctggccggcaaggtggaggagacccccaagaagtgcaaggacatcatcaagaccgccagaagcctgctgaacgacgtgcagttcggccagttcggcgacgaccccaaggaggaggtgatggtgctggagagaatcctgctgcagaccatcaagttcgacctgcaggtggagcacccctaccagttcctgctgaagtacgccaagcagctgaagggcgacaagaacaagatccagaagctggtgcagatggcctggaccttcgtgaacgacagcctgtgcaccaccctgagcctgcagtgggagcccgagatcatcgccgtggccgtgatgtacctggccggcagactgtgcaagttcgagatccaggagtggaccagcaagcccatgtacagaagatggtgggagcagttcgtgcaggacgtgcccgtggacgtgctggaggacatctgccaccagatcctggacctgtacagccagggcaagcagcagatgccccaccacaccccccaccagctgcagcagccccccagcctgcagcccaccccccaggtgccccaggtgcagcagagccagcccagccagagcagcgagcccagccagccccagcagaaggacccccagcagcccgcccagcagcagcagcccgcccagcagcccaagaagcccagcccccagcccagcagccccagacaggtgaagagagccgtggtggtgagccccaaggaggagaacaaggccgccgagccccccccccccaagatccccaagatcgagaccacccacccccccctgccccccgcccaccccccccccgacagaaagccccccctggccgccgccctgggcgaggccgagccccccggccccgtggacgccaccgacctgcccaaggtgcagatccccccccccgcccaccccgcccccgtgcaccagcccccccccctgccccacagaccccccccccccccccccagcagctacatgaccggcatgagcaccaccagcagctacatgagcggcgagggctaccagagcctgcagagcatgatgaagaccgagggccccagctacggcgccctgccccccgcctacggcccccccgcccacctgccctaccacccccacgtgtacccccccaaccccccccccccccccgtgccccccccccccgccagcttccccccccccgccatccccccccccacccccggctaccccccccccccccccacctacaaccccaacttccccccccccccccccagactgccccccacccacgccgtgcccccccaccccccccccggcctgggcctgccccccgccagctaccccccccccgccgtgccccccggcggccagccccccgtgcccccccccatccccccccccggcatgccccccgtgggcggcctgggcagagccgcctggatgagatag

SEQ ID NO: 78009 - DNA, 1803 bp, synthetic construct
  misc_feature 1..1803: note = Description of Artificial Sequence: Synthetic coding sequence
  source 1..1803: mol_type = other DNA
atgaaggagaacaaggagaacagcagccccagcgtgaccagcgccaacctggaccacaccaagccctgctggtactgggacaagaaggacctggcccacacccccagccagctggagggcctggaccccgccaccgaggccagatacagaagagagggcgccagattcatcttcgacgtgggcaccagactgggcctgcactacgacaccctggccaccggcatcatctacttccacagattctacatgttccacagcttcaagcagttccccagatacgtgaccggcgcctgctgcctgttcctggccggcaaggtggaggagacccccaagaagtgcaaggacatcatcaagaccgccagaagcctgctgaacgacgtgcagttcggccagttcggcgacgaccccaaggaggaggtgatggtgctggagagaatcctgctgcagaccatcaagttcgacctgcaggtggagcacccctaccagttcctgctgaagtacgccaagcagctgaagggcgacaagaacaagatccagaagctggtgcagatggcctggaccttcgtgaacgacagcctgtgcaccaccctgagcctgcagtgggagcccgagatcatcgccgtggccgtgatgtacctggccggcagactgtgcaagttcgagatccaggagtggaccagcaagcccatgtacagaagatggtgggagcagttcgtgcaggacgtgcccgtggacgtgctggaggacatctgccaccagatcctggacctgtacagccagggcaagcagcagatgccccaccacaccccccaccagctgcagcagccccccagcctgcagcccaccccccaggtgccccaggtgcagcagagccagcccagccagagcagcgagcccagccagccccagcagaaggacccccagcagcccgcccagcagcagcagcccgcccagcagcccaagaagcccagcccccagcccagcagccccagacaggtgaagagagccgtggtgagcggcctgaagcaggccctgggcagagccggcttccccggcggcggcaacaccaccgtggtgagccccaaggaggagaacaaggccgccgagccccccccccccaagatccccaagatcgagaccacccacccccccctgccccccgcccaccccccccccgacagaaagccccccctggccgccgccctgggcgaggccgagccccccggccccgtggacgccaccgacctgcccaaggtgcagatccccccccccgcccaccccgcccccgtgcaccagcccccccccctgccccacagaccccccccccccccccccagcagctacatgaccggcatgagcaccaccagcagctacatgagcggcgagggctaccagagcctgcagagcatgatgaagaccgagggccccagctacggcgccctgccccccgcctacggcccccccgcccacctgccctaccacccccacgtgtacccccccaaccccccccccccccccgtgccccccccccccgccagcttccccccccccgccatccccccccccacccccggctaccccccccccccccccacctacaaccccaacttccccccccccccccccagactgccccccacccacgccgtgcccccccaccccccccccggcctgggcctgccccccgccagctaccccccccccgccgtgccccccggcggccagccccccgtgcccccccccatccccccccccggcatgccccccgtgggcggcctgggcagagccgcctggatgagatag

SEQ ID NO: 78010 - DNA, 333 bp, synthetic construct
  misc_feature 1..333: note = Description of Artificial Sequence: Synthetic coding sequence
  source 1..333: mol_type = other DNA
atgaaggagaacaaggagaacagcagccccagcgtgaccagcgccaacctggaccacaccaagccctgctggtactgggacaagaaggacctggcccacacccccagccagctggagggcctggaccccgccaccgaggccagatacagaagagagggcgccagattcatcttcgacgtgggcaccagactgggcctgcactacgacaccctggccaccggcatcatctacttccacagattctacatgttccacagcttcaagcagttccccagatacgtgaccggcgcctgctgcctgttcctggccggcaaggtggaggagaccccctag

SEQ ID NO: 78011 - DNA, 684 bp, synthetic construct
  misc_feature 1..684: note = Description of Artificial Sequence: Synthetic coding sequence
  source 1..684: mol_type = other DNA
atgaaggagaacaaggagaacagcagccccagcgtgaccagcgccaacctggaccacaccaagccctgctggtactgggacaagaaggacctggcccacacccccagccagctggagggcctggaccccgccaccgaggccagatacagaagagagggcgccagattcatcttcgacgtgggcaccagactgggcctgcactacgacaccctggccaccggcatcatctacttccacagattctacatgttccacagcttcaagcagttccccagatacgtgaccggcgcctgctgcctgttcctggccggcaaggtggaggagacccccaagaagtgcaaggacatcatcaagaccgccagaagcctgctgaacgacgtgcagttcggccagttcggcgacgaccccaaggaggaggtgatggtgctggagagaatcctgctgcagaccatcaagttcgacctgcaggtggagcacccctaccagttcctgctgaagtacgccaagcagctgaagggcgacaagaacaagatccagaagctggtgcagatggcctggaccttcgtgaacgacagcctgtgcaccaccctgagcctgcagtgggagcccgagatcatcgccgtggccgtgatgtacctggccggcagactgtgcaagttcgagatccaggagtggaccagctag

SEQ ID NO: 78012 - DNA, 519 bp, synthetic construct
  misc_feature 1..519: note = Description of Artificial Sequence: Synthetic coding sequence
  source 1..519: mol_type = other DNA
atggccagcggcccccacagcaccgccaccgccgccgccgccgccagcagcgccgcccccagcgccggcggcagcagcagcggcaccaccaccaccaccaccaccaccaccggcggcatcctgatcggcgacagactgtacagcgaggtgagcctgaccatcgaccacagcctgatccccgaggagagactgagccccacccccagcatgcaggacggcctggacctgcccagcgagaccgacctgagaatcctgggctgcgagctgatccaggccgccggcatcctgctgagactgccccaggtggccatggccaccggccaggtgctgttccacagattcttctacagcaagagcttcgtgaagcacagcttcgagatcgtggccatggcctgcatcaacctggccagcaagatcgaggaggcccccagaagaatcagagacgtgatcaacgtgttccaccacctgagacagctgagaggcaagagcgaccagctgcacctgcccaagcccggctag

SEQ ID NO: 78013 - DNA, 1581 bp, synthetic construct
  misc_feature 1..1581: note = Description of Artificial Sequence: Synthetic coding sequence
  source 1..1581: mol_type = other DNA
atggccagcggcccccacagcaccgccaccgccgccgccgccgccagcagcgccgcccccagcgccggcggcagcagcagcggcaccaccaccaccaccaccaccaccaccggcggcatcctgatcggcgacagactgtacagcgaggtgagcctgaccatcgaccacagcctgatccccgaggagagactgagccccacccccagcatgcaggacggcctggacctgcccagcgagaccgacctgagaatcctgggctgcgagctgatccaggccgccggcatcctgctgagactgccccaggtggccatggccaccggccaggtgctgttccacagattcttctacagcaagagcttcgtgaagcacagcttcgagatcgtggccatggcctgcatcaacctggccagcaagatcgaggaggcccccagaagaatcagagacgtgatcaacgtgttccaccacctgagacagctgagaggcaagagaacccccagccccctgatcctggaccagaactacatcaacaccaagaaccaggtgatcaaggccgagagaagagtgctgaaggagctgggcttctgcgtgcacgtgaagcacccccacaagatcatcgtgatgtacctgcaggtgctggagtgcgagagaaaccagaccctggtgcagaccgcctggaactacatgaacgacagcctgagaaccaacgtgttcgtgagattccagcccgagaccatcgcctgcgcctgcatctacctggccgccagagccctgcagatccccctgcccaccagaccccactggttcctgctgttcggcaccaccgaggaggagatccaggagatctgcatcgagaccctgagactgtacaccagaaagaagcccaactacgagctgctggagaaggaggtggagaagagaaaggtggccctgcaggaggccaagctgaaggccaagggcctgaaccccgacggcacccccgccctgagcaccctgggcggcttcagccccgccagcaagcccagcagccccagagaggtgaaggccgaggagaagagccccatcagcatcaacgtgaagaccgtgaagaaggagcccgaggacagacagcaggccagcaagagcccctacaacggcgtgagaaaggacagcaagagaagcagaaacagcagaagcgccagcagaagcagaagcagaaccagaagcagaagcagaagccacacccccagaagacactacaacaacagaagaagcagaagcggcacctacagcagcagaagcagaagcagaagcagaagccacagcgagagccccagaagacaccacaaccacggcagcccccacctgaaggccaagcacaccagagacgacctgaagagcagcaacagacacggccacaagagaaagaagagcagaagcagaagccagagcaagagcagagaccacagcgacgccgccaagaagcacagacacgagagaggccaccacagagacagaagagagagaagcagaagcttcgagagaagccacaagagcaagcaccacggcggcagcagaagcggccacggcagacacagaagatag

SEQ ID NO: 78014 - DNA, 1563 bp, synthetic construct
  misc_feature 1..1563: note = Description of Artificial Sequence: Synthetic coding sequence
  source 1..1563: mol_type = other DNA
atggccgccgccgccgccgccgccggcgccgccggcagcgccgcccccgccgccgccgccggcgcccccggcagcggcggcgcccccagcggcagccagggcgtgctgatcggcgacagactgtacagcggcgtgctgatcaccctggagaactgcctgctgcccgacgacaagctgagattcacccccagcatgagcagcggcctggacaccgacaccgagaccgacctgagagtggtgggctgcgagctgatccaggccgccggcatcctgctgagactgccccaggtggccatggccaccggccaggtgctgttccagagattcttctacaccaagagcttcgtgaagcacagcatggagcacgtgagcatggcctgcgtgcacctggccagcaagatcgaggaggcccccagaagaatcagagacgtgatcaacgtgttccacagactgagacagctgagagacaagaagaagcccgtgcccctgctgctggaccaggactacgtgaacctgaagaaccagatcatcaaggccgagagaagagtgctgaaggagctgggcttctgcgtgcacgtgaagcacccccacaagatcatcgtgatgtacctgcaggtgctggagtgcgagagaaaccagcacctggtgcagaccagctggaactacatgaacgacagcctgagaaccgacgtgttcgtgagattccagcccgagagcatcgcctgcgcctgcatctacctggccgccagaaccctggagatccccctgcccaacagaccccactggttcctgctgttcggcgccaccgaggaggagatccaggagatctgcctgaagatcctgcagctgtacgccagaaagaaggtggacctgacccacctggagggcgaggtggagaagagaaagcacgccatcgaggaggccaaggcccaggccagaggcctgctgcccggcggcacccaggtgctggacggcaccagcggcttcagccccgcccccaagctggtggagagccccaaggagggcaagggcagcaagcccagccccctgagcgtgaagaacaccaagagaagactggagggcgccaagaaggccaaggccgacagccccgtgaacggcctgcccaagggcagagagagcagaagcagaagcagaagcagagagcagagctacagcagaagccccagcagaagcgccagccccaagagaagaaagagcgacagcggcagcaccagcggcggcagcaagagccagagcagaagcagaagcagaagcgacagcccccccagacaggcccccagaagcgccccctacaagggcagcgagatcagaggcagcagaaagagcaaggactgcaagtacccccagaagccccacaagagcagaagcagaagcagcagcagaagcagaagcagaagcagagagagagccgacaaccccggcaagtacaagaagaagagccactactacagagaccagagaagagagagaagcagaagctacgagagaaccggcagaagatacgagagagaccaccccggccacagcagacacagaagatag

SEQ ID NO: 78015 - DNA, 681 bp, synthetic construct
  misc_feature 1..681: note = Description of Artificial Sequence: Synthetic coding sequence
  source 1..681: mol_type = other DNA
atggccgccgccgccgccgccgccggcgccgccggcagcgccgcccccgccgccgccgccggcgcccccggcagcggcggcgcccccagcggcagccagggcgtgctgatcggcgacagactgtacagcggcgtgctgatcaccctggagaactgcctgctgcccgacgacaagctgagattcacccccagcatgagcagcggcctggacaccgacaccgagaccgacctgagagtggtgggctgcgagctgatccaggccgccggcatcctgctgagactgccccaggtggccatggccaccggccaggtgctgttccagagattcttctacaccaagagcttcgtgaagcacagcatggagcacgtgagcatggcctgcgtgcacctggccagcaagatcgaggaggcccccagaagaatcagagacgtgatcaacgtgttccacagactgagacagctgagagacaagaagaagcccgtgcccctgctgctggaccaggactacgtgaacctgaagaaccagatcatcaaggccgagagaagagtgctgaaggagctgggcttctgcgtgcacgtgaagcacccccacaagatcatcgtgatgtacctgcaggtgctggagtgcgagagaaaccagcacctggtgcagaccagctgggtggccagcgagggcaagtag

SEQ ID NO: 78016 - DNA, 1044 bp, synthetic construct
  misc_feature 1..1044: note = Description of Artificial Sequence: Synthetic coding sequence
  source 1..1044: mol_type = other DNA
atgaacgacagcctgagaaccgacgtgttcgtgagattccagcccgagagcatcgcctgcgcctgcatctacctggccgccagaaccctggagatccccctgcccaacagaccccactggttcctgctgttcggcgccaccgaggaggagatccaggagatctgcctgaagatcctgcagctgtacgccagaaagaaggtggacctgacccacctggagggcgaggtggagaagagaaagcacgccatcgaggagggccccagccccggccccgtggcctggggccacaccggcgccggctggtacctgggcgtgctgagctgcccccaggccggctgctgggactacagcctggagtgcagcggcgccatctgggaccactgcaagctgagactgcccgacagcggcgacagctgcgccagcgccagccaggtggccggcatcgccggcgcccaccaccacgcccagagcctggccgtgctgcccgtggagagccccaaggagggcaagggcagcaagcccagccccctgagcgtgaagaacaccaagagaagactggagggcgccaagaaggccaaggccgacagccccgtgaacggcctgcccaagggcagagagagcagaagcagaagcagaagcagagagcagagctacagcagaagccccagcagaagcgccagccccaagagaagaaagagcgacagcggcagcaccagcggcggcagcaagagccagagcagaagcagaagcagaagcgacagcccccccagacaggcccccagaagcgccccctacaagggcagcgagatcagaggcagcagaaagagcaaggactgcaagtacccccagaagccccacaagagcagaagcagaagcagcagcagaagcagaagcagaagcagagagagagccgacaaccccggcaagtacaagaagaagagccactactacagagaccagagaagagagagaagcagaagctacgagagaaccggcagaagatacgagagagaccaccccggccacagcagacacagaagatag

SEQ ID NO: 78017 - DNA, 2856 bp, synthetic construct
  misc_feature 1..2856: note = Description of Artificial Sequence: Synthetic coding sequence
  source 1..2856: mol_type = other DNA
atggccgccgccgccgccgccgccgccgccgtgggcgtgagactgagagactgctgcagcagaggcgccgtgctgctgctgttcttcagcctgagccccagaccccccgccgccgccgcctggctgctgggcctgagacccgaggacaccgccggcggcagagtgagcctggagggcggcaccctgagagccgccgagggcaccagcttcctgctgagagtgtacttccagcccggcccccccgccaccgccgcccccgtgcccagccccaccctgaacagcggcgagaacggcaccggcgactgggcccccagactggtgttcatcgaggagccccccggcggcggcggcgtggcccccagcgccgtgcccaccagaccccccggcccccagagatgcagagagcagagcgactgggccagcgacgtggaggtgctgggccccctgagacccggcggcgtggccggcagcgccctggtgcaggtgagagtgagagagctgagaaagggcgaggccgagagaggcggcgccggcggcggcggcaagctgttcagcctgtgcgcctgggacggcagagcctggcaccaccacggcgccgccggcggcttcctgctgagagtgagacccagactgtacggccccggcggcgacctgctgccccccgcctggctgagagccctgggcgccctgctgctgctggccctgagcgccctgttcagcggcctgagactgagcctgctgagcctggaccccgtggagctgagagtgctgagaaacagcggcagcgccgccgagcaggagcaggccagaagagtgcaggccgtgagaggcagaggcacccacctgctgtgcaccctgctgctgggccaggccggcgccaacgccgccctggccggctggctgtacaccagcctgccccccggcttcggcggcaccggcgaggactacagcgaggagggcatccacttcccctggctgcccgccctggtgtgcaccggcgccgtgttcctgggcgccgagatctgcccctacagcgtgtgcagcagacacggcctggccatcgccagccacagcgtgtgcctgaccagactgctgatggccgccgccttccccgtgtgctaccccctgggcagactgctggactgggccctgagacaggagatcagcaccttctacaccagagagaagctgctggagaccctgagagccgccgacccctacagcgacctggtgaaggaggagctgaacatcatccagggcgccctggagctgagaaccaaggtggtggaggaggtgctgacccccctgggcgactgcttcatgctgagaagcgacgccgtgctggacttcgccaccgtgagcgagatcctgagaagcggctacaccagaatccccgtgtacgagggcgaccagagacacaacatcgtggacatcctgttcgtgaaggacctggccttcgtggaccccgacgactgcacccccctgctgaccgtgaccagattctacaacagacccctgcactgcgtgttcaacgacaccagactggacaccgtgctggaggagttcaagaagggcaagagccacctggccatcgtgcagagagtgaacaacgagggcgagggcgaccccttctacgaggtgatgggcatcgtgaccctggaggacatcatcgaggagatcatcaagagcgagatcctggacgagaccgacctgtacaccgacaacagaaagaagcagagagtgccccagagagagagaaagagacacgacttcagcctgttcaagctgagcgacaccgagatgagagtgaagatcagcccccagctgctgctggccacccacagattcatggccaccgaggtggagcccttcaagagcctgtacctgagcgagaagatcctgctgagactgctgaagcaccccaacgtgatccaggagctgaagttcgacgagaagaacaagaaggcccccgagcactacctgtaccagagaaacagacccgtggactacttcgtgctgctgctgcagggcaaggtggaggtggaggtgggcaaggagggcctgagattcgagaacggcgccttcacctactacggcgtgcccgccatcatgaccaccgcctgcagcgacaacgacgtgagaaaggtgggcagcctggccggcagcagcgtgttcctgaacagaagccccagcagatgcagcggcctgaacagaagcgagagccccaacagagagagaagcgacttcggcggcagcaacacccagctgtacagcagcagcaacaacctgtacatgcccgactacagcgtgcacatcctgagcgacgtgcagttcgtgaagatcaccagacagcagtaccagaacgccctgaccgcctgccacatggacagcagcccccagagccccgacatggaggccttcaccgacggcgacagcaccaaggcccccaccaccagaggcaccccccagacccccaaggacgaccccgccatcaccctgctgaacaacagaaacagcctgccctgcagcagaagcgacggcctgagaagccccagcgaggtggtgtacctgagaatggaggagctggccttcacccaggaggagatgaccgacttcgaggagcacagcacccagcagctgaccctgagccccgccgccgtgcccaccagagccgccagcgacagcgagtgctgcaacatcaacctggacaccgagaccagcccctgcagcagcgacttcgaggagaacgtgggcaagaagctgctgagaaccctgagcggccagaagagaaagagaagccccgagggcgagagaaccagcgaggacaacagcaacctgacccccctgatcacctag

SEQ ID NO: 78018 - DNA, 2493 bp, synthetic construct
  misc_feature 1..2493: note = Description of Artificial Sequence: Synthetic coding sequence
  source 1..2493: mol_type = other DNA
atggccgccgccgccgccgccgccgccgccgtgggcgtgagactgagagactgctgcagcagaggcgccgtgctgctgctgttcttcagcctgagccccagaccccccgccgccgccgcctggctgctgggcctgagacccgaggacaccgccggcggcagagtgagcctggagggcggcaccctgagagccgccgagggcaccagcttcctgctgagagtgtacttccagcccggcccccccagatgcagagagcagagcgactgggccagcgacgtggaggtgctgggccccctgagacccggcggcgtggccggcagcgccctggtgcagctgttcagcctgtgcgcctgggacggcagagcctggcaccaccacggcgccgccggcggcttcctgctgagagtgagacccagactgtacggccccggcggcgacctgctgccccccgcctggctgagagccctgggcgccctgctgctgctggccctgagcgccctgttcagcggcctgagactgagcctgctgagcctggaccccgtggagctgagagtgctgagaaacagcggcagcgccgccgagcaggagcaggccagaagagtgcaggccgtgagaggcagaggcacccacctgctgtgcaccctgctgctgggccaggccggcgccaacgccgccctggccggctggctgtacaccagcctgccccccggcttcggcggcaccggcgaggactacagcgaggagggcatccacttcccctggctgcccgccctggtgtgcaccggcgccgtgttcctgggcgccgagatctgcccctacagcgtgtgcagcagacacggcctggccatcgccagccacagcgtgtgcctgaccagactgctgatggccgccgccttccccgtgtgctaccccctgggcagactgctggactgggccctgagacaggagatcagcaccttctacaccagagagaagctgctggagaccctgagagccgccgacccctacagcgacctggtgaaggaggagctgaacatcatccagggcgccctggagctgagaaccaaggtggtggaggaggtgctgacccccctgggcgactgcttcatgctgagaagcgacgccgtgctggacttcgccaccgtgagcgagatcctgagaagcggctacaccagaatccccgtgtacgagggcgaccagagacacaacatcgtggacatcctgttcgtgaaggacctggccttcgtggaccccgacgactgcacccccctgctgaccgtgaccagattctacaacagacccctgcactgcgtgttcaacgacaccagactggacaccgtgctggaggagttcaagaagggcaagagccacctggccatcgtgcagagagtgaacaacgagggcgagggcgaccccttctacgaggtgatgggcatcgtgaccctggaggacatcatcgaggagatcatcaagagcgagatcctggacgagaccgacctgtacaccgacaacagaaagaagcagagagtgccccagagagagagaaagagacacgacttcagcctgttcaagctgagcgacaccgagatgagagtgaagatcagcccccagctgctgctggccacccacagattcatggccaccgaggtggagcccttcaagagcctgtacctgagcgagaagatcctgctgagactgctgaagcaccccaacgtgatccaggagctgaagttcgacgagaagaacaagaaggcccccgagcactacctgtaccagagaaacagacccgtggactacttcgtgctgctgctgcagggcaaggtggaggtggaggtgggcaaggagggcctgagattcgagaacggcgccttcacctactacggcgtgcccgccatcatgaccaccgcctgcagcgacaacgacgtgagaaaggtgggcagcctggccggcagcagcgtgttcctgaacagaagccccagcagatgcagcggcctgaacagaagcgagagccccaacagagagagaagcgacttcggcggcagcaacacccagctgtacagcagcagcaacaacctgtacatgcccgactacagcgtgcacatcctgagcgacgtgcagttcgtgaagatcaccagacagcagtaccagaacgccctgaccgcctgccacatggacagcagcccccagagccccgacatggaggccttcaccgacggcgacagcaccaaggcccccaccaccagaggcaccccccagacccccaaggacgaccccgccatcaccctgctgaacaacagaaacagcctgcccagcagcgacagcgagtgctgcaacatcaacctggacaccgagaccagcccctgcagcagcgacttcgaggagaacgtgggcaagaagctgctgagaaccctgagcggccagaagagaaagagaagccccgagggcgagagaaccagcgaggacaacagcaacctgacccccctgatcacctag

SEQ ID NO: 78019 - DNA, 1824 bp, synthetic construct
  misc_feature 1..1824: note = Description of Artificial Sequence: Synthetic coding sequence
  source 1..1824: mol_type = other DNA
atggccgccgccttccccgtgtgctaccccctgggcagactgctggactgggccctgagacaggagatcagcaccttctacaccagagagaagctgctggagaccctgagagccgccgacccctacagcgacctggtgaaggaggagctgaacatcatccagggcgccctggagctgagaaccaaggtggtggaggaggtgctgacccccctgggcgactgcttcatgctgagaagcgacgccgtgctggacttcgccaccgtgagcgagatcctgagaagcggctacaccagaatccccgtgtacgagggcgaccagagacacaacatcgtggacatcctgttcgtgaaggacctggccttcgtggaccccgacgactgcacccccctgctgaccgtgaccagattctacaacagacccctgcactgcgtgttcaacgacaccagactggacaccgtgctggaggagttcaagaagggcaagagccacctggccatcgtgcagagagtgaacaacgagggcgagggcgaccccttctacgaggtgatgggcatcgtgaccctggaggacatcatcgaggagatcatcaagagcgagatcctggacgagaccgacctgtacaccgacaacagaaagaagcagagagtgccccagagagagagaaagagacacgacttcagcctgttcaagctgagcgacaccgagatgagagtgaagatcagcccccagctgctgctggccacccacagattcatggccaccgaggtggagcccttcaagagcctgtacctgagcgagaagatcctgctgagactgctgaagcaccccaacgtgatccaggagctgaagttcgacgagaagaacaagaaggcccccgagcactacctgtaccagagaaacagacccgtggactacttcgtgctgctgctgcagggcaaggtggaggtggaggtgggcaaggagggcctgagattcgagaacggcgccttcacctactacggcgtgcccgccatcatgaccaccgcctgcagcgacaacgacgtgagaaaggtgggcagcctggccggcagcagcgtgttcctgcccgtgagcgtgagcagaaccttcgccgtgagcagaggcgacagcctggccggcagccccgtgaacagaagccccagcagatgcagcggcctgaacagaagcgagagccccaacagagagagaagcgacttcggcggcagcaacacccagctgtacagcagcagcaacaacctgtacatgcccgactacagcgtgcacatcctgagcgacgtgcagttcgtgaagatcaccagacagcagtaccagaacgccctgaccgcctgccacatggacagcagcccccagagccccgacatggaggccttcaccgacggcgacagcaccaaggcccccaccaccagaggcaccccccagacccccaaggacgaccccgccatcaccctgctgaacaacagaaacagcctgccctgcagcagaagcgacggcctgagaagccccagcgaggtggtgtacctgagaatggaggagctggccttcacccaggaggagatgaccgacttcgaggagcacagcacccagcagctgaccctgagccccgccgccgtgcccaccagagccgccagcgacagcgagtgctgcaacatcaacctggacaccgagaccagcccctgcagcagcgacttcgaggagaacgtgggcaagaagctgctgagaaccctgagcggccagaagagaaagagaagccccgagggcgagagaaccagcgaggacaacagcaacctgacccccctgatcacctag

SEQ ID NO: 78020 - DNA, 2643 bp, synthetic construct
  misc_feature 1..2643: note = Description of Artificial Sequence: Synthetic coding sequence
  source 1..2643: mol_type = other DNA
atggccgccgccgccgccgccgccgccgccgtgggcgtgagactgagagactgctgcagcagaggcgccgtgctgctgctgttcttcagcctgagccccagaccccccgccgccgccgcctggctgctgggcctgagacccgaggacaccgccggcggcagagtgagcctggagggcggcaccctgagagccgccgagggcaccagcttcctgctgagagtgtacttccagcccggcccccccagatgcagagagcagagcgactgggccagcgacgtggaggtgctgggccccctgagacccggcggcgtggccggcagcgccctggtgcagctgttcagcctgtgcgcctgggacggcagagcctggcaccaccacggcgccgccggcggcttcctgctgagagtgagacccagactgtacggccccggcggcgacctgctgccccccgcctggctgagagccctgggcgccctgctgctgctggccctgagcgccctgttcagcggcctgagactgagcctgctgagcctggaccccgtggagctgagagtgctgagaaacagcggcagcgccgccgagcaggagcaggccagaagagtgcaggccgtgagaggcagaggcacccacctgctgtgcaccctgctgctgggccaggccggcgccaacgccgccctggccggctggctgtacaccagcctgccccccggcttcggcggcaccggcgaggactacagcgaggagggcatccacttcccctggctgcccgccctggtgtgcaccggcgccgtgttcctgggcgccgagatctgcccctacagcgtgtgcagcagacacggcctggccatcgccagccacagcgtgtgcctgaccagactgctgatggccgccgccttccccgtgtgctaccccctgggcagactgctggactgggccctgagacaggagatcagcaccttctacaccagagagaagctgctggagaccctgagagccgccgacccctacagcgacctggtgaaggaggagctgaacatcatccagggcgccctggagctgagaaccaaggtggtggaggaggtgctgacccccctgggcgactgcttcatgctgagaagcgacgccgtgctggacttcgccaccgtgagcgagatcctgagaagcggctacaccagaatccccgtgtacgagggcgaccagagacacaacatcgtggacatcctgttcgtgaaggacctggccttcgtggaccccgacgactgcacccccctgctgaccgtgaccagattctacaacagacccctgcactgcgtgttcaacgacaccagactggacaccgtgctggaggagttcaagaagggcaagagccacctggccatcgtgcagagagtgaacaacgagggcgagggcgaccccttctacgaggtgatgggcatcgtgaccctggaggacatcatcgaggagatcatcaagagcgagatcctggacgagaccgacctgtacaccgacaacagaaagaagcagagagtgccccagagagagagaaagagacacgacttcagcctgttcaagctgagcgacaccgagatgagagtgaagatcagcccccagctgctgctggccacccacagattcatggccaccgaggtggagcccttcaagagcctgtacctgagcgagaagatcctgctgagactgctgaagcaccccaacgtgatccaggagctgaagttcgacgagaagaacaagaaggcccccgagcactacctgtaccagagaaacagacccgtggactacttcgtgctgctgctgcagggcaaggtggaggtggaggtgggcaaggagggcctgagattcgagaacggcgccttcacctactacggcgtgcccgccatcatgaccaccgcctgcagcgacaacgacgtgagaaaggtgggcagcctggccggcagcagcgtgttcctgaacagaagccccagcagatgcagcggcctgaacagaagcgagagccccaacagagagagaagcgacttcggcggcagcaacacccagctgtacagcagcagcaacaacctgtacatgcccgactacagcgtgcacatcctgagcgacgtgcagttcgtgaagatcaccagacagcagtaccagaacgccctgaccgcctgccacatggacagcagcccccagagccccgacatggaggccttcaccgacggcgacagcaccaaggcccccaccaccagaggcaccccccagacccccaaggacgaccccgccatcaccctgctgaacaacagaaacagcctgccctgcagcagaagcgacggcctgagaagccccagcgaggtggtgtacctgagaatggaggagctggccttcacccaggaggagatgaccgacttcgaggagcacagcacccagcagctgaccctgagccccgccgccgtgcccaccagagccgccagcgacagcgagtgctgcaacatcaacctggacaccgagaccagcccctgcagcagcgacttcgaggagaacgtgggcaagaagctgctgagaaccctgagcggccagaagagaaagagaagccccgagggcgagagaaccagcgaggacaacagcaacctgacccccctgatcacctag

SEQ ID NO: 78021 - DNA, 1215 bp, synthetic construct
  misc_feature 1..1215: note = Description of Artificial Sequence: Synthetic coding sequence
  source 1..1215: mol_type = other DNA
atgggcatcgtgaccctggaggacatcatcgaggagatcatcaagagcgagatcctggacgagaccgacctgtacaccgacaacagaaagaagcagagagtgccccagagagagagaaagagacacgacttcagcctgttcaagctgagcgacaccgagatgagagtgaagatcagcccccagctgctgctggccacccacagattcatggccaccgaggtggagcccttcaagagcctgtacctgagcgagaagatcctgctgagactgctgaagcaccccaacgtgatccaggagctgaagttcgacgagaagaacaagaaggcccccgagcactacctgtaccagagaaacagacccgtggactacttcgtgctgctgctgcagggcaaggtggaggtggaggtgggcaaggagggcctgagattcgagaacggcgccttcacctactacggcgtgcccgccatcatgaccaccgcctgcagcgacaacgacgtgagaaaggtgggcagcctggccggcagcagcgtgttcctgaacagaagccccagcagatgcagcggcctgaacagaagcgagagccccaacagagagagaagcgacttcggcggcagcaacacccagctgtacagcagcagcaacaacctgtacatgcccgactacagcgtgcacatcctgagcgacgtgcagttcgtgaagatcaccagacagcagtaccagaacgccctgaccgcctgccacatggacagcagcccccagagccccgacatggaggccttcaccgacggcgacagcaccaaggcccccaccaccagaggcaccccccagacccccaaggacgaccccgccatcaccctgctgaacaacagaaacagcctgccctgcagcagaagcgacggcctgagaagccccagcgaggtggtgtacctgagaatggaggagctggccttcacccaggaggagatgaccgacttcgaggagcacagcacccagcagctgaccctgagccccgccgccgtgcccaccagagccgccagcgacagcgagtgctgcaacatcaacctggacaccgagaccagcccctgcagcagcgacttcgaggagaacgtgggcaagaagctgctgagaaccctgagcggccagaagagaaagagaagccccgagggcgagagaaccagcgaggacaacagcaacctgacccccctgatcacctag

SEQ ID NO: 78022 - DNA, 2562 bp, synthetic construct
  misc_feature 1..2562: note = Description of Artificial Sequence: Synthetic coding sequence
  source 1..2562: mol_type = other DNA
atgatcggctgcggcgcctgcgagcccaaggtgaagatggccggcggccaggccgccgccgccctgcccacctggaagatggccgccagaagaagcctgagcgccagaggcagaggcatcctgcaggccgccgccggcagactgctgcccctgctgctgctgagctgctgctgcggcgccggcggctgcgccgccgtgggcgagaacgaggagaccgtgatcatcggcctgagactggaggacaccaacgacgtgagcttcatggagggcggcgccctgagagtgagcgagagaaccagagtgaagctgagagtgtacggccagaacatcaacaacgagacctggagcagaatcgccttcaccgagcacgagagaagaagacacagccccggcgagagaggcctgggcggccccgccccccccgagcccgacagcggcccccagagatgcggcatcagaaccagcgacatcatcatcctgccccacatcatcctgaacagaagaaccagcggcatcatcgagatcgagatcaagcccctgagaaagatggagaagagcaagagctactacctgtgcaccagcctgagcacccccgccctgggcgccggcggcagcggcagcaccggcggcgccgtgggcggcaagggcggcagcggcgtggccggcctgcccccccccccctgggccgagaccacctggatctaccacgacggcgaggacaccaagatgatcgtgggcgaggagaagaagttcctgctgcccttctggctgcaggtgatcttcatcagcctgctgctgtgcctgagcggcatgttcagcggcctgaacctgggcctgatggccctggaccccatggagctgagaatcgtgcagaactgcggcaccgagaaggagaagaactacgccaagagaatcgagcccgtgagaagacagggcaactacctgctgtgcagcctgctgctgggcaacgtgctggtgaacaccaccctgaccatcctgctggacgacatcgccggcagcggcctggtggccgtggtggtgagcaccatcggcatcgtgatcttcggcgagatcgtgccccaggccatctgcagcagacacggcctggccgtgggcgccaacaccatcttcctgaccaagttcttcatgatgatgaccttccccgccagctaccccgtgagcaagctgctggactgcgtgctgggccaggagatcggcaccgtgtacaacagagagaagctgctggagatgctgagagtgaccgacccctacaacgacctggtgaaggaggagctgaacatcatccagggcgccctggagctgagaaccaagaccgtggaggacgtgatgacccccctgagagactgcttcatgatcaccggcgaggccatcctggacttcaacaccatgagcgagatcatggagagcggctacaccagaatccccgtgttcgagggcgagagaagcaacatcgtggacctgctgttcgtgaaggacctggccttcgtggaccccgacgactgcacccccctgaagaccatcaccaagttctacaaccaccccctgcacttcgtgttcaacgacaccaagctggacgccatgctggaggagttcaagaagggcaagagccacctggccatcgtgcagagagtgaacaacgagggcgagggcgaccccttctacgaggtgctgggcatcgtgaccctggaggacgtgatcgaggagatcatcaagagcgagatcctggacgagaccgacctgtacaccgacaacagaaccaagaagaaggtggcccacagagagagaaagcaggacttcagcgccttcaagcagaccgacagcgagatgaaggtgaagatcagcccccagctgctgctggccatgcacagattcctggccaccgaggtggaggccttcagccccagccagatgagcgagaagatcctgctgagactgctgaagcaccccaacgtgatccaggagctgaagtacgacgagaagaacaagaaggcccccgagtactacctgtaccagagaaacaagcccgtggactacttcgtgctgatcctgcagggcaaggtggaggtggaggccggcaaggagggcatgaagttcgaggccagcgccttcagctactacggcgtgatggccctgaccgccagccccggcgagaacaagagcccccccagaccctgcggcctgaaccacagcgacagcctgagcagaagcgacagaatcgacgccgtgacccccaccctgggcagcagcaacaaccagctgaacagcagcctgctgcaggtgtacatccccgactacagcgtgagagccctgagcgacctgcagttcgtgaagatcagcagacagcagtaccagaacgccctgatggccagcagaatggacaagaccccccagagcagcgacagcgagaacaccaagatcgagctgaccctgaccgagctgcacgacggcctgcccgacgagaccgccaacctgctgaacgagcagaactgcgtgacccacagcaaggccaaccacagcctgcacaacgagggcgccatctag

SEQ ID NO: 78023 - DNA, 1659 bp, synthetic construct
  misc_feature 1..1659: note = Description of Artificial Sequence: Synthetic coding sequence
  source 1..1659: mol_type = other DNA
atgatcggctgcggcgcctgcgagcccaaggtgaagatggccggcggccaggccgccgccgccctgcccacctggaagatggccgccagaagaagcctgagcgccagaggcagaggcatcctgcaggccgccgccggcagactgctgcccctgctgctgctgagctgctgctgcggcgccggcggctgcgccgccgtgggcgagaacgaggagaccgtgatcatcggcctgagactggaggacaccaacgacgtgagcttcatggagggcggcgccctgagagtgagcgagagaaccagagtgaagctgagagtgtacggccagaacatcaacaacgagacctggagcagaatcgccttcaccgagcacgagagaagaagacacagccccggcgagagaggcctgggcggccccgccccccccgagcccgacagcggcccccagagatgcggcatcagaaccagcgacatcatcatcctgccccacatcatcctgaacagaagaaccagcggcatcatcgagatcgagatcaagcccctgagaaagatggagaagagcaagagctactacctgtgcaccagcctgagcacccccgccctgggcgccggcggcagcggcagcaccggcggcgccgtgggcggcaagggcggcagcggcgtggccggcctgcccccccccccctgggccgagaccacctggatctaccacgacggcgaggacaccaagatgatcgtgggcgaggagaagaagttcctgctgcccttctggctgcaggtgatcttcatcagcctgctgctgtgcctgagcggcatgttcagcggcctgaacctgggcctgatggccctggaccccatggagctgagaatcgtgcagaactgcggcaccgagaaggagaagaactacgccaagagaatcgagcccgtgagaagacagggcaactacctgctgtgcagcctgctgctgggcaacgtgctggtgaacaccaccctgaccatcctgctggacgacatcgccggcagcggcctggtggccgtggtggtgagcaccatcggcatcgtgatcttcggcgagatcgtgccccaggccatctgcagcagacacggcctggccgtgggcgccaacaccatcttcctgaccaagttcttcatgatgatgaccttccccgccagctaccccgtgagcaagctgctggactgcgtgctgggccaggagatcggcaccgtgtacaacagagagaagctgctggagatgctgagagtgaccgacccctacaacgacctggtgaaggaggagctgaacatcatccagggcgccctggagctgagaaccaagaccgtggaggacgtgatgacccccctgagagactgcttcatgatcaccggcgaggccatcctggacttcaacaccatgagcgagatcatggagagcggctacaccagaatccccgtgttcgagggcgagagaagcaacatcgtggacctgctgttcgtgaaggacctggccttcgtggaccccgacgactgcacccccctgaagaccatcaccaagttctacaaccaccccctgcacttcgtgttcaacgacaccaagctggacgccatgctggaggagttcaagaaggagcacaccaacaagaagcccaagagctaccagcactag

SEQ ID NO: 78024 - DNA, 2628 bp, synthetic construct
  misc_feature 1..2628: note = Description of Artificial Sequence: Synthetic coding sequence
  source 1..2628: mol_type = other DNA
atgatcggctgcggcgcctgcgagcccaaggtgaagatggccggcggccaggccgccgccgccctgcccacctggaagatggccgccagaagaagcctgagcgccagaggcagaggcatcctgcaggccgccgccggcagactgctgcccctgctgctgctgagctgctgctgcggcgccggcggctgcgccgccgtgggcgagaacgaggagaccgtgatcatcggcctgagactggaggacaccaacgacgtgagcttcatggagggcggcgccctgagagtgagcgagagaaccagagtgaagctgagagtgtacggccagaacatcaacaacgagacctggagcagaatcgccttcaccgagcacgagagaagaagacacagccccggcgagagaggcctgggcggccccgccccccccgagcccgacagcggcccccagagatgcggcatcagaaccagcgacatcatcatcctgccccacatcatcctgaacagaagaaccagcggcatcatcgagatcgagatcaagcccctgagaaagatggagaagagcaagagctactacctgtgcaccagcctgagcacccccgccctgggcgccggcggcagcggcagcaccggcggcgccgtgggcggcaagggcggcagcggcgtggccggcctgcccccccccccctgggccgagaccacctggatctaccacgacggcgaggacaccaagatgatcgtgggcgaggagaagaagttcctgctgcccttctggctgcaggtgatcttcatcagcctgctgctgtgcctgagcggcatgttcagcggcctgaacctgggcctgatggccctggaccccatggagctgagaatcgtgcagaactgcggcaccgagaaggagaagaactacgccaagagaatcgagcccgtgagaagacagggcaactacctgctgtgcagcctgctgctgggcaacgtgctggtgaacaccaccctgaccatcctgctggacgacatcgccggcagcggcctggtggccgtggtggtgagcaccatcggcatcgtgatcttcggcgagatcgtgccccaggccatctgcagcagacacggcctggccgtgggcgccaacaccatcttcctgaccaagttcttcatgatgatgaccttccccgccagctaccccgtgagcaagctgctggactgcgtgctgggccaggagatcggcaccgtgtacaacagagagaagctgctggagatgctgagagtgaccgacccctacaacgacctggtgaaggaggagctgaacatcatccagggcgccctggagctgagaaccaagaccgtggaggacgtgatgacccccctgagagactgcttcatgatcaccggcgaggccatcctggacttcaacaccatgagcgagatcatggagagcggctacaccagaatccccgtgttcgagggcgagagaagcaacatcgtggacctgctgttcgtgaaggacctggccttcgtggaccccgacgactgcacccccctgaagaccatcaccaagttctacaaccaccccctgcacttcgtgttcaacgacaccaagctggacgccatgctggaggagttcaagaagggcaagagccacctggccatcgtgcagagagtgaacaacgagggcgagggcgaccccttctacgaggtgctgggcatcgtgaccctggaggacgtgatcgaggagatcatcaagagcgagatcctggacgagaccgacctgtacaccgacaacagaaccaagaagaaggtggcccacagagagagaaagcaggacttcagcgccttcaagcagaccgacagcgagatgaaggtgaagatcagcccccagctgctgctggccatgcacagattcctggccaccgaggtggaggccttcagccccagccagatgagcgagaagatcctgctgagactgctgaagcaccccaacgtgatccaggagctgaagtacgacgagaagaacaagaaggcccccgagtactacctgtaccagagaaacaagcccgtggactacttcgtgctgatcctgcagggcaaggtggaggtggaggccggcaaggagggcatgaagttcgaggccagcgccttcagctactacggcgtgatggccctgaccgccagccccgtgcccctgagcctgagcagaaccttcgtggtgagcagaaccgagctgctggccgccggcagccccggcgagaacaagagcccccccagaccctgcggcctgaaccacagcgacagcctgagcagaagcgacagaatcgacgccgtgacccccaccctgggcagcagcaacaaccagctgaacagcagcctgctgcaggtgtacatccccgactacagcgtgagagccctgagcgacctgcagttcgtgaagatcagcagacagcagtaccagaacgccctgatggccagcagaatggacaagaccccccagagcagcgacagcgagaacaccaagatcgagctgaccctgaccgagctgcacgacggcctgcccgacgagaccgccaacctgctgaacgagcagaactgcgtgacccacagcaaggccaaccacagcctgcacaacgagggcgccatctag

SEQ ID NO: 78025 - DNA, 2565 bp, synthetic construct
  misc_feature 1..2565: note = Description of Artificial Sequence: Synthetic coding sequence
  source 1..2565: mol_type = other DNA
atgatcggctgcggcgcctgcgagcccaaggtgaagatggccggcggccaggccgccgccgccctgcccacctggaagatggccgccagaagaagcctgagcgccagaggcagaggcatcctgcaggccgccgccggcagactgctgcccctgctgctgctgagctgctgctgcggcgccggcggctgcgccgccgtgggcgagaacgaggagaccgtgatcatcggcctgagactggaggacaccaacgacgtgagcttcatggagggcggcgccctgagagtgagcgagagaaccagagtgaagctgagagtgtacggccagaacatcaacaacgagacctggagcagaatcgccttcaccgagcacgagagaagaagacacagccccggcgagagaggcctgggcggccccgccccccccgagcccgacagcggcccccagagatgcggcatcagaaccagcgacatcatcatcctgccccacatcatcctgaacagaagaaccagcggcatcatcgagatcgagatcaagcccctgagaaagatggagaagagcaagagctactacctgtgcaccagcctgagcacccccgccctgggcgccggcggcagcggcagcaccggcggcgccgtgggcggcaagggcggcagcggcgtggccggcctgcccccccccccctgggccgagaccacctggatctaccacgacggcgaggacaccaagatgatcgtgggcgaggagaagaagttcctgctgcccttctggctgcaggtgatcttcatcagcctgctgctgtgcctgagcggcatgttcagcggcctgaacctgggcctgatggccctggaccccatggagctgagaatcgtgcagaactgcggcaccgagaaggagaagaactacgccaagagaatcgagcccgtgagaagacagggcaactacctgctgtgcagcctgctgctgggcaacgtgctggtgaacaccaccctgaccatcctgctggacgacatcgccggcagcggcctggtggccgtggtggtgagcaccatcggcatcgtgatcttcggcgagatcgtgccccaggccatctgcagcagacacggcctggccgtgggcgccaacaccatcttcctgaccaagttcttcatgatgatgaccttccccgccagctaccccgtgagcaagctgctggactgcgtgctgggccaggagatcggcaccgtgtacaacagagagaagctgctggagatgctgagagtgaccgacccctacaacgacctggtgaaggaggagctgaacatcatccagggcgccctggagctgagaaccaagaccgtggaggacgtgatgacccccctgagagactgcttcatgatcaccggcgaggccatcctggacttcaacaccatgagcgagatcatggagagcggctacaccagaatccccgtgttcgagggcgagagaagcaacatcgtggacctgctgttcgtgaaggacctggccttcgtggaccccgacgactgcacccccctgaagaccatcaccaagttctacaaccaccccctgcacttcgtgttcaacgacaccaagctggacgccatgctggaggagttcaagaagggcaagagccacctggccatcgtgcagagagtgaacaacgagggcgagggcgaccccttctacgaggtgctgggcatcgtgaccctggaggacgtgatcgaggagatcatcaagagcgagatcctggacgagaccgacctgtacaccgacaacagaaccaagaagaaggtggcccacagagagagaaagcaggacttcagcgccttcaagcagaccgacagcgagatgaaggtgaagatcagcccccagctgctgctggccatgcacctggtgttcatcagcatcgaggtggaggccttcagccccagccagatgagcgagaagatcctgctgagactgctgaagcaccccaacgtgatccaggagctgaagtacgacgagaagaacaagaaggcccccgagtactacctgtaccagagaaacaagcccgtggactacttcgtgctgatcctgcagggcaaggtggaggtggaggccggcaaggagggcatgaagttcgaggccagcgccttcagctactacggcgtgatggccctgaccgccagccccggcgagaacaagagcccccccagaccctgcggcctgaaccacagcgacagcctgagcagaagcgacagaatcgacgccgtgacccccaccctgggcagcagcaacaaccagctgaacagcagcctgctgcaggtgtacatccccgactacagcgtgagagccctgagcgacctgcagttcgtgaagatcagcagacagcagtaccagaacgccctgatggccagcagaatggacaagaccccccagagcagcgacagcgagaacaccaagatcgagctgaccctgaccgagctgcacgacggcctgcccgacgagaccgccaacctgctgaacgagcagaactgcgtgacccacagcaaggccaaccacagcctgcacaacgagggcgccatctag

SEQ ID NO: 78026 - DNA, 2631 bp, synthetic construct
  misc_feature 1..2631: note = Description of Artificial Sequence: Synthetic coding sequence
  source 1..2631: mol_type = other DNA
atgatcggctgcggcgcctgcgagcccaaggtgaagatggccggcggccaggccgccgccgccctgcccacctggaagatggccgccagaagaagcctgagcgccagaggcagaggcatcctgcaggccgccgccggcagactgctgcccctgctgctgctgagctgctgctgcggcgccggcggctgcgccgccgtgggcgagaacgaggagaccgtgatcatcggcctgagactggaggacaccaacgacgtgagcttcatggagggcggcgccctgagagtgagcgagagaaccagagtgaagctgagagtgtacggccagaacatcaacaacgagacctggagcagaatcgccttcaccgagcacgagagaagaagacacagccccggcgagagaggcctgggcggccccgccccccccgagcccgacagcggcccccagagatgcggcatcagaaccagcgacatcatcatcctgccccacatcatcctgaacagaagaaccagcggcatcatcgagatcgagatcaagcccctgagaaagatggagaagagcaagagctactacctgtgcaccagcctgagcacccccgccctgggcgccggcggcagcggcagcaccggcggcgccgtgggcggcaagggcggcagcggcgtggccggcctgcccccccccccctgggccgagaccacctggatctaccacgacggcgaggacaccaagatgatcgtgggcgaggagaagaagttcctgctgcccttctggctgcaggtgatcttcatcagcctgctgctgtgcctgagcggcatgttcagcggcctgaacctgggcctgatggccctggaccccatggagctgagaatcgtgcagaactgcggcaccgagaaggagaagaactacgccaagagaatcgagcccgtgagaagacagggcaactacctgctgtgcagcctgctgctgggcaacgtgctggtgaacaccaccctgaccatcctgctggacgacatcgccggcagcggcctggtggccgtggtggtgagcaccatcggcatcgtgatcttcggcgagatcgtgccccaggccatctgcagcagacacggcctggccgtgggcgccaacaccatcttcctgaccaagttcttcatgatgatgaccttccccgccagctaccccgtgagcaagctgctggactgcgtgctgggccaggagatcggcaccgtgtacaacagagagaagctgctggagatgctgagagtgaccgacccctacaacgacctggtgaaggaggagctgaacatcatccagggcgccctggagctgagaaccaagaccgtggaggacgtgatgacccccctgagagactgcttcatgatcaccggcgaggccatcctggacttcaacaccatgagcgagatcatggagagcggctacaccagaatccccgtgttcgagggcgagagaagcaacatcgtggacctgctgttcgtgaaggacctggccttcgtggaccccgacgactgcacccccctgaagaccatcaccaagttctacaaccaccccctgcacttcgtgttcaacgacaccaagctggacgccatgctggaggagttcaagaagggcaagagccacctggccatcgtgcagagagtgaacaacgagggcgagggcgaccccttctacgaggtgctgggcatcgtgaccctggaggacgtgatcgaggagatcatcaagagcgagatcctggacgagaccgacctgtacaccgacaacagaaccaagaagaaggtggcccacagagagagaaagcaggacttcagcgccttcaagcagaccgacagcgagatgaaggtgaagatcagcccccagctgctgctggccatgcacctggtgttcatcagcatcgaggtggaggccttcagccccagccagatgagcgagaagatcctgctgagactgctgaagcaccccaacgtgatccaggagctgaagtacgacgagaagaacaagaaggcccccgagtactacctgtaccagagaaacaagcccgtggactacttcgtgctgatcctgcagggcaaggtggaggtggaggccggcaaggagggcatgaagttcgaggccagcgccttcagctactacggcgtgatggccctgaccgccagccccgtgcccctgagcctgagcagaaccttcgtggtgagcagaaccgagctgctggccgccggcagccccggcgagaacaagagcccccccagaccctgcggcctgaaccacagcgacagcctgagcagaagcgacagaatcgacgccgtgacccccaccctgggcagcagcaacaaccagctgaacagcagcctgctgcaggtgtacatccccgactacagcgtgagagccctgagcgacctgcagttcgtgaagatcagcagacagcagtaccagaacgccctgatggccagcagaatggacaagaccccccagagcagcgacagcgagaacaccaagatcgagctgaccctgaccgagctgcacgacggcctgcccgacgagaccgccaacctgctgaacgagcagaactgcgtgacccacagcaaggccaaccacagcctgcacaacgagggcgccatctag

SEQ ID NO: 78027 - DNA, 1725 bp, synthetic construct
  misc_feature 1..1725: note = Description of Artificial Sequence: Synthetic coding sequence
  source 1..1725: mol_type = other DNA
atgatcggctgcggcgcctgcgagcccaaggtgaagatggccggcggccaggccgccgccgccctgcccacctggaagatggccgccagaagaagcctgagcgccagaggcagaggcatcctgcaggccgccgccggcagactgctgcccctgctgctgctgagctgctgctgcggcgccggcggctgcgccgccgtgggcgagaacgaggagaccgtgatcatcggcctgagactggaggacaccaacgacgtgagcttcatggagggcggcgccctgagagtgagcgagagaaccagagtgaagctgagagtgtacggccagaacatcaacaacgagacctggagcagaatcgccttcaccgagcacgagagaagaagacacagccccggcgagagaggcctgggcggccccgccccccccgagcccgacagcggcccccagagatgcggcatcagaaccagcgacatcatcatcctgccccacatcatcctgaacagaagaaccagcggcatcatcgagatcgagatcaagcccctgagaaagatggagaagagcaagagctactacctgtgcaccagcctgagcacccccgccctgggcgccggcggcagcggcagcaccggcggcgccgtgggcggcaagggcggcagcggcgtggccggcctgcccccccccccctgggccgagaccacctggatctaccacgacggcgaggacaccaagatgatcgtgggcgaggagaagaagttcctgctgcccttctggctgcaggtgatcttcatcagcctgctgctgtgcctgagcggcatgttcagcggcctgaacctgggcctgatggccctggaccccatggagctgagaatcgtgcagaactgcggcaccgagaaggagaagaactacgccaagagaatcgagcccgtgagaagacagggcaactacctgctgtgcagcctgctgctgggcaacgtgctggtgaacaccaccctgaccatcctgctggacgacatcgccggcagcggcctggtggccgtggtggtgagcaccatcggcatcgtgatcttcggcgagatcgtgccccaggccatctgcagcagacacggcctggccgtgggcgccaacaccatcttcctgaccaagttcttcatgatgatgaccttccccgccagctaccccgtgagcaagctgctggactgcgtgctgggccaggagatcggcaccgtgtacaacagagagaagctgctggagatgctgagagtgaccgacccctacaacgacctggtgaaggaggagctgaacatcatccagggcgccctggagctgagaaccaagaccgtggaggacgtgatgacccccctgagagactgcttcatgatcaccggcgaggccatcctggacttcaacaccatgagcgagatcatggagagcggctacaccagaatccccgtgttcgagggcgagagaagcaacatcgtggacctgctgttcgtgaaggacctggccttcgtggaccccgacgactgcacccccctgaagaccatcaccaagttctacaaccaccccctgcacttcgtgttcaacgacaccaagctggacgccatgctggaggagttcaagaaggagcacaccaacaagaagcccaagagctaccagcactgcaacgagcagaactgcgtgacccacagcaaggccaaccacagcctgcacaacgagggcgccatctag

SEQ ID NO: 78028 - DNA, 2124 bp, synthetic construct
  misc_feature 1..2124: note = Description of Artificial Sequence: Synthetic coding sequence
  source 1..2124: mol_type = other DNA
atggccgccgccgtggccgccgccggcagactgggctggctgttcgccgccctgtgcctgggcaacgccgccggcgaggccgcccccggccccagagtgctgggcttctgcctggaggaggacggcgccgccggcgccggctgggtgagaggcggcgccgccagagacacccccgacgccaccttcctgctgagactgttcggccccggcttcgccaacagcagctggagctgggtggcccccgagggcgccggctgcagagaggaggccgccagccccgccggcgagtggagagccctgctgagactgagactgagagccgaggccgtgagaccccacagcgccctgctggccgtgagagtggagcccggcggcggcgccgccgaggaggccgcccccccctgggccctgggcctgggcgccgccggcctgctggccctggccgccctggccagaggcctgcagctgagcgccctggccctggcccccgccgaggtgcaggtgctgagagagagcggcagcgaggccgagagagccgccgccagaagactggagcccgccagaagatgggccggctgcgccctgggcgccctgctgctgctggccagcctggcccaggccgccctggccgtgctgctgtacagagccgccggccagagagccgtgcccgccgtgctgggcagcgccggcctggtgttcctggtgggcgaggtggtgcccgccgccgtgagcggcagatggaccctggccctggcccccagagccctgggcctgagcagactggccgtgctgctgaccctgcccgtggccctgcccgtgggccagctgctggagctggccgccagacccggcagactgagagagagagtgctggagctggccagaggcggcggcgacccctacagcgacctgagcaagggcgtgctgagatgcagaaccgtggaggacgtgctgacccccctggaggactgcttcatgctggacgccagcaccgtgctggacttcggcgtgctggccagcatcatgcagagcggccacaccagaatccccgtgtacgaggaggagagaagcaacatcgtggacatgctgtacctgaaggacctggccttcgtggaccccgaggactgcacccccctgagcaccatcaccagattctacaaccaccccctgcacttcgtgttcaacgacaccaagctggacgccgtgctggaggagttcaagagaggcaagagccacctggccatcgtgcagaaggtgaacaacgagggcgagggcgaccccttctacgaggtgctgggcctggtgaccctggaggacgtgatcgaggagatcatcagaagcgagatcctggacgagagcgaggactacagagacaccgtggtgaagagaaagcccgccagcctgatggcccccctgaagagaaaggaggagttcagcctgttcaaggtgagcgacgacgagtacaaggtgaccatcagcccccagctgctgctggccacccagagattcctgagcagagaggtggacgtgttcagccccctgagaatcagcgagaaggtgctgctgcacctgctgaagcaccccagcgtgaaccaggaggtgagattcgacgagagcaacagactggccacccaccactacctgtaccagagaagccagcccgtggactacttcatcctgatcctgcagggcagagtggaggtggagatcggcaaggagggcctgaagttcgagaacggcgccttcacctactacggcgtgagcgccctgaccgtgcccagcagcgtgcaccagagccccgtgagcagcctgcagcccatcagacacgacctgcagcccgaccccggcgacggcacccacagcagcgcctactgccccgactacaccgtgagagccctgagcgacctgcagctgatcaaggtgaccagactgcagtacctgaacgccctgctggccaccagagcccagaacctgccccagagccccgagaacaccgacctgcaggtgatccccggcagccagaccagactgctgggcgagaagaccaccaccgccgccggcagcagccacagcagacccggcgtgcccgtggagggcagccccggcagaaaccccggcgtgtag

SEQ ID NO: 78029 - DNA, 1980 bp, synthetic construct
  misc_feature 1..1980: note = Description of Artificial Sequence: Synthetic coding sequence
  source 1..1980: mol_type = other DNA
atggccgccgccgtggccgccgccggcagactgggctggctgttcgccgccctgtgcctgggcaacgccgccggcgaggccgcccccggccccagagtgctgggcttctgcctggaggaggacggcgccgccggcgccggctgggtgagaggcggcgccgccagagacacccccgacgccaccttcctgctgagactgttcggccccggcttcgccaacagcagctggagctgggtggcccccgagggcgccggctgcagagaggaggccgccagccccgccggcgagtggagagccctgctgagactgagactgagagccgaggccgtgagaccccacagcgccctgctggccgtgagagtggagcccggcggcggcgccgccgaggaggccgcccccccctgggccctgggcctgggcgccgccggcctgctggccctggccgccctggccagaggcctgcagctgagcgccctggccctggcccccgccgaggtgcaggtgctgagagagagcggcagcgaggccgagagagccgccgccagaagactggagcccgccagaagatgggccggctgcgccctgggcgccctgctgctgctggccagcctggcccaggccgccctggccgtgctgctgtacagagccgccggccagagagccgtgcccgccgtgctgggcagcgccggcctggtgttcctggtgggcgaggtggtgcccgccgccgtgagcggcagatggaccctggccctggcccccagagccctgggcctgagcagactggccgtgctgctgaccctgcccgtggccctgcccgtgggccagctgctggagctggccgccagacccggcagactgagagagagagtgctggagctggccagaggcggcggcgacccctacagcgacctgagcaagggcgtgctgagatgcagaaccgtggaggacgtgctgacccccctggaggactgcttcatgctggacgccagcaccgtgctggacttcggcgtgctggccagcatcatgcagagcggccacaccagaatccccgtgtacgaggaggagagaagcaacatcgtggacatgctgtacctgaaggacctggccttcgtggaccccgaggactgcacccccctgagcaccatcaccagattctacaaccaccccctgcacttcgtgttcaacgacaccaagctggacgccgtgctggaggagttcaagagaggcgacaccgtggtgaagagaaagcccgccagcctgatggcccccctgaagagaaaggaggagttcagcctgttcaaggtgagcgacgacgagtacaaggtgaccatcagcccccagctgctgctggccacccagagattcctgagcagagaggtggacgtgttcagccccctgagaatcagcgagaaggtgctgctgcacctgctgaagcaccccagcgtgaaccaggaggtgagattcgacgagagcaacagactggccacccaccactacctgtaccagagaagccagcccgtggactacttcatcctgatcctgcagggcagagtggaggtggagatcggcaaggagggcctgaagttcgagaacggcgccttcacctactacggcgtgagcgccctgaccgtgcccagcagcgtgcaccagagccccgtgagcagcctgcagcccatcagacacgacctgcagcccgaccccggcgacggcacccacagcagcgcctactgccccgactacaccgtgagagccctgagcgacctgcagctgatcaaggtgaccagactgcagtacctgaacgccctgctggccaccagagcccagaacctgccccagagccccgagaacaccgacctgcaggtgatccccggcagccagaccagactgctgggcgagaagaccaccaccgccgccggcagcagccacagcagacccggcgtgcccgtggagggcagccccggcagaaaccccggcgtgtag

SEQ ID NO: 78030 - DNA, 2043 bp, synthetic construct
  misc_feature 1..2043: note = Description of Artificial Sequence: Synthetic coding sequence
  source 1..2043: mol_type = other DNA
atggccgccgccgtggccgccgccggcagactgggctggctgttcgccgccctgtgcctgggcaacgccgccggcgaggccgcccccggccccagagtgctgggcttctgcctggaggaggacggcgccgccggcgccggctgggtgagaggcggcgccgccagagacacccccgacgccaccttcctgctgagactgttcggccccggcttcgccaacagcagctggagctgggtggcccccgagggcgccggctgcagagaggaggccgccagccccgccggcgagtggagagccctgctgagactgagactgagagccgaggccgtgagaccccacagcgccctgctggccgtgagagtggagcccggcggcggcgccgccgaggaggccgcccccccctgggccctgggcctgggcgccgccggcctgctggccctggccgccctggccagaggcctgcagctgagcgccctggccctggcccccgccgaggtgcaggtgctgagagagagcggcagcgaggccgagagagccgccgccagaagactggagcccgccagaagatgggccggctgcgccctgggcgccctgctgctgctggccagcctggcccaggccgccctggccgtgctgctgtacagagccgccggccagagagccgtgcccgccgtgctgggcagcgccggcctggtgttcctggtgggcgaggtggtgcccgccgccgtgagcggcagatggaccctggccctggcccccagagccctgggcctgagcagactggccgtgctgctgaccctgcccgtggccctgcccgtgggccagctgctggagctggccgccagacccggcagactgagagagagagtgctggagctggccagaggcggcggcgacccctacagcgacctgagcaagggcgtgctgagatgcagaaccgtggaggacgtgctgacccccctggaggactgcttcatgctggacgccagcaccgtgctggacttcggcgtgctggccagcatcatgcagagcggccacaccagaatccccgtgtacgaggaggagagaagcaacatcgtggacatgctgtacctgaaggacctggccttcgtggaccccgaggactgcacccccctgagcaccatcaccagattctacaaccaccccctgcacttcgtgttcaacgacaccaagctggacgccgtgctggaggagttcaagagaggcgacaccgtggtgaagagaaagcccgccagcctgatggcccccctgaagagaaaggaggagttcagcctgttcaaggtgagcgacgacgagtacaaggtgaccatcagcccccagctgctgctggccacccagagattcctgagcagagaggtggacgtgttcagccccctgagaatcagcgagaaggtgctgctgcacctgctgaagcaccccagcgtgaaccaggaggtgagattcgacgagagcaacagactggccacccaccactacctgtaccagagaagccagcccgtggactacttcatcctgatcctgcagggcagagtggaggtggagatcggcaaggagggcctgaagttcgagaacggcgccttcacctactacggcgtgagcgccctgaccgtgcccagcagcgtgcaccagagccccgtgagcagcctgcagcccatcagacacgacctgcagcccgaccccggcgacggcacccacagcagcgcctactgccccgactacaccgtgagagccctgagcgacctgcagctgatcaaggtgaccagactgcagtacctgaacgccctgctggccaccagagcccagaacctgccccagagccccgagaacaccgacctgcaggtgatccccggcagccagaccagactgctgggcgagaagaccaccaccgccgccggcagcagccacagcagacccagcctgcccctgctgcccagaggcagagacagcgccgcctacagcgacagcgacctgttcggcctgagccacctggtgagcgccgtgaccgccttcgtgtggccctag

SEQ ID NO: 78031 - DNA, 2328 bp, synthetic construct
  misc_feature 1..2328: note = Description of Artificial Sequence: Synthetic coding sequence
  source 1..2328: mol_type = other DNA
atggcccccgtgggcggcggcggcagacccgtgggcggccccgccagaggcagactgctgctggccgcccccgtgctgctggtgctgctgtgggccctgggcgccagaggccagggcagcccccagcagggcaccatcgtgggcatgagactggccagctgcaacaagagctgcggcaccaaccccgacggcatcatcttcgtgagcgagggcagcaccgtgaacctgagactgtacggctacagcctgggcaacatcagcagcaacctgatcagcttcaccgaggtggacgacgccgagaccctgcacaagagcaccagctgcctggagctgaccaaggacctggtggtgcagcagctggtgaacgtgagcagaggcaacaccagcggcgtgctggtggtgctgaccaagttcctgagaagaagcgagagcatgaagctgtacgccctgtgcaccagagcccagcccgacggcccctggctgaagtggaccgacaaggacagcctgctgttcatggtggaggagcccggcagattcctgcccctgtggctgcacatcctgctgatcaccgtgctgctggtgctgagcggcatcttcagcggcctgaacctgggcctgatggccctggaccccatggagctgagaatcgtgcagaactgcggcaccgagaaggagagaagatacgccagaaagatcgagcccatcagaagaaagggcaactacctgctgtgcagcctgctgctgggcaacgtgctggtgaacaccagcctgaccatcctgctggacaacctgatcggcagcggcctgatggccgtggccagcagcaccatcggcatcgtgatcttcggcgagatcctgccccaggccctgtgcagcagacacggcctggccgtgggcgccaacaccatcctgctgaccaagttcttcatgctgctgaccttccccctgagcttccccatcagcaagctgctggacttcttcctgggccaggagatcagaaccgtgtacaacagagagaagctgatggagatgctgaaggtgaccgagccctacaacgacctggtgaaggaggagctgaacatgatccagggcgccctggagctgagaaccaagaccgtggaggacatcatgacccagctgcaggactgcttcatgatcagaagcgacgccatcctggacttcaacaccatgagcgagatcatggagagcggctacaccagaatccccgtgttcgaggacgagcagagcaacatcgtggacatcctgtacgtgaaggacctggccttcgtggaccccgacgactgcacccccctgaagaccatcaccagattctacaaccaccccgtgcacttcgtgttccacgacaccaagctggacgccatgctggaggagttcaagaagggcaagagccacctggccatcgtgcagaaggtgaacaacgagggcgagggcgaccccttctacgaggtgctgggcctggtgaccctggaggacgtgatcgaggagatcatcaagagcgagatcctggacgagagcgacatgtacaccgacaacagaagcagaaagagagtgagcgagaagaacaagagagacttcagcgccttcaaggacgccgacaacgagctgaaggtgaagatcagcccccagctgctgctggccgcccacagattcctggccaccgaggtgagccagttcagccccagcctgatcagcgagaagatcctgctgagactgctgaagtaccccgacgtgatccaggagctgaagttcgacgagcacaacaagtactacgccagacactacctgtacaccagaaacaagcccgccgactacttcatcctgatcctgcagggcaaggtggaggtggaggccggcaaggagaacatgaagttcgagaccggcgccttcagctactacggcaccatggccctgaccagcgtgcccagcgacagaagccccgcccaccccacccccctgagcagaagcgccagcctgagctaccccgacagaaccgacgtgagcaccgccgccaccctggccggcagcagcaaccagttcggcagcagcgtgctgggccagtacatcagcgacttcagcgtgagagccctggtggacctgcagtacatcaagatcaccagacagcagtaccagaacggcctgctggccagcagaatggagaacagcccccagttccccatcgacggctgcaccacccacatggagaacctggccgagaagagcgagctgcccgtggtggacgagaccaccaccctgctgaacgagagaaacagcctgctgcacaaggccagccacgagaacgccatctag

SEQ ID NO: 78032 - DNA, 792 bp, synthetic construct
  misc_feature 1..792: note = Description of Artificial Sequence: Synthetic coding sequence
  source 1..792: mol_type = other DNA
atgtacaccgacaacagaagcagaaagagagtgagcgagaagaacaagagagacttcagcgccttcaaggacgccgacaacgagctgaaggtgaagatcagcccccagctgctgctggccgcccacagattcctggccaccgaggtgagccagttcagccccagcctgatcagcgagaagatcctgctgagactgctgaagtaccccgacgtgatccaggagctgaagttcgacgagcacaacaagtactacgccagacactacctgtacaccagaaacaagcccgccgactacttcatcctgatcctgcagggcaaggtggaggtggaggccggcaaggagaacatgaagttcgagaccggcgccttcagctactacggcaccatggccctgaccagcgtgcccagcgacagaagccccgcccaccccacccccctgagcagaagcgccagcctgagctaccccgacagaaccgacgtgagcaccgccgccaccctggccggcagcagcaaccagttcggcagcagcgtgctgggccagtacatcagcgacttcagcgtgagagccctggtggacctgcagtacatcaagccccagagctggccctgcttcagcagacccggcgacagagtgtgcctgcccgccccccccagcatgaacagcagcctgccccacgccgaccacagcgccgccgtgcccgagagagccgccggcttcagccacggcgagcagcccagcgtgagccacagaagagtgcaccacccccacggcgagctgggcagagaggtgtag

SEQ ID NO: 78033 - DNA, 2193 bp, synthetic construct
  misc_feature 1..2193: note = Description of Artificial Sequence: Synthetic coding sequence
  source 1..2193: mol_type = other DNA
atggccagcggcagaggcgccagcagcagatggttcttcaccagagagcagctggagaacacccccagcagaagatgcggcgtggaggccgacaaggagctgagctgcagacagcaggccgccaacctgatccaggagatgggccagagactgaacgtgagccagctgaccatcaacaccgccatcgtgtacatgcacagattctacatgcaccacagcttcaccaagttcaacaagaacatcatcagcagcaccgccctgttcctggccgccaaggtggaggagcaggccagaaagctggagcacgtgatcaaggtggcccacgcctgcctgcaccccctggagcccctgctggacaccaagtgcgacgcctacctgcagcagacccaggagctggtgatcctggagaccatcatgctgcagaccctgggcttcgagatcaccatcgagcacccccacaccgacgtggtgaagtgcacccagctggtgagagccagcaaggacctggcccagaccagctacttcatggccaccaacagcctgcacctgaccaccttctgcctgcagtacaagcccaccgtgatcgcctgcgtgtgcatccacctggcctgcaagtggagcaactgggagatccccgtgagcaccgacggcaagcactggtgggagtacgtggaccccaccgtgaccctggagctgctggacgagctgacccacgagttcctgcagatcctggagaagacccccaacagactgaagaagatcagaaactggagagccaaccaggccgccagaaagcccaaggtggacggccaggtgagcgagacccccctgctgggcagcagcctggtgcagaacagcatcctggtggacagcgtgaccggcgtgcccaccaaccccagcttccagaagcccagcaccagcgccttccccgcccccgtgcccctgaacagcggcaacatcagcgtgcaggacagccacaccagcgacaacctgagcatgctggccaccggcatgcccagcaccagctacggcctgagcagccaccaggagtggccccagcaccaggacagcgccagaaccgagcagctgtacagccagaagcaggagaccagcctgagcggcagccagtacaacatcaacttccagcagggccccagcatcagcctgcacagcggcctgcaccacagacccgacaagatcagcgaccacagcagcgtgaagcaggagtacacccacaaggccggcagcagcaagcaccacggccccatcagcaccacccccggcatcatcccccagaagatgagcctggacaagtacagagagaagagaaagctggagaccctggacctggacgtgagagaccactacatcgccgcccaggtggagcagcagcacaagcagggccagagccaggccgccagcagcagcagcgtgaccagccccatcaagatgaagatccccatcgccaacaccgagaagtacatggccgacaagaaggagaagagcggcagcctgaagctgagaatccccatcccccccaccgacaagagcgccagcaaggaggagctgaagatgaagatcaaggtgagcagcagcgagagacacagcagcagcgacgagggcagcggcaagagcaagcacagcagcccccacatcagcagagaccacaaggagaagcacaaggagcaccccagcagcagacaccacaccagcagccacaagcacagccacagccacagcggcagcagcagcggcggcagcaagcacagcgccgacggcatcccccccaccgtgctgagaagccccgtgggcctgagcagcgacggcatcagcagcagcagcagcagcagcagaaagagactgcacgtgaacgacgccagccacaaccaccacagcaagatgagcaagagcagcaagagcagcggcagcagcagcagcagcagcagcagcgtgaagcagtacatcagcagccacaacagcgtgttcaaccaccccctgcccccccccccccccgtgacctaccaggtgggctacggccacctgagcaccctggtgaagctggacaagaagcccgtggagaccaacggccccgacgccaaccacgagtacagcaccagcagccagcacatggactacaaggacaccttcgacatgctggacagcctgctgagcgcccagggcatgaacatgtag

SEQ ID NO: 78034 - DNA, 1992 bp, synthetic construct
  misc_feature 1..1992: note = Description of Artificial Sequence: Synthetic coding sequence
  source 1..1992: mol_type = other DNA
atggccagcggcagaggcgccagcagcagatggttcttcaccagagagcagctggagaacacccccagcagaagatgcggcgtggaggccgacaaggagctgagctgcagacagcaggccgccaacctgatccaggagatgggccagagactgaacgtgagccagctgaccatcaacaccgccatcgtgtacatgcacagattctacatgcaccacagcttcaccaagttcaacaagaacatcatcagcagcaccgccctgttcctggccgccaaggtggaggagcaggccagaaagctggagcacgtgatcaaggtggcccacgcctgcctgcaccccctggagcccctgctggacaccaagtgcgacgcctacctgcagcagacccaggagctggtgatcctggagaccatcatgctgcagaccctgggcttcgagatcaccatcgagcacccccacaccgacgtggtgaagtgcacccagctggtgagagccagcaaggacctggcccagaccagctacttcatggccaccaacagcctgcacctgaccaccttctgcctgcagtacaagcccaccgtgatcgcctgcgtgtgcatccacctggcctgcaagtggagcaactgggagatccccgtgagcaccgacggcaagcactggtgggagtacgtggaccccaccgtgaccctggagctgctggacgagctgacccacgagttcctgcagatcctggagaagacccccaacagactgaagaagatcagaaactggagagccaaccaggccgccagaaagcccaaggtggacggccaggtgagcgagacccccctgctgggcagcagcctggtgcagaacagcatcctggtggacagcgtgaccggcgtgcccaccaaccccagcttccagaagcccagcaccagcgccttccccgcccccgtgcccctgaacagcggcaacatcagcgtgcaggacagccacaccagcgacaacctgagcatgctggccaccggcatgcccagcaccagctacggcctgagcagccaccaggagtggccccagcaccaggacagcgccagaaccgagcagctgtacagccagaagcaggagaccagcctgagcggcagccagtacaacatcaacttccagcagggccccagcatcagcctgcacagcggcctgcaccacagacccgacaagatcagcgaccacagcagcgtgaagcaggagtacacccacaaggccggcagcagcaagcaccacggccccatcagcaccacccccggcatcatcccccagaagatgagcctggacaagtacagagagaagagaaagctggagaccctggacctggacgtgagagaccactacatcgccgcccaggtggagcagcagcacaagcagggccagagccaggccgccagcagcagcagcgtgaccagccccatcaagatgaagatccccatcgccaacaccgagaagtacatggccgacaagaaggagaagagcggcagcctgaagctgagaatccccatcccccccaccgacaagagcgccagcaaggaggagctgaagatgaagatcaaggtgagcagcagcgagagacacagcagcagcgacgagggcagcggcaagagcaagcacagcagcccccacatcagcagagaccacaaggagaagcacaaggagcaccccagcagcagacaccacaccagcagccacaagcacagccacagccacagcggcagcagcagcggcggcagcaagcacagcgccgacggcatcccccccaccgtgctgagaagccccgtgggcctgagcagcgacggcatcagcagcagcagcagcagcagcagaaagagactgcacgtgaacgacgccagccacaaccaccacagcaagatgagcaagagcagcaagagcagcggcggcctgagaaccagccagcaccccagagagaccggccaggaggccagcggcgaccagagaagctag

SEQ ID NO: 78035 - DNA, 1467 bp, synthetic construct
  misc_feature 1..1467: note = Description of Artificial Sequence: Synthetic coding sequence
  source 1..1467: mol_type = other DNA
atggccaccaacagcctgcacctgaccaccttctgcctgcagtacaagcccaccgtgatcgcctgcgtgtgcatccacctggcctgcaagtggagcaactgggagatccccgtgagcaccgacggcaagcactggtgggagtacgtggaccccaccgtgaccctggagctgctggacgagctgacccacgagttcctgcagatcctggagaagacccccaacagactgaagaagatcagaaactggagagccaaccaggccgccagaaagcccaaggtggacggccaggtgagcgagacccccctgctgggcagcagcctggtgcagaacagcatcctggtggacagcgtgaccggcgtgcccaccaaccccagcttccagaagcccagcaccagcgccttccccgcccccgtgcccctgaacagcggcaacatcagcgtgcaggacagccacaccagcgacaacctgagcatgctggccaccggcatgcccagcaccagctacggcctgagcagccaccaggagtggccccagcaccaggacagcgccagaaccgagcagctgtacagccagaagcaggagaccagcctgagcggcagccagtacaacatcaacttccagcagggccccagcatcagcctgcacagcggcctgcaccacagacccgacaagatcagcgaccacagcagcgtgaagcaggagtacacccacaaggccggcagcagcaagcaccacggccccatcagcaccacccccggcatcatcccccagaagatgagcctggacaagtacagagagaagagaaagctggagaccctggacctggacgtgagagaccactacatcgccgcccaggtggagcagcagcacaagcagggccagagccaggccgccagcagcagcagcgtgaccagccccatcaagatgaagatccccatcgccaacaccgagaagtacatggccgacaagaaggagaagagcggcagcctgaagctgagaatccccatcccccccaccgacaagagcgccagcaaggaggagctgaagatgaagatcaaggtgagcagcagcgagagacacagcagcagcgacgagggcagcggcaagagcaagcacagcagcccccacatcagcagagaccacaaggagaagcacaaggagcaccccagcagcagacaccacaccagcagccacaagcacagccacagccacagcggcagcagcagcggcggcagcaagcacagcgccgacggcatcccccccaccgtgctgagaagccccgtgggcctgagcagcgacggcatcagcagcagcagcagcagcagcagaaagagactgcacgtgaacgacgccagccacaaccaccacagcaagatgagcaagagcagcaagagcagcggcggcctgagaaccagccagcaccccagagagaccggccaggaggccagcggcgaccagagaagctag

SEQ ID NO: 78036 - DNA, 864 bp, synthetic construct
  misc_feature 1..864: note = Description of Artificial Sequence: Synthetic coding sequence
  source 1..864: mol_type = other DNA
atggagttcaaccccagcgaccaccccagagccagcaccatcttcctgagcaagagccagaccgacgtgagagagaagagaaagagcctgttcatcaaccaccacccccccggccagatcgccagaaagtacagcagctgcagcaccatcttcctggacgacagcaccgtgagccagcccaacctgaagtacaccatcaagtgcgtggccctggccatctactaccacatcaagaacagagaccccgacggcagaatgctgctggacatcttcgacgagaacctgcaccccctgagcaagagcgaggtgccccccgactacgacaagcacaaccccgagcagaagcagatctacagattcgtgagaaccctgttcagcgccgcccagctgaccgccgagtgcgccatcgtgaccctggtgtacctggagagactgctgacctacgccgagatcgacatctgccccgccaactggaagagaatcgtgctgggcgccatcctgctggccagcaaggtgtgggacgaccaggccgtgtggaacgtggactactgccagatcctgaaggacatcaccgtggaggacatgaacgagctggagagacagttcctggagctgctgcagttcaacatcaacgtgcccagcagcgtgtacgccaagtactacttcgacctgagaagcctggccgaggccaacaacctgagcttccccctggagcccctgagcagagagagagcccacaagctggaggccatcagcagactgtgcgaggacaagtacaaggacctgagaagaagcgccagaaagagaagcgccagcgccgacaacctgaccctgcccagatggagccccgccatcatcagctag

SEQ ID NO: 78037 - DNA, 951 bp, synthetic construct
  misc_feature 1..951: note = Description of Artificial Sequence: Synthetic coding sequence
  source 1..951: mol_type = other DNA
atgggcaacaccaccagctgctgcgtgagcagcagccccaagctgagaagaaacgcccacagcagactggagagctacagacccgacaccgacctgagcagagaggacaccggctgcaacctgcagcacatcagcgacagagagaacatcgacgtgagagagaagagaaagagcctgttcatcaaccaccacccccccggccagatcgccagaaagtacagcagctgcagcaccatcttcctggacgacagcaccgtgagccagcccaacctgaagtacaccatcaagtgcgtggccctggccatctactaccacatcaagaacagagaccccgacggcagaatgctgctggacatcttcgacgagaacctgcaccccctgagcaagagcgaggtgccccccgactacgacaagcacaaccccgagcagaagcagatctacagattcgtgagaaccctgttcagcgccgcccagctgaccgccgagtgcgccatcgtgaccctggtgtacctggagagactgctgacctacgccgagatcgacatctgccccgccaactggaagagaatcgtgctgggcgccatcctgctggccagcaaggtgtgggacgaccaggccgtgtggaacgtggactactgccagatcctgaaggacatcaccgtggaggacatgaacgagctggagagacagttcctggagctgctgcagttcaacatcaacgtgcccagcagcgtgtacgccaagtactacttcgacctgagaagcctggccgaggccaacaacctgagcttccccctggagcccctgagcagagagagagcccacaagctggaggccatcagcagactgtgcgaggacaagtacaaggacctgagaagaagcgccagaaagagaagcgccagcgccgacaacctgaccctgcccagatggagccccgccatcatcagctag

SEQ ID NO: 78038 - DNA, 1026 bp, synthetic construct
  misc_feature 1..1026: note = Description of Artificial Sequence: Synthetic coding sequence
  source 1..1026: mol_type = other DNA
atgggcaacaccaccagctgctgcgtgagcagcagccccaagctgagaagaaacgcccacagcagactggagagctacagacccgacaccgacctgagcagagaggacaccggctgcaacctgcagcacatcagcgacagagagaacatcgacgacctgaacatggagttcaaccccagcgaccaccccagagccagcaccatcttcctgagcaagagccagaccgacgtgagagagaagagaaagagcctgttcatcaaccaccacccccccggccagatcgccagaaagtacagcagctgcagcaccatcttcctggacgacagcaccgtgagccagcccaacctgaagtacaccatcaagtgcgtggccctggccatctactaccacatcaagaacagagaccccgacggcagaatgctgctggacatcttcgacgagaacctgcaccccctgagcaagagcgaggtgccccccgactacgacaagcacaaccccgagcagaagcagatctacagattcgtgagaaccctgttcagcgccgcccagctgaccgccgagtgcgccatcgtgaccctggtgtacctggagagactgctgacctacgccgagatcgacatctgccccgccaactggaagagaatcgtgctgggcgccatcctgctggccagcaaggtgtgggacgaccaggccgtgtggaacgtggactactgccagatcctgaaggacatcaccgtggaggacatgaacgagctggagagacagttcctggagctgctgcagttcaacatcaacgtgcccagcagcgtgtacgccaagtactacttcgacctgagaagcctggccgaggccaacaacctgagcttccccctggagcccctgagcagagagagagcccacaagctggaggccatcagcagactgtgcgaggacaagtacaaggacctgagaagaagcgccagaaagagaagcgccagcgccgacaacctgaccctgcccagatggagccccgccatcatcagctag

SEQ ID NO: 78039 - DNA, 864 bp, synthetic construct; identical to SEQ ID NO: 78036
  misc_feature 1..864: note = Description of Artificial Sequence: Synthetic coding sequence
  source 1..864: mol_type = other DNA

SEQ ID NO: 78040 - DNA, 627 bp, synthetic construct
  misc_feature 1..627: note = Description of Artificial Sequence: Synthetic coding sequence
  source 1..627: mol_type = other DNA
atggaccccgacggcagaatgctgctggacatcttcgacgagaacctgcaccccctgagcaagagcgaggtgccccccgactacgacaagcacaaccccgagcagaagcagatctacagattcgtgagaaccctgttcagcgccgcccagctgaccgccgagtgcgccatcgtgaccctggtgtacctggagagactgctgacctacgccgagatcgacatctgccccgccaactggaagagaatcgtgctgggcgccatcctgctggccagcaaggtgtgggacgaccaggccgtgtggaacgtggactactgccagatcctgaaggacatcaccgtggaggacatgaacgagctggagagacagttcctggagctgctgcagttcaacatcaacgtgcccagcagcgtgtacgccaagtactacttcgacctgagaagcctggccgaggccaacaacctgagcttccccctggagcccctgagcagagagagagcccacaagctggaggccatcagcagactgtgcgaggacaagtacaaggacctgagaagaagcgccagaaagagaagcgccagcgccgacaacctgaccctgcccagatggagccccgccatcatcagctag

SEQ ID NO: 78041 - DNA, 1026 bp, synthetic construct; identical to SEQ ID NO: 78038
  misc_feature 1..1026: note = Description of Artificial Sequence: Synthetic coding sequence
  source 1..1026: mol_type = other DNA

SEQ ID NO: 78042 - DNA, 942 bp, synthetic construct
  misc_feature 1..942: note = Description of Artificial Sequence: Synthetic coding sequence
  source 1..942: mol_type = other DNA
atggagcccatgtaccaggacagagccagagacacccagaccgacgagatcgtggccctgaagaaggtgagaatggacaaggagaaggacggcatccccatcagcagcctgagagagatcaccctgctgctgagactgagacaccccaacatcgtggagctgaaggaggtggtggtgggcaaccacctggagagcatcttcctggtgatgggctactgcgagcaggacctggccagcctgctggagaacatgcccacccccttcagcgaggcccaggtgaagtgcatcgtgctgcaggtgctgagaggcctgcagtacctgcacagaaacttcatcatccacagagacctgaaggtgagcaacctgctgatgaccgacaagggctgcgtgaagaccgccgacttcggcctggccagagcctacggcgtgcccgtgaagcccatgacccccaaggtggtgaccctgtggtacagagcccccgagctgctgctgggcaccaccacccagaccaccagcatcgacatgtgggccgtgggctgcatcctggccgagctgctggcccacagacccctgctgcccggcaccagcgagatccaccagatcgacctgatcgtgcagctgctgggcacccccagcgagaacatctggcccggcttcagcaagctgcccctggtgggccagtacagcctgagaaagcagccctacaacaacctgaagcacaagttcccctggctgagcgaggccggcctgagactgctgcacttcctgttcatgtacgaccccaagaagagagccaccgccggcgactgcctggagagcagctacttcaaggagaagcccctgccctgcgagcccgagctgatgcccaccttcccccaccacagaaacaagagagccgcccccgccaccagcgagggccagagcaagagatgcaagccctag

SEQ ID NO: 78043 - DNA, 1083 bp, synthetic construct
  misc_feature 1..1083: note = Description of Artificial Sequence: Synthetic coding sequence
  source 1..1083: mol_type = other DNA
atggccgagcccgacctggagtgcgagcagatcagactgaagtgcatcagaaaggagggcttcttcaccgtgccccccgagcacagactgggcagatgcagaagcgtgaaggagttcgagaagctgaacagaatcggcgagggcacctacggcatcgtgtacagagccagagacacccagaccgacgagatcgtggccctgaagaaggtgagaatggacaaggagaaggacggcatccccatcagcagcctgagagagatcaccctgctgctgagactgagacaccccaacatcgtggagctgaaggaggtggtggtgggcaaccacctggagagcatcttcctggtgatgggctactgcgagcaggacctggccagcctgctggagaacatgcccacccccttcagcgaggcccaggtgaagtgcatcgtgctgcaggtgctgagaggcctgcagtacctgcacagaaacttcatcatccacagagacctgaaggtgagcaacctgctgatgaccgacaagggctgcgtgaagaccgccgacttcggcctggccagagcctacggcgtgcccgtgaagcccatgacccccaaggtggtgaccctgtggtacagagcccccgagctgctgctgggcaccaccacccagaccaccagcatcgacatgtgggccgtgggctgcatcctggccgagctgctggcccacagacccctgctgcccggcaccagcgagatccaccagatcgacctgatcgtgcagctgctgggcacccccagcgagaacatctggcccggcttcagcaagctgcccctggtgggccagtacagcctgagaaagcagccctacaacaacctgaagcacaagttcccctggctgagcgaggccggcctgagactgctgcacttcctgttcatgtacgaccccaagaagagagccaccgccggcgactgcctggagagcagctacttcaaggagaagcccctgccctgcgagcccgagctgatgcccaccttcccccaccacagaaacaagagagccgcccccgccaccagcgagggccagagcaagagatgcaagccctag

SEQ ID NO: 78044 - DNA, 819 bp, synthetic construct
  misc_feature 1..819: note = Description of Artificial Sequence: Synthetic coding sequence
  source 1..819: mol_type = other DNA
atggacaaggagaaggacggcatccccatcagcagcctgagagagatcaccctgctgctgagactgagacaccccaacatcgtggagctgaaggaggtggtggtgggcaaccacctggagagcatcttcctggtgatgggctactgcgagcaggacctggccagcctgctggagaacatgcccacccccttcagcgaggcccaggtgaagtgcatcgtgctgcaggtgctgagaggcctgcagtacctgcacagaaacttcatcatccacagagacctgaaggtgagcaacctgctgatgaccgacaagggctgcgtgaagaccgccgacttcggcctggccagagcctacggcgtgcccgtgaagcccatgacccccaaggtggtgaccctgtggtacagagcccccgagctgctgctgggcaccaccacccagaccaccagcatcgacatgtgggccgtgggctgcatcctggccgagctgctggcccacagacccctgctgcccggcaccagcgagatccaccagatcgacctgatcgtgcagctgctgggcacccccagcgagaacatctggcccggcttcagcaagctgcccctggtgggccagtacagcctgagaaagcagccctacaacaacctgaagcacaagttcccctggctgagcgaggccggcctgagactgctgcacttcctgttcatgtacgaccccaagaagagagccaccgccggcgactgcctggagagcagctacttcaaggagaagcccctgagactgcccatcagcggcgtgtgcgagggctgcagagagcccggctag

SEQ ID NO: 78045 - DNA, 504 bp, synthetic construct
  misc_feature 1..504: note = Description of Artificial Sequence: Synthetic coding sequence
  source 1..504: mol_type = other DNA
atgggcaagaccgaggagaagggcaacggcaagggcgccttccaggagagaaagggccccctgggcgccgtgagaaaggaggccggcgccggcgcccaggacgccggcgccgccgagggcgccgccgtgaagaagatgaccttcagcgagcacccctacaacaacctgagaaagagattcggcgccctgctgagcgaccagggcttcgacctgatgaacaagttcctgacctacttccccggcagaagaatcagcgccgaggacggcctgaagcacgagtacttcagagagacccccctgcccatcgaccccagcatgttccccacctggcccgccaagagcgagcagcagagagtgaagagaggcaccagccccagaccccccgagggcggcctgggctacagccagctgggcgacgacgacctgaaggagaccggcttccacctgaccaccaccaaccagggcgccagcgccgccggccccggcttcagcctgaagttctag

SEQ ID NO: 78046 - DNA, 2241 bp, synthetic construct
  misc_feature 1..2241: note = Description of Artificial Sequence: Synthetic coding sequence
  source 1..2241: mol_type = other DNA
atgagccagagcgacgacagagacagcaagagagacagcctggaggagggcgagctgagagaccactgcatggagatcaccatcagaaacagcccctacagaagagaggacagcatggaggacagaggcgaggaggacgacagcctggccatcaagcccccccagcagatgagcagaaaggagaaggtgcaccacagaaaggacgagaagagaaaggagaagtgcagacaccacagccacagcgccgagggcggcaagcacgccagagtgaaggagagagagcacgagagaagaaagagacacagagaggagcaggacaaggccagaagagagtgggagagacagaagagaagagagatggccagagagcacagcagaagagagagagacagactggagcagctggagagaaagagagagagagagagaaagatgagagagcagcagaaggagcagagagagcagaaggagagagagagaagagccgaggagagaagaaaggagagagaggccagaagagaggtgagcgcccaccacagaaccatgagagaggactacagcgacaaggtgaaggccagccactggagcagaagcccccccagaccccccagagagagattcgagctgggcgacggcagaaagcccgtgaaggaggagaagatggaggagagagacctgctgagcgacctgcaggacatcagcgacagcgagagaaagaccagcagcgccgagagcagcagcgccgagagcggcagcggcagcgaggaggaggaggaggaggaggaggaggaggaggaggagggcagcaccagcgaggagagcgaggaggaggaggaggaggaggaggaggaggaggaggagaccggcagcaacagcgaggaggccagcgagcagagcgccgaggaggtgagcgaggaggagatgagcgaggacgaggagagagagaacgagaaccacctgctggtggtgcccgagagcagattcgacagagacagcggcgagagcgaggaggccgaggaggaggtgggcgagggcaccccccagagcagcgccctgaccgagggcgactacgtgcccgacagccccgccctgctgcccatcgagctgaagcaggagctgcccaagtacctgcccgccctgcagggctgcagaagcgtggaggagttccagtgcctgaacagaatcgaggagggcacctacggcgtggtgtacagagccaaggacaagaagaccgacgagatcgtggccctgaagagactgaagatggagaaggagaaggagggcttccccatcaccagcctgagagagatcaacaccatcctgaaggcccagcaccccaacatcgtgaccgtgagagagatcgtggtgggcagcaacatggacaagatctacatcgtgatgaactacgtggagcacgacctgaagagcctgatggagaccatgaagcagcccttcctgcccggcgaggtgaagaccctgatgatccagctgctgagaggcgtgaagcacctgcacgacaactggatcctgcacagagacctgaagaccagcaacctgctgctgagccacgccggcatcctgaaggtgggcgacttcggcctggccagagagtacggcagccccctgaaggcctacacccccgtggtggtgacccagtggtacagagcccccgagctgctgctgggcgccaaggagtacagcaccgccgtggacatgtggagcgtgggctgcatcttcggcgagctgctgacccagaagcccctgttccccggcaacagcgagatcgaccagatcaacaaggtgttcaaggagctgggcacccccagcgagaagatctggcccggctacagcgagctgcccgtggtgaagaagatgaccttcagcgagcacccctacaacaacctgagaaagagattcggcgccctgctgagcgaccagggcttcgacctgatgaacaagttcctgacctacttccccggcagaagaatcagcgccgaggacggcctgaagcacgagtacttcagagagacccccctgcccatcgaccccagcatgttccccacctggcccgccaagagcgagcagcagagagtgaagagaggcaccagccccagaccccccgagggcggcctgggctacagccagctgggcgacgacgacctgaaggagaccggcttccacctgaccaccaccaaccagggcgccagcgccgccggccccggcttcagcctgaagttctag

SEQ ID NO: 78047 - DNA, 2340 bp, synthetic construct
  misc_feature 1..2340: note = Description of Artificial Sequence: Synthetic coding sequence
  source 1..2340: mol_type = other DNA
atgggcgacgagaaggacagctggaaggtgaagaccctggacgagatcctgcaggagaagaagagaagaaaggagcaggaggagaaggccgagatcaagagactgaagaacagcgacgacagagacagcaagagagacagcctggaggagggcgagctgagagaccactgcatggagatcaccatcagaaacagcccctacagaagagaggacagcatggaggacagaggcgaggaggacgacagcctggccatcaagcccccccagcagatgagcagaaaggagaaggtgcaccacagaaaggacgagaagagaaaggagaagtggaagcacgccagagtgaaggagagagagcacgagagaagaaagagacacagagaggagcaggacaaggccagaagagagtgggagagacagaagagaagagagatggccagagagcacagcagaagagagagaggcaacgacggcgtgtgcctgttcagagacagactggagcagctggagagaaagagagagagagagagaaagatgagagagcagcagaaggagcagagagagcagaaggagagagagagaagagccgaggagagaagaaaggagagagaggccagaagagaggtgagcgcccaccacagaaccatgagagaggactacagcgacaaggtgaaggccagccactggagcagaagcccccccagaccccccagagagagattcgagctgggcgacggcagaaagcccgtgaaggaggagaagatggaggagagagacctgctgagcgacctgcaggacatcagcgacagcgagagaaagaccagcagcgccgagagcagcagcgccgagagcggcagcggcagcgaggaggaggaggaggaggaggaggaggaggaggaggagggcagcaccagcgaggagagcgaggaggaggaggaggaggaggaggaggaggaggaggagaccggcagcaacagcgaggaggccagcgagcagagcgccgaggaggtgagcgaggaggagatgagcgaggacgaggagagagagaacgagaaccacctgctggtggtgcccgagagcagattcgacagagacagcggcgagagcgaggaggccgaggaggaggtgggcgagggcaccccccagagcagcgccctgaccgagggcgactacgtgcccgacagccccgccctgctgcccatcgagctgaagcaggagctgcccaagtacctgcccgccctgcagggctgcagaagcgtggaggagttccagtgcctgaacagaatcgaggagggcacctacggcgtggtgtacagagccaaggacaagaagaccgacgagatcgtggccctgaagagactgaagatggagaaggagaaggagggcttccccatcaccagcctgagagagatcaacaccatcctgaaggcccagcaccccaacatcgtgaccgtgagagagatcgtggtgggcagcaacatggacaagatctacatcgtgatgaactacgtggagcacgacctgaagagcctgatggagaccatgaagcagcccttcctgcccggcgaggtgaagaccctgatgatccagctgctgagaggcgtgaagcacctgcacgacaactggatcctgcacagagacctgaagaccagcaacctgctgctgagccacgccggcatcctgaaggtgggcgacttcggcctggccagagagtacggcagccccctgaaggcctacacccccgtggtggtgacccagtggtacagagcccccgagctgctgctgggcgccaaggagtacagcaccgccgtggacatgtggagcgtgggctgcatcttcggcgagctgctgacccagaagcccctgttccccggcaacagcgagatcgaccagatcaacaaggtgttcaaggagctgggcacccccagcgagaagatctggcccggctacagcgagctgcccgtggtgaagaagatgaccttcagcgagcacccctacaacaacctgagaaagagattcggcgccctgctgagcgaccagggcttcgacctgatgaacaagttcctgacctacttccccggcagaagaatcagcgccgaggacggcctgaagcacgagtacttcagagagacccccctgcccatcgaccccagcatgttccccacctggcccgccaagagcgagcagcagagagtgaagagaggcaccagccccagaccccccgagggcggcctgggctacagccagctgggcgacgacgacctgaaggagaccggcttccacctgaccaccaccaaccagggcgccagcgccgccggccccggcttcagcctgaagttctag

SEQ ID NO: 78048 - DNA, 2313 bp, synthetic construct
  misc_feature 1..2313: note = Description of Artificial Sequence: Synthetic coding sequence
  source 1..2313: mol_type = other DNA
atgggcgacgagaaggacagctggaaggtgaagaccctggacgagatcctgcaggagaagaagagaagaaaggagcaggaggagaaggccgagatcaagagactgaagaacagcgacgacagagacagcaagagagacagcctggaggagggcgagctgagagaccactgcatggagatcaccatcagaaacagcccctacagaagagaggacagcatggaggacagaggcgaggaggacgacagcctggccatcaagcccccccagcagatgagcagaaaggagaaggtgcaccacagaaaggacgagaagagaaaggagaagtggaagcacgccagagtgaaggagagagagcacgagagaagaaagagacacagagaggagcaggacaaggccagaagagagtgggagagacagaagagaagagagatggccagagagcacagcagaagagagagagacagactggagcagctggagagaaagagagagagagagagaaagatgagagagcagcagaaggagcagagagagcagaaggagagagagagaagagccgaggagagaagaaaggagagagaggccagaagagaggtgagcgcccaccacagaaccatgagagaggactacagcgacaaggtgaaggccagccactggagcagaagcccccccagaccccccagagagagattcgagctgggcgacggcagaaagcccgtgaaggaggagaagatggaggagagagacctgctgagcgacctgcaggacatcagcgacagcgagagaaagaccagcagcgccgagagcagcagcgccgagagcggcagcggcagcgaggaggaggaggaggaggaggaggaggaggaggaggagggcagcaccagcgaggagagcgaggaggaggaggaggaggaggaggaggaggaggaggagaccggcagcaacagcgaggaggccagcgagcagagcgccgaggaggtgagcgaggaggagatgagcgaggacgaggagagagagaacgagaaccacctgctggtggtgcccgagagcagattcgacagagacagcggcgagagcgaggaggccgaggaggaggtgggcgagggcaccccccagagcagcgccctgaccgagggcgactacgtgcccgacagccccgccctgctgcccatcgagctgaagcaggagctgcccaagtacctgcccgccctgcagggctgcagaagcgtggaggagttccagtgcctgaacagaatcgaggagggcacctacggcgtggtgtacagagccaaggacaagaagaccgacgagatcgtggccctgaagagactgaagatggagaaggagaaggagggcttccccatcaccagcctgagagagatcaacaccatcctgaaggcccagcaccccaacatcgtgaccgtgagagagatcgtggtgggcagcaacatggacaagatctacatcgtgatgaactacgtggagcacgacctgaagagcctgatggagaccatgaagcagcccttcctgcccggcgaggtgaagaccctgatgatccagctgctgagaggcgtgaagcacctgcacgacaactggatcctgcacagagacctgaagaccagcaacctgctgctgagccacgccggcatcctgaaggtgggcgacttcggcctggccagagagtacggcagccccctgaaggcctacacccccgtggtggtgacccagtggtacagagcccccgagctgctgctgggcgccaaggagtacagcaccgccgtggacatgtggagcgtgggctgcatcttcggcgagctgctgacccagaagcccctgttccccggcaacagcgagatcgaccagatcaacaaggtgttcaaggagctgggcacccccagcgagaagatctggcccggctacagcgagctgcccgtggtgaagaagatgaccttcagcgagcacccctacaacaacctgagaaagagattcggcgccctgctgagcgaccagggcttcgacctgatgaacaagttcctgacctacttccccggcagaagaatcagcgccgaggacggcctgaagcacgagtacttcagagagacccccctgcccatcgaccccagcatgttccccacctggcccgccaagagcgagcagcagagagtgaagagaggcaccagccccagaccccccgagggcggcctgggctacagccagctgggcgacgacgacctgaaggagaccggcttccacctgaccaccaccaaccagggcgccagcgccgccggccccggcttcagcctgaagttctag

SEQ ID NO: 78049 - DNA, 2241 bp, synthetic construct; identical to SEQ ID NO: 78046
  misc_feature 1..2241: note = Description of Artificial Sequence: Synthetic coding sequence
  source 1..2241: mol_type = other DNA

SEQ ID NO: 78050 - DNA, 2352 bp, synthetic construct
  misc_feature 1..2352: note = Description of Artificial Sequence: Synthetic coding sequence
  source 1..2352: mol_type = other DNA
atgggcgacgagaaggacagctggaaggtgaagaccctggacgagatcctgcaggagaagaagagaagaaaggagcaggaggagaaggccgagatcaagagactgaagaacagcgacgacagagacagcaagagagacagcctggaggagggcgagctgagagaccactgcatggagatcaccatcagaaacagcccctacagaagagaggacagcatggaggacagaggcgaggaggacgacagcctggccatcaagcccccccagcagatgagcagaaaggagaaggtgcaccacagaaaggacgagaagagaaaggagaagtggaagcacgccagagtgaaggagagagagcacgagagaagaaagagacacagagaggagcaggacaaggccagaagagagtgggagagacagaagagaagagagatggccagagagcacagcagaagagagagagacagactggagcagctggagagaaagagagagagagagagaaagatgagagagcagcagaaggagcagagagagcagaaggagagagagagaagagccgaggagagaagaaaggagagagaggccagaagagaggtgagcgcccaccacagaaccatgagagaggactacagcgacaaggtgaaggccagccactggagcagaagcccccccagaccccccagagagagattcgagctgggcgacggcagaaagcccggcgaggccagacccgcccccgcccagaagcccgcccagctgaaggaggagaagatggaggagagagacctgctgagcgacctgcaggacatcagcgacagcgagagaaagaccagcagcgccgagagcagcagcgccgagagcggcagcggcagcgaggaggaggaggaggaggaggaggaggaggaggaggagggcagcaccagcgaggagagcgaggaggaggaggaggaggaggaggaggaggaggaggagaccggcagcaacagcgaggaggccagcgagcagagcgccgaggaggtgagcgaggaggagatgagcgaggacgaggagagagagaacgagaaccacctgctggtggtgcccgagagcagattcgacagagacagcggcgagagcgaggaggccgaggaggaggtgggcgagggcaccccccagagcagcgccctgaccgagggcgactacgtgcccgacagccccgccctgctgcccatcgagctgaagcaggagctgcccaagtacctgcccgccctgcagggctgcagaagcgtggaggagttccagtgcctgaacagaatcgaggagggcacctacggcgtggtgtacagagccaaggacaagaagaccgacgagatcgtggccctgaagagactgaagatggagaaggagaaggagggcttccccatcaccagcctgagagagatcaacaccatcctgaaggcccagcaccccaacatcgtgaccgtgagagagatcgtggtgggcagcaacatggacaagatctacatcgtgatgaactacgtggagcacgacctgaagagcctgatggagaccatgaagcagcccttcctgcccggcgaggtgaagaccctgatgatccagctgctgagaggcgtgaagcacctgcacgacaactggatcctgcacagagacctgaagaccagcaacctgctgctgagccacgccggcatcctgaaggtgggcgacttcggcctggccagagagtacggcagccccctgaaggcctacacccccgtggtggtgacccagtggtacagagcccccgagctgctgctgggcgccaaggagtacagcaccgccgtggacatgtggagcgtgggctgcatcttcggcgagctgctgacccagaagcccctgttccccggcaacagcgagatcgaccagatcaacaaggtgttcaaggagctgggcacccccagcgagaagatctggcccggctacagcgagctgcccgtggtgaagaagatgaccttcagcgagcacccctacaacaacctgagaaagagattcggcgccctgctgagcgaccagggcttcgacctgatgaacaagttcctgacctacttccccggcagaagaatcagcgccgaggacggcctgaagcacgagtacttcagagagacccccctgcccatcgaccccagcatgttccccacctggcccgccaagagcgagcagcagagagtgaagagaggcaccagccccagaccccccgagggcggcctgggctacagccagctgggcgacgacgacctgaaggagaccggcttccacctgaccaccaccaaccagggcgccagcgccgccggccccggcttcagcctgaagttctag

SEQ ID NO: 78051 - DNA, 699 bp, synthetic construct
  misc_feature 1..699: note = Description of Artificial Sequence: Synthetic coding sequence
  source 1..699: mol_type = other DNA
atgggcgacgagaaggacagctggaaggtgaagaccctggacgagatcctgcaggagaagaagagaagaaaggagcaggaggagaaggccgagatcaagagactgaagaacagcgacgacagagacagcaagagagacagcctggaggagggcgagctgagagaccactgcatggagatcaccatcagaaacagcccctacagaagagaggacagcatggaggacagaggcgaggaggacgacagcctggccatcaagcccccccagcagatgagcagaaaggagaaggtgcaccacagaaaggacgagaagagaaaggagaagtggaagcacgccagagtgaaggagagagagcacgagagaagaaagagacacagagaggagcaggacaaggccagaagagagtgggagagacagaagagaagagagatggccagagagcacagcagaagagagagcgtgtgcaccagccccaacgacgagagaggcctgcagagacagagcgagagccagcccctggagagccagcccgccagcgccgccgccggcgccgtgagagtgggcagaagacccgaggccagcaagagaagagagaacggcagaaagggccccgccgtgagactgaccggccaccagagacagagagaggaggaccagctgggcagagtgctggtgagcggcatcagactgagattctag

SEQ ID NO: 78052 - DNA, 2241 bp, synthetic construct; identical to SEQ ID NO: 78046
  misc_feature 1..2241: note = Description of Artificial Sequence: Synthetic coding sequence
  source 1..2241: mol_type = other DNA

SEQ ID NO: 78053 - DNA, 114 bp, synthetic construct
  misc_feature 1..114: note = Description of Artificial Sequence: Synthetic coding sequence
  source 1..114: mol_type = other DNA
atgggcgacgagaaggacagctggaaggtgaagaccctggacgagatcctgcaggagaagaagagaagaaaggagcaggaggagaaggccgagatcaagagactgaagaactag

SEQ ID NO: 78054 - DNA, 2343 bp, synthetic construct
  misc_feature 1..2343: note = Description of Artificial Sequence: Synthetic coding sequence
  source 1..2343: mol_type = other DNA
atgggcgacgagaaggacagctggaaggtgaagaccctggacgagatcctgcaggagaagaagagaagaaaggagcaggaggagaaggccgagatcaagagactgaagaacagcgacgacagagacagcaagagagacagcctggaggagggcgagctgagagaccactgcatggagatcaccatcagaaacagcccctacagaagagaggacagcatggaggacagaggcgaggaggacgacagcctggccatcaagcccccccagcagatgagcagaaaggagaaggtgcaccacagaaaggacgagaagagaaaggagaagtgcagacaccacagccacagcgccgagggcggcaagcacgccagagtgaaggagagagagcacgagagaagaaagagacacagagaggagcaggacaaggccagaagagagtgggagagacagaagagaagagagatggccagagagcacagcagaagagagagagacagactggagcagctggagagaaagagagagagagagagaaagatgagagagcagcagaaggagcagagagagcagaaggagagagagagaagagccgaggagagaagaaaggagagagaggccagaagagaggtgagcgcccaccacagaaccatgagagaggactacagcgacaaggtgaaggccagccactggagcagaagcccccccagaccccccagagagagattcgagctgggcgacggcagaaagcccgtgaaggaggagaagatggaggagagagacctgctgagcgacctgcaggacatcagcgacagcgagagaaagaccagcagcgccgagagcagcagcgccgagagcggcagcggcagcgaggaggaggaggaggaggaggaggaggaggaggaggagggcagcaccagcgaggagagcgaggaggaggaggaggaggaggaggaggaggaggaggagaccggcagcaacagcgaggaggccagcgagcagagcgccgaggaggtgagcgaggaggagatgagcgaggacgaggagagagagaacgagaaccacctgctggtggtgcccgagagcagattcgacagagacagcggcgagagcgaggaggccgaggaggaggtgggcgagggcaccccccagagcagcgccctgaccgagggcgactacgtgcccgacagccccgccctgctgcccatcgagctgaagcaggagctgcccaagtacctgcccgccctgcagggctgcagaagcgtggaggagttccagtgcctgaacagaatcgaggagggcacctacggcgtggtgtacagagccaaggacaagaagaccgacgagatcgtggccctgaagagactgaagatggagaaggagaaggagggcttccccatcaccagcctgagagagatcaacaccatcctgaaggcccagcaccccaacatcgtgaccgtgagagagatcgtggtgggcagcaacatggacaagatctacatcgtgatgaactacgtggagcacgacctgaagagcctgatggagaccatgaagcagcccttcctgcccggcgaggtgaagaccctgatgatccagctgctgagaggcgtgaagcacctgcacgacaactggatcctgcacagagacctgaagaccagcaacctgctgctgagccacgccggcatcctgaaggtgggcgacttcggcctggccagagagtacggcagccccctgaaggcctacacccccgtggtggtgacccagtggtacagagcccccgagctgctgctgggcgccaaggagtacagcaccgccgtggacatgtggagcgtgggctgcatcttcggcgagctgctgacccagaagcccctgttccccggcaacagcgagatcgaccagatcaacaaggtgttcaaggagctgggcacccccagcgagaagatctggcccggctacagcgagctgcccgtggtgaagaagatgaccttcagcgagcacccctacaacaacctgagaaagagattcggcgccctgctgagcgaccagggcttcgacctgatgaacaagttcctgacctacttccccggcagaagaatcagcgccgaggacggcctgaagcacgagtacttcagagagacccccctgcccatcgaccccagcatgttccccacctggcccgccaagagcgagcagcagagagtgaagagaggcaccagccccagaccccccgagggcggcctgggctacagccagctgggcgacgacgacctgaaggagaccggcttccacctgaccaccaccaaccagggcgccagcgccgccggccccggcttcagcctgaagttctag

SEQ ID NO: 78055 - DNA, 456 bp, synthetic construct
  misc_feature 1..456: note = Description of Artificial Sequence: Synthetic coding sequence
  source 1..456: mol_type = other DNA
atgggcgacgagaaggacagctggaaggtgaagaccctggacgagatcctgcaggagaagaagagaagaaaggagcaggaggagaaggccgagatcaagagactgaagaacagcgacgacagagacagcaagagagacagcctggaggagggcgagctgagagaccactgcatggagatcaccatcagaaacagcccctacagaagagaggacagcatggaggacagaggcgaggaggacgacagcctggccatcaagcccccccagcagatgagcagaaaggagaaggtgcaccacagaaaggacgagaagagaaaggagaagtggaagcacgccagagtgaaggagagagagcacgagagaagaaagagacacagagaggagcaggacaaggccagaagagagtgggagagacagaagagaagagagatggccagagagcacagcagaagatag

SEQ ID NO: 78056 - DNA, 1263 bp, synthetic construct
  misc_feature 1..1263: note = Description of Artificial Sequence: Synthetic coding sequence
  source 1..1263: mol_type = other DNA
atgggcgacgagaaggacagctggaaggtgaagaccctggacgagatcctgcaggagaagaagagaagaaaggagcaggaggagaaggccgagatcaagagactgaagaacagcgacgacagagacagcaagagagacagcctggaggagggcgagctgagagaccactgcatggagatcaccatcagaaacagcccctacagaagagaggacagcatggaggacagaggcgaggaggacgacagcctggccatcaagcccccccagcagatgagcagaaaggagaaggtgcaccacagaaaggacgagaagagaaaggagaagtgcagacaccacagccacagcgccgagggcggcaagcacgccagagtgaaggagagagagcacgagagaagaaagagacacagagaggagcaggacaaggccagaagagagtgggagagacagaagagaagagagatggccagagagcacagcagaagagagagagacagactggagcagctggagagaaagagagagagagagagaaagatgagagagcagcagaaggagcagagagagcagaaggagagagagagaagagccgaggagagaagaaaggagagagaggccagaagagaggtgagcgcccaccacagaaccatgagagaggactacagcgacaaggtgaaggccagccactggagcagaagcccccccagaccccccagagagagattcgagctgggcgacggcagaaagcccggcgaggccagacccgcccccgcccagaagcccgcccagctgaaggaggagaagatggaggagagagacctgctgagcgacctgcaggacatcagcgacagcgagagaaagaccagcagcgccgagagcagcagcgccgagagcggcagcggcagcgaggaggaggaggaggaggaggaggaggaggaggaggagggcagcaccagcgaggagagcgaggaggaggaggaggaggaggaggaggaggaggaggagaccggcagcaacagcgaggaggccagcgagcagagcgccgaggaggtgagcgaggaggagatgagcgaggacgaggagagagagaacgagaaccacctgctggtggtgcccgagagcagattcgacagagacagcggcgagagcgaggaggccgaggaggaggtgggcctgcccgagagaagaggcgtgcccgtgcccgagcaggacagaggcggccacctgtggagcggcctgcagagcaagagacaggagaacagatag

SEQ ID NO: 78057 - DNA, 1686 bp, synthetic construct
  misc_feature 1..1686: note = Description of Artificial Sequence: Synthetic coding sequence
  source 1..1686: mol_type = other DNA
atggccatcgccaccagcacccagctggccagagccctgtacgacaacaccgccgagagcccccaggagctgagcttcagaagaggcgacgtgctgagagtgctgcagagagagggcgccggcggcctggacggctggtgcctgtgcagcctgcacggccagcagggcatcgtgcccgccaacagagtgaagctgctgcccgccggccccgcccccaagcccagcctgagccccgccagccccgcccagcccggcagcccctaccccgcccccgaccacagcaacgaggaccaggaggtgtacgtggtgcccccccccgccagaccctgccccaccagcggcccccccgccggcccctgcccccccagccccgacctgatctacaagatccccagagccagcggcacccagctggccgcccccagagacgccctggaggtgtacgacgtgccccccaccgccctgagagtgcccagcagcggcccctacgactgccccgccagcttcagccaccccctgaccagagtggccccccagccccccggcgaggacgacgccccctacgacgtgcccctgacccccaagccccccgccgagctggagcccgacctggagtgggagggcggcagagagcccggcccccccatctacgccgcccccagcaacctgaagagagccagcgccctgctgaacctgtacgaggcccccgaggagctgctggccgacggcgagggcggcggcaccgacgagggcatctacgacgtgcccctgctgggccccgaggccccccccagccccgagccccccggcgccctggccagccacgaccaggacaccctggcccagctgctggccagaagccccccccccccccacagacccagactgcccagcgccgagagcctgagcagaagacccctgcccgccctgcccgtgcccgaggcccccagccccagccccgtgcccagccccgcccccggcagaaagggcagcatccaggacagacccctgcccccccccccccccagactgcccggctacggcggccccaaggtggagggcgaccccgagggcagagagatggaggacgaccccgccggccaccacaacgagtacgagggcatccccatggccgaggagtacgactacgtgcacctgaagggcatggacaaggcccagggcagcagaccccccgaccaggcctgcaccggcgaccccgagctgcccgagagaggcatgcccgccccccaggaggccctgagccccggcgagcccctggtggtgagcaccggcgacctgcagctgctgtacttctacgccggccagtgccagagccactacagcgccctgcaggccgccgtggccgccctgatgagcagcacccaggccaaccagccccccagactgttcgtgccccacagcaagagagtggtggtggccgcccacagactggtgttcgtgggcgacaccctgggcagactggccgccagcgcccccctgagagcccaggtgagagccgccggcaccgccctgggccaggccctgagagccaccgtgctggccgtgaagggcgccgccctgggctaccccagcagccccgccatccaggagatggtgcagtgcgtgaccgagctggccggccaggccctgcagttcaccaccctgctgaccagcctggccccctag

SEQ ID NO: 78058 - DNA, 684 bp, synthetic construct
  misc_feature 1..684: note = Description of Artificial Sequence: Synthetic coding sequence
  source 1..684: mol_type = other DNA
atgaacggcaccatctacgccaacgagtgccagcagatcagacaccccaacagcaagaccctgggcaccgtgacccccagaaagcccgtgctgagcgtgagcgccagaaagatcaaggacaacgccgccgactggcacaacctgatcctgaagtgggagaccctgaacgacgccggcttcaccaccgccaacaacatcgccaacctgaagatcagcctgctgaacaaggacaagatcgagctggacagcagcagccccgccagcaaggagaacgaggagaaggtgtgcctggagtacaacgaggagctggagaagctgtgcgaggagctgcaggccaccctggacggcctgaccaagatccaggtgaagatggagaagctgagcagcaccaccaagggcatctgcgagctggagaactaccactacggcgaggagagcaagagaccccccctgttccacacctggcccaccacccacttctacgaggtgagccacaagctgctggagatgtacagaaaggagctgctgctgaagagaaccgtggccaaggagctggcccacaccggcgaccccgacctgaccctgagctacctgagcatgtggctgcaccagccctacgtggagagcgacagcagactgcacctggagagcatgctgctggagaccggccacagagccctgtag

SEQ ID NO: 78059 - DNA, 357 bp, synthetic construct
  misc_feature 1..357: note = Description of Artificial Sequence: Synthetic coding sequence
  source 1..357: mol_type = other DNA
atggaggccaagaccctgggcaccgtgacccccagaaagcccgtgctgagcgtgagcgccagaaagatcaaggacaacgccgccgactggcacaacctgatcctgaagtgggagaccctgaacgacgccggcttcaccaccgccaacaacatcgccaacctgaagatcagcctgctgaacaaggacaagatcgagctggacagcagcagccccgccagcaaggagaacgaggagaaggtgtgcctggagtacaacgaggagctggagaagctgtgcgaggagctgcaggccaccctggacggcctgatgagattcagaatcagcagctggagatgcaccggcagaagctgcagctag

SEQ ID NO: 78060 - DNA, 639 bp, synthetic construct
  misc_feature 1..639: note = Description of Artificial Sequence: Synthetic coding sequence
  source 1..639: mol_type = other DNA
atggaggccaagaccctgggcaccgtgacccccagaaagcccgtgctgagcgtgagcgccagaaagatcaaggacaacgccgccgactggcacaacctgatcctgaagtgggagaccctgaacgacgccggcttcaccaccgccaacaacatcgccaacctgaagatcagcctgctgaacaaggacaagatcgagctggacagcagcagccccgccagcaaggagaacgaggagaaggtgtgcctggagtacaacgaggagctggagaagctgtgcgaggagctgcaggccaccctggacggcctgaccaagatccaggtgaagatggagaagctgagcagcaccaccaagggcatctgcgagctggagaactaccactacggcgaggagagcaagagaccccccctgttccacacctggcccaccacccacttctacgaggtgagccacaagctgctggagatgtacagaaaggagctgctgctgaagagaaccgtggccaaggagctggcccacaccggcgaccccgacctgaccctgagctacctgagcatgtggctgcaccagccctacgtggagagcgacagcagactgcacctggagagcatgctgctggagaccggccacagagccctgtag

SEQ ID NO: 78061 - DNA, 918 bp, synthetic construct
  misc_feature 1..918: note = Description of Artificial Sequence: Synthetic coding sequence
  source 1..918: mol_type = other DNA
atggacatgttccagaaggtggagaagatcggcgagggcacctacggcgtggtgtacaaggccaagaacagagagaccggccagctggtggccctgaagaagatcagactggacctggagatggagggcgtgcccagcaccgccatcagagagatcagcctgctgaaggagctgaagcaccccaacatcgtgagactgctggacgtggtgcacaacgagagaaagctgtacctggtgttcgagttcctgagccaggacctgaagaagtacatggacagcacccccggcagcgagctgcccctgcacctgatcaagagctacctgttccagctgctgcagggcgtgagcttctgccacagccacagagtgatccacagagacctgaagccccagaacctgctgatcaacgagctgggcgccatcaagctggccgacttcggcctggccagagccttcggcgtgcccctgagaacctacacccacgaggtggtgaccctgtggtacagagcccccgagatcctgctgggcagcaagttctacaccaccgccgtggacatctggagcatcggctgcatcttcgccgagatggtgaccagaaaggccctgttccccggcgacagcgagatcgaccagctgttcagaatcttcagaatgctgggcacccccagcgaggacacctggcccggcgtgacccagctgcccgactacaagggcagcttccccaagtggaccagaaagggcctggaggagatcgtgcccaacctggagcccgagggcagagacctgctgatgcagctgctgcagtacgaccccagccagagaatcaccgccaagaccgccctggcccacccctacttcagcagccccgagcccagccccgccgccagacagtacgtgctgcagagattcagacactag

SEQ ID NO: 78062 - DNA, 918 bp, synthetic construct; identical to SEQ ID NO: 78061
  misc_feature 1..918: note = Description of Artificial Sequence: Synthetic coding sequence
  source 1..918: mol_type = other DNA

SEQ ID NO: 78063 - DNA, 879 bp, synthetic construct
  misc_feature 1..879: note = Description of Artificial Sequence: Synthetic coding sequence
  source 1..879: mol_type = other DNA
atgcagaagtacgagaagctggagaagatcggcgagggcacctacggcaccgtgttcaaggccaagaacagagagacccacgagatcgtggccctgaagagagtgagactggacgacgacgacgagggcgtgcccagcagcgccctgagagagatctgcctgctgaaggagctgaagcacaagaacatcgtgagactgcacgacgtgctgcacagcgacaagaagctgaccctggtgttcgagttctgcgaccaggacctgaagaagtacttcgacagctgcaacggcgacctggaccccgagatcgtgaagagcttcctgttccagctgctgaagggcctgggcttctgccacagcagaaacgtgctgcacagagacctgaagccccagaacctgctgatcaacagaaacggcgagctgaagctggccgacttcggcctggccagagccttcggcatccccgtgagatgctacagcgccgaggtggtgaccctgtggtacagaccccccgacgtgctgttcggcgccaagctgtacagcaccagcatcgacatgtggagcgccggctgcatcttcgccgagctggccaacgccggcagacccctgttccccggcaacgacgtggacgaccagctgaagagaatcttcagactgctgggcacccccaccgaggagcagtggcccagcatgaccaagctgcccgactacaagccctaccccatgtaccccgccaccaccagcctggtgaacgtggtgcccaagctgaacgccaccggcagagacctgctgcagaacctgctgaagtgcaaccccgtgcagagaatcagcgccgaggaggccctgcagcacccctacttcagcgacttctgccccccctag

SEQ ID NO: 78064 - DNA, 783 bp, synthetic construct
  misc_feature 1..783: note = Description of Artificial Sequence: Synthetic coding sequence
  source 1..783: mol_type = other DNA
atgcagaagtacgagaagctggagaagatcggcgagggcacctacggcaccgtgttcaaggccaagaacagagagacccacgagatcgtggccctgaagagagtgagactggacgacgacgacgagggcgtgcccagcagcgccctgagagagatctgcctgctgaaggagctgaagcacaagaacatcgtgagactgcacgacgtgctgcacagcgacaagaagctgaccctggtgttcgagttctgcgaccaggacctgaagaagtacttcgacagctgcaacggcgacctggaccccgagatcgtgaagaacggcgagctgaagctggccgacttcggcctggccagagccttcggcatccccgtgagatgctacagcgccgaggtggtgaccctgtggtacagaccccccgacgtgctgttcggcgccaagctgtacagcaccagcatcgacatgtggagcgccggctgcatcttcgccgagctggccaacgccggcagacccctgttccccggcaacgacgtggacgaccagctgaagagaatcttcagactgctgggcacccccaccgaggagcagtggcccagcatgaccaagctgcccgactacaagccctaccccatgtaccccgccaccaccagcctggtgaacgtggtgcccaagctgaacgccaccggcagagacctgctgcagaacctgctgaagtgcaaccccgtgcagagaatcagcgccgaggaggccctgcagcacccctacttcagcgacttctgccccccctag

SEQ ID NO: 78065 - DNA, 1104 bp, synthetic construct
  misc_feature 1..1104: note = Description of Artificial Sequence: Synthetic coding sequence
  source 1..1104: mol_type = other DNA
atgggcaccgtgctgagcctgagccccgccagcagcgccaagggcagaagacccggcggcctgcccgaggagaagaagaaggccccccccgccggcgacgaggccctgggcggctacggcgccccccccgtgggcaagggcggcaagggcgagagcagactgaagagacccagcgtgctgatcagcgccctgacctggaagagactggtggccgccagcgccaagaagaagaagggcagcaagaaggtgacccccaagcccgccagcaccggccccgaccccctggtgcagcagagaaacagagagaacctgctgagaaagggcagagacccccccgacggcggcggcaccgccaagcccctggccgtgcccgtgcccaccgtgcccgccgccgccgccacctgcgagccccccagcggcggcagcgccgccgcccagccccccggcagcggcggcggcaagcccccccccccccccccccccgccccccaggtggccccccccgtgcccggcggcagccccagaagagtgatcgtgcaggccagcaccggcgagctgctgagatgcctgggcgacttcgtgtgcagaagatgctacagactgaaggagctgagccccggcgagctggtgggctggttcagaggcgtggacagaagcctgctgctgcagggctggcaggaccaggccttcatcacccccgccaacctggtgttcgtgtacctgctgtgcagagagagcctgagaggcgacgagctggccagcgccgccgagctgcaggccgccttcctgacctgcctgtacctggcctacagctacatgggcaacgagatcagctaccccctgaagcccttcctggtggagcccgacaaggagagattctggcagagatgcctgagactgatccagagactgagcccccagatgctgagactgaacgccgacccccacttcttcacccaggtgttccaggacctgaagaacgagggcgaggccgccgccagcggcggcggcccccccagcggcggcgcccccgccgccagcagcgccgccagagacagctgcgccgccggcaccaagcactggaccatgaacctggacagatag

SEQ ID NO: 78066 - DNA, 1779 bp, synthetic construct
  misc_feature 1..1779: note = Description of Artificial Sequence: Synthetic coding sequence
  source 1..1779: mol_type = other DNA
atggagatgtacgagaccctgggcaaggtgggcgagggcagctacggcaccgtgatgaagtgcaagcacaagaacaccggccagatcgtggccatcaagatcttctacgagagacccgagcagagcgtgaacaagatcgccatgagagagatcaagttcctgaagcagttccaccacgagaacctggtgaacctgatcgaggtgttcagacagaagaagaagatccacctggtgttcgagttcatcgaccacaccgtgctggacgagctgcagcactactgccacggcctggagagcaagagactgagaaagtacctgttccagatcctgagagccatcgactacctgcacagcaacaacatcatccacagagacatcaagcccgagaacatcctggtgagccagagcggcatcaccaagctgtgcgacttcggcttcgccagaaccctggccgcccccggcgacatctacaccgactacgtggccaccagatggtacagagcccccgagctggtgctgaaggacaccagctacggcaagcccgtggacatctgggccctgggctgcatgatcatcgagatggccaccggcaacccctacctgcccagcagcagcgacctggacctgctgcacaagatcgtgctgaaggtgggcaacctgagcccccacctgcagaacatcttcagcaagagccccatcttcgccggcgtggtgctgccccaggtgcagcaccccaagaacgccagaaagaagtaccccaagctgaacggcctgctggccgacatcgtgcacgcctgcctgcagatcgaccccgccgacagaatcagcagcagcgacctgctgcaccacgagtacttcaccagagacggcttcatcgagaagttcatgcccgagctgaaggccaagctgctgcaggaggccaaggtgaacagcctgatcaagcccaaggagagcagcaaggagaacgagctgagaaaggacgagagaaagaccgtgtacaccaacaccctgctgagcagcagcgtgctgggcaaggagatcgagaaggagaagaagcccaaggagatcaaggtgagagtgatcaaggtgaagggcggcagaggcgacatcagcgagcccaagaagaaggagtacgagggcggcctgggccagcaggacgccaacgagaacgtgcaccccatgagccccgacaccaagctggtgaccatcgagccccccaaccccatcaaccccagcaccaactgcaacggcctgaaggagaacccccactgcggcggcagcgtgaccatgccccccatcaacctgaccaacagcaacctgatggccgccaacctgagcagcaacctgttccaccccagcgtgagactgaccgagagagccaagaagagaagaaccagcagccagagcatcggccaggtgatgcccaacagcagacaggaggaccccggccccatccagagccagatggagaagggcatcttcaacgagagaaccggccacagcgaccagatggccaacgagaacaagagaaagctgaacttcagcagaagcgacagaaaggagttccacttccccgagctgcccgtgaccatccagagcaaggacaccaagggcatggaggtgaagcagatcaagatgctgaagagagagagcaagaagaccgagagcagcaagatccccaccctgctgaacgtggaccagaaccaggagaagcaggagggcggcgacggccactgcgagggcaagaacctgaagagaaacagattcttcttctggtag

SEQ ID NO: 78067 - DNA, 1368 bp, synthetic construct
  misc_feature 1..1368: note = Description of Artificial Sequence: Synthetic coding sequence
  source 1..1368: mol_type = other DNA
atggagatgtacgagaccctgggcaaggtgggcgagggcagctacggcaccgtgatgaagtgcaagcacaagaacaccggccagatcgtggccatcaagatcttctacgagagacccgagcagagcgtgaacaagatcgccatgagagagatcaagttcctgaagcagttccaccacgagaacctggtgaacctgatcgaggtgttcagacagaagaagaagatccacctggtgttcgagttcatcgaccacaccgtgctggacgagctgcagcactactgccacggcctggagagcaagagactgagaaagtacctgttccagatcctgagagccatcgactacctgcacagcaacaacatcatccacagagacatcaagcccgagaacatcctggtgagccagagcggcatcaccaagctgtgcgacttcggcttcgccagaaccctggccgcccccggcgacatctacaccgactacgtggccaccagatggtacagagcccccgagctggtgctgaaggacaccagctacggcaagcccgtggacatctgggccctgggctgcatgatcatcgagatggccaccggcaacccctacctgcccagcagcagcgacctggacctgctgcacaagatcgtgctgaaggtgggcaacctgagcccccacctgcagaacatcttcagcaagagccccatcttcgccggcgtggtgctgccccaggtgcagcaccccaagaacgccagaaagaagtaccccaagctgaacggcctgctggccgacatcgtgcacgcctgcctgcagatcgaccccgccgacagaatcagcagcagcgacctgctgcaccacgagtacttcaccagagacggcttcatcgagaagttcatgcccgagctgaaggccaagctgctgcaggaggccaaggtgaacagcctgatcaagcccaaggagagcagcaaggagaacgagctgagaaaggacgagagaaagaccgtgtacaccaacaccctgctgagcagcagcgtgctgggcaaggagatcgagaaggagaagaagcccaaggagatcaaggtgagagtgatcaaggtgaagggcggcagaggcgacatcagcgagcccaagaagaaggagtacgagggcggcctgggccagcaggacgccaacgagaacgtgcaccccatgagccccgacaccaagctggtgaccatcgagccccccaaccccatcaaccccagcaccaactgcaacggcctgaaggagaacccccactgcggcggcagcgtgaccatgccccccatcaacctgaccaacagcaacctgatggccgccaacctgagcagcaacctgttccaccccagcgtgagatag

SEQ ID NO: 78068 - DNA, 1092 bp, synthetic construct
  misc_feature 1..1092: note = Description of Artificial Sequence: Synthetic coding sequence
  source 1..1092: mol_type = other DNA
atgcccgagctgaaggccaagctgctgcaggaggccaaggtgaacagcctgatcaagcccaaggagagcagcaaggagaacgagctgagaaaggacgagagaaagaccgtgtacaccaacaccctgctgagcagcagcgtgctgggcaaggagatcgagaaggagaagaagcccaaggagatcaaggtgagagtgatcaaggtgaagggcggcagaggcgacatcagcgagcccaagaagaaggagtacgagggcggcctgggccagcaggacgccaacgagaacgtgcaccccatgagccccgacaccaagctggtgaccatcgagccccccaaccccatcaaccccagcaccaactgcaacggcctgaaggagaacccccactgcggcggcagcgtgaccatgccccccatcaacctgaccaacagcaacctgatggccgccaacctgagcagcaacctgttccaccccagcgtgagactgaccgagagagccaagaagagaagaaccagcagccagagcatcggccaggtgatgcccaacagcagacaggaggaccccggccccatccagagccagatggagaagggcatcttcaacgagagaaccggccacagcgaccagatggccaacgagaacaagagaaagctgaacttcagcagaagcgacagaaaggagttccacttccccgagctgcccgtgaccatccagagcaaggacaccaagggcatggaggtgaagcagatcaagatgctgaagagagagagcaagaagaccgagagcagcaagatccccaccctgctgaacgtggaccagaaccaggagaagcaggagttcatccccctgagcctgctgagcgcctgctgccccatcttcaccaacatctgcagccagctgaccatcagatacgtgttcatcagcggcatgaagaccgaccagtacagcgagctggtgcccgtggagtggggcatcgccgagaagatccccaagaacgtggaggccaccctggagctgggcaacagacagagattcgagcagttcggcgagctgagaagaagacaggagaacgtgggcaagttcggcaccttctag

SEQ ID NO: 78069 - DNA, 1773 bp, synthetic construct
  misc_feature 1..1773: note = Description of Artificial Sequence: Synthetic coding sequence
  source 1..1773: mol_type = other DNA
atggagatgtacgagaccctgggcaaggtgggcgagggcagctacggcaccgtgatgaagtgcaagcacaagaacaccggccagatcgtggccatcaagatcttctacgagagacccgagcagagcgtgaacaagatcgccatgagagagatcaagttcctgaagcagttccaccacgagaacctggtgaacctgatcgaggtgttcagacagaagaagaagatccacctggtgttcgagttcatcgaccacaccgtgctggacgagctgcagcactactgccacggcctggagagcaagagactgagaaagtacctgttccagatcctgagagccatcgactacctgcacagcaacaacatcatccacagagacatcaagcccgagaacatcctggtgagccagagcggcatcaccaagctgtgcgacttcggcttcgccagaaccctggccgcccccggcgacatctacaccgactacgtggccaccagatggtacagagcccccgagctggtgctgaaggacaccagctacggcaagcccgtggacatctgggccctgggctgcatgatcatcgagatggccaccggcaacccctacctgcccagcagcagcgacctggacctgctgcacaagatcgtgctgaaggtgggcaacctgagcccccacctgcagaacatcttcagcaagagccccatcttcgccggcgtggtgctgccccaggtgcagcaccccaagaacgccagaaagaagtaccccaagctgaacggcctgctggccgacatcgtgcacgcctgcctgcagatcgaccccgccgacagaatcagcagcagcgacctgctgcaccacgagtacttcaccagagacggcttcatcgagaagttcatgcccgagctgaaggccaagctgctgcaggaggccaaggtgaacagcctgatcaagcccaaggagagcagcaaggagaacgagctgagaaaggacgagagaaagaccgtgtacaccaacaccctgctgagcagcagcgtgctgggcaaggagatcgagaaggagaagaagcccaaggagatcaaggtgagagtgatcaaggtgaagggcggcagaggcgacatcagcgagcccaagaagaaggagtacgagggcggcctgggccagcaggacgccaacgagaacgtgcaccccatgagccccgacaccaagctggtgaccatcgagccccccaaccccatcaaccccagcaccaactgcaacggcctgaaggagaacccccactgcggcggcagcgtgaccatgccccccatcaacctgaccaacagcaacctgatggccgccaacctgagcagcaacctgttccaccccagcgtgagactgaccgagagagccaagaagagaagaaccagcagccagagcatcggccaggtgatgcccaacagcagacaggaggaccccggccccatccagagccagatggagaagggcatcttcaacgagagaaccggccacagcgaccagatggccaacgagaacaagagaaagctgaacttcagcagaagcgacagaaaggagttccacttccccgagctgcccgtgaccatccagagcaaggacaccaagggcatggaggtgaagcagatcaagatgctgaagagagagagcaagaagaccgagagcagcaagatccccaccctgctgaacgtggaccagaaccaggagaagcaggagaacaccggcaacgcccagaccgagagaaagaagaacctgcccgacgtggagtag

SEQ ID NO: 78070 - DNA, 1368 bp, synthetic construct; identical to SEQ ID NO: 78067
  misc_feature 1..1368: note = Description of Artificial Sequence: Synthetic coding sequence
  source 1..1368: mol_type = other DNA

SEQ ID NO: 78071 - DNA, 876 bp, synthetic construct
  misc_feature 1..876: note = Description of Artificial Sequence: Synthetic coding sequence
  source 1..876: mol_type = other DNA
atgcccgagctgaaggccaagctgctgcaggaggccaaggtgaacagcctgatcaagcccaaggagagcagcaaggagaacgagctgagaaaggacgagagaaagaccgtgtacaccaacaccctgctgagcagcagcgtgctgggcaaggagatcgagaaggagaagaagcccaaggagatcaaggtgagagtgatcaaggtgaagggcggcagaggcgacatcagcgagcccaagaagaaggagtacgagggcggcctgggccagcaggacgccaacgagaacgtgcaccccatgagccccgacaccaagctggtgaccatcgagccccccaaccccatcaaccccagcaccaactgcaacggcctgaaggagaacccccactgcggcggcagcgtgaccatgccccccatcaacctgaccaacagcaacctgatggccgccaacctgagcagcaacctgttccaccccagcgtgagactgaccgagagagccaagaagagaagaaccagcagccagagcatcggccaggtgatgcccaacagcagacaggaggaccccggccccatccagagccagatggagaagggcatcttcaacgagagaaccggccacagcgaccagatggccaacgagaacaagagaaagctgaacttcagcagaagcgacagaaaggagttccacttccccgagctgcccgtgaccatccagagcaaggacaccaagggcatggaggtgaagcagatcaagatgctgaagagagagagcaagaagaccgagagcagcaagatccccaccctgctgaacgtggaccagaaccaggagaagcaggaggtgagactgtaccagagacacgaggacagacccatccagtag

SEQ ID NO: 78072 - DNA, 3093 bp, synthetic construct
  misc_feature 1..3093: note = Description of Artificial Sequence: Synthetic coding sequence
  source 1..3093: mol_type = other DNA
atgaagatccccaacatcggcaacgtgatgaacaagttcgagatcctgggcgtggtgggcgagggcgcctacggcgtggtgctgaagtgcagacacaaggagacccacgagatcgtggccatcaagaagttcaaggacagcgaggagaacgaggaggtgaaggagaccaccctgagagagctgaagatgctgagaaccctgaagcaggagaacatcgtggagctgaaggaggccttcagaagaagaggcaagctgtacctggtgttcgagtacgtggagaagaacatgctggagctgctggaggagatgcccaacggcgtgccccccgagaaggtgaagagctacatctaccagctgatcaaggccatccactggtgccacaagaacgacatcgtgcacagagacatcaagcccgagaacctgctgatcagccacaacgacgtgctgaagctgtgcgacttcggcttcgccagaaacctgagcgagggcaacaacgccaactacaccgagtacgtggccaccagatggtacagaagccccgagctgctgctgggcgccccctacggcaagagcgtggacatgtggagcgtgggctgcatcctgggcgagctgagcgacggccagcccctgttccccggcgagagcgagatcgaccagctgttcaccatccagaaggtgctgggccccctgcccagcgagcagatgaagctgttctacagcaaccccagattccacggcctgagattccccgccgtgaaccacccccagagcctggagagaagatacctgggcatcctgaacagcgtgctgctggacctgatgaagaacctgctgaagctggaccccgccgacagatacctgaccgagcagtgcctgaaccaccccaccttccagacccagagactgctggacagaagccccagcagaagcgccaagagaaagccctaccacgtggagagcagcaccctgagcaacagaaaccaggccggcaagagcaccgccctgcagagccaccacagaagcaacagcaaggacatccagaacctgagcgtgggcctgcccagagccgacgagggcctgcccgccaacgagagcttcctgaacggcaacctggccggcgccagcctgagccccctgcacaccaagacctaccaggccagcagccagcccggcagcaccagcaaggacctgaccaacaacaacatcccccacctgctgagccccaaggaggccaagagcaagaccgagttcgacttcaacatcgaccccaagcccagcgagggccccggcaccaagtacctgaagagcaacagcagaagccagcagaacagacacagcttcatggagagcagccagagcaaggccggcaccctgcagcccaacgagaagcagagcagacacagctacatcgacaccatcccccagagcagcagaagccccagctacagaaccaaggccaagagccacggcgccctgagcgacagcaagagcgtgagcaacctgagcgaggccagagcccagatcgccgagcccagcaccagcagatacttccccagcagctgcctggacctgaacagccccaccagccccacccccaccagacacagcgacaccagaaccctgctgagccccagcggcagaaacaacagaaacgagggcaccctggacagcagaagaaccaccaccagacacagcaagaccatggaggagctgaagctgcccgagcacatggacagcagccacagccacagcctgagcgccccccacgagagcttcagctacggcctgggctacaccagccccttcagcagccagcagagaccccacagacacagcatgtacgtgaccagagacaaggtgagagccaagggcctggacggcagcctgagcatcggccagggcatggccgccagagccaacagcctgcagctgctgagcccccagcccggcgagcagctgccccccgagatgaccgtggccagaagcagcgtgaaggagaccagcagagagggcaccagcagcttccacaccagacagaagagcgagggcggcgtgtaccacgacccccacagcgacgacggcaccgcccccaaggagaacagacacctgtacaacgaccccgtgcccagaagagtgggcagcttctacagagtgcccagccccagacccgacaacagcttccacgagaacaacgtgagcaccagagtgagcagcctgcccagcgagagcagcagcggcaccaaccacagcaagagacagcccgccttcgacccctggaagagccccgagaacatcagccacagcgagcagctgaaggagaaggagaagcagggcttcttcagaagcatgaagaagaagaagaagaagagccagaccgtgcccaacagcgacagccccgacctgctgaccctgcagaagagcatccacagcgccagcacccccagcagcagacccaaggagtggagacccgagaagatcagcgacctgcagacccagagccagcccctgaagagcctgagaaagctgctgcacctgagcagcgccagcaaccaccccgccagcagcgaccccagattccagcccctgaccgcccagcagaccaagaacagcttcagcgagatcagaatccaccccctgagccaggccagcggcggcagcagcaacatcagacaggagcccgcccccaagggcagacccgccctgcagctgcccgacggcggctgcgacggcagaagacagagacaccacagcggcccccaggacagaagattcatgctgagaaccaccgagcagcagggcgagtacttctgctgcggcgaccccaagaagccccacaccccctgcgtgcccaacagagccctgcacagacccatcagcagccccgccccctaccccgtgctgcaggtgagaggcaccagcatgtgccccaccctgcaggtgagaggcaccgacgccttcagctgccccacccagcagagcggcttcagcttcttcgtgagacacgtgatgagagaggccctgatccacagagcccaggtgaaccaggccgccctgctgacctaccacgagaacgccgccctgaccggcaagtag

SEQ ID NO: 78073 - DNA, 3093 bp, synthetic construct; identical to SEQ ID NO: 78072
  misc_feature 1..3093: note = Description of Artificial Sequence: Synthetic coding sequence
  source 1..3093: mol_type = other DNA

SEQ ID NO: 78074 - DNA, 1956 bp, synthetic construct
  misc_feature 1..1956: note = Description of Artificial Sequence: Synthetic coding sequence
  source 1..1956: mol_type = other DNA
atgagcctgcccagactgctgaaggtgaacatcagaacctacgacaacagcatccccatcagcgagagcagcagaaagagctggaaccagaagcacttcgccctgaccttccccaagcccctgcagagaggcaccaacgacaagagcagacccctgaagagccagatcaccgtgaccagacacgacaagagaaagctggaggagggccagaagcccgcccacaagtggatcagacacagcttcagaaagatcctgcagtggccccccatctacaccgccgccagagagcagacccccttcagacacctgtacaccagcaagacccacctgaagaaggccgagtacaagaagagcaaggacgagaagggcggcacccccctgaagaaggacagcaagaagaagggcggcagctacgccaccaaccccgagagcaagcagatcgtggaggagaagaccaagagacagaacgaggccgacaagacccccctgaagagcagccacgagaacgagcagagcaagaagagcaagagcagcagcgagaccaaccccgagagccagaacagcaagaccgtgagcaagaactgcagccagaaggacaagaaggacagcaagaacagcaagaagaccaacaccgagttcctgcacaccaagaacaaccccaagaaggacctgaagagaagcaagaccagcaacgaccccatcagcgagatctgcagcgagaacagcctgaacgtggacttcctgatgctggtgggccagagcgacgacgagagcatcaacttcgacgcctggctgagaaactacagccagaacaacagcaagaactacagcctgaagtacaccaagtacaccaagaaggacaccaagaagaacgccaagaagagcagcgacgccgagagcgaggacagcaaggacgccaagaaggacagcaagaaggtgaagaagaacgtgaagaaggacgacaagaagaaggacgtgaagaaggacaccgagagcaccgacgccgagagcggcgacagcaaggacgagagaaaggacaccaagaaggacaagaagaagctgaagaaggacgacaagaagaaggacaccaagaagtaccccgagagcaccgacaccgagagcggcgacgccaaggacgccagaaacgacagcagaaacctgaagaaggccagcaagaacgacgacaagaagaaggacgccaagaagatcaccttcagcaccgacagcgagagcgagctggagagcaaggagagccagaaggacgagaagaaggacaagaaggacagcaagaccgacaacaagaagagcgtgaagaacgacgaggagagcaccgacgccgacagcgagcccaagggcgacagcaagaagggcaagaaggacgagaagaagggcaagaaggacagcaagaaggacgacaagaagaaggacgccaagaagaacgccgagagcaccgagatggagagcgacctggagctgaagaaggacaagaagcacagcaaggagaagaagggcagcaagaaggacatcaagaaggacgccagaaaggacaccgagagcaccgacgccgagttcgacgagagcagcaagaccggcttcaagaccagcaccaagatcaagggcagcgacaccgagagcgaggagagcctgtacaagcccggcgccaagaagaagatcgacgagagcgacggcaccagcgccaacagcaagatggagggcctggagagcaagagaggcttcagaatgagcagcaagaagaccaccttcaacgagaagggcgagaaggccagcaccggcagagtgccccccagcagagagaagccccccctgcccgcctgcgagcccagcctgcccagccccaaggtgagaagactgtgctggtgcaagatgcccccccccccccccaagcccagatacgcccccctgcccgaggccccctggatccacaagctgctgtag

SEQ ID NO: 78075 - DNA, 1974 bp, synthetic construct
  misc_feature 1..1974: note = Description of Artificial Sequence: Synthetic coding sequence
  source 1..1974: mol_type = other DNA
atgagcctgcccagactgctgaaggtgaacatcagaacctacgacaacagcatccccatcagcgagagcagcagaaagagctggaaccagaagcacttcgccctgaccttccccaagcccctgcagagaggcaccaacgacaagagcagacccctgaagagccagatcaccgtgaccagacacgacaagagaaagctggaggagggccagaagcccgcccacaagtggatcagacacagcttcagaaagatcctgcagtggccccccatctacaccgccgccagagagcagacccccttcagacacctgtacaccagcaagacccacctgaagaaggccgagtacaagaagagcaaggacgagaagggcggcacccccctgaagaaggacagcaagaagaagggcggcagctacgccaccaaccccgagagcaagcagatcgtggaggagaagaccaagagacagaacgaggccgacaagacccccctgaagagcagccacgagaacgagcagagcaagaagagcaagagcagcagcgagaccaaccccgagagccagaacagcaagaccgtgagcaagaactgcagccagaaggacaagaaggacagcaagaacagcaagaagaccaacaccgagttcctgcacaccaagaacaaccccaagaaggacctgaagagaagcaagaccagcaacgaccccatcagcgagatctgcagcgagaacagcctgaacgtggacttcctgatgctggtgggccagagcgacgacgagagcatcaacttcgacgcctggctgagaaactacagccagaacaacagcaagaactacagcctgaagtacaccaagtacaccaagaaggacaccaagaagaacgccaagaagagcagcgacgccgagagcgaggacagcaaggacgccaagaaggacagcaagaaggtgaagaagaacgtgaagaaggacgacaagaagaaggacgtgaagaaggacaccgagagcaccgacgccgagagcggcgacagcaaggacgagagaaaggacaccaagaaggacaagaagaagctgaagaaggacgacaagaagaaggacaccaagaagtaccccgagagcaccgacaccgagagcggcgacgccaaggacgccagaaacgacagcagaaacctgaagaaggccagcaagaacgacgacaagaagaaggacgccaagaagatcaccttcagcaccgacagcgagagcgagctggagagcaaggagagccagaaggacgagaagaaggacaagaaggacagcaagaccgacaacaagaagagcgtgaagaacgacgaggagagcaccgacgccgacagcgagcccaagggcgacagcaagaagggcaagaaggacgagaagaagggcaagaaggacagcaagaaggacgacaagaagaaggacgccaagaagaacgccgagagcaccgagatggagagcgacctggagctgaagaaggacaagaagcacagcaaggagaagaagggcagcaagaaggacatcaagaaggacgccagaaaggacaccgagagcaccgacgccgagttcgacgagagcagcaagaccggcttcaagaccagcaccaagatcaagggcagcgacaccgagagcgaggagagcctgtacaagcccggcgccaagaagaagatcgacgagagcgacggcaccagcgccaacagcaagatggagggcctggagagcaagagaggcttcagaatgagcagcaagaagaccaccttcaacgagaagggcgagaaggccagcaccggcagagtgccccccagcagagagaagccccccctgcccgcctgcgagcccagcctgcccagccccaaggtgagaagactgtgctggtgcaagatgcccccccccccccccaagcccagatacgcccccctgatccagagaagacagagactgggcgtgagaagatgccagctgctgatgtag

SEQ ID NO: 78076 - DNA, 1086 bp, synthetic construct
  misc_feature 1..1086: note = Description of Artificial Sequence: Synthetic coding sequence
  source 1..1086: mol_type = other DNA
atgcaggagaaggacgccagcagccagggcttcctgccccacttccagcacttcgccacccaggccatccacgtgggccaggaccccgagcagtggaccagcagagccgtggtgccccccatcagcctgagcaccaccttcaagcagggcgcccccggccagcacagcggcttcgagtacagcagaagcggcaaccccaccagaaactgcctggagaaggccgtggccgccctggacggcgccaagtactgcctggccttcgccagcggcctggccgccaccgtgaccatcacccacctgctgaaggccggcgaccagatcatctgcatggacgacgtgtacggcggcaccaacagatacttcagacaggtggccagcgagttcggcctgaagatcagcttcgtggactgcagcaagatcaagctgctggaggccgccatcacccccgagaccaagagacccctggccctgggcgccgacatcagcatgtacagcgccaccaagtacatgaacggccacagcgacgtggtgatgggcctggtgagcgtgaactgcgagagcctgcacaacagactgagattcctgcagaacagcctgggcgccgtgcccagccccatcgactgctacctgtgcaacagaggcctgaagaccctgcacgtgagaatggagaagcacttcaagaacggcatggccgtggcccagttcctggagagcaacccctgggtggagaaggtgatctaccccggcctgcccagccacccccagcacgagctggtgaagagacagtgcaccggctgcaccggcatggtgaccttctacatcaagggcaccctgcagcacgccgagatcttcctgaagaacctgaagctgttcaccctggccgagagcctgggcggcttcgagagcctggccgagctgcccgccatcatgacccacgccagcgtgctgaagaacgacagagacgtgctgggcatcagcgacaccctgatcagactgagcgtgggcctggaggacgaggaggacctgctggaggacctggaccaggccctgaaggccgcccacccccccagcggcagccacagctag

SEQ ID NO: 78077 - DNA, 1218 bp, synthetic construct
  misc_feature 1..1218: note = Description of Artificial Sequence: Synthetic coding sequence
  source 1..1218: mol_type = other DNA
atgcaggagaaggacgccagcagccagggcttcctgccccacttccagcacttcgccacccaggccatccacgtgggccaggaccccgagcagtggaccagcagagccgtggtgccccccatcagcctgagcaccaccttcaagcagggcgcccccggccagcacagcggcttcgagtacagcagaagcggcaaccccaccagaaactgcctggagaaggccgtggccgccctggacggcgccaagtactgcctggccttcgccagcggcctggccgccaccgtgaccatcacccacctgctgaaggccggcgaccagatcatctgcatggacgacgtgtacggcggcaccaacagatacttcagacaggtggccagcgagttcggcctgaagatcagcttcgtggactgcagcaagatcaagctgctggaggccgccatcacccccgagaccaagctggtgtggatcgagacccccaccaaccccacccagaaggtgatcgacatcgagggctgcgcccacatcgtgcacaagcacggcgacatcatcctggtggtggacaacaccttcatgagcccctacttccagagacccctggccctgggcgccgacatcagcatgtacagcgccaccaagtacatgaacggccacagcgacgtggtgatgggcctggtgagcgtgaactgcgagagcctgcacaacagactgagattcctgcagaacagcctgggcgccgtgcccagccccatcgactgctacctgtgcaacagaggcctgaagaccctgcacgtgagaatggagaagcacttcaagaacggcatggccgtggcccagttcctggagagcaacccctgggtggagaaggtgatctaccccggcctgcccagccacccccagcacgagctggtgaagagacagtgcaccggctgcaccggcatggtgaccttctacatcaagggcaccctgcagcacgccgagatcttcctgaagaacctgaagctgttcaccctggccgagagcctgggcggcttcgagagcctggccgagctgcccgccatcatgacccacgccagcgtgctgaagaacgacagagacgtgctgggcatcagcgacaccctgatcagactgagcgtgggcctggaggacgaggaggacctgctggaggacctggaccaggccctgaaggccgcccacccccccagcggcagccacagctag

SEQ ID NO: 78078 - DNA, 1122 bp, synthetic construct
  misc_feature 1..1122: note = Description of Artificial Sequence: Synthetic coding sequence
  source 1..1122: mol_type = other DNA
atgcaggagaaggacgccagcagccagggcttcctgccccacttccagcacttcgccacccaggccatccacgtgggccaggaccccgagcagtggaccagcagagccgtggtgccccccatcagcctgagcaccaccttcaagcagggcgcccccggccagcacagcggcttcgagtacagcagaagcggcaaccccaccagaaactgcctggagaaggccgtggccgccctggacggcgccaagtactgcaccaacagatacttcagacaggtggccagcgagttcggcctgaagatcagcttcgtggactgcagcaagatcaagctgctggaggccgccatcacccccgagaccaagctggtgtggatcgagacccccaccaaccccacccagaaggtgatcgacatcgagggctgcgcccacatcgtgcacaagcacggcgacatcatcctggtggtggacaacaccttcatgagcccctacttccagagacccctggccctgggcgccgacatcagcatgtacagcgccaccaagtacatgaacggccacagcgacgtggtgatgggcctggtgagcgtgaactgcgagagcctgcacaacagactgagattcctgcagaacagcctgggcgccgtgcccagccccatcgactgctacctgtgcaacagaggcctgaagaccctgcacgtgagaatggagaagcacttcaagaacggcatggccgtggcccagttcctggagagcaacccctgggtggagaaggtgatctaccccggcctgcccagccacccccagcacgagctggtgaagagacagtgcaccggctgcaccggcatggtgaccttctacatcaagggcaccctgcagcacgccgagatcttcctgaagaacctgaagctgttcaccctggccgagagcctgggcggcttcgagagcctggccgagctgcccgccatcatgacccacgccagcgtgctgaagaacgacagagacgtgctgggcatcagcgacaccctgatcagactgagcgtgggcctggaggacgaggaggacctgctggaggacctggaccaggccctgaaggccgcccacccccccagcggcagccacagctag

SEQ ID NO: 78079 - DNA, 1656 bp, synthetic construct
  misc_feature 1..1656: note = Description of Artificial Sequence: Synthetic coding sequence
  source 1..1656: mol_type = other DNA
atgcccagcgagaccccccaggccgaggtgggccccaccggctgcccccacagaagcggcccccacagcgccaagggcagcctggagaagggcagccccgaggacaaggaggccaaggagcccctgtggatcagacccgacgcccccagcagatgcacctggcagctgggcagacccgccagcgagagcccccaccaccacaccgcccccgccaagagccccaagatcctgcccgacatcctgaagaagatcggcgacacccccatggtgagaatcaacaagatcggcaagaagttcggcctgaagtgcgagctgctggccaagtgcgagttcttcaacgccggcggcagcgtgaaggacagaatcagcctgagaatgatcgaggacgccgagagagacggcaccctgaagcccggcgacaccatcatcgagcccaccagcggcaacaccggcatcggcctggccctggccgccgccgtgagaggctacagatgcatcatcgtgatgcccgagaagatgagcagcgagaaggtggacgtgctgagagccctgggcgccgagatcgtgagaacccccaccaacgccagattcgacagccccgagagccacgtgggcgtggcctggagactgaagaacgagatccccaacagccacatcctggaccagtacagaaacgccagcaaccccctggcccactacgacaccaccgccgacgagatcctgcagcagtgcgacggcaagctggacatgctggtggccagcgtgggcaccggcggcaccatcaccggcatcgccagaaagctgaaggagaagtgccccggctgcagaatcatcggcgtggaccccgagggcagcatcctggccgagcccgaggagctgaaccagaccgagcagaccacctacgaggtggagggcatcggctacgacttcatccccaccgtgctggacagaaccgtggtggacaagtggttcaagagcaacgacgaggaggccttcaccttcgccagaatgctgatcgcccaggagggcctgctgtgcggcggcagcgccggcagcaccgtggccgtggccgtgaaggccgcccaggagctgcaggagggccagagatgcgtggtgatcctgcccgacagcgtgagaaactacatgaccaagttcctgagcgacagatggatgctgcagaagggcttcctgaaggaggaggacctgaccgagaagaagccctggtggtggcacctgagagtgcaggagctgggcctgagcgcccccctgaccgtgctgcccaccatcacctgcggccacaccatcgagatcctgagagagaagggcttcgaccaggcccccgtggtggacgaggccggcgtgatcctgggcatggtgaccctgggcaacatgctgagcagcctgctggccggcaaggtgcagcccagcgaccaggtgggcaaggtgatctacaagcagttcaagcagatcagactgaccgacaccctgggcagactgagccacatcctggagatggaccacttcgccctggtggtgcacgagcagatccagtaccacagcaccggcaagagcagccagagacagatggtgttcggcgtggtgaccgccatcgacctgctgaacttcgtggccgcccaggagagagaccagaagtag

SEQ ID NO: 78080 - DNA, 1656 bp, synthetic construct; identical to SEQ ID NO: 78079
  misc_feature 1..1656: note = Description of Artificial Sequence: Synthetic coding sequence
  source 1..1656: mol_type = other DNA

SEQ ID NO: 78081 - DNA, 1656 bp, synthetic construct; identical to SEQ ID NO: 78079
  misc_feature 1..1656: note = Description of Artificial Sequence: Synthetic coding sequence
  source 1..1656: mol_type = other DNA

SEQ ID NO: 78082 - DNA, 1656 bp, synthetic construct; identical to SEQ ID NO: 78079
  misc_feature 1..1656: note = Description of Artificial Sequence: Synthetic coding sequence
  source 1..1656: mol_type = other DNA

SEQ ID NO: 78083 - DNA, 1698 bp, synthetic construct
  misc_feature 1..1698: note = Description of Artificial Sequence: Synthetic coding sequence
  source 1..1698: mol_type = other DNA
atgcccagcgagaccccccaggccgaggtgggccccaccggctgcccccacagaagcggcccccacagcgccaagggcagcctggagaagggcagccccgaggacaaggaggccaaggagcccctgtggatcagacccgacgcccccagcagatgcacctggcagctgggcagacccgccagcgagagcccccaccaccacaccgcccccgccaagagccccaagatcctgcccgacatcctgaagaagatcggcgacacccccatggtgagaatcaacaagatcggcaagaagttcggcctgaagtgcgagctgctggccaagtgcgagttcttcaacgccggcggcagcgtgaaggacagaatcagcctgagaatgatcgaggacgccgagagagacggcaccctgaagcccggcgacaccatcatcgagcccaccagcggcaacaccggcatcggcctggccctggccgccgccgtgagaggctacagatgcatcatcgtgatgcccgagaagatgagcagcgagaaggtggacgtgctgagagccctgggcgccgagatcgtgagaacccccaccaacgccagattcgacagccccgagagccacgtgggcgtggcctggagactgaagaacgagatccccaacagccacatcctggaccagtacagaaacgccagcaaccccctggcccactacgacaccaccgccgacgagatcctgcagcagtgcgacggcaagctggacatgctggtggccagcgtgggcaccggcggcaccatcaccggcatcgccagaaagctgaaggagaagtgccccggctgcagaatcatcggcgtggaccccgagggcagcatcctggccgagcccgaggagctgaaccagaccgagcagaccacctacgaggtggagggcatcggctacgacttcatccccaccgtgctggacagaaccgtggtggacaagtggttcaagagcaacgacgaggaggccttcaccttcgccagaatgctgatcgcccaggagggcctgctgtgcggcggcagcgccggcagcaccgtggccgtggccgtgaaggccgcccaggagctgcaggagggccagagatgcgtggtgatcctgcccgacagcgtgagaaactacatgaccaagttcctgagcgacagatggatgctgcagaagggcttcctgaaggaggaggacctgaccgagaagaagccctggtggtggcacctgagagtgcaggagctgggcctgagcgcccccctgaccgtgctgcccaccatcacctgcggccacaccatcgagatcctgagagagaagggcttcgaccaggcccccgtggtggacgaggccggcgtgatcctgggcatggtgaccctgggcaacatgctgagcagcctgctggccggcaaggtgcagcccagcgaccaggtgggcaaggtgatctacaagcagttcaagcagatcagactgaccgacaccctgggcagactgagccacatcctggagatggaccacttcgccctggtggtgcacgagcagatccagagccaggaccaggcctgggccggcgtggtgggcggccccgccgaccacagcaccggcaagagcagccagagacagatggtgttcggcgtggtgaccgccatcgacctgctgaacttcgtggccgcccaggagagagaccagaagtag

SEQ ID NO: 78084 - DNA, 534 bp, synthetic construct
  misc_feature 1..534: note = Description of Artificial Sequence: Synthetic coding sequence
  source 1..534: mol_type = other DNA
atgcccagcgagaccccccaggccgaggtgggccccaccggctgcccccacagaagcggcccccacagcgccaagggcagcctggagaagggcagccccgaggacaaggaggccaaggagcccctgtggatcagacccgacgcccccagcagatgcacctggcagctgggcagacccgccagcgagagcccccaccaccacaccgcccccgccaagagccccaagatcctgcccgacatcctgaagaagatcggcgacacccccatggtgagaatcaacaagatcggcaagaagttcggcctgaagtgcgagctgctggccaagtgcgagttcttcaacgccggcggcagcgtgaaggacagaatcagcctgagaatgatcgaggacgccgagagagacggcaccctgaagcccggcgacaccatcatcgagcccaccagcggcaacaccggcatcggcctggccctggccgccgccgtgagaggctacagatgcatcatcgtgatgcccgagaagatgagcagcgagaagtag

SEQ ID NO: 78085 - DNA, 1527 bp, synthetic construct
  misc_feature 1..1527: note = Description of Artificial Sequence: Synthetic coding sequence
  source 1..1527: mol_type = other DNA
atgcccagcgagaccccccaggccgaggtgggccccaccggctgcccccacagaagcggcccccaccaccacaccgcccccgccaagagccccaagatcctgcccgacatcctgaagaagatcggcgacacccccatggtgagaatcaacaagatcggcaagaagttcggcctgaagtgcgagctgctggccaagtgcgagttcttcaacgccggcggcagcgtgaaggacagaatcagcctgagaatgatcgaggacgccgagagagacggcaccctgaagcccggcgacaccatcatcgagcccaccagcggcaacaccggcatcggcctggccctggccgccgccgtgagaggctacagatgcatcatcgtgatgcccgagaagatgagcagcgagaaggtggacgtgctgagagccctgggcgccgagatcgtgagaacccccaccaacgccagattcgacagccccgagagccacgtgggcgtggcctggagactgaagaacgagatccccaacagccacatcctggaccagtacagaaacgccagcaaccccctggcccactacgacaccaccgccgacgagatcctgcagcagtgcgacggcaagctggacatgctggtggccagcgtgggcaccggcggcaccatcaccggcatcgccagaaagctgaaggagaagtgccccggctgcagaatcatcggcgtggaccccgagggcagcatcctggccgagcccgaggagctgaaccagaccgagcagaccacctacgaggtggagggcatcggctacgacttcatccccaccgtgctggacagaaccgtggtggacaagtggttcaagagcaacgacgaggaggccttcaccttcgccagaatgctgatcgcccaggagggcctgctgtgcggcggcagcgccggcagcaccgtggccgtggccgtgaaggccgcccaggagctgcaggagggccagagatgcgtggtgatcctgcccgacagcgtgagaaactacatgaccaagttcctgagcgacagatggatgctgcagaagggcttcctgaaggaggaggacctgaccgagaagaagccctggtggtggcacctgagagtgcaggagctgggcctgagcgcccccctgaccgtgctgcccaccatcacctgcggccacaccatcgagatcctgagagagaagggcttcgaccaggcccccgtggtggacgaggccggcgtgatcctgggcatggtgaccctgggcaacatgctgagcagcctgctggccggcaaggtgcagcccagcgaccaggtgggcaaggtgatctacaagcagttcaagcagatcagactgaccgacaccctgggcagactgagccacatcctggagatggaccacttcgccctggtggtgcacgagcagatccagtaccacagcaccggcaagagcagccagagacagatggtgttcggcgtggtgaccgccatcgacctgctgaacttcgtggccgcccaggagagagaccagaagtag

SEQ ID NO: 78086 - DNA, 1392 bp, synthetic construct
  misc_feature 1..1392: note = Description of Artificial Sequence: Synthetic coding sequence
  source 1..1392: mol_type = other DNA
atggtgagaatcaacaagatcggcaagaagttcggcctgaagtgcgagctgctggccaagtgcgagttcttcaacgccggcggcagcgtgaaggacagaatcagcctgagaatgatcgaggacgccgagagagacggcaccctgaagcccggcgacaccatcatcgagcccaccagcggcaacaccggcatcggcctggccctggccgccgccgtgagaggctacagatgcatcatcgtgatgcccgagaagatgagcagcgagaaggtggacgtgctgagagccctgggcgccgagatcgtgagaacccccaccaacgccagattcgacagccccgagagccacgtgggcgtggcctggagactgaagaacgagatccccaacagccacatcctggaccagtacagaaacgccagcaaccccctggcccactacgacaccaccgccgacgagatcctgcagcagtgcgacggcaagctggacatgctggtggccagcgtgggcaccggcggcaccatcaccggcatcgccagaaagctgaaggagaagtgccccggctgcagaatcatcggcgtggaccccgagggcagcatcctggccgagcccgaggagctgaaccagaccgagcagaccacctacgaggtggagggcatcggctacgacttcatccccaccgtgctggacagaaccgtggtggacaagtggttcaagagcaacgacgaggaggccttcaccttcgccagaatgctgatcgcccaggagggcctgctgtgcggcggcagcgccggcagcaccgtggccgtggccgtgaaggccgcccaggagctgcaggagggccagagatgcgtggtgatcctgcccgacagcgtgagaaactacatgaccaagttcctgagcgacagatggatgctgcagaagggcttcctgaaggaggaggacctgaccgagaagaagccctggtggtggcacctgagagtgcaggagctgggcctgagcgcccccctgaccgtgctgcccaccatcacctgcggccacaccatcgagatcctgagagagaagggcttcgaccaggcccccgtggtggacgaggccggcgtgatcctgggcatggtgaccctgggcaacatgctgagcagcctgctggccggcaaggtgcagcccagcgaccaggtgggcaaggtgatctacaagcagttcaagcagatcagactgaccgacaccctgggcagactgagccacatcctggagatggaccacttcgccctggtggtgcacgagcagatccagtaccacagcaccggcaagagcagccagagacagatggtgttcggcgtggtgaccgccatcgacctgctgaacttcgtggccgcccaggagagagaccagaagtag

SEQ ID NO: 78087 - DNA, 312 bp, synthetic construct
  misc_feature 1..312: note = Description of Artificial Sequence: Synthetic coding sequence
  source 1..312: mol_type = other DNA
atgatggccgagccctggcaggccctgcagctgctgctggccatcctgctgaccctgatggccctgccctaccaggccagaaagaagaccttcctgagcgtgcacgaggtgatggccgtggagaactacgccaaggacagcctgcagtggatcaccgaccagtacaacaaggagagcgacgacaagtaccacttcagaatcttcagagtgctgaaggtgcagagacagcaggtgaactgcttcttcagcgtgttcgccgtgccctggttcgagcagtacaagatcctgaacaagagctgcagcagcgactag

SEQ ID NO: 78088 - DNA, 417 bp, synthetic construct
  misc_feature 1..417: note = Description of Artificial Sequence: Synthetic coding sequence
  source 1..417: mol_type = other DNA
atgatggccgagccctggcaggccctgcagctgctgctggccatcctgctgaccctgatggccctgccctaccaggccagaaagaagaccttcctgagcgtgcacgaggtgatggccgtggagaactacgccaaggacagcctgcagtggatcaccgaccagtacaacaaggagagcgacgacaagtaccacttcagaatcttcagagtgctgaaggtgcagagacaggtgaccgaccacctggagtaccacctgaacgtggagatgcagtggaccacctgccagaagcccgagaccaccaactgcgtgccccaggagagagagctgcacaagcaggtgaactgcttcttcagcgtgttcgccgtgccctggttcgagcagtacaagatcctgaacaagagctgcagcagcgactag

SEQ ID NO: 78089 - DNA, 297 bp, synthetic construct
  misc_feature 1..297: note = Description of Artificial Sequence: Synthetic coding sequence
  source 1..297: mol_type = other DNA
atgatccccggcggcctgagcgaggccaagcccgccacccccgagatccaggagatcgtggacaaggtgaagccccagctggaggagaagaccaacgagacctacggcaagctggaggccgtgcagtacaagacccaggtggtggccggcaccaactactacatcaaggtgagagccggcgacaacaagtacatgcacctgaaggtgttcaagagcctgcccggccagaacgaggacctggtgctgaccggctaccaggtggacaagaacaaggacgacgagctgaccggcttctag

SEQ ID NO: 78090 - DNA, 297 bp, synthetic construct
  misc_feature 1..297: note = Description of Artificial Sequence: Synthetic coding sequence
  source 1..297: mol_type = other DNA
atgatgtgcggcgcccccagcgccacccagcccgccaccgccgagacccagcacatcgccgaccaggtgagaagccagctggaggagaaggagaacaagaagttccccgtgttcaaggccgtgagcttcaagagccaggtggtggccggcaccaactacttcatcaaggtgcacgtgggcgacgaggacttcgtgcacctgagagtgttccagagcctgccccacgagaacaagcccctgaccctgagcaactaccagaccaacaaggccaagcacgacgagctgacctacttctag

SEQ ID NO: 78091 - DNA, 441 bp, synthetic construct
  misc_feature 1..441: note = Description of Artificial Sequence: Synthetic coding sequence
  source 1..441: mol_type = other DNA
atggccggccccctgagagcccccctgctgctgctggccatcctggccgtggccctggccgtgagccccgccgccggcagcagccccggcaagccccccagactggtgggcggccccatggacgccagcgtggaggaggagggcgtgagaagagccctggacttcgccgtgggcgagtacaacaaggccagcaacgacatgtaccacagcagagccctgcaggtggtgagagccagaaagcagatcgtggccggcgtgaactacttcctggacgtggagctgggcagaaccacctgcaccaagacccagcccaacctggacaactgccccttccacgaccagccccacctgaagagaaaggccttctgcagcttccagatctacgccgtgccctggcagggcaccatgaccctgagcaagagcacctgccaggacgcctag

SEQ ID NO: 78092 - DNA, 441 bp, synthetic construct; identical to SEQ ID NO: 78091
  misc_feature 1..441: note = Description of Artificial Sequence: Synthetic coding sequence
  source 1..441: mol_type = other DNA

SEQ ID NO: 78093 - DNA, 441 bp, synthetic construct; identical to SEQ ID NO: 78091
  misc_feature 1..441: note = Description of Artificial Sequence: Synthetic coding sequence
  source 1..441: mol_type = other DNA

SEQ ID NO: 78094 - DNA, 429 bp, synthetic construct
  misc_feature 1..429: note = Description of Artificial Sequence: Synthetic coding sequence
  source 1..429: mol_type = other DNA
atgatgtggcccatgcacacccccctgctgctgctgaccgccctgatggtggccgtggccggcagcgccagcgcccagagcagaaccctggccggcggcatccacgccaccgacctgaacgacaagagcgtgcagtgcgccctggacttcgccatcagcgagtacaacaaggtgatcaacaaggacgagtactacagcagacccctgcaggtgatggccgcctaccagcagatcgtgggcggcgtgaactactacttcaacgtgaagttcggcagaaccacctgcaccaagagccagcccaacctggacaactgccccttcaacgaccagcccaagctgaaggaggaggagttctgcagcttccagatcaacgaggtgccctgggaggacaagatcagcatcctgaactacaagtgcagaaaggtgtag

SEQ ID NO: 78095 - DNA, 1578 bp, synthetic construct
  misc_feature 1..1578: note = Description of Artificial Sequence: Synthetic coding sequence
  source 1..1578: mol_type = other DNA
atggccaccctgctgagaagcaagctgagcaacgtggccaccagcgtgagcaacaagagccaggccaagatgagcggcatgttcgccagaatgggcttccaggccgccaccgacgaggaggccgtgggcttcgcccactgcgacgacctggacttcgagcacagacagggcctgcagatggacatcctgaaggccgagggcgagccctgcggcgacgagggcgccgaggcccccgtggagggcgacatccactaccagagaggcagcggcgcccccctgccccccagcggcagcaaggaccaggtgggcggcggcggcgagttcggcggccacgacaagcccaagatcaccgcctgggaggccggctggaacgtgaccaacgccatccagggcatgttcgtgctgggcctgccctacgccatcctgcacggcggctacctgggcctgttcctgatcatcttcgccgccgtggtgtgctgctacaccggcaagatcctgatcgcctgcctgtacgaggagaacgaggacggcgaggtggtgagagtgagagacagctacgtggccatcgccaacgcctgctgcgcccccagattccccaccctgggcggcagagtggtgaacgtggcccagatcatcgagctggtgatgacctgcatcctgtacgtggtggtgagcggcaacctgatgtacaacagcttccccggcctgcccgtgagccagaagagctggagcatcatcgccaccgccgtgctgctgccctgcgccttcctgaagaacctgaaggccgtgagcaagttcagcctgctgtgcaccctggcccacttcgtgatcaacatcctggtgatcgcctactgcctgagcagagccagagactgggcctgggagaaggtgaagttctacatcgacgtgaagaagttccccatcagcatcggcatcatcgtgttcagctacaccagccagatcttcctgcccagcctggagggcaacatgcagcagcccagcgagttccactgcatgatgaactggacccacatcgccgcctgcgtgctgaagggcctgttcgccctggtggcctacctgacctgggccgacgagaccaaggaggtgatcaccgacaacctgcccggcagcatcagagccgtggtgaacatcttcctggtggccaaggccctgctgagctaccccctgcccttcttcgccgccgtggaggtgctggagaagagcctgttccaggagggcagcagagccttcttccccgcctgctacagcggcgacggcagactgaagagctggggcctgaccctgagatgcgccctggtggtgttcaccctgctgatggccatctacgtgccccacttcgccctgctgatgggcctgaccggcagcctgaccggcgccggcctgtgcttcctgctgcccagcctgttccacctgagactgctgtggagaaagctgctgtggcaccaggtgttcttcgacgtggccatcttcgtgatcggcggcatctgcagcgtgagcggcttcgtgcacagcctggagggcctgatcgaggcctacagaaccaacgccgaggactag

SEQ ID NO: 78096 - DNA, 426 bp, synthetic construct
  misc_feature 1..426: note = Description of Artificial Sequence: Synthetic coding sequence
  source 1..426: mol_type = other DNA
atggcctggcccctgtgcaccctgctgctgctgctggccacccaggccgtggccctggcctggagcccccaggaggaggacagaatcatcgagggcggcatctacgacgccgacctgaacgacgagagagtgcagagagccctgcacttcgtgatcagcgagtacaacaaggccaccgaggacgagtactacagaagactgctgagagtgctgagagccagagagcagatcgtgggcggcgtgaactacttcttcgacatcgaggtgggcagaaccatctgcaccaagagccagcccaacctggacacctgcgccttccacgagcagcccgagctgcagaagaagcagctgtgcagcttccagatctacgaggtgccctgggaggacagaatgagcctggtgaacagcagatgccaggaggcctag

SEQ ID NO: 78097 - DNA, 426 bp, synthetic construct
  misc_feature 1..426: note = Description of Artificial Sequence: Synthetic coding sequence
  source 1..426: mol_type = other DNA
atggcccagtacctgagcaccctgctgctgctgctggccaccctggccgtggccctggcctggagccccaaggaggaggacagaatcatccccggcggcatctacaacgccgacctgaacgacgagtgggtgcagagagccctgcacttcgccatcagcgagtacaacaaggccaccaaggacgactactacagaagacccctgagagtgctgagagccagacagcagaccgtgggcggcgtgaactacttcttcgacgtggaggtgggcagaaccatctgcaccaagagccagcccaacctggacacctgcgccttccacgagcagcccgagctgcagaagaagcagctgtgcagcttcgagatctacgaggtgccctgggagaacagaagaagcctggtgaagagcagatgccaggagagctag

SEQ ID NO: 78098 - DNA, 426 bp, synthetic construct; identical to SEQ ID NO: 78097
  misc_feature 1..426: note = Description of Artificial Sequence: Synthetic coding sequence
  source 1..426: mol_type = other DNA

SEQ ID NO: 78099 - DNA, 582 bp, synthetic construct
  misc_feature 1..582: note = Description of Artificial Sequence: Synthetic coding sequence
  source 1..582: mol_type = other DNA
atgcccaactggggcggcggcaagaagtgcggcgtgtgccagaagaccgtgtacttcgccgaggaggtgcagtgcgagggcaacagcttccacaagagctgcttcctgtgcatggtgtgcaagaagaacctggacagcaccaccgtggccgtgcacggcgaggagatctactgcaagagctgctacggcaagaagtacggccccaagggctacggctacggccagggcgccggcaccctgagcaccgacaagggcgagagcctgggcatcaagcacgaggaggcccccggccacagacccaccaccaaccccaacgccagcaagttcgcccagaagatcggcggcagcgagagatgccccagatgcagccaggccgtgtacgccgccgagaaggtgatcggcgccggcaagagctggcacaaggcctgcttcagatgcgccaagtgcggcaagggcctggagagcaccaccctggccgacaaggacggcgagatctactgcaagggctgctacgccaagaacttcggccccaagggcttcggcttcggccagggcgccggcgccctggtgcacagcgagtag

SEQ ID NO: 78100 - DNA, 582 bp, synthetic construct; identical to SEQ ID NO: 78099
  misc_feature 1..582: note = Description of Artificial Sequence: Synthetic coding sequence
  source 1..582: mol_type = other DNA

SEQ ID NO: 78101 - DNA, 582 bp, synthetic construct; identical to SEQ ID NO: 78099
  misc_feature 1..582: note = Description of Artificial Sequence: Synthetic coding sequence
  source 1..582: mol_type = other DNA

SEQ ID NO: 78102 - DNA, 582 bp, synthetic construct; identical to SEQ ID NO: 78099
  misc_feature 1..582: note = Description of Artificial Sequence: Synthetic coding sequence
  source 1..582: mol_type = other DNA

SEQ ID NO: 78103 - DNA, 513 bp, synthetic construct
  misc_feature 1..513: note = Description of Artificial Sequence: Synthetic coding sequence
  source 1..513: mol_type = other DNA
atgcccaactggggcggcggcaagaagtgcggcgtgtgccagaagaccgtgtacttcgccgaggaggtgcagtgcgagggcaacagcttccacaagagctgcttcctgtgcatggtgtgcaagaagaacctggacagcaccaccgtggccgtgcacggcgaggagatctactgcaagagctgctacggcaagaagtacggccccaagggctacggctacggccagggcgccggcaccaaccccaacgccagcaagttcgcccagaagatcggcggcagcgagagatgccccagatgcagccaggccgtgtacgccgccgagaaggtgatcggcgccggcaagagctggcacaaggcctgcttcagatgcgccaagtgcggcaagggcctggagagcaccaccctggccgacaaggacggcgagatctactgcaagggctgctacgccaagaacttcggccccaagggcttcggcttcggccagggcgccggcgccctggtgcacagcgagtag

SEQ ID NO: 78104 - DNA, 582 bp, synthetic construct
  misc_feature 1..582: note = Description of Artificial Sequence: Synthetic coding sequence
  source 1..582: mol_type = other DNA
atgcccgtgtggggcggcggcaacaagtgcggcgcctgcggcagaaccgtgtaccacgccgaggaggtgcagtgcgacggcagaagcttccacagatgctgcttcctgtgcatggtgtgcagaaagaacctggacagcaccaccgtggccatccacgacgaggagatctactgcaagagctgctacggcaagaagtacggccccaagggctacggctacggccagggcgccggcaccctgaacatggacagaggcgagagactgggcatcaagcccgagagcgtgcagccccacagacccaccaccaaccccaacaccagcaagttcgcccagaagtacggcggcgccgagaagtgcagcagatgcggcgacagcgtgtacgccgccgagaagatcatcggcgccggcaagccctggcacaagaactgcttcagatgcgccaagtgcggcaagagcctggagagcaccaccctgaccgagaaggagggcgagatctactgcaagggctgctacgccaagaacttcggccccaagggcttcggctacggccagggcgccggcgccctggtgcacgcccagtag

SEQ ID NO: 78105 - DNA, 582 bp, synthetic construct; identical to SEQ ID NO: 78104
  misc_feature 1..582: note = Description of Artificial Sequence: Synthetic coding sequence
  source 1..582: mol_type = other DNA

SEQ ID NO: 78106 - DNA, 585 bp, synthetic construct
  misc_feature 1..585: note = Description of Artificial Sequence: Synthetic coding sequence
  source 1..585: mol_type = other DNA
atgcccaactggggcggcggcgccaagtgcggcgcctgcgagaagaccgtgtaccacgccgaggagatccagtgcaacggcagaagcttccacaagacctgcttccactgcatggcctgcagaaaggccctggacagcaccaccgtggccgcccacgagagcgagatctactgcaaggtgtgctacggcagaagatacggccccaagggcatcggctacggccagggcgccggctgcctgagcaccgacaccggcgagcacctgggcctgcagttccagcagagccccaagcccgccagaagcgtgaccaccagcaaccccagcaagttcaccgccaagttcggcgagagcgagaagtgccccagatgcggcaagagcgtgtacgccgccgagaaggtgatgggcggcggcaagccctggcacaagacctgcttcagatgcgccatctgcggcaagagcctggagagcaccaacgtgaccgacaaggacggcgagctgtactgcaaggtgtgctacgccaagaacttcggccccaccggcatcggcttcggcggcctgacccagcaggtggagaagaaggagtag

SEQ ID NO: 78107 - DNA, 585 bp, synthetic construct; identical to SEQ ID NO: 78106
  misc_feature 1..585: note = Description of Artificial Sequence: Synthetic coding sequence
  source 1..585: mol_type = other DNA

SEQ ID NO: 78108 - DNA, 1365 bp, synthetic construct
  misc_feature 1..1365: note = Description of Artificial Sequence: Synthetic coding sequence
  source 1..1365: mol_type = other DNA
atgttcctggcccagagaagcctgtgcagcctgagcggcagagccaagttcctgaagaccatcagcagcagcaagatcctgggcttcagcaccagcgccaagatgagcctgaagttcaccaacgccaagagaatcgagggcctggacagcaacgtgtggatcgagttcaccaagctggccgccgaccccagcgtggtgaacctgggccagggcttccccgacatcagcccccccacctacgtgaaggaggagctgagcaagatcgccgccatcgacagcctgaaccagtacaccagaggcttcggccaccccagcctggtgaaggccctgagctacctgtacgagaagctgtaccagaagcagatcgacagcaacaaggagatcctggtgaccgtgggcgcctacggcagcctgttcaacaccatccaggccctgatcgacgagggcgacgaggtgatcctgatcgtgcccttctacgactgctacgagcccatggtgagaatggccggcgccacccccgtgttcatccccctgagaagcaagcccgtgtacggcaagagatggagcagcagcgactggaccctggacccccaggagctggagagcaagttcaacagcaagaccaaggccatcatcctgaacaccccccacaaccccctgggcaaggtgtacaacagagaggagctgcaggtgatcgccgacctgtgcatcaagtacgacaccctgtgcatcagcgacgaggtgtacgagtggctggtgtacagcggcaacaagcacctgaagatcgccaccttccccggcatgtgggagagaaccatcaccatcggcagcgccggcaagaccttcagcgtgaccggctggaagctgggctggagcatcggccccaaccacctgatcaagcacctgcagaccgtgcagcagaacaccatctacacctgcgccacccccctgcaggaggccctggcccaggccttctggatcgacatcaagagaatggacgaccccgagtgctacttcaacagcctgcccaaggagctggaggtgaagagagacagaatggtgagactgctggagagcgtgggcctgaagcccatcgtgcccgacggcggctacttcatcatcgccgacgtgagcctgctggaccccgacctgagcgacatgaagaacaacgagccctacgactacaagttcgtgaagtggatgaccaagcacaagaagctgagcgccatccccgtgagcgccttctgcaacagcgagaccaagagccagttcgagaagttcgtgagattctgcttcatcaagaaggacagcaccctggacgccgccgaggagatcatcaaggcctggagcgtgcagaagagctag

SEQ ID NO: 78109 - DNA, 504 bp, synthetic construct
  misc_feature 1..504: note = Description of Artificial Sequence: Synthetic coding sequence
  source 1..504: mol_type = other DNA
atgttcctggcccagagaagcctgtgcagcctgagcggcagagccaagttcctgaagaccatcagcagcagcaagatcctgggcttcagcaccagcgccaagatgagcctgaagttcaccaacgccaagagaatcgagggcctggacagcaacgtgtggatcgagttcaccaagctggccgccgaccccagcgtggtgaacctgggccagggcttccccgacatcagcccccccacctacgtgaaggaggagctgagcaagatcgccgccatcgacagcctgaaccagtacaccagaggcttcggccaccccagcctggtgaaggccctgagctacctgtacgagaagctgtaccagaagcagatcgacagcaacaaggagatcctggtgaccgtgggcgcctacggcagcctgttcaacaccatccaggccctgatcgacgagggcgacgagtacaacgcctgcaccgtgaagttcaccaacctgaagtgcaccgccggctag

SEQ ID NO: 78110 - DNA, 789 bp, synthetic construct
  misc_feature 1..789: note = Description of Artificial Sequence: Synthetic coding sequence
  source 1..789: mol_type = other DNA
atgttcctggcccagagaagcctgtgcagcctgagcggcagagccaagttcctgaagaccatcagcagcagcaagatcctgggcttcagcaccagcgccaagatgagcctgaagttcaccaacgccaagagaatcgagggcctggacagcaacgtgtggatcgagttcaccaagctggccgccgaccccagcgtggtgaacctgggccagggcttccccgacatcagcccccccacctacgtgaaggaggagctgagcaagatcgccgccatcgacagcctgaaccagtacaccagaggcttcggccaccccagcctggtgaaggccctgagctacctgtacgagaagctgtaccagaagcagatcgacagcaacaaggagatcctggtgaccgtgggcgcctacggcagcctgttcaacaccatccaggccctgatcgacgagggcgacgaggtgatcctgatcgtgcccttctacgactgctacgagcccatggtgagaatggccggcgccacccccgtgttcatccccctgagaagcaagcccgtgtacggcaagagatggagcagcagcgactggaccctggacccccaggagctggagagcaagttcaacagcaagaccaaggccatcatcctgaacaccccccacaaccccctgggcaaggtgtacaacagagaggagctgcaggtgatcgccgacctgtgcatcaagtacgacaccctgtgcatcagcgacgaggtgtacgagtggctggtgtacagcggcaacaagcacctgaagatctag

SEQ ID NO: 78111 - DNA, 1263 bp, synthetic construct
  misc_feature 1..1263: note = Description of Artificial Sequence: Synthetic coding sequence
  source 1..1263: mol_type = other DNA
atgagcctgaagttcaccaacgccaagagaatcgagggcctggacagcaacgtgtggatcgagttcaccaagctggccgccgaccccagcgtggtgaacctgggccagggcttccccgacatcagcccccccacctacgtgaaggaggagctgagcaagatcgccgccatcgacagcctgaaccagtacaccagaggcttcggccaccccagcctggtgaaggccctgagctacctgtacgagaagctgtaccagaagcagatcgacagcaacaaggagatcctggtgaccgtgggcgcctacggcagcctgttcaacaccatccaggccctgatcgacgagggcgacgaggtgatcctgatcgtgcccttctacgactgctacgagcccatggtgagaatggccggcgccacccccgtgttcatccccctgagaagcaagcccgtgtacggcaagagatggagcagcagcgactggaccctggacccccaggagctggagagcaagttcaacagcaagaccaaggccatcatcctgaacaccccccacaaccccctgggcaaggtgtacaacagagaggagctgcaggtgatcgccgacctgtgcatcaagtacgacaccctgtgcatcagcgacgaggtgtacgagtggctggtgtacagcggcaacaagcacctgaagatcgccaccttccccggcatgtgggagagaaccatcaccatcggcagcgccggcaagaccttcagcgtgaccggctggaagctgggctggagcatcggccccaaccacctgatcaagcacctgcagaccgtgcagcagaacaccatctacacctgcgccacccccctgcaggaggccctggcccaggccttctggatcgacatcaagagaatggacgaccccgagtgctacttcaacagcctgcccaaggagctggaggtgaagagagacagaatggtgagactgctggagagcgtgggcctgaagcccatcgtgcccgacggcggctacttcatcatcgccgacgtgagcctgctggaccccgacctgagcgacatgaagaacaacgagccctacgactacaagttcgtgaagtggatgaccaagcacaagaagctgagcgccatccccgtgagcgccttctgcaacagcgagaccaagagccagttcgagaagttcgtgagattctgcttcatcaagaaggacagcaccctggacgccgccgaggagatcatcaaggcctggagcgtgcagaagagctag

SEQ ID NO: 78112 - DNA, 1269 bp, synthetic construct
  misc_feature 1..1269: note = Description of Artificial Sequence: Synthetic coding sequence
  source 1..1269: mol_type = other DNA
atggccaagcagctgcaggccagaagactggacggcatcgactacaacccctgggtggagttcgtgaagctggccagcgagcacgacgtggtgaacctgggccagggcttccccgacttccccccccccgacttcgccgtggaggccttccagcacgccgtgagcggcgacttcatgctgaaccagtacaccaagaccttcggctacccccccctgaccaagatcctggccagcttcttcggcgagctgctgggccaggagatcgaccccctgagaaacgtgctggtgaccgtgggcggctacggcgccctgttcaccgccttccaggccctggtggacgagggcgacgaggtgatcatcatcgagcccttcttcgactgctacgagcccatgaccatgatggccggcggcagacccgtgttcgtgagcctgaagcccggccccatccagaacggcgagctgggcagcagcagcaactggcagctggaccccatggagctggccggcaagttcaccagcagaaccaaggccctggtgctgaacacccccaacaaccccctgggcaaggtgttcagcagagaggagctggagctggtggccagcctgtgccagcagcacgacgtggtgtgcatcaccgacgaggtgtaccagtggatggtgtacgacggccaccagcacatcagcatcgccagcctgcccggcatgtgggagagaaccctgaccatcggcagcgccggcaagaccttcagcgccaccggctggaaggtgggctgggtgctgggccccgaccacatcatgaagcacctgagaaccgtgcaccagaacagcgtgttccactgccccacccagagccaggccgccgtggccgagagcttcgagagagagcagctgctgttcagacagcccagcagctacttcgtgcagttcccccaggccatgcagagatgcagagaccacatgatcagaagcctgcagagcgtgggcctgaagcccatcatcccccagggcagctacttcctgatcaccgacatcagcgacttcaagagaaagatgcccgacctgcccggcgccgtggacgagccctacgacagaagattcgtgaagtggatgatcaagaacaagggcctggtggccatccccgtgagcatcttctacagcgtgccccaccagaagcacttcgaccactacatcagattctgcttcgtgaaggacgaggccaccctgcaggccatggacgagaagctgagaaagtggaaggtggagctgtag

SEQ ID NO: 78113 - DNA, 1119 bp, synthetic construct
  misc_feature 1..1119: note = Description of Artificial Sequence: Synthetic coding sequence
  source 1..1119: mol_type = other DNA
atggccaagcagctgcaggccagaagactggacggcatcgactacaacccctgggtggagttcgtgaagctggccagcgagcacgacgtggtgaacctgggccagggcttccccgacttccccccccccgacttcgccgtggaggccttccagcacgccgtgagcggcgacttcatgctgaaccagtacaccaagaccttcgtgatcatcatcgagcccttcttcgactgctacgagcccatgaccatgatggccggcggcagacccgtgttcgtgagcctgaagcccggccccatccagaacggcgagctgggcagcagcagcaactggcagctggaccccatggagctggccggcaagttcaccagcagaaccaaggccctggtgctgaacacccccaacaaccccctgggcaaggtgttcagcagagaggagctggagctggtggccagcctgtgccagcagcacgacgtggtgtgcatcaccgacgaggtgtaccagtggatggtgtacgacggccaccagcacatcagcatcgccagcctgcccggcatgtgggagagaaccctgaccatcggcagcgccggcaagaccttcagcgccaccggctggaaggtgggctgggtgctgggccccgaccacatcatgaagcacctgagaaccgtgcaccagaacagcgtgttccactgccccacccagagccaggccgccgtggccgagagcttcgagagagagcagctgctgttcagacagcccagcagctacttcgtgcagttcccccaggccatgcagagatgcagagaccacatgatcagaagcctgcagagcgtgggcctgaagcccatcatcccccagggcagctacttcctgatcaccgacatcagcgacttcaagagaaagatgcccgacctgcccggcgccgtggacgagccctacgacagaagattcgtgaagtggatgatcaagaacaagggcctggtggccatccccgtgagcatcttctacagcgtgccccaccagaagcacttcgaccactacatcagattctgcttcgtgaaggacgaggccaccctgcaggccatggacgagaagctgagaaagtggaaggtggagctgtag

SEQ ID NO: 78114 - DNA, 480 bp, synthetic construct
  misc_feature 1..480: note = Description of Artificial Sequence: Synthetic coding sequence
  source 1..480: mol_type = other DNA
gccatggccaagcagctgcaggccagaagactggacggcatcgactacaacccctgggtggagttcgtgaagctggccagcgagcacgacgtggtgaacctgggccagggcttccccgacttccccccccccgacttcgccgtggaggccttccagcacgccgtgagcggcgacttcatgctgaaccagtacaccaagaccttcgtgagcctgtgctaccccggctggagcgccatggtgagaagctggagcaccgccgccctgaccctgcccgtgagcagcggcccccccaccagcgccagcggcgtgaccggcaccaccggctggagccagagctggctggagagcagcttcttcgaccccaagaagaagaagatcatctggggctacccccccctgaccaagatcctggccagcttcttcggcgagctgctgggccaggagatcgaccccctgagaaacgtgctggtgaccgtgtag

SEQ ID NO: 78115 - DNA, 555 bp, synthetic construct
  misc_feature 1..555: note = Description of Artificial Sequence: Synthetic coding sequence
  source 1..555: mol_type = other DNA
atggccaagcagctgcaggccagaagactggacggcatcgactacaacccctgggtggagttcgtgaagctggccagcgagcacgacgtggtgaacctgggccagggcttccccgacttccccccccccgacttcgccgtggaggccttccagcacgccgtgagcggcgacttcatgctgaaccagtacaccaagaccttcggctacccccccctgaccaagatcctggccagcttcttcggcgagctgctgggccaggagatcgaccccctgagaaacgtgctggtgaccgtgggcggctacggcgccctgttcaccgccttccaggccctggtggacgagggcgacgaggtgatcatcatcgagcccttcttcgactgctacgagcccatgaccatgatggccggcggcagacccgtgttcgtgagcctgaagcccggccccatccagaacggcgagctgggcagcagcagcaactggcagctggaccccatggagctggccggcaagttcaccagcagaaccaaggccctggtgctgaacacccccaactag

SEQ ID NO: 78116 - DNA, 480 bp, synthetic construct; identical to SEQ ID NO: 78114
  misc_feature 1..480: note = Description of Artificial Sequence: Synthetic coding sequence
  source 1..480: mol_type = other DNA

SEQ ID NO: 78117 - DNA, 1551 bp, synthetic construct
  misc_feature 1..1551: note = Description of Artificial Sequence: Synthetic coding sequence
  source 1..1551: mol_type = other DNA
atgttcagaaccgccgccgccatcagcgtgcacctggtgggccccctgcagggcagaaaggccggcgcccccctgacctggttcctgcaccagacccaggtggccgagaagaacgtgggcagccccgcccccagacccaccagccacctgggcctggccaacccccaggagagaaaggtgccccagggcccccagagcccctgcgaggtgcccgccgccgagggcatcctgagaaccggcggcgccaagctgcccatccagggccaccccgccaagctggccatggccaagcagctgcaggccagaagactggacggcatcgactacaacccctgggtggagttcgtgaagctggccagcgagcacgacgtggtgaacctgggccagggcttccccgacttccccccccccgacttcgccgtggaggccttccagcacgccgtgagcggcgacttcatgctgaaccagtacaccaagaccttcggctacccccccctgaccaagatcctggccagcttcttcggcgagctgctgggccaggagatcgaccccctgagaaacgtgctggtgaccgtgggcggctacggcgccctgttcaccgccttccaggccctggtggacgagggcgacgaggtgatcatcatcgagcccttcttcgactgctacgagcccatgaccatgatggccggcggcagacccgtgttcgtgagcctgaagcccggccccatccagaacggcgagctgggcagcagcagcaactggcagctggaccccatggagctggccggcaagttcaccagcagaaccaaggccctggtgctgaacacccccaacaaccccctgggcaaggtgttcagcagagaggagctggagctggtggccagcctgtgccagcagcacgacgtggtgtgcatcaccgacgaggtgtaccagtggatggtgtacgacggccaccagcacatcagcatcgccagcctgcccggcatgtgggagagaaccctgaccatcggcagcgccggcaagaccttcagcgccaccggctggaaggtgggctgggtgctgggccccgaccacatcatgaagcacctgagaaccgtgcaccagaacagcgtgttccactgccccacccagagccaggccgccgtggccgagagcttcgagagagagcagctgctgttcagacagcccagcagctacttcgtgcagttcccccaggccatgcagagatgcagagaccacatgatcagaagcctgcagagcgtgggcctgaagcccatcatcccccagggcagctacttcctgatcaccgacatcagcgacttcaagagaaagatgcccgacctgcccggcgccgtggacgagccctacgacagaagattcgtgaagtggatgatcaagaacaagggcctggtggccatccccgtgagcatcttctacagcgtgccccaccagaagcacttcgaccactacatcagattctgcttcgtgaaggacgaggccaccctgcaggccatggacgagaagctgagaaagtggaaggtggagctgtag

SEQ ID NO: 78118 - DNA, 756 bp, synthetic construct
  misc_feature 1..756: note = Description of Artificial Sequence: Synthetic coding sequence
  source 1..756: mol_type = other DNA
atggccaagcagctgcaggccagaagactggacggcatcgactacaacccctgggtggagttcgtgaagctggccagcgagcacgacgtggtgaacctgggccagggcttccccgacttccccccccccgacttcgccgtggaggccttccagcacgccgtgagcggcgacttcatgctgaaccagtacaccaagaccttcggctacccccccctgaccaagatcctggccagcttcttcggcgagctgctgggccaggagatcgaccccctgagaaacgtgctggtgaccgtgggcggctacggcgccctgttcaccgccttccaggccctggtggacgagggcgacgaggtgatcatcatcgagcccttcttcgactgctacgagcccatgaccatgatggccggcggcagacccgtgttcgtgagcctgaagcccggccccatccagaacggcgagctgggcagcagcagcaactggcagctggaccccatggagctggccggcaagttcaccagcagaaccaaggccctggtgctgaacacccccaacaaccccctgggcaaggtgttcagcagagaggagctggagctggtggccagcctgtgccagcagcacgacgtggtgtgcatcaccgacgaggtgtaccagtggatggtgtacgacggccaccagcacatcagcatcgccagcctgcccggcatgtgggagagaaccctgaccatcggcagcgccggcaagaccttcagcgcctag

SEQ ID NO: 78119 - DNA, 603 bp, synthetic construct
  misc_feature 1..603: note = Description of Artificial Sequence: Synthetic coding sequence
  source 1..603: mol_type = other DNA
atggagcagaccgaggtgctgaagcccagaaccctggccgacctgatcagaatcctgcaccagctgttcgccggcgacgaggtgaacgtggaggaggtgcaggccatcatggaggcctacgagagcgaccccaccgagtgggccatgtacgccaagttcgaccagtacagatacaccagaaacctggtggaccagggcaacggcaagttcaacctgatgatcctgtgctggggcgagggccacggcagcagcatccacgaccacaccaacagccactgcttcctgaagatgctgcagggcaacctgaaggagaccctgttcgcctggcccgacaagaagagcaacgagatggtgaagaagagcgagagagtgctgagagagaaccagtgcgcctacatcaacgacagcatcggcctgcacagagtggagaacatcagccacaccgagcccgccgtgagcctgcacctgtacagcccccccttcgacacctgccacgccttcgaccagagaaccggccacaagaacaaggtgaccatgaccttccacagcaagttcggcatcagaacccccaacgccaccagcggcagcctggagaacaactag

SEQ ID NO: 78120 - DNA, 3111 bp, synthetic construct
  misc_feature 1..3111: note = Description of Artificial Sequence: Synthetic coding sequence
  source 1..3111: mol_type = other DNA
atgtacctggtggccggcgacagaggcctggccggctgcggccacctgctggtgagcctgctgggcctgctgctgctgctggccagaagcggcaccagagccctggtgtgcctgccctgcgacgagagcaagtgcgaggagcccagaaactgccccggcagcatcgtgcagggcgtgtgcggctgctgctacacctgcgccagccagagaaacgagagctgcggcggcaccttcggcatctacggcacctgcgacagaggcctgagatgcgtgatcagaccccccctgaacggcgacagcctgaccgagtacgaggccggcgtgtgcgaggacgagaactggaccgacgaccagctgctgggcttcaagccctgcaacgagaacctgatcgccggctgcaacatcatcaacggcaagtgcgagtgcaacaccatcagaacctgcagcaaccccttcgagttccccagccaggacatgtgcctgagcgccctgaagagaatcgaggaggagaagcccgactgcagcaaggccagatgcgaggtgcagttcagccccagatgccccgaggacagcgtgctgatcgagggctacgccccccccggcgagtgctgccccctgcccagcagatgcgtgtgcaaccccgccggctgcctgagaaaggtgtgccagcccggcaacctgaacatcctggtgagcaaggccagcggcaagcccggcgagtgctgcgacctgtacgagtgcaagcccgtgttcggcgtggactgcagaaccgtggagtgcccccccgtgcagcagaccgcctgcccccccgacagctacgagacccaggtgagactgaccgccgacggctgctgcaccctgcccaccagatgcgagtgcctgagcggcctgtgcggcttccccgtgtgcgaggtgggcagcacccccagaatcgtgagcagaggcgacggcacccccggcaagtgctgcgacgtgttcgagtgcgtgaacgacaccaagcccgcctgcgtgttcaacaacgtggagtactacgacggcgacatgttcagaatggacaactgcagattctgcagatgccagggcggcgtggccatctgcttcaccgcccagtgcggcgagatcaactgcgagagatactacgtgcccgagggcgagtgctgccccgtgtgcgaggaccccgtgtaccccttcaacaaccccgccggctgctacgccaacggcctgatcctggcccacggcgacagatggagagaggacgactgcaccttctgccagtgcgtgaacggcgagagacactgcgtggccaccgtgtgcggccagacctgcaccaaccccgtgaaggtgcccggcgagtgctgccccgtgtgcgaggagcccaccatcatcaccgtggacccccccgcctgcggcgagctgagcaactgcaccctgaccggcaaggactgcatcaacggcttcaagagagaccacaacggctgcagaacctgccagtgcatcaacaccgaggagctgtgcagcgagagaaagcagggctgcaccctgaactgccccttcggcttcctgaccgacgcccagaactgcgagatctgcgagtgcagacccagacccaagaagtgcagacccatcatctgcgacaagtactgccccctgggcctgctgaagaacaagcacggctgcgacatctgcagatgcaagaagtgccccgagctgagctgcagcaagatctgccccctgggcttccagcaggacagccacggctgcctgatctgcaagtgcagagaggccagcgccagcgccggcccccccatcctgagcggcacctgcctgaccgtggacggccaccaccacaagaacgaggagagctggcacgacggctgcagagagtgctactgcctgaacggcagagagatgtgcgccctgatcacctgccccgtgcccgcctgcggcaaccccaccatccaccccggccagtgctgccccagctgcgccgacgacttcgtggtgcagaagcccgagctgagcacccccagcatctgccacgcccccggcggcgagtacttcgtggagggcgagacctggaacatcgacagctgcacccagtgcacctgccacagcggcagagtgctgtgcgagaccgaggtgtgcccccccctgctgtgccagaaccccagcagaacccaggacagctgctgcccccagtgcaccgaccagcccttcagacccagcctgagcagaaacaacagcgtgcccaactactgcaagaacgacgagggcgacatcttcctggccgccgagagctggaagcccgacgtgtgcaccagctgcatctgcatcgacagcgtgatcagctgcttcagcgagagctgccccagcgtgagctgcgagagacccgtgctgagaaagggccagtgctgcccctactgcatcgaggacaccatccccaagaaggtggtgtgccacttcagcggcaaggcctacgccgacgaggagagatgggacctggacagctgcacccactgctactgcctgcagggccagaccctgtgcagcaccgtgagctgcccccccctgccctgcgtggagcccatcaacgtggagggcagctgctgccccatgtgccccgagatgtacgtgcccgagcccaccaacatccccatcgagaagaccaaccacagaggcgaggtggacctggaggtgcccctgtggcccacccccagcgagaacgacatcgtgcacctgcccagagacatgggccacctgcaggtggactacagagacaacagactgcaccccagcgaggacagcagcctggacagcatcgccagcgtggtggtgcccatcatcatctgcctgagcatcatcatcgccttcctgttcatcaaccagaagaagcagtggatccccctgctgtgctggtacagaacccccaccaagcccagcagcctgaacaaccagctggtgagcgtggactgcaagaagggcaccagagtgcaggtggacagcagccagagaatgctgagaatcgccgagcccgacgccagattcagcggcttctacagcatgcagaagcagaaccacctgcaggccgacaacttctaccagaccgtgtag

SEQ ID NO: 78121 - DNA, 498 bp, synthetic construct
  misc_feature 1..498: note = Description of Artificial Sequence: Synthetic coding sequence
  source 1..498: mol_type = other DNA
atggccgacttcgacgagatctacgaggaggaggaggacgaggagagagccctggaggagcagctgctgaagtacagccccgaccccgtggtggtgagaggcagcggccacgtgaccgtgttcggcctgagcaacaagttcgagagcgagttccccagcagcctgaccggcaaggtggcccccgaggagttcaaggccagcatcaacagagtgaacagctgcctgaagaagaacctgcccgtgaacgtgagatggctgctgtgcggctgcctgtgctgctgctgcaccctgggctgcagcatgtggcccgtgatctgcctgagcaagagaaccagaagaagcatcgagaagctgctggagtgggagaacaacagactgtaccacaagctgtgcctgcactggagactgagcaagagaaagtgcgagaccaacaacatgatggagtacgtgatcctgatcgagttcctgcccaagacccccatcttcagacccgactag

SEQ ID NO: 78122 - DNA, 234 bp, synthetic construct
  misc_feature 1..234: note = Description of Artificial Sequence: Synthetic coding sequence
  source 1..234: mol_type = other DNA
atgcccaagtgccccaagtgcaacaaggaggtgtacttcgccgagagagtgaccagcctgggcaaggactggcacagaccctgcctgaagtgcgagaagtgcggcaagaccctgaccagcggcggccacgccgagcacgagggcaagccctactgcaaccacccctgctacgccgccatgttcggccccaagggcttcggcagaggcggcgccgagagccacaccttcaagtag

SEQ ID NO: 78123 - DNA, 234 bp, synthetic construct; identical to SEQ ID NO: 78122
  misc_feature 1..234: note = Description of Artificial Sequence: Synthetic coding sequence
  source 1..234: mol_type = other DNA

SEQ ID NO: 78124 - DNA, 234 bp, synthetic construct; identical to SEQ ID NO: 78122
  misc_feature 1..234: note = Description of Artificial Sequence: Synthetic coding sequence
  source 1..234: mol_type = other DNA

SEQ ID NO: 78125 - DNA, 627 bp, synthetic construct
  misc_feature 1..627: note = Description of Artificial Sequence: Synthetic coding sequence
  source 1..627: mol_type = other DNA
atggccagcaagtgccccaagtgcgacaagaccgtgtacttcgccgagaaggtgagcagcctgggcaaggactggcacaagttctgcctgaagtgcgagagatgcagcaagaccctgacccccggcggccacgccgagcacgacggcaagcccttctgccacaagccctgctacgccaccctgttcggccccaagggcgtgaacatcggcggcgccggcagctacatctacgagaagcccctggccgagggcccccaggtgaccggccccatcgaggtgcccgccgccagagccgaggagagaaaggccagcggcccccccaagggccccagcagagccagcagcgtgaccaccttcaccggcgagcccaacacctgccccagatgcagcaagaaggtgtacttcgccgagaaggtgaccagcctgggcaaggactggcacagaccctgcctgagatgcgagagatgcggcaagaccctgacccccggcggccacgccgagcacgacggccagccctactgccacaagccctgctacggcatcctgttcggccccaagggcgtgaacaccggcgccgtgggcagctacatctacgacagagaccccgagggcaaggtgcagccctag

SEQ ID NO: 78126 - DNA, 849 bp, synthetic construct
  misc_feature 1..849: note = Description of Artificial Sequence: Synthetic coding sequence
  source 1..849: mol_type = other DNA
atgcccccccaccacctgctgccctggctggcccaggtgcccagcgccgagggcgagctggtgagactggtgagcagagccggcggcagaggcgcctgcttctggcccgccgtgaccatggagatggccgtggccgccggctgcgtgtgcaagggcggcggctgctgccacagagagcccagccaggaccaccacgagagccaggagcacagaggccccctggtgggcagccagacctgcctggtgcaccaggccgagggcaccgccgagaaggtgagcagcctgggcaaggactggcacaagttctgcctgaagtgcgagagatgcagcaagaccctgacccccggcggccacgccgagcacgacggcaagcccttctgccacaagccctgctacgccaccctgttcggccccaagggcgtgaacatcggcggcgccggcagctacatctacgagaagcccctggccgagggcccccaggtgaccggccccatcgaggtgcccgccgccagagccgaggagagaaaggccagcggcccccccaagggccccagcagagccagcagcgtgaccaccttcaccggcgagcccaacacctgccccagatgcagcaagaaggtgtacttcgccgagaaggtgaccagcctgggcaaggactggcacagaccctgcctgagatgcgagagatgcggcaagaccctgacccccggcggccacgccgagcacgacggccagccctactgccacaagccctgctacggcatcctgttcggccccaagggcgtgaacaccggcgccgtgggcagctacatctacgacagagaccccgagggcaaggtgcagccctag

SEQ ID NO: 78127 - DNA, 315 bp, synthetic construct
  misc_feature 1..315: note = Description of Artificial Sequence: Synthetic coding sequence
  source 1..315: mol_type = other DNA
tgacccggcggcgagagagccgagggcgccggcagacccggcgcccccaccatggccagcaagtgccccaagtgcgacaagaccgtgtacttcgccgagaaggtgaccagcctgggcaaggactggcacagaccctgcctgagatgcgagagatgcggcaagaccctgacccccggcggccacgccgagcacgacggccagccctactgccacaagccctgctacggcatcctgttcggccccaagggcgtgaacaccggcgccgtgggcagctacatctacgacagagaccccgagggcaaggtgcagccctag

SEQ ID NO: 78128 - DNA, 537 bp, synthetic construct
  misc_feature 1..537: note = Description of Artificial Sequence: Synthetic coding sequence
  source 1..537: mol_type = other DNA
atggagatcaagcacctgctgttcctggtggccgccgcctgcctgctgcccatgctgagcatgaagaagaagagcgccagagaccagttcaacaagctggtgaccgacctgcccaacgtgcaggaggagatcgtgaacatccacaacgccctgagaagaagagtggtgccccccgccagcaacatgctgaagatgagctggagcgaggaggccgcccagaacgccagaatcttcagcaagtactgcgacatgaccgagagcaaccccctggagagaagactgcccaacaccttctgcggcgagaacatgcacatgaccagctaccccgtgagctggagcagcgtgatcggcgtgtggtacagcgagagcaccagcttcaagcacggcgagtggaccaccaccgacgacgacatcaccaccgaccactacacccagatcgtgtgggccaccagctacctgatcggctgcgccatcgccagctgcagacagcagggcagccccagatacctgtacgtgtgccactactgccacgactag

SEQ ID NO: 78129 - DNA, 750 bp, synthetic construct
  misc_feature 1..750: note = Description of Artificial Sequence: Synthetic coding sequence
  source 1..750: mol_type = other DNA
atggagatcaagcacctgctgttcctggtggccgccgcctgcctgctgcccatgctgagcatgaagaagaagagcgccagagaccagttcaacaagctggtgaccgacctgcccaacgtgcaggaggagatcgtgaacatccacaacgccctgagaagaagagtggtgccccccgccagcaacatgctgaagatgagctggagcgaggaggccgcccagaacgccagaatcttcagcaagtactgcgacatgaccgagagcaaccccctggagagaagactgcccaacaccttctgcggcgagaacatgcacatgaccagctaccccgtgagctggagcagcgtgatcggcgtgtggtacagcgagagcaccagcttcaagcacggcgagtggaccaccaccgacgacgacatcaccaccgaccactacacccagatcgtgtgggccaccagctacctgatcggctgcgccatcgccagctgcagacagcagggcagccccagatacctgtacgtgtgccactactgccacgagggcaacgaccccgagaccaagaacgagccctacaagaccggcgtgccctgcgaggcctgccccagcaactgcgaggacaagctgtgcaccaacccctgcatctactacgacgagtacttcgactgcgacatccaggtgcactacctgggctgcaaccacagcaccaccatcctgttctgcaaggccacctgcctgtgcgacaccgagatcaagtag

SEQ ID NO: 78130 - DNA, 750 bp, synthetic construct; identical to SEQ ID NO: 78129
  misc_feature 1..750: note = Description of Artificial Sequence: Synthetic coding sequence
  source 1..750: mol_type = other DNA

SEQ ID NO: 78131 - DNA, 750 bp, synthetic construct; identical to SEQ ID NO: 78129
  misc_feature 1..750: note = Description of Artificial Sequence: Synthetic coding sequence
  source 1..750: mol_type = other DNA

SEQ ID NO: 78132 - DNA, 537 bp, synthetic construct; identical to SEQ ID NO: 78128
  misc_feature 1..537: note = Description of Artificial Sequence: Synthetic coding sequence
  source 1..537: mol_type = other DNA

SEQ ID NO: 78133 - DNA, 537 bp, synthetic construct; identical to SEQ ID NO: 78128
  misc_feature 1..537: note = Description of Artificial Sequence: Synthetic coding sequence
  source 1..537: mol_type = other DNA

SEQ ID NO: 78134 - DNA, 669 bp, synthetic construct
  misc_feature 1..669: note = Description of Artificial Sequence: Synthetic coding sequence
  source 1..669: mol_type = other DNA
atggccggcaagcccaagctgcactacttcaacggcagaggcagaatggagcccatcagatggctgctggccgccgccggcgtggagttcgaggagaagttcatcggcagcgccgaggacctgggcaagctgagaaacgacggcagcctgatgttccagcaggtgcccatggtggagatcgacggcatgaagctggtgcagaccagagccatcctgaactacatcgccagcaagtacaacctgtacggcaaggacatcaaggagagagccctgatcgacatgtacaccgagggcatggccgacctgaacgagatgatcctgctgctgcccctgtgcagacccgaggagaaggacgccaagatcgccctgatcaaggagaagaccaagagcagatacttccccgccttcgagaaggtgctgcagagccacggccaggactacctggtgggcaacaagctgagcagagccgacatcagcctggtggagctgctgtactacgtggaggagctggacagcagcctgatcagcaacttccccctgctgaaggccctgaagaccagaatcagcaacctgcccaccgtgaagaagttcctgcagcccggcagccccagaaagccccccgccgacgccaaggccctggaggaggccagaaagatcttcagattctag

SEQ ID NO: 78135 - DNA, 732 bp, synthetic construct
  misc_feature 1..732: note = Description of Artificial Sequence: Synthetic coding sequence
  source 1..732: mol_type = other DNA
atggccctgctgcccgtgctgttcctggtgaccgtgctgctgcccagcctgcccgccgagggcaaggaccccgccttcaccgccctgctgaccacccagctgcaggtgcagagagagatcgtgaacaagcacaacgagctgagaaaggccgtgagcccccccgccagcaacatgctgaagatggagtggagcagagaggtgaccaccaacgcccagagatgggccaacaagtgcaccctgcagcacagcgaccccgaggacagaaagaccagcaccagatgcggcgagaacctgtacatgagcagcgaccccaccagctggagcagcgccatccagagctggtacgacgagatcctggacttcgtgtacggcgtgggccccaagagccccaacgccgtggtgggccactacacccagctggtgtggtacagcacctaccaggtgggctgcggcatcgcctactgccccaaccaggacagcctgaagtactactacgtgtgccagtactgccccgccggcaacaacatgaacagaaagaacaccccctaccagcagggcaccccctgcgccggctgccccgacgactgcgacaagggcctgtgcaccaacagctgccagtaccaggacctgctgagcaactgcgacagcctgaagaacaccgccggctgcgagcacgagctgctgaaggagaagtgcaaggccacctgcctgtgcgagaacaagatctactag

SEQ ID NO: 78136 - DNA, 1494 bp, synthetic construct
  misc_feature 1..1494: note = Description of Artificial Sequence: Synthetic coding sequence
  source 1..1494: mol_type = other DNA
atgagctgcgtgctgggcggcgtgatccccctgggcctgctgttcctggtgtgcggcagccagggctacctgctgcccaacgtgaccctgctggaggagctgctgagcaagtaccagcacaacgagagccacagcagagtgagaagagccatccccagagaggacaaggaggagatcctgatgctgcacaacaagctgagaggccaggtgcagccccaggccagcaacatggagtacatgacctgggacgacgagctggagaagagcgccgccgcctgggccagccagtgcatctgggagcacggccccaccagcctgctggtgagcatcggccagaacctgggcgcccactggggcagatacagaagccccggcttccacgtgcagagctggtacgacgaggtgaaggactacacctacccctaccccagcgagtgcaacccctggtgccccgagagatgcagcggccccatgtgcacccactacacccagatcgtgtgggccaccaccaacaagatcggctgcgccgtgaacacctgcagaaagatgaccgtgtggggcgaggtgtgggagaacgccgtgtacttcgtgtgcaactacagccccaagggcaactggatcggcgaggccccctacaagaacggcagaccctgcagcgagtgcccccccagctacggcggcagctgcagaaacaacctgtgctacagagaggagacctacacccccaagcccgagaccgacgagatgaacgaggtggagaccgcccccatccccgaggagaaccacgtgtggctgcagcccagagtgatgagacccaccaagcccaagaagaccagcgccgtgaactacatgacccaggtggtgagatgcgacaccaagatgaaggacagatgcaagggcagcacctgcaacagataccagtgccccgccggctgcctgaaccacaaggccaagatcttcggcaccctgttctacgagagcagcagcagcatctgcagagccgccatccactacggcatcctggacgacaagggcggcctggtggacatcaccagaaacggcaaggtgcccttcttcgtgaagagcgagagacacggcgtgcagagcctgagcaagtacaagcccagcagcagcttcatggtgagcaaggtgaaggtgcaggacctggactgctacaccaccgtggcccagctgtgccccttcgagaagcccgccacccactgccccagaatccactgccccgcccactgcaaggacgagcccagctactgggcccccgtgttcggcaccaacatctacgccgacaccagcagcatctgcaagaccgccgtgcacgccggcgtgatcagcaacgagagcggcggcgacgtggacgtgatgcccgtggacaagaagaagacctacgtgggcagcctgagaaacggcgtgcagagcgagagcctgggcacccccagagacggcaaggccttcagaatcttcgccgtgagacagtag

SEQ ID NO: 78137 - DNA, 1269 bp, synthetic construct
  misc_feature 1..1269: note = Description of Artificial Sequence: Synthetic coding sequence
  source 1..1269: mol_type = other DNA
atggccccctggccccccaagggcctggtgcccgccatgctgtggggcctgagcctgttcctgaacctgcccggccccatctggctgcagcccagcccccccccccagagcagcccccccccccagccccacccctgccacacctgcagaggcctggtggacagcttcaacaagggcctggagagaaccatcagagacaacttcggcggcggcaacaccgcctgggaggaggagaacctgagcaagtacaaggacagcgagaccagactggtggaggtgctggagggcgtgtgcagcaagagcgacttcgagtgccacagactgctggagctgagcgaggagctggtggagagctggtggttccacaagcagcaggaggcccccgacctgttccagtggctgtgcagcgacagcctgaagctgtgctgccccgccggcaccttcggccccagctgcctgccctgccccggcggcaccgagagaccctgcggcggctacggccagtgcgagggcgagggcaccagaggcggcagcggccactgcgactgccaggccggctacggcggcgaggcctgcggccagtgcggcctgggctacttcgaggccgagagaaacgccagccacctggtgtgcagcgcctgcttcggcccctgcgccagatgcagcggccccgaggagagcaactgcctgcagtgcaagaagggctgggccctgcaccacctgaagtgcgtggacatcgacgagtgcggcaccgagggcgccaactgcggcgccgaccagttctgcgtgaacaccgagggcagctacgagtgcagagactgcgccaaggcctgcctgggctgcatgggcgccggccccggcagatgcaagaagtgcagccccggctaccagcaggtgggcagcaagtgcctggacgtggacgagtgcgagaccgaggtgtgccccggcgagaacaagcagtgcgagaacaccgagggcggctacagatgcatctgcgccgagggctacaagcagatggagggcatctgcgtgaaggagcagatccccggcgccttccccatcctgaccgacctgacccccgagaccaccagaagatggaagctgggcagccacccccacagcacctacgtgaagatgaagatgcagagagacgaggccaccttccccggcctgtacggcaagcaggtggccaagctgggcagccagagcagacagagcgacagaggcaccagactgatccacagccagcaggccagcagccagagatag

SEQ ID NO: 78138 - DNA, 1263 bp, synthetic construct
  misc_feature 1..1263: note = Description of Artificial Sequence: Synthetic coding sequence
  source 1..1263: mol_type = other DNA
atggccccctggccccccaagggcctggtgcccgccatgctgtggggcctgagcctgttcctgaacctgcccggccccatctggctgcagcccagcccccccccccagagcagcccccccccccagccccacccctgccacacctgcagaggcctggtggacagcttcaacaagggcctggagagaaccatcagagacaacttcggcggcggcaacaccgcctgggaggaggagaacctgagcaagtacaaggacagcgagaccagactggtggaggtgctggagggcgtgtgcagcaagagcgacttcgagtgccacagactgctggagctgagcgaggagctggtggagagctggtggttccacaagcagcaggaggcccccgacctgttccagtggctgtgcagcgacagcctgaagctgtgctgccccgccggcaccttcggccccagctgcctgccctgccccggcggcaccgagagaccctgcggcggctacggccagtgcgagggcgagggcaccagaggcggcagcggccactgcgactgccaggccggctacggcggcgaggcctgcggccagtgcggcctgggctacttcgaggccgagagaaacgccagccacctggtgtgcagcgcctgcttcggcccctgcgccagatgcagcggccccgaggagagcaactgcctgcagtgcaagaagggctgggccctgcaccacctgaagtgcgtggacatcgacgagtgcggcaccgagggcgccaactgcggcgccgaccagttctgcgtgaacaccgagggcagctacgagtgcagagactgcgccaaggcctgcctgggctgcatgggcgccggccccggcagatgcaagaagtgcagccccggctaccagcaggtgggcagcaagtgcctggacgtggacgagtgcgagaccgaggtgtgccccggcgagaacaagcagtgcgagaacaccgagggcggctacagatgcatctgcgccgagggctacaagcagatggagggcatctgcgtgaaggagcagatccccgagagcgccggcttcttcagcgagatgaccgaggacgagctggtggtgctgcagcagatgttcttcggcatcatcatctgcgccctggccaccctggccgccaagggcgacctggtgttcaccgccatcttcatcggcgccgtggccgccatgaccggctactggctgagcgagagaagcgacagagtgctggagggcttcatcaagggcagatag

SEQ ID NO: 78139 - DNA, 1263 bp, synthetic construct; identical to SEQ ID NO: 78138
  misc_feature 1..1263: note = Description of Artificial Sequence: Synthetic coding sequence
  source 1..1263: mol_type = other DNA

SEQ ID NO: 78140 - DNA, 1263 bp, synthetic construct; identical to SEQ ID NO: 78138
  misc_feature 1..1263: note = Description of Artificial Sequence: Synthetic coding sequence
  source 1..1263: mol_type = other DNA

SEQ ID NO: 78141 - DNA, 1140 bp, synthetic construct
  misc_feature 1..1140: note = Description of Artificial Sequence: Synthetic coding sequence
  source 1..1140: mol_type = other DNA
atgagcagcagaatcgccagagccctggccctggtggtgaccctgctgcacctgaccagactggccctgagcacctgccccgccgcctgccactgccccctggaggcccccaagtgcgcccccggcgtgggcctggtgagagacggctgcggctgctgcaaggtgtgcgccaagcagctgaacgaggactgcagcaagacccagccctgcgaccacaccaagggcctggagtgcaacttcggcgccagcagcaccgccctgaagggcatctgcagagcccagagcgagggcagaccctgcgagtacaacagcagaatctaccagaacggcgagagcttccagcccaactgcaagcaccagtgcacctgcatcgacggcgccgtgggctgcatccccctgtgcccccaggagctgagcctgcccaacctgggctgccccaaccccagactggtgaaggtgaccggccagtgctgcgaggagtgggtgtgcgacgaggacagcatcaaggaccccatggaggaccaggacggcctgctgggcaaggagctgggcttcgacgccagcgaggtggagctgaccagaaacaacgagctgatcgccgtgggcaagggcagcagcctgaagagactgcccgtgttcggcatggagcccagaatcctgtacaaccccctgcagggccagaagtgcatcgtgcagaccaccagctggagccagtgcagcaagacctgcggcaccggcatcagcaccagagtgaccaacgacaaccccgagtgcagactggtgaaggagaccagaatctgcgaggtgagaccctgcggccagcccgtgtacagcagcctgaagaagggcaagaagtgcagcaagaccaagaagagccccgagcccgtgagattcacctacgccggctgcctgagcgtgaagaagtacagacccaagtactgcggcagctgcgtggacggcagatgctgcaccccccagctgaccagatgcgaggacgccgtgcccctgagaagatggggcgacatcttccaggagagacacgacgaccccgtgaagtgcaactacaactgcccccacgccaacgaggccgccttccccttctacagactgttcaacgacatccacaagttcagagactag

SEQ ID NO: 78142 - DNA, 1146 bp, synthetic construct
  misc_feature 1..1146: note = Description of Artificial Sequence: Synthetic coding sequence
  source 1..1146: mol_type = other DNA
atgagcagcagaatcgccagagccctggccctggtggtgaccctgctgcacctgaccagactggccctgagcacctgccccgccgcctgccactgccccctggaggcccccaagtgcgcccccggcgtgggcctggtgagagacggctgcggctgctgcaaggtgtgcgccaagcagctgaacgaggactgcagcaagacccagccctgcgaccacaccaagggcctggagtgcaacttcggcgccagcagcaccgccctgaagggcatctgcagagcccagagcgagggcagaccctgcgagtacaacagcagaatctaccagaacggcgagagcttccagcccaactgcaagcaccagtgcacctgcatcgacggcgccgtgggctgcatccccctgtgcccccaggagctgagcctgcccaacctgggctgccccaaccccagactggtgaaggtgaccggccagtgctgcgaggagtgggtgtgcgacgaggacagcatcaaggaccccatggaggaccaggacggcctgctgggcaaggagctgggcttcgacgccagcgaggtggagctgaccagaaacaacgagctgatcgccgtgggcaagggcagcagcctgaagagactgcccgtgttcggcatggagcccagaatcctgtacaaccccctgcagggccagaagtgcatcgtgcagaccaccagctggagccagtgcagcaagacctgcggcaccggcatcagcaccagagtgaccaacgacaaccccgagtgcagactggtgaaggagaccagaatctgcgaggtgagaccctgcggccagcccgtgtacagcagcctgaagaagggcaagaagtgcagcaagaccaagaagagccccgagcccgtgagattcacctacgccggctgcctgagcgtgaagaagtacagacccaagtactgcggcagctgcgtggacggcagatgctgcaccccccagctgaccagaaccgtgaagatgagattcagatgcgaggacggcgagaccttcagcaagaacgtgatgatgatccagagctgcaagtgcaactacaactgcccccacgccaacgaggccgccttccccttctacagactgttcaacgacatccacaagttcagagactag

SEQ ID NO: 78143 - DNA, 1074 bp, synthetic construct
  misc_feature 1..1074: note = Description of Artificial Sequence: Synthetic coding sequence
  source 1..1074: mol_type = other DNA
atgagcagcagaatcgccagagccctggccctggtggtgaccctgctgcacctgaccagactggccctgagcacctgcggctgctgcaaggtgtgcgccaagcagctgaacgaggactgcagcaagacccagccctgcgaccacaccaagggcctggagtgcaacttcggcgccagcagcaccgccctgaagggcatctgcagagcccagagcgagggcagaccctgcgagtacaacagcagaatctaccagaacggcgagagcttccagcccaactgcaagcaccagtgcacctgcatcgacggcgccgtgggctgcatccccctgtgcccccaggagctgagcctgcccaacctgggctgccccaaccccagactggtgaaggtgaccggccagtgctgcgaggagtgggtgtgcgacgaggacagcatcaaggaccccatggaggaccaggacggcctgctgggcaaggagctgggcttcgacgccagcgaggtggagctgaccagaaacaacgagctgatcgccgtgggcaagggcagcagcctgaagagactgcccgtgttcggcatggagcccagaatcctgtacaaccccctgcagggccagaagtgcatcgtgcagaccaccagctggagccagtgcagcaagacctgcggcaccggcatcagcaccagagtgaccaacgacaaccccgagtgcagactggtgaaggagaccagaatctgcgaggtgagaccctgcggccagcccgtgtacagcagcctgaagaagggcaagaagtgcagcaagaccaagaagagccccgagcccgtgagattcacctacgccggctgcctgagcgtgaagaagtacagacccaagtactgcggcagctgcgtggacggcagatgctgcaccccccagctgaccagaaccgtgaagatgagattcagatgcgaggacggcgagaccttcagcaagaacgtgatgatgatccagagctgcaagtgcaactacaactgcccccacgccaacgaggccgccttccccttctacagactgttcaacgacatccacaagttcagagactag

SEQ ID NO: 78144 - DNA, 1014 bp, synthetic construct
  misc_feature 1..1014: note = Description of Artificial Sequence: Synthetic coding sequence
  source 1..1014: mol_type = other DNA
atggacgagaccggcaacctgaccgtgagcagcgccacctgccacgacaccatcgacgacttcagaaaccaggtgtacagcaccctgtacagcatgatcagcgtggtgggcttcttcggcaacggcttcgtgctgtacgtgctgatcaagacctaccacaagaagagcgccttccaggtgtacatgatcaacctggccgtggccgacctgctgtgcgtgtgcaccctgcccctgagagtggtgtactacgtgcacaagggcatctggctgttcggcgacttcctgtgcagactgagcacctacgccctgtacgtgaacctgtactgcagcatcttcttcatgaccgccatgagcttcttcagatgcatcgccatcgtgttccccgtgcagaacatcaacctggtgacccagaagaaggccagattcgtgtgcgtgggcatctggatcttcgtgatcctgaccagcagccccttcctgatggccaagccccagaaggacgagaagaacaacaccaagtgcttcgagcccccccaggacaaccagaccaagaaccacgtgctggtgctgcactacgtgagcctgttcgtgggcttcatcatccccttcgtgatcatcatcgtgtgctacaccatgatcatcctgaccctgctgaagaagagcatgaagaagaacctgagcagccacaagaaggccatcggcatgatcatggtggtgaccgccgccttcctggtgagcttcatgccctaccacatccagagaaccatccacctgcacttcctgcacaacgagaccaagccctgcgacagcgtgctgagaatgcagaagagcgtggtgatcaccctgagcctggccgccagcaactgctgcttcgaccccctgctgtacttcttcagcggcggcaacttcagaaagagactgagcaccttcagaaagcacagcctgagcagcgtgacctacgtgcccagaaagaaggccagcctgcccgagaagggcgaggagatctgcaaggtgtag

SEQ ID NO: 78145 - DNA, 1041 bp, synthetic construct
  misc_feature 1..1041: note = Description of Artificial Sequence: Synthetic coding sequence
  source 1..1041: mol_type = other DNA
atggagagaaagttcatgagcctgcagcccagcatcagcgtgagcgagatggagcccaacggcaccttcagcaacaacaacagcagaaactgcaccatcgagaacttcaagagagagttcttccccatcgtgtacctgatcatcttcttctggggcgtgctgggcaacggcctgagcatctacgtgttcctgcagccctacaagaagagcaccagcgtgaacgtgttcatgctgaacctggccatcagcgacctgctgttcatcagcaccctgcccttcagagccgactactacctgagaggcagcaactggatcttcggcgacctggcctgcagaatcatgagctacagcctgtacgtgaacatgtacagcagcatctacttcctgaccgtgctgagcgtggtgagattcctggccatggtgcaccccttcagactgctgcacgtgaccagcatcagaagcgcctggatcctgtgcggcatcatctggatcctgatcatggccagcagcatcatgctgctggacagcggcagcgagcagaacggcagcgtgaccagctgcctggagctgaacctgtacaagatcgccaagctgcagaccatgaactacatcgccctggtggtgggctgcctgctgcccttcttcaccctgagcatctgctacctgctgatcatcagagtgctgctgaaggtggaggtgcccgagagcggcctgagagtgagccacagaaaggccctgaccaccatcatcatcaccctgatcatcttcttcctgtgcttcctgccctaccacaccctgagaaccgtgcacctgaccacctggaaggtgggcctgtgcaaggacagactgcacaaggccctggtgatcaccctggccctggccgccgccaacgcctgcttcaaccccctgctgtactacttcgccggcgagaacttcaaggacagactgaagagcgccctgagaaagggccacccccagaaggccaagaccaagtgcgtgttccccgtgagcgtgtggctgagaaaggagaccagagtgtag

SEQ ID NO: 78146 - DNA, 2181 bp, synthetic construct
  misc_feature 1..2181: note = Description of Artificial Sequence: Synthetic coding sequence
  source 1..2181: mol_type = other DNA
atggccgacagcagcggccagcagggcaagggcagaagagtgcagccccagtggagcccccccgccggcacccagccctgcagactgcacctgtacaacagcctgaccagaaacaaggaggtgttcatcccccaggacggcaagaaggtgacctggtactgctgcggccccaccgtgtacgacgccagccacatgggccacgccagaagctacatcagcttcgacatcctgagaagagtgctgaaggactacttcaagttcgacgtgttctactgcatgaacatcaccgacatcgacgacaagatcatcaagagagccagacagaaccacctgttcgagcagtacagagagaagagacccgaggccgcccagctgctggaggacgtgcaggccgccctgaagcccttcagcgtgaagctgaacgagaccaccgaccccgacaagaagcagatgctggagagaatccagcacgccgtgcagctggccaccgagcccctggagaaggccgtgcagagcagactgaccggcgaggaggtgaacagctgcgtggaggtgctgctggaggaggccaaggacctgctgagcgactggctggacagcaccctgggctgcgacgtgaccgacaacagcatcttcagcaagctgcccaagttctgggagggcgacttccacagagacatggaggccctgaacgtgctgccccccgacgtgctgaccagagtgagcgagtacgtgcccgagatcgtgaacttcgtgcagaagatcgtggacaacggctacggctacgtgagcaacggcagcgtgtacttcgacaccgccaagttcgccagcagcgagaagcacagctacggcaagctggtgcccgaggccgtgggcgaccagaaggccctgcaggagggcgagggcgacctgagcatcagcgccgacagactgagcgagaagagaagccccaacgacttcgccctgtggaaggccagcaagcccggcgagcccagctggccctgcccctggggcaagggcagacccggctggcacatcgagtgcagcgccatggccggcaccctgctgggcgccagcatggacatccacggcggcggcttcgacctgagattcccccaccacgacaacgagctggcccagagcgaggcctacttcgagaacgactgctgggtgagatacttcctgcacaccggccacctgaccatcgccggctgcaagatgagcaagagcctgaagaacttcatcaccatcaaggacgccctgaagaagcacagcgccagacagctgagactggccttcctgatgcacagctggaaggacaccctggactacagcagcaacaccatggagagcgccctgcagtacgagaagttcctgaacgagttcttcctgaacgtgaaggacatcctgagagcccccgtggacatcaccggccagttcgagaagtggggcgaggaggaggccgagctgaacaagaacttctacgacaagaagaccgccatccacaaggccctgtgcgacaacgtggacaccagaaccgtgatggaggagatgagagccctggtgagccagtgcaacctgtacatggccgccagaaaggccgtgagaaagagacccaaccaggccctgctggagaacatcgccctgtacctgacccacatgctgaagatcttcggcgccgtggaggaggacagcagcctgggcttccccgtgggcggccccggcaccagcctgagcctggaggccaccgtgatgccctacctgcaggtgctgagcgagttcagagagggcgtgagaaagatcgccagagagcagaaggtgcccgagatcctgcagctgagcgacgccctgagagacaacatcctgcccgagctgggcgtgagattcgaggaccacgagggcctgcccaccgtggtgaagctggtggacagaaacaccctgctgaaggagagagaggagaagagaagagtggaggaggagaagagaaagaagaaggaggaggccgccagaagaaagcaggagcaggaggccgccaagctggccaagatgaagatcccccccagcgagatgttcctgagcgagaccgacaagtacagcaagttcgacgagaacgtgagcatggtgtgcccccacatgacctggagagccaagagcagcgccaagggcaagcccagaagctag

SEQ ID NO: 78147 - DNA, 2496 bp, synthetic construct
  misc_feature 1..2496: note = Description of Artificial Sequence: Synthetic coding sequence
  source 1..2496: mol_type = other DNA
atggccgacagcagcggccagcaggcccccgactacagaagcatcctgagcatcagcgacgaggccgccagagcccaggccctgaacgagcacctgagcaccagaagctacgtgcagggctacagcctgagccaggccgacgtggacgccttcagacagctgagcgccccccccgccgacccccagctgttccacgtggccagatggttcagacacatcgaggccctgctgggcagcccctgcggcaagggccagccctgcagactgcaggccagcaagggcagaagagtgcagccccagtggagcccccccgccggcacccagccctgcagactgcacctgtacaacagcctgaccagaaacaaggaggtgttcatcccccaggacggcaagaaggtgacctggtactgctgcggccccaccgtgtacgacgccagccacatgggccacgccagaagctacatcagcttcgacatcctgagaagagtgctgaaggactacttcaagttcgacgtgttctactgcatgaacatcaccgacatcgacgacaagatcatcaagagagccagacagaaccacctgttcgagcagtacagagagaagagacccgaggccgcccagctgctggaggacgtgcaggccgccctgaagcccttcagcgtgaagctgaacgagaccaccgaccccgacaagaagcagatgctggagagaatccagcacgccgtgcagctggccaccgagcccctggagaaggccgtgcagagcagactgaccggcgaggaggtgaacagctgcgtggaggtgctgctggaggaggccaaggacctgctgagcgactggctggacagcaccctgggctgcgacgtgaccgacaacagcatcttcagcaagctgcccaagttctgggagggcgacttccacagagacatggaggccctgaacgtgctgccccccgacgtgctgaccagagtgagcgagtacgtgcccgagatcgtgaacttcgtgcagaagatcgtggacaacggctacggctacgtgagcaacggcagcgtgtacttcgacaccgccaagttcgccagcagcgagaagcacagctacggcaagctggtgcccgaggccgtgggcgaccagaaggccctgcaggagggcgagggcgacctgagcatcagcgccgacagactgagcgagaagagaagccccaacgacttcgccctgtggaaggccagcaagcccggcgagcccagctggccctgcccctggggcaagggcagacccggctggcacatcgagtgcagcgccatggccggcaccctgctgggcgccagcatggacatccacggcggcggcttcgacctgagattcccccaccacgacaacgagctggcccagagcgaggcctacttcgagaacgactgctgggtgagatacttcctgcacaccggccacctgaccatcgccggctgcaagatgagcaagagcctgaagaacttcatcaccatcaaggacgccctgaagaagcacagcgccagacagctgagactggccttcctgatgcacagctggaaggacaccctggactacagcagcaacaccatggagagcgccctgcagtacgagaagttcctgaacgagttcttcctgaacgtgaaggacatcctgagagcccccgtggacatcaccggccagttcgagaagtggggcgaggaggaggccgagctgaacaagaacttctacgacaagaagaccgccatccacaaggccctgtgcgacaacgtggacaccagaaccgtgatggaggagatgagagccctggtgagccagtgcaacctgtacatggccgccagaaaggccgtgagaaagagacccaaccaggccctgctggagaacatcgccctgtacctgacccacatgctgaagatcttcggcgccgtggaggaggacagcagcctgggcttccccgtgggcggccccggcaccagcctgagcctggaggccaccgtgatgccctacctgcaggtgctgagcgagttcagagagggcgtgagaaagatcgccagagagcagaaggtgcccgagatcctgcagctgagcgacgccctgagagacaacatcctgcccgagctgggcgtgagattcgaggaccacgagggcctgcccaccgtggtgaagctggtggacagaaacaccctgctgaaggagagagaggagaagagaagagtggaggaggagaagagaaagaagaaggaggaggccgccagaagaaagcaggagcaggaggccgccaagctggccaagatgaagatcccccccagcgagatgttcctgagcgagaccgacaagtacagcaagttcgacgagaacggcctgcccacccacgacatggagggcaaggagctgagcaagggccaggccaagaagctgaagaagctgttcgaggcccaggagaagctgtacaaggagtacctgcagatggcccagaacggcagcttccagtag

SEQ ID NO: 78148 - DNA, 2247 bp, synthetic construct
  misc_feature 1..2247: note = Description of Artificial Sequence: Synthetic coding sequence
  source 1..2247: mol_type = other DNA
atggccgacagcagcggccagcagggcaagggcagaagagtgcagccccagtggagcccccccgccggcacccagccctgcagactgcacctgtacaacagcctgaccagaaacaaggaggtgttcatcccccaggacggcaagaaggtgacctggtactgctgcggccccaccgtgtacgacgccagccacatgggccacgccagaagctacatcagcttcgacatcctgagaagagtgctgaaggactacttcaagttcgacgtgttctactgcatgaacatcaccgacatcgacgacaagatcatcaagagagccagacagaaccacctgttcgagcagtacagagagaagagacccgaggccgcccagctgctggaggacgtgcaggccgccctgaagcccttcagcgtgaagctgaacgagaccaccgaccccgacaagaagcagatgctggagagaatccagcacgccgtgcagctggccaccgagcccctggagaaggccgtgcagagcagactgaccggcgaggaggtgaacagctgcgtggaggtgctgctggaggaggccaaggacctgctgagcgactggctggacagcaccctgggctgcgacgtgaccgacaacagcatcttcagcaagctgcccaagttctgggagggcgacttccacagagacatggaggccctgaacgtgctgccccccgacgtgctgaccagagtgagcgagtacgtgcccgagatcgtgaacttcgtgcagaagatcgtggacaacggctacggctacgtgagcaacggcagcgtgtacttcgacaccgccaagttcgccagcagcgagaagcacagctacggcaagctggtgcccgaggccgtgggcgaccagaaggccctgcaggagggcgagggcgacctgagcatcagcgccgacagactgagcgagaagagaagccccaacgacttcgccctgtggaaggccagcaagcccggcgagcccagctggccctgcccctggggcaagggcagacccggctggcacatcgagtgcagcgccatggccggcaccctgctgggcgccagcatggacatccacggcggcggcttcgacctgagattcccccaccacgacaacgagctggcccagagcgaggcctacttcgagaacgactgctgggtgagatacttcctgcacaccggccacctgaccatcgccggctgcaagatgagcaagagcctgaagaacttcatcaccatcaaggacgccctgaagaagcacagcgccagacagctgagactggccttcctgatgcacagctggaaggacaccctggactacagcagcaacaccatggagagcgccctgcagtacgagaagttcctgaacgagttcttcctgaacgtgaaggacatcctgagagcccccgtggacatcaccggccagttcgagaagtggggcgaggaggaggccgagctgaacaagaacttctacgacaagaagaccgccatccacaaggccctgtgcgacaacgtggacaccagaaccgtgatggaggagatgagagccctggtgagccagtgcaacctgtacatggccgccagaaaggccgtgagaaagagacccaaccaggccctgctggagaacatcgccctgtacctgacccacatgctgaagatcttcggcgccgtggaggaggacagcagcctgggcttccccgtgggcggccccggcaccagcctgagcctggaggccaccgtgatgccctacctgcaggtgctgagcgagttcagagagggcgtgagaaagatcgccagagagcagaaggtgcccgagatcctgcagctgagcgacgccctgagagacaacatcctgcccgagctgggcgtgagattcgaggaccacgagggcctgcccaccgtggtgaagctggtggacagaaacaccctgctgaaggagagagaggagaagagaagagtggaggaggagaagagaaagaagaaggaggaggccgccagaagaaagcaggagcaggaggccgccaagctggccaagatgaagatcccccccagcgagatgttcctgagcgagaccgacaagtacagcaagttcgacgagaacggcctgcccacccacgacatggagggcaaggagctgagcaagggccaggccaagaagctgaagaagctgttcgaggcccaggagaagctgtacaaggagtacctgcagatggcccagaacggcagcttccagtag

SEQ ID NO: 78149 - DNA, 2217 bp, synthetic construct
  misc_feature 1..2217: note = Description of Artificial Sequence: Synthetic coding sequence
  source 1..2217: mol_type = other DNA
atgcagaccccccccctgcagcagccccaccaggagcaggtgttcctggccttcctggtgatcgtgatccccagcttcctgaccaaggaggtgttcatcccccaggacggcaagaaggtgacctggtactgctgcggccccaccgtgtacgacgccagccacatgggccacgccagaagctacatcagcttcgacatcctgagaagagtgctgaaggactacttcaagttcgacgtgttctactgcatgaacatcaccgacatcgacgacaagatcatcaagagagccagacagaaccacctgttcgagcagtacagagagaagagacccgaggccgcccagctgctggaggacgtgcaggccgccctgaagcccttcagcgtgaagctgaacgagaccaccgaccccgacaagaagcagatgctggagagaatccagcacgccgtgcagctggccaccgagcccctggagaaggccgtgcagagcagactgaccggcgaggaggtgaacagctgcgtggaggtgctgctggaggaggccaaggacctgctgagcgactggctggacagcaccctgggctgcgacgtgaccgacaacagcatcttcagcaagctgcccaagttctgggagggcgacttccacagagacatggaggccctgaacgtgctgccccccgacgtgctgaccagagtgagcgagtacgtgcccgagatcgtgaacttcgtgcagaagatcgtggacaacggctacggctacgtgagcaacggcagcgtgtacttcgacaccgccaagttcgccagcagcgagaagcacagctacggcaagctggtgcccgaggccgtgggcgaccagaaggccctgcaggagggcgagggcgacctgagcatcagcgccgacagactgagcgagaagagaagccccaacgacttcgccctgtggaaggccagcaagcccggcgagcccagctggccctgcccctggggcaagggcagacccggctggcacatcgagtgcagcgccatggccggcaccctgctgggcgccagcatggacatccacggcggcggcttcgacctgagattcccccaccacgacaacgagctggcccagagcgaggcctacttcgagaacgactgctgggtgagatacttcctgcacaccggccacctgaccatcgccggctgcaagatgagcaagagcctgaagaacttcatcaccatcaaggacgccctgaagaagcacagcgccagacagctgagactggccttcctgatgcacagctggaaggacaccctggactacagcagcaacaccatggagagcgccctgcagtacgagaagttcctgaacgagttcttcctgaacgtgaaggacatcctgagagcccccgtggacatcaccggccagttcgagaagtggggcgaggaggaggccgagctgaacaagaacttctacgacaagaagaccgccatccacaaggccctgtgcgacaacgtggacaccagaaccgtgatggaggagatgagagccctggtgagccagtgcaacctgtacatggccgccagaaaggccgtgagaaagagacccaaccaggccctgctggagaacatcgccctgtacctgacccacatgctgaagatcttcggcgccgtggaggaggacagcagcctgggcttccccgtgggcggccccggcaccagcctgagcctggaggccaccgtgatgccctacctgcaggtgctgagcgagttcagagagggcgtgagaaagatcgccagagagcagaaggtgcccgagatcctgcagctgagcgacgccctgagagacaacatcctgcccgagctgggcgtgagattcgaggaccacgagggcctgcccaccgtggtgaagctggtggacagaaacaccctgctgaaggagagagaggagaagagaagagtggaggaggagaagagaaagaagaaggaggaggccgccagaagaaagcaggagcaggaggccgccaagctggccaagatgaagatcccccccagcgagatgttcctgagcgagaccgacaagtacagcaagttcgacgagaacggcctgcccacccacgacatggagggcaaggagctgagcaagggccaggccaagaagctgaagaagctgttcgaggcccaggagaagctgtacaaggagtacctgcagatggcccagaacggcagcttccagtag

SEQ ID NO: 78150 - DNA, 2220 bp, synthetic construct
  misc_feature 1..2220: note = Description of Artificial Sequence: Synthetic coding sequence
  source 1..2220: mol_type = other DNA
atggagcccaccagcggccccttcagaaccgacctgggctaccacctggtgggctgcagcagcggcaagggcagaagagtgcagccccagtggagcccccccgccggcacccagccctgcagactgcacctgtacaacagcctgaccagaaacaaggaggtgttcatcccccaggacggcaagaaggtgacctggtactgctgcggccccaccgtgtacgacgccagccacatgggccacgccagaagctacatcagcttcgacatcctgagaagagtgctgaaggactacttcaagttcgacgtgttctactgcatgaacatcaccgacatcgacgacaagatcatcaagagagccagacagaaccacctgttcgagcagtacagagagaagagacccgaggccgcccagctgctggaggacgtgcaggccgccctgaagcccttcagcgtgaagctgaacgagaccaccgaccccgacaagaagcagatgctggagagaatccagcacgccgtgcagctggccaccgagcccctggagaaggccgtgcagagcagactgaccggcgaggaggtgaacagctgcgtggaggtgctgctggaggaggccaaggacctgctgagcgactggctggacagcaccctgggctgcgacgtgaccgacaacagcatcttcagcaagctgcccaagttctgggagggcgacttccacagagacatggaggccctgaacgtgctgccccccgacgtgctgaccagagtgagcgagtacgtgcccgagatcgtgaacttcgtgcagaagatcgtggacaacggctacggctacgtgagcaacggcagcgtgtacttcgacaccgccaagttcgccagcagcgagaagcacagctacggcaagctggtgcccgaggccgtgggcgaccagaaggccctgcaggagggcgagggcgacctgagcatcagcgccgacagactgagcgagaagagaagccccaacgacttcgccctgtggaaggccagcaagcccggcgagcccagctggccctgcccctggggcaagggcagacccggctggcacatcgagtgcagcgccatggccggcaccctgctgggcgccagcatggacatccacggcggcggcttcgacctgagattcccccaccacgacaacgagctggcccagagcgaggcctacttcgagaacgactgctgggtgagatacttcctgcacaccggccacctgaccatcgccggctgcaagatgagcaagagcctgaagaacttcatcaccatcaaggacgccctgaagaagcacagcgccagacagctgagactggccttcctgatgcacagctggaaggacaccctggactacagcagcaacaccatggagagcgccctgcagtacgagaagttcctgaacgagttcttcctgaacgtgaaggacatcctgagagcccccgtggacatcaccggccagttcgagaagtggggcgaggaggaggccgagctgaacaagaacttctacgacaagaagaccgccatccacaaggccctgtgcgacaacgtggacaccagaaccgtgatggaggagatgagagccctggtgagccagtgcaacctgtacatggccgccagaaaggccgtgagaaagagacccaaccaggccctgctggagaacatcgccctgtacctgacccacatgctgaagatcttcggcgccgtggaggaggacagcagcctgggcttccccgtgggcggccccggcaccagcctgagcctggaggccaccgtgatgccctacctgcaggtgctgagcgagttcagagagggcgtgagaaagatcgccagagagcagaaggtgcccgagatcctgcagctgagcgacgccctgagagacaacatcctgcccgagctgggcgtgagattcgaggaccacgagggcctgcccaccgtggtgaagctggtggacagaaacaccctgctgaaggagagagaggagaagagaagagtggaggaggagaagagaaagaagaaggaggaggccgccagaagaaagcaggagcaggaggccgccaagctggccaagatgaagatcccccccagcgagatgttcctgagcgagaccgacaagtacagcaagttcgacgagaacgtgagcatggtgtgcccccacatgacctggagagccaagagcagcgccaagggcaagcccagaagctag

SEQ ID NO: 78151 - DNA, 1695 bp, synthetic construct
  misc_feature 1..1695: note = Description of Artificial Sequence: Synthetic coding sequence
  source 1..1695: mol_type = other DNA
atgctgagaaccaccagaggccccggcctgggcccccccctgctgcaggccgccctgggcctgggcagagccggctggcactggcccgccggcagagccgccagcggcggcagaggcagagcctggctgcagcccaccggcagagagaccggcgtgcaggtgtacaacagcctgaccggcagaaaggagcccctgatcgtggcccacgccgaggccgccagctggtacagctgcggccccaccgtgtacgaccacgcccacctgggccacgcctgcagctacgtgagattcgacatcatcagaagaatcctgaccaaggtgttcggctgcagcatcgtgatggtgatgggcatcaccgacgtggacgacaagatcatcaagagagccaacgagatgaacatcagccccgccagcctggccagcctgtacgaggaggacttcaagcaggacatggccgccctgaaggtgctgccccccaccgtgtacctgagagtgaccgagaacatcccccagatcatcagcttcatcgagggcatcatcgccagaggcaacgcctacagcaccgccaagggcaacgtgtacttcgacctgaagagcagaggcgacaagtacggcaagctggtgggcgtggtgcccggccccgtgggcgagcccgccgacagcgacaagagacacgccagcgacttcgccctgtggaaggccgccaagccccaggaggtgttctgggccagcccctggggccccggcagacccggctggcacatcgagtgcagcgccatcgccagcatggtgttcggcagccagctggacatccacagcggcggcatcgacctggccttcccccaccacgagaacgagatcgcccagtgcgaggtgttccaccagtgcgagcagtggggcaactacttcctgcacagcggccacctgcacgccaagggcaaggaggagaagatgagcaagagcctgaagaactacatcaccatcaaggacttcctgaagaccttcagccccgacgtgttcagattcttctgcctgagaagcagctacagaagcgccatcgactacagcgacagcgccatgctgcaggcccagcagctgctgctgggcctgggcagcttcctggaggacgccagagcctacatgaagggccagctggcctgcggcagcgtgagagaggccatgctgtgggagagactgagcagcaccaagagagccgtgaaggccgccctggccgacgacttcgacacccccagagtggtggacgccatcctgggcctggcccaccacggcaacggccagctgagagccagcctgaaggagcccgagggccccagaagccccgccgtgttcggcgccatcatcagctacttcgagcagttcttcgagaccgtgggcatcagcctggccaaccagcagtacgtgagcggcgacggcagcgaggccaccctgcacggcgtggtggacgagctggtgagattcagacagaaggtgagacagttcgccctggccatgcccgaggccaccggcgacgccagaagacagcagctgctggagagacagcccctgctggaggcctgcgacaccctgagaagaggcctgaccgcccacggcatcaacatcaaggacagaagcagcaccaccagcacctgggagctgctggaccagagaaccaaggaccagaagagcgccggctag

SEQ ID NO: 78152 - DNA, 549 bp, synthetic construct
  misc_feature 1..549: note = Description of Artificial Sequence: Synthetic coding sequence
  source 1..549: mol_type = other DNA
atggtgttcggcagccagctggacatccacagcggcggcatcgacctggccttcccccaccacgagaacgagatcgcccagtgcgaggtgttccaccagtgcgagcagtggggcaactacttcctgcacagcggccacctgcacgccaagggcaaggaggagaagatgagcaagagcctgaagaactacatcaccatcaaggacttcctgaagaccttcagccccgacgtgttcagattcttctgcctgagaagcagctacagaagcgccatcgactacagcgacagcgccatgctgcaggcccagcagctgctgctgggcctgggcagcttcctggaggacgccagagcctacatgaagggccagctggcctgcggcagcgtgagagaggccatgctgtgggagagactgagcagcaccaagagagccgtgaaggccgccctggccgacgacttcgacacccccagagtggtggacgccatcctgggcctggcccaccacggcaacggccagctgagagccagcctgaagaagcccggcagcgcctag

SEQ ID NO: 78153 - DNA, 441 bp, synthetic construct
  misc_feature 1..441: note = Description of Artificial Sequence: Synthetic coding sequence
  source 1..441: mol_type = other DNA
atggcccagaagagacccgcctgcaccctgaagcccgagtgcgtgcagcagctgctggtgtgcagccaggaggccaagaagagcgcctactgcccctacagccacttccccgtgggcgccgccctgctgacccaggagggcagaatcttcaagggctgcaacatcgagaacgcctgctaccccctgggcatctgcgccgagagaaccgccatccagaaggccgtgagcgagggctacaaggacttcagagccatcgccatcgccagcgacatgcaggacgacttcatcagcccctgcggcgcctgcagacaggtgatgagagagttcggcaccaactggcccgtgtacatgaccaagcccgacggcacctacatcgtgatgaccgtgcaggagctgctgcccagcagcttcggccccgaggacctgcagaagacccagtag

SEQ ID NO: 78154 - DNA, 687 bp, synthetic construct
  misc_feature 1..687: note = Description of Artificial Sequence: Synthetic coding sequence
  source 1..687: mol_type = other DNA
atgctgagcagatgcagaagcggcctgctgcacgtgctgggcctgagcttcctgctgcagaccagaagacccatcctgctgtgcagccccagactgatgaagcccctggtggtgttcgtgctgggcggccccggcgccggcaagggcacccagtgcgccagaatcgtggagaagtacggctacacccacctgagcgccggcgagctgctgagagacgagagaaagaaccccgacagccagtacggcgagctgatcgagaagtacatcaaggagggcaagatcgtgcccgtggagatcaccatcagcctgctgaagagagagatggaccagaccatggccgccaacgcccagaagaacaagttcctgatcgacggcttccccagaaaccaggacaacctgcagggctggaacaagaccatggacggcaaggccgacgtgagcttcgtgctgttcttcgactgcaacaacgagatctgcatcgagagatgcctggagagaggcaagagcagcggcagaagcgacgacaacagagagagcctggagaagagaatccagacctacctgcagagcaccaagcccatcatcgacctgtacgaggagatgggcaaggtgaagaagatcgacgccagcaagagcgtggacgaggtgttcgacgaggtggtgcagatcttcgacaaggagggctag

SEQ ID NO: 78155 - DNA, 540 bp, synthetic construct
  misc_feature 1..540: note = Description of Artificial Sequence: Synthetic coding sequence
  source 1..540: mol_type = other DNA
atgctgagcagatgcagaagcggcctgctgcacgtgctgggcctgagcttcctgctgcagaccagaagacccatcctgctgtgcagccccagactgatgaagcccctggtggtgttcgtgctgggcggccccggcgccggcaagggcacccagtgcgccagaatcgtggaggagatggaccagaccatggccgccaacgcccagaagaacaagttcctgatcgacggcttccccagaaaccaggacaacctgcagggctggaacaagaccatggacggcaaggccgacgtgagcttcgtgctgttcttcgactgcaacaacgagatctgcatcgagagatgcctggagagaggcaagagcagcggcagaagcgacgacaacagagagagcctggagaagagaatccagacctacctgcagagcaccaagcccatcatcgacctgtacgaggagatgggcaaggtgaagaagatcgacgccagcaagagcgtggacgaggtgttcgacgaggtggtgcagatcttcgacaaggagggctag

SEQ ID NO: 78156 - DNA, 1230 bp, synthetic construct
  misc_feature 1..1230: note = Description of Artificial Sequence: Synthetic coding sequence
  source 1..1230: mol_type = other DNA
atggccttcgccagaagactgctgagaggccccctgagcggccccctgctgggcagaagaggcgtgtgcgccggcgccatggccccccccagaagattcgtgctggagctgcccgactgcaccctggcccacttcgccctgggcgccgacgcccccggcgacgccgacgcccccgaccccagactggccgccctgctgggcccccccgagagaagctacagcctgtgcgtgcccgtgacccccgacgccggctgcggcgccagagtgagagccgccagactgcaccagagactgctgcaccagctgagaagaggccccttccagagatgccagctgctgagactgctgtgctactgccccggcggccaggccggcggcgcccagcagggcttcctgctgagagaccccctggacgaccccgacaccagacaggccctgctggagctgctgggcgcctgccaggaggcccccagaccccacctgggcgagttcgaggccgaccccagaggccagctgtggcagagactgtgggaggtgcaggacggcagaagactgcaggtgggctgcgcccaggtggtgcccgtgcccgagccccccctgcaccccgtggtgcccgacctgcccagcagcgtggtgttccccgacagagaggccgccagagccgtgctggaggagtgcaccagcttcatccccgaggccagagccgtgctggacctggtggaccagtgccccaagcagatccagaagggcaagttccaggtggtggccatcgagggcctggacgccaccggcaagaccaccgtgacccagagcgtggccgacagcctgaaggccgtgctgctgaagagcccccccagctgcatcggccagtggagaaagatcttcgacgacgagcccaccatcatcagaagagccttctacagcctgggcaactacatcgtggccagcgagatcgccaaggagagcgccaagagccccgtgatcgtggacagatactggcacagcaccgccacctacgccatcgccaccgaggtgagcggcggcctgcagcacctgccccccgcccaccaccccgtgtaccagtggcccgaggacctgctgaagcccgacctgatcctgctgctgaccgtgagccccgaggagagactgcagagactgcagggcagaggcatggagaagaccagagaggaggccgagctggaggccaacagcgtgttcagacagaagtag

SEQ ID NO: 78157 - DNA, 1350 bp, synthetic construct
  misc_feature 1..1350: note = Description of Artificial Sequence: Synthetic coding sequence
  source 1..1350: mol_type = other DNA
atggccttcgccagaagactgctgagaggccccctgagcggccccctgctgggcagaagaggcgtgtgcgccggcgccatggccccccccagaagattcgtgctggagctgcccgactgcaccctggcccacttcgccctgggcgccgacgcccccggcgacgccgacgcccccgaccccagactggccgccctgctgggcccccccgagagaagctacagcctgtgcgtgcccgtgacccccgacgccggctgcggcgccagagtgagagccgccagactgcaccagagactgctgcaccagctgagaagaggccccttccagagatgccagctgctgagactgctgtgctactgccccggcggccaggccggcggcgcccagcagggcttcctgctgagagaccccctggacgaccccgacaccagacaggccctgctggagctgctgggcgcctgccaggaggcccccagaccccacctgggcgagttcgaggccgaccccagaggccagctgtggcagagactgtgggaggtgcaggacggcagaagactgcaggtgggctgcgcccaggtggtgcccgtgcccgagccccccctgcaccccgtggtgcccgacctgcccagcagcgtggtgttccccgacagagaggccgccagagccgtgctggaggagtgcaccagcttcatccccgaggccagagccgtgctggacctggtggaccagtgccccaagcagatccagaagggcaagttccaggtggtggccatcgagggcctggacgccaccggcaagaccaccgtgacccagagcgtggccgacagcctgaaggccgtgctgctgaagagcccccccagctgcatcggccagtggagaaagatcttcgacgacgagcccaccatcatcagaagagccttctacagcctgggcaactacatcgtggccagcgagatcgccaaggagagcgccaagagccccgtgatcgtggacagatactggcacagcaccgccacctacgccatcgccaccgaggtgagcggcggcctgcagcacctgccccccgcccaccaccccgtgtaccagtggcccgaggacctgctgaagcccgacctgatcctgctgctgaccgtgagccccgaggagagactgcagagactgcagggcagaggcatggagaagaccagagaggaggccgagctggaggccaacagcgtgttcagacagaaggtggagatgagctaccagagaatggagaaccccggctgccacgtggtggacgccagccccagcagagagaaggtgctgcagaccgtgctgagcctgatccagaacagcttcagcgagccctag

SEQ ID NO: 78158 - DNA, 1101 bp, synthetic construct
  misc_feature 1..1101: note = Description of Artificial Sequence: Synthetic coding sequence
  source 1..1101: mol_type = other DNA
atggccttcgccagaagactgctgagaggccccctgagcggccccctgctgggcagaagaggcgtgtgcgccggcgccatggccccccccagaagattcgtgctggagctgcccgactgcaccctggcccacttcgccctgggcgccgacgcccccggcgacgccgacgcccccgaccccagactggccgccctgctgggcccccccgagagaagctacagcctgtgcgtgcccgtgacccccgacgccggctgcggcgccagagtgagagccgccagactgcaccagagactgctgcaccagctgagaagaggccccttccagagatgccagctgctgagactgctgtgctactgccccggcggccaggccggcggcgcccagcagggcttcctgctgagagaccccctggacgaccccgacaccagacaggccctgctggagctgctgggcgcctgccaggaggcccccagaccccacctgggcgagttcgaggccgaccccagaggccagctgtggcagagactgtgggaggtgcaggacggcagaagactgcaggtgggctgcgcccaggtggtgcccgtgcccgagccccccctgcaccccgtggtgcccgacctgcccagcagcgtggtgttccccgacagagaggccgccagagccgtgctggaggagtgcaccagcttcatccccgaggccagagccgtgctggacctggtggaccagtgccccaagcagatccagaagggcaagttccaggtggtggccatcgagggcctggacgccaccggcaagaccaccgtgacccagagcgtggccgacagcctgaaggccgtgctgctgaagagcccccccagctgcatcggccagtggagaaagatcttcgacgacgagcccaccatcatcagaagagccttctacagcctgggcaactacatcgtggccagcgagatcgccaaggagagcgccaagagccccgtgatcgtggacagaagccagctgggcggcaccctgtaccaccccagcctgcacctgctgggcagcgaggtgtgcggcaccggcatcctggacagcagccacagcagccagggcctggagtag

SEQ ID NO: 78159 - DNA, 813 bp, synthetic construct
  misc_feature 1..813: note = Description of Artificial Sequence: Synthetic coding sequence
  source 1..813: mol_type = other DNA
atgggcaacaccagcagcgagagagccgccctggagagacacggcggccacaagacccccagaagagacagcagcggcggcaccaaggacggcgacagacccaagatcctgatggacagccccgaggacgccgacctgttccacagcgaggagatcaaggcccccgagaaggaggagttcctggcctggcagcacgacctggaggtgaacgacaaggcccccgcccaggccagacccaccgtgttcagatggaccggcggcggcaaggaggtgtacctgagcggcagcttcaacaactggagcaagctgcccctgaccagaagccacaacaacttcgtggccatcctggacctgcccgagggcgagcaccagtacaagttcttcgtggacggccagtggacccacgaccccagcgagcccatcgtgaccagccagctgggcaccgtgaacaacatcatccaggtgaagaagaccgacttcgaggtgttcgacgccctgatggtggacagccagaagtgcagcgacgtgagcgagctgagcagcagcccccccggcccctaccaccaggagccctacgtgtgcaagcccgaggagagattcagagccccccccatcctgcccccccacctgctgcaggtgatcctgaacaaggacaccggcatcagctgcgaccccgccctgctgcccgagcccaaccacgtgatgctgaaccacctgtacgccctgagcatcaaggacggcgtgatggtgctgagcgccacccacagatacaagaagaagtacgtgaccaccctgctgtacaagcccatctag

SEQ ID NO: 78160 - DNA, 588 bp, synthetic construct
  misc_feature 1..588: note = Description of Artificial Sequence: Synthetic coding sequence
  source 1..588: mol_type = other DNA
atgggccagatcgagtgggccatgtgggccaacgagcaggccctggccagcggcctgatcctgatcaccggcggcatcgtggccaccgccggcagattcacccagtggtacttcggcgcctacagcatcgtggccggcgtgttcgtgtgcctgctggagtaccccagaggcaagagaaagaagggcagcaccatggagagatggggccagaagtacatgaccgccgtggtgaagctgttcggccccttcaccagaaactactacgtgagagccgtgctgcacctgctgctgagcgtgcccgccggcttcctgctggccaccatcctgggcaccgcctgcctggccatcgccagcggcatctacctgctggccgccgtgagaggcgagcagtggacccccatcgagcccaagcccagagagagaccccagatcggcggcaccatcaagcagccccccagcaaccccccccccagaccccccgccgaggccagaaagaagcccagcgaggaggaggccgccgtggccgccggcggcccccccggcggcccccaggtgaaccccatccccgtgaccgacgaggtggtgtag

SEQ ID NO: 78161 - DNA, 1713 bp, synthetic construct
  misc_feature 1..1713: note = Description of Artificial Sequence: Synthetic coding sequence
  source 1..1713: mol_type = other DNA
atgggcaactgggccgtgaacgagggcctgagcatcttcgtgatcctggtgtggctgggcctgaacgtgttcctgttcgtgtggtactacagagtgtacgacatcccccccaagttcttctacaccagaaagctgctgggcagcgccctggccctggccagagcccccgccgcctgcctgaacttcaactgcatgctgatcctgctgcccgtgtgcagaaacctgctgagcttcctgagaggcagcagcgcctgctgcagcaccagagtgagaagacagctggacagaaacctgaccttccacaagatggtggcctggatgatcgccctgcacagcgccatccacaccatcgcccacctgttcaacgtggagtggtgcgtgaacgccagagtgaacaacagcgacccctacagcgtggccctgagcgagctgggcgacagacagaacgagagctacctgaacttcgccagaaagagaatcaagaaccccgagggcggcctgtacctggccgtgaccctgctggccggcatcaccggcgtggtgatcaccctgtgcctgatcctgatcatcaccagcagcaccaagaccatcagaagaagctacttcgaggtgttctggtacacccaccacctgttcgtgatcttcttcatcggcctggccatccacggcgccgagagaatcgtgagaggccagaccgccgagagcctggccgtgcacaacatcaccgtgtgcgagcagaagatcagcgagtggggcaagatcaaggagtgccccatcccccagttcgccggcaacccccccatgacctggaagtggatcgtgggccccatgttcctgtacctgtgcgagagactggtgagattctggagaagccagcagaaggtggtgatcaccaaggtggtgacccaccccttcaagaccatcgagctgcagatgaagaagaagggcttcaagatggaggtgggccagtacatcttcgtgaagtgccccaaggtgagcaagctggagtggcaccccttcaccctgaccagcgcccccgaggaggacttcttcagcatccacatcagaatcgtgggcgactggaccgagggcctgttcaacgcctgcggctgcgacaagcaggagttccaggacgcctggaagctgcccaagatcgccgtggacggccccttcggcaccgccagcgaggacgtgttcagctacgaggtggtgatgctggtgggcgccggcatcggcgtgacccccttcgccagcatcctgaagagcgtgtggtacaagtactgcaacaacgccaccaacctgaagctgaagaagatctacttctactggctgtgcagagacacccacgccttcgagtggttcgccgacctgctgcagctgctggagagccagatgcaggagagaaacaacgccggcttcctgagctacaacatctacctgaccggctgggacgagagccaggccaaccacttcgccgtgcaccacgacgaggagaaggacgtgatcaccggcctgaagcagaagaccctgtacggcagacccaactgggacaacgagttcaagaccatcgccagccagcaccccaacaccagaatcggcgtgttcctgtgcggccccgaggccctggccgagaccctgagcaagcagagcatcagcaacagcgagagcggccccagaggcgtgcacttcatcttcaacaaggagaacttctag

SEQ ID NO: 78162 - DNA, 912 bp, synthetic construct
  misc_feature 1..912: note = Description of Artificial Sequence: Synthetic coding sequence
  source 1..912: mol_type = other DNA
atgacctggaagtggatcgtgggccccatgttcctgtacctgtgcgagagactggtgagattctggagaagccagcagaaggtggtgatcaccaaggtggtgacccaccccttcaagaccatcgagctgcagatgaagaagaagggcttcaagatggaggtgggccagtacatcttcgtgaagtgccccaaggtgagcaagctggagtggcaccccttcaccctgaccagcgcccccgaggaggacttcttcagcatccacatcagaatcgtgggcgactggaccgagggcctgttcaacgcctgcggctgcgacaagcaggagttccaggacgcctggaagctgcccaagatcgccgtggacggccccttcggcaccgccagcgaggacgtgttcagctacgaggtggtgatgctggtgggcgccggcatcggcgtgacccccttcgccagcatcctgaagagcgtgtggtacaagtactgcaacaacgccaccaacctgaagctgaagaagatctacttctactggctgtgcagagacacccacgccttcgagtggttcgccgacctgctgcagctgctggagagccagatgcaggagagaaacaacgccggcttcctgagctacaacatctacctgaccggctgggacgagagccaggccaaccacttcgccgtgcaccacgacgaggagaaggacgtgatcaccggcctgaagcagaagaccctgtacggcagacccaactgggacaacgagttcaagaccatcgccagccagcaccccaacaccagaatcggcgtgttcctgtgcggccccgaggccctggccgagaccctgagcaagcagagcatcagcaacagcgagagcggccccagaggcgtgcacttcatcttcaacaaggagaacttctag

SEQ ID NO: 78163 - DNA, 1617 bp, synthetic construct
  misc_feature 1..1617: note = Description of Artificial Sequence: Synthetic coding sequence
  source 1..1617: mol_type = other DNA
atgggcaactgggccgtgaacgagggcctgagcatcttcgtgatcagcgccctggccctggccagagcccccgccgcctgcctgaacttcaactgcatgctgatcctgctgcccgtgtgcagaaacctgctgagcttcctgagaggcagcagcgcctgctgcagcaccagagtgagaagacagctggacagaaacctgaccttccacaagatggtggcctggatgatcgccctgcacagcgccatccacaccatcgcccacctgttcaacgtggagtggtgcgtgaacgccagagtgaacaacagcgacccctacagcgtggccctgagcgagctgggcgacagacagaacgagagctacctgaacttcgccagaaagagaatcaagaaccccgagggcggcctgtacctggccgtgaccctgctggccggcatcaccggcgtggtgatcaccctgtgcctgatcctgatcatcaccagcagcaccaagaccatcagaagaagctacttcgaggtgttctggtacacccaccacctgttcgtgatcttcttcatcggcctggccatccacggcgccgagagaatcgtgagaggccagaccgccgagagcctggccgtgcacaacatcaccgtgtgcgagcagaagatcagcgagtggggcaagatcaaggagtgccccatcccccagttcgccggcaacccccccatgacctggaagtggatcgtgggccccatgttcctgtacctgtgcgagagactggtgagattctggagaagccagcagaaggtggtgatcaccaaggtggtgacccaccccttcaagaccatcgagctgcagatgaagaagaagggcttcaagatggaggtgggccagtacatcttcgtgaagtgccccaaggtgagcaagctggagtggcaccccttcaccctgaccagcgcccccgaggaggacttcttcagcatccacatcagaatcgtgggcgactggaccgagggcctgttcaacgcctgcggctgcgacaagcaggagttccaggacgcctggaagctgcccaagatcgccgtggacggccccttcggcaccgccagcgaggacgtgttcagctacgaggtggtgatgctggtgggcgccggcatcggcgtgacccccttcgccagcatcctgaagagcgtgtggtacaagtactgcaacaacgccaccaacctgaagctgaagaagatctacttctactggctgtgcagagacacccacgccttcgagtggttcgccgacctgctgcagctgctggagagccagatgcaggagagaaacaacgccggcttcctgagctacaacatctacctgaccggctgggacgagagccaggccaaccacttcgccgtgcaccacgacgaggagaaggacgtgatcaccggcctgaagcagaagaccctgtacggcagacccaactgggacaacgagttcaagaccatcgccagccagcaccccaacaccagaatcggcgtgttcctgtgcggccccgaggccctggccgagaccctgagcaagcagagcatcagcaacagcgagagcggccccagaggcgtgcacttcatcttcaacaaggagaacttctag

SEQ ID NO: 78164 - DNA, 714 bp, synthetic construct
  misc_feature 1..714: note = Description of Artificial Sequence: Synthetic coding sequence
  source 1..714: mol_type = other DNA
atgaacagcagaagaagagagcccatcaccctgcaggaccccgaggccaagtaccccctgcccctgatcgagaaggagaagatcagccacaacaccagaagattcagattcggcctgcccagccccgaccacgtgctgggcctgcccgtgggcaactacgtgcagctgctggccaagatcgacaacgagctggtggtgagagcctacacccccgtgagcagcgacgacgacagaggcttcgtggacctgatcatcaagatctacttcaagaacgtgcacccccagtaccccgagggcggcaagatgacccagtacctggagaacatgaagatcggcgagaccatcttcttcagaggccccagaggcagactgttctaccacggccccggcaacctgggcatcagacccgaccagaccagcgagcccaagaagaccctggccgaccacctgggcatgatcgccggcggcaccggcatcacccccatgctgcagctgatcagacacatcaccaaggaccccagcgacagaaccagaatgagcctgatcttcgccaaccagaccgaggaggacatcctggtgagaaaggagctggaggagatcgccagaacccaccccgaccagttcaacctgtggtacaccctggacagaccccccatcggcccctggagcgccgagggcgccaccctgctgagcaacagcgcccagttccactag

SEQ ID NO: 78165 - DNA, 831 bp, synthetic construct
  misc_feature 1..831: note = Description of Artificial Sequence: Synthetic coding sequence
  source 1..831: mol_type = other DNA
atgaacagcagaagaagagagcccatcaccctgcaggaccccgaggccaagtaccccctgcccctgatcgagaaggagaagatcagccacaacaccagaagattcagattcggcctgcccagccccgaccacgtgctgggcctgcccgtgggcaactacgtgcagctgctggccaagatcgacaacgagctggtggtgagagcctacacccccgtgagcagcgacgacgacagaggcttcgtggacctgatcatcaagatctacttcaagaacgtgcacccccagtaccccgagggcggcaagatgacccagtacctggagaacatgaagatcggcgagaccatcttcttcagaggccccagaggcagactgttctaccacggccccggcaacctgggcatcagacccgaccagaccagcgagcccaagaagaccctggccgaccacctgggcatgatcgccggcggcaccggcatcacccccatgctgcagctgatcagacacatcaccaaggaccccagcgacagaaccagaatgagcctgatcttcgccaaccagaccgaggaggacatcctggtgagaaaggagctggaggagatcgccagaacccaccccgaccagttcaacctgtggtacaccctggacagaccccccatcggctggaagtacagcagcggcttcgtgaccgccgacatgatcaaggagcacctgcccccccccgccaagagcaccctgatcctggtgtgcggccccccccccctgatccagaccgccgcccaccccaacctggagaagctgggctacacccaggacatgatcttcacctactag

SEQ ID NO: 78166 - DNA, 351 bp, synthetic construct
  misc_feature 1..351: note = Description of Artificial Sequence: Synthetic coding sequence
  source 1..351: mol_type = other DNA
atgaacagcagaagaagagagcccatcaccctgcaggaccccgaggccaagtaccccctgcccctgatcgagaaggagaagatcagccacaacaccagaagattcagattcggcctgcccagccccgaccacgtgctgggcctgcccgtgggcaactacgtgcagctgctggccaagatcgacaacgagctggtggtgagagcctacacccccgtgagcagcgacgacgacagaggcttcgtggacctgatcatcaagatctacttcaagaacgtgcacccccagtaccccgagggcggcaagatgacccagtacctggagaacatgaagatcggcgagaccatcttctag

SEQ ID NO: 78167 - DNA, 714 bp, synthetic construct; identical to SEQ ID NO: 78164
  misc_feature 1..714: note = Description of Artificial Sequence: Synthetic coding sequence
  source 1..714: mol_type = other DNA

SEQ ID NO: 78168 - DNA, 441 bp, synthetic construct
  misc_feature 1..441: note = Description of Artificial Sequence: Synthetic coding sequence
  source 1..441: mol_type = other DNA
atgaacagcagaagaagagagcccatcaccctgcaggaccccgaggccaagtaccccctgcccctgatcgagaaggagaagatcagccacaacaccagaagattcagattcggcctgcccagccccgaccacgtgctgggcctgcccgtgggcaactacgtgcagctgctggccaagatcgacaacgagctggtggtgagagcctacacccccgtgagcagcgacgacgacagaggcttcgtggacctgatcatcaagatctacttcaagaacgtgcacccccagtaccccgagggcggcaagatgacccagtacctggagaacatgaagatcggcgagaccatcttcttcagaggccccagaggcagactgttctaccacggccccggcaacctgggcatcagacccgaccagaccagcgagcccaagaagaccctgtag

SEQ ID NO: 78169 - DNA, 516 bp, synthetic construct
  misc_feature 1..516: note = Description of Artificial Sequence: Synthetic coding sequence
  source 1..516: mol_type = other DNA
atgaacagcagaagaagagagcccatcaccctgcaggaccccgaggccaagtaccccctgcccctgatcgagaaggagaagatcagccacaacaccagaagattcagattcggcctgcccagccccgaccacgtgctgggcctgcccgtgggcaactacgtgcagctgctggccaagatcgacaacgagctggtggtgagagcctacacccccgtgagcagcgacgacgacagaggcttcgtggacctgatcatcaagatctacttcaagaacgtgcacccccagtaccccgagggcggcaagatgacccagtacctggagaacatgaagatcggcgagaccatcttcttcagaggccccagaggcagactgttctaccacggccccggcaacctgggcatcagacccgaccagaccagcgagcccaagaagaccctggccgaccacctgggcatgatcgccggcggcaccggcatcacccccatgctgcagctgatcagacacatcaccaagtag

SEQ ID NO: 78170 - DNA, 831 bp, synthetic construct; identical to SEQ ID NO: 78165
  misc_feature 1..831: note = Description of Artificial Sequence: Synthetic coding sequence
  source 1..831: mol_type = other DNA

SEQ ID NO: 78171 - DNA, 906 bp, synthetic construct
  misc_feature 1..906: note = Description of Artificial Sequence: Synthetic coding sequence
  source 1..906: mol_type = other DNA
atgggcgcccagctgagcaccctgggccacatggtgctgttccccgtgtggttcctgtacagcctgctgatgaagctgttccagagaagcacccccgccatcaccctggagagccccgacatcaagtaccccctgagactgatcgacagagagatcatcagccacgacaccagaagattcagattcgccctgcccagcccccagcacatcctgggcctgcccgtgggccagcacatctacctgagcgccagaatcgacggcaacctggtggtgagaccctacacccccatcagcagcgacgacgacaagggcttcgtggacctggtgatcaaggtgtacttcaaggacacccaccccaagttccccgccggcggcaagatgagccagtacctggagagcatgcagatcggcgacaccatcgagttcagaggccccagcggcctgctggtgtaccagggcaagggcaagttcgccatcagacccgacaagaagagcaaccccatcatcagaaccgtgaagagcgtgggcatgatcgccggcggcaccggcatcacccccatgctgcaggtgatcagagccatcatgaaggaccccgacgaccacaccgtgtgccacctgctgttcgccaaccagaccgagaaggacatcctgctgagacccgagctggaggagctgagaaacaagcacagcgccagattcaagctgtggtacaccctggacagagcccccgaggcctgggactacggccagggcttcgtgaacgaggagatgatcagagaccacctgcccccccccgaggaggagcccctggtgctgatgtgcggccccccccccatgatccagtacgcctgcctgcccaacctggaccacgtgggccaccccaccgagagatgcttcgtgttctag

SEQ ID NO: 78172 - DNA, 1005 bp, synthetic construct
  misc_feature 1..1005: note = Description of Artificial Sequence: Synthetic coding sequence
  source 1..1005: mol_type = other DNA
atgaacagaagcctgctggtgggctgcatgcagagcaaggacatctggggcagagaggagagcatctgcgagagactgaagcaggacggcctggacgtggagagagccgagagctgggagctgggccacatggtgctgttccccgtgtggttcctgtacagcctgctgatgaagctgttccagagaagcacccccgccatcaccctggagagccccgacatcaagtaccccctgagactgatcgacagagagatcatcagccacgacaccagaagattcagattcgccctgcccagcccccagcacatcctgggcctgcccgtgggccagcacatctacctgagcgccagaatcgacggcaacctggtggtgagaccctacacccccatcagcagcgacgacgacaagggcttcgtggacctggtgatcaaggtgtacttcaaggacacccaccccaagttccccgccggcggcaagatgagccagtacctggagagcatgcagatcggcgacaccatcgagttcagaggccccagcggcctgctggtgtaccagggcaagggcaagttcgccatcagacccgacaagaagagcaaccccatcatcagaaccgtgaagagcgtgggcatgatcgccggcggcaccggcatcacccccatgctgcaggtgatcagagccatcatgaaggaccccgacgaccacaccgtgtgccacctgctgttcgccaaccagaccgagaaggacatcctgctgagacccgagctggaggagctgagaaacaagcacagcgccagattcaagctgtggtacaccctggacagagcccccgaggcctgggactacggccagggcttcgtgaacgaggagatgatcagagaccacctgcccccccccgaggaggagcccctggtgctgatgtgcggccccccccccatgatccagtacgcctgcctgcccaacctggaccacgtgggccaccccaccgagagatgcttcgtgttctag

SEQ ID NO: 78173 - DNA, 837 bp, synthetic construct
  misc_feature 1..837: note = Description of Artificial Sequence: Synthetic coding sequence
  source 1..837: mol_type = other DNA
atgaagctgttccagagaagcacccccgccatcaccctggagagccccgacatcaagtaccccctgagactgatcgacagagagatcatcagccacgacaccagaagattcagattcgccctgcccagcccccagcacatcctgggcctgcccgtgggccagcacatctacctgagcgccagaatcgacggcaacctggtggtgagaccctacacccccatcagcagcgacgacgacaagggcttcgtggacctggtgatcaaggtgtacttcaaggacacccaccccaagttccccgccggcggcaagatgagccagtacctggagagcatgcagatcggcgacaccatcgagttcagaggccccagcggcctgctggtgtaccagggcaagggcaagttcgccatcagacccgacaagaagagcaaccccatcatcagaaccgtgaagagcgtgggcatgatcgccggcggcaccggcatcacccccatgctgcaggtgatcagagccatcatgaaggaccccgacgaccacaccgtgtgccacctgctgttcgccaaccagaccgagaaggacatcctgctgagacccgagctggaggagctgagaaacaagcacagcgccagattcaagctgtggtacaccctggacagagcccccgaggcctgggactacggccagggcttcgtgaacgaggagatgatcagagaccacctgcccccccccgaggaggagcccctggtgctgatgtgcggccccccccccatgatccagtacgcctgcctgcccaacctggaccacgtgggccaccccaccgagagatgcttcgtgttctag

SEQ ID NO: 78174 - DNA, 837 bp, synthetic construct; identical to SEQ ID NO: 78173
  misc_feature 1..837: note = Description of Artificial Sequence: Synthetic coding sequence
  source 1..837: mol_type = other DNA

SEQ ID NO: 78175 - DNA, 837 bp, synthetic construct; identical to SEQ ID NO: 78173
  misc_feature 1..837: note = Description of Artificial Sequence: Synthetic coding sequence
  source 1..837: mol_type = other DNA

SEQ ID NO: 78176 - DNA, 837 bp, synthetic construct; identical to SEQ ID NO: 78173
  misc_feature 1..837: note = Description of Artificial Sequence: Synthetic coding sequence
  source 1..837: mol_type = other DNA

SEQ ID NO: 78177 - DNA, 444 bp, synthetic construct
  misc_feature 1..444: note = Description of Artificial Sequence: Synthetic coding sequence
  source 1..444: mol_type = other DNA
atgaagctgttccagagaagcacccccgccatcaccctggagagccccgacatcaagtaccccctgagactgatcgacagagagatcatcagccacgacaccagaagattcagattcgccctgcccagcccccagcacatcctgggcctgcccgtgggccagcacatctacctgagcgccagaatcgacggcaacctggtggtgagaccctacacccccatcagcagcgacgacgacaagggcttcgtggacctggtgatcaaggtgtacttcaaggacacccaccccaagttccccgccggcggcaagatgagccagtacctggagagcatgcagatcggcgacaccatcgagttcagaggccccagcggcctgctggtgtaccagggcaagggcaagttcgccatcagacccgacaagaagagcaaccccatcatcagatag

SEQ ID NO: 78178 - DNA, 330 bp, synthetic construct
  misc_feature 1..330: note = Description of Artificial Sequence: Synthetic coding sequence
  source 1..330: mol_type = other DNA
atggactggatcagactgaccaagagcggcaaggacctgaccggcctgaagggcagactgatcgaggtgaccgaggaggagctgaagaagcacaacaagaaggacgactgctggatctgcatcagaggcttcgtgtacaacgtgagcccctacatggagtaccaccccggcggcgaggacgagctgatgagagccgccggcagcgacggcaccgagctgttcgaccaggtgcacagatgggtgaactacgagagcatgctgaaggagtgcctggtgggcagaatggccatcaagcccgccgtgctgaagggcaagctgtggcacctgtag

SEQ ID NO: 78179 - DNA, 1566 bp, synthetic construct
  misc_feature 1..1566: note = Description of Artificial Sequence: Synthetic coding sequence
  source 1..1566: mol_type = other DNA
atgctgaacgtgcccagccagagcttccccgcccccagaagccagcagagagtggccagcggcggcagaagcaaggtgcccctgaagcagggcagaagcctgatggactggatcagactgaccaagagcggcaaggacctgaccggcctgaagggcagactgatcgaggtgaccgaggaggagctgaagaagcacaacaagaaggacgactgctggatctgcatcagaggcttcgtgtacaacgtgagcccctacatggagtaccaccccggcggcgaggacgagctgatgagagccgccggcagcgacggcaccgagctgttcgaccaggtgcacagatgggtgaactacgagagcatgctgaaggagtgcctggtgggcagaatggccatcaagcccgccgtgctgaaggactacagagaggaggagaagaaggtgctgaacggcatgctgcccaagagccaggtgaccgacaccctggccaaggagggccccagctaccccagctacgactggttccagaccgacagcctggtgaccatcgccatctacaccaagcagaaggacatcaacctggacagcatcatcgtggaccaccagaacgacagcttcagagccgagaccatcatcaaggactgcctgtacctgatccacatcggcctgagccacgaggtgcaggaggacttcagcgtgagagtggtggagagcgtgggcaagatcgagatcgtgctgcagaagaaggagaacaccagctgggacttcctgggccaccccctgaagaaccacaacagcctgatccccagaaaggacaccggcctgtactacagaaagtgccagctgatcagcaaggaggacgtgacccacgacaccagactgttctgcctgatgctgccccccagcacccacctgcaggtgcccatcggccagcacgtgtacctgaagctgcccatcaccggcaccgagatcgtgaagccctacacccccgtgagcggcagcctgctgagcgagttcaaggagcccgtgctgcccaacaacaagtacatctacttcctgatcaagatctaccccaccggcctgttcacccccgagctggacagactgcagatcggcgacttcgtgagcgtgagcagccccgagggcaacttcaagatcagcaagttccaggagctggaggacctgttcctgctggccgccggcaccggcttcacccccatggtgaagatcctgaactacgccctgaccgacatccccagcctgagaaaggtgaagctgatgttcttcaacaagaccgaggacgacatcatctggagaagccagctggagaagctggccttcaaggacaagagactggacgtggagttcgtgctgagcgcccccatcagcgagtggaacggcaagcagggccacatcagccccgccctgctgagcgagttcctgaagagaaacctggacaagagcaaggtgctggtgtgcatctgcggccccgtgcccttcaccgagcagggcgtgagactgctgcacgacctgaacttcagcaagaacgagatccacagcttcaccgcctag

SEQ ID NO: 78180 - DNA, 297 bp, synthetic construct
  misc_feature 1..297: note = Description of Artificial Sequence: Synthetic coding sequence
  source 1..297: mol_type = other DNA
atggccgagcagagcgacgaggccgtgaagtactacaccctggaggagatccagaagcacaaccacagcaagagcacctggctgatcctgcaccacaaggtgtacgacctgaccaagttcctggaggagcaccccggcggcgaggaggtgctgagagagcaggccggcggcgacgccaccgagaacttcgaggacgtgggccacagcaccgacgccagagagatgagcaagaccttcatcatcggcgagctgcaccccgacgacagacccaagctgaacaagccccccaagccctag

SEQ ID NO: 78181 - DNA, 405 bp, synthetic construct
  misc_feature 1..405: note = Description of Artificial Sequence: Synthetic coding sequence
  source 1..405: mol_type = other DNA
atggccgagcagagcgacgaggccgtgaagtactacaccctggaggagatccagaagcacaaccacagcaagagcacctggctgatcctgcaccacaaggtgtacgacctgaccaagttcctggaggagcaccccggcggcgaggaggtgctgagagagcaggccggcggcgacgccaccgagaacttcgaggacgtgggccacagcaccgacgccagagagatgagcaagaccttcatcatcggcgagctgcaccccgacgacagacccaagctgaacaagccccccgagaccctgatcaccaccatcgacagcagcagcagctggtggaccaactgggtgatccccgccatcagcgccgtggccgtggccctgatgtacagactgtacatggccgaggactag

SEQ ID NO: 78182 - DNA, 375 bp, synthetic construct
  misc_feature 1..375: note = Description of Artificial Sequence: Synthetic coding sequence
  source 1..375: mol_type = other DNA
atggccgagcagagcgacgaggccgtgaagtactacaccctggaggagatccagaagcacaaccacagcaagagcacctggctgatcctgcaccacaaggtgtacgacctgaccaagttcctggaggagcaccccggcggcgaggaggtgctgagagagcaggccggcggcgacgccaccgagaacttcgaggacgtgggccacagcaccgacgccagagagatgagcaagaccttcatcatcggcgagctgcaccccgagaccctgatcaccaccatcgacagcagcagcagctggtggaccaactgggtgatccccgccatcagcgccgtggccgtggccctgatgtacagactgtacatggccgaggactag

SEQ ID NO: 78183 - DNA, 297 bp, synthetic construct
  misc_feature 1..297: note = Description of Artificial Sequence: Synthetic coding sequence
  source 1..297: mol_type = other DNA
atggccgagcagagcgacgaggccgtgaagtactacaccctggaggagatccagaagcacaaccacagcaagagcacctggctgatcctgcaccacaaggtgtacgacctgaccaagttcctggaggagcaccccggcggcgaggaggtgctgagagagcaggccggcggcgacgccaccgagaacttcgaggacgtgggccacagcaccgacgccagagagatgagcaagaccttcatcatcggcgagctgcaccccgacgacagacccaagctgaacaagccccccgagccctag

SEQ ID NO: 78184 - DNA, 453 bp, synthetic construct
  misc_feature 1..453: note = Description of Artificial Sequence: Synthetic coding sequence
  source 1..453: mol_type = other DNA
atgagcggcagcatggccaccgccgaggccagcggcagcgacggcaagggccaggaggtggagaccagcgtgacctactacagactggaggaggtggccaagagaaacagcctgaaggagctgtggctggtgatccacggcagagtgtacgacgtgaccagattcctgaacgagcaccccggcggcgaggaggtgctgctggagcaggccggcgtggacgccagcgagagcttcgaggacgtgggccacagcagcgacgccagagagatgctgaagcagtactacatcggcgacatccaccccagcgacctgaagcccgagagcggcagcaaggaccccagcaagaacgacacctgcaagagctgctgggcctactggatcctgcccatcatcggcgccgtgctgctgggcttcctgtacagatactacaccagcgagagcaagagcagctag

SEQ ID NO: 78185 - DNA, 441 bp, synthetic construct
  misc_feature 1..441: note = Description of Artificial Sequence: Synthetic coding sequence
  source 1..441: mol_type = other DNA
atggccaccgccgaggccagcggcagcgacggcaagggccaggaggtggagaccagcgtgacctactacagactggaggaggtggccaagagaaacagcctgaaggagctgtggctggtgatccacggcagagtgtacgacgtgaccagattcctgaacgagcaccccggcggcgaggaggtgctgctggagcaggccggcgtggacgccagcgagagcttcgaggacgtgggccacagcagcgacgccagagagatgctgaagcagtactacatcggcgacatccaccccagcgacctgaagcccgagagcggcagcaaggaccccagcaagaacgacacctgcaagagctgctgggcctactggatcctgcccatcatcggcgccgtgctgctgggcttcctgtacagatactacaccagcgagagcaagagcagctag

SEQ ID NO: 78186 - DNA, 756 bp, synthetic construct
  misc_feature 1..756: note = Description of Artificial Sequence: Synthetic coding sequence
  source 1..756: mol_type = other DNA
atggagggcggcgccgccgccgccacccccaccgccctgccctactacgtggccttcagccagctgctgggcctgaccctggtggccatgaccggcgcctggctgggcctgtacagaggcggcatcgcctgggagagcgacctgcagttcaacgcccaccccctgtgcatggtgatcggcctgatcttcctgcagggcaacgccctgctggtgtacagagtgttcagaaacgaggccaagagaaccaccaaggtgctgcacggcctgctgcacatcttcgccctggtgatcgccctggtgggcctggtggccgtgttcgactaccacagaaagaagggctacgccgacctgtacagcctgcacagctggtgcggcatcctggtgttcgtgctgtacttcgtgcagtggctggtgggcttcagcttcttcctgttccccggcgccagcttcagcctgagaagcagatacagaccccagcacatcttcttcggcgccaccatcttcctgctgagcgtgggcaccgccctgctgggcctgaaggaggccctgctgttcaacctgggcggcaagtacagcgccttcgagcccgagggcgtgctggccaacgtgctgggcctgctgctggcctgcttcggcggcgccgtgctgtacatcctgaccagagccgactggaagagacccagccaggccgaggagcaggccctgagcatggacttcaagaccctgaccgagggcgacagccccggcagccagtag

SEQ ID NO: 78187 - DNA, 756 bp, synthetic construct; identical to SEQ ID NO: 78186
  misc_feature 1..756: note = Description of Artificial Sequence: Synthetic coding sequence
  source 1..756: mol_type = other DNA

SEQ ID NO: 78188 - DNA, 756 bp, synthetic construct; identical to SEQ ID NO: 78186
  misc_feature 1..756: note = Description of Artificial Sequence: Synthetic coding sequence
  source 1..756: mol_type = other DNA

SEQ ID NO: 78189 - DNA, 417 bp, synthetic construct
  misc_feature 1..417: note = Description of Artificial Sequence: Synthetic coding sequence
  source 1..417: mol_type = other DNA
atggagggcggcgccgccgccgccacccccaccgccctgccctactacgtggccttcagccagctgctgggcctgaccctggtggccatgaccggcgcctggctgggcctgtacagaggcggcatcgcctgggagagcgacctgcagttcaacgcccaccccctgtgcatggtgatcggcctgatcttcctgcagggcaacgccctgctggtgtacagagtgttcagaaacgaggccaagagaaccaccaaggtgctgcacggcctgctgcacatcttcgccctggtgatcgccctggtgggcctggtggccgtgttcgactaccacagaaagaagggctacgccgacctgtacagcctgcacagctggtgcggcatcctggtgttcgtgctgtacttcgtgcagggccaggtgtag

SEQ ID NO: 78190 - DNA, 957 bp, synthetic construct
  misc_feature 1..957: note = Description of Artificial Sequence: Synthetic coding sequence
  source 1..957: mol_type = other DNA
atgaagcagaagaccaagcccggcaccggccccctgagcagcctggagttcggcgtgagcttcctggcccccagcccccacatggagctgctggccagctgccccagaagcagactgagcccctggggcggctgggcccccccccccagccacagcagagacctgagacccctgccccaggacgacggcgtgtgcctgagcatggagggcggcgccgccgccgccacccccaccgccctgccctactacgtggccttcagccagctgctgggcctgaccctggtggccatgaccggcgcctggctgggcctgtacagaggcggcatcgcctgggagagcgacctgcagttcaacgcccaccccctgtgcatggtgatcggcctgatcttcctgcagggcaacgccctgctggtgtacagagtgttcagaaacgaggccaagagaaccaccaaggtgctgcacggcctgctgcacatcttcgccctggtgatcgccctggtgggcctggtggccgtgttcgactaccacagaaagaagggctacgccgacctgtacagcctgcacagctggtgcggcatcctggtgttcgtgctgtacttcgtgcagtggctggtgggcttcagcttcttcctgttccccggcgccagcttcagcctgagaagcagatacagaccccagcacatcttcttcggcgccaccatcttcctgctgagcgtgggcaccgccctgctgggcctgaaggaggccctgctgttcaacctgggcggcaagtacagcgccttcgagcccgagggcgtgctggccaacgtgctgggcctgctgctggcctgcttcggcggcgccgtgctgtacatcctgaccagagccgactggaagagacccagccaggccgaggagcaggccctgagcatggacttcaagaccctgaccgagggcgacagccccggcagccagtag

SEQ ID NO: 78191 - DNA, 1143 bp, synthetic construct
  misc_feature 1..1143: note = Description of Artificial Sequence: Synthetic coding sequence
  source 1..1143: mol_type = other DNA
atgggcagcggctgcagaatcgagtgcatcttcttcagcgagttccaccccaccctgggccccaagatcacctaccaggtgcccgaggacttcatcagcagagagctgttcgacaccgtgcaggtgtacatcatcaccaagcccgagctgcagaacaagctgatcaccgtgaccgccatggagaagaagctgatcggctgccccgtgtgcatcgagcacaagaagtacagcagaaacgccctgctgttcaacctgggcttcgtgtgcgacgcccaggccaagacctgcgccctggagcccatcgtgaagaagctggccggctacctgaccaccctggagctggagagcagcttcgtgagcatggaggagagcaagcagaagctggtgcccatcatgaccatcctgctggaggagctgaacgccagcggcagatgcaccctgcccatcgacgagagcaacaccatccacctgaaggtgatcgagcagagacccgacccccccgtggcccaggagtacgacgtgcccgtgttcaccaaggacaaggaggacttcttcaacagccagtgggacctgaccacccagcagatcctgccctacatcgacggcttcagacacatccagaagatcagcgccgaggccgacgtggagctgaacctggtgagaatcgccatccagaacctgctgtactacggcgtggtgaccctggtgagcatcctgcagtacagcaacgtgtactgccccacccccaaggtgcaggacctggtggacgacaagagcctgcaggaggcctgcctgagctacgtgaccaagcagggccacaagagagccagcctgagagacgtgttccagctgtactgcagcctgagccccggcaccaccgtgagagacctgatcggcagacacccccagcagctgcagcacgtggacgagagaaagctgatccagttcggcctgatgaagaacctgatcagaagactgcagaagtaccccgtgagagtgaccagagaggagcagagccaccccgccagactgtacaccggctgccacagctacgacgagatctgctgcaagaccggcatgagctaccacgagctggacgagagactggagaacgaccccaacatcatcatctgctggaagtag

SEQ ID NO: 78192 - DNA, 669 bp, synthetic construct
  misc_feature 1..669: note = Description of Artificial Sequence: Synthetic coding sequence
  source 1..669: mol_type = other DNA
atggccctgagcgccgagaccgagagccacatctacagagccctgagaaccgccagcggcgccgccgcccacctggtggccctgggcttcaccatcttcgtggccgtgctggccagacccggcagcagcctgttcagctggcaccccgtgctgatgagcctggccttcagcttcctgatgaccgaggccctgctggtgttcagccccgagagcagcctgctgcacagcctgagcagaaagggcagagccagatgccactgggtgctgcagctgctggccctgctgtgcgccctgctgggcctgggcctggtgatcctgcacaaggagcagctgggcaaggcccacctggtgaccagacacggccaggccggcctgctggccgtgctgtgggccggcctgcagtgcagcggcggcgtgggcctgctgtaccccaagctgctgcccagatggcccctggccaagctgaagctgtaccacgccaccagcggcctggtgggctacctgctgggcagcgccagcctgctgctgggcatgtgcagcctgtggttcaccgccagcgtgaccggcgccgcctggtacctggccgtgctgtgccccgtgctgaccagcctggtgatcatgaaccaggtgagcaacgcctacctgtacagaaagagaatccagccctag

SEQ ID NO: 78193 - DNA, 669 bp, synthetic construct; identical to SEQ ID NO: 78192
  misc_feature 1..669: note = Description of Artificial Sequence: Synthetic coding sequence
  source 1..669: mol_type = other DNA

SEQ ID NO: 78194 - DNA, 669 bp, synthetic construct; identical to SEQ ID NO: 78192
  misc_feature 1..669: note = Description of Artificial Sequence: Synthetic coding sequence
  source 1..669: mol_type = other DNA

SEQ ID NO: 78195 - DNA, 696 bp, synthetic construct
  misc_feature 1..696: note = Description of Artificial Sequence: Synthetic coding sequence
  source 1..696: mol_type = other DNA
atgggcggcctgtggagacccggctggagatgcgtgcccttctgcggctggagatggatccaccccggcagccccaccagagccgccgagagagtggagcccttcctgagacccgagtggagcggcaccggcggcgccgagagaggcctgagatggctgggcacctggaagagatgcagcctgagagccagacaccccgccctgcagccccccagaagacccaagagcagcaaccccttcaccagagcccaggaggaggagagaagaagacagaacaagaccaccctgacctacgtggccgccgtggccgtgggcatgctgggcgccagctacgccgccgtgcccctgtacagactgtactgccagaccaccggcctgggcggcagcgccgtggccggccacgccagcgacaagatcgagaacatggtgcccgtgaaggacagaatcatcaagatcagcttcaacgccgacgtgcacgccagcctgcagtggaacttcagaccccagcagaccgagatctacgtggtgcccggcgagaccgccctggccttctacagagccaagaaccccaccgacaagcccgtgatcggcatcagcacctacaacatcgtgcccttcgaggccggccagtacttcaacaagatccaggccagcaagctgcacagagtgtacgtgctggagagctggcacctgtag

SEQ ID NO: 78196 - DNA, 510 bp, synthetic construct
  misc_feature 1..510: note = Description of Artificial Sequence: Synthetic coding sequence
  source 1..510: mol_type = other DNA
atgctggccaccagagtgttcagcctggtgggcaagagagccatcagcaccagcgtgtgcgtgagagcccacgagagcgtggtgaagagcgaggacttcagcctgcccgcctacatggacagaagagaccaccccctgcccgaggtggcccacgtgaagcacctgagcgccagccagaaggccctgaaggagaaggagaaggccagctggagcagcctgagcatggacgagaaggtggagctgtacagaatcaagttcaaggagagcttcgccgagatgaacagaggcagcaacgagtggaagaccgtggtgggcggcgccatgttcttcatcggcttcaccgccctggtgatcatgtggcagaagcactacgtgtacggccccctgccccagagcttcgacaaggagtgggtggccaagcagaccaagagaatgctggacatgaaggtgaaccccatccagggcctggccagcaagtgggactacgagaagaacgagtggaagaagtag

SEQ ID NO: 78197 - DNA, 516 bp, synthetic construct
  misc_feature 1..516: note = Description of Artificial Sequence: Synthetic coding sequence
  source 1..516: mol_type = other DNA
atgctgcccagagccgcctggagcctggtgctgagaaagggcggcggcggcagaagaggcatgcacagcagcgagggcaccaccagaggcggcggcaagatgagcccctacaccaactgctacgcccagagatactaccccatgcccgaggagcccttctgcaccgagctgaacgccgaggagcaggccctgaaggagaaggagaagggcagctggacccagctgacccacgccgagaaggtggccctgtacagactgcagttcaacgagaccttcgccgagatgaacagaagaagcaacgagtggaagaccgtgatgggctgcgtgttcttcttcatcggcttcgccgccctggtgatctggtggcagagagtgtacgtgttcccccccaagcccatcaccctgaccgacgagagaaaggcccagcagctgcagagaatgctggacatgaaggtgaaccccgtgcagggcctggccagcagatgggactacgagaagaagcagtggaagaagtag

SEQ ID NO: 78198 - DNA, 390 bp, synthetic construct
  misc_feature 1..390: note = Description of Artificial Sequence: Synthetic coding sequence
  source 1..390: mol_type = other DNA
atggccagcagactgctgagaggcgccggcaccctggccgcccaggccctgagagccagaggccccagcggcgccgccgccatgagaagcatggccagcggcggcggcgtgcccaccgacgaggagcaggccaccggcctggagagagagatcatgctggccgccaagaagggcctggacccctacaacgtgctggcccccaagggcgccagcggcaccagagaggaccccaacctggtgcccagcatcagcaacaagagaatcgtgggctgcatctgcgaggaggacaacaccagcgtggtgtggttctggctgcacaagggcgaggcccagagatgccccagatgcggcgcccactacaagctggtgccccagcagctggcccactag

SEQ ID NO: 78199 - DNA, 606 bp, synthetic construct
  misc_feature 1..606: note = Description of Artificial Sequence: Synthetic coding sequence
  source 1..606: mol_type = other DNA
atggccagagactacgaccacctgttcaagctgctgatcatcggcgacagcggcgtgggcaagagcagcctgctgctgagattcgccgacaacaccttcagcggcagctacatcaccaccatcggcgtggacttcaagatcagaaccgtggagatcaacggcgagaaggtgaagctgcagatctgggacaccgccggccaggagagattcagaaccatcaccagcacctactacagaggcacccacggcgtgatcgtggtgtacgacgtgaccagcgccgagagcttcgtgaacgtgaagagatggctgcacgagatcaaccagaactgcgacgacgtgtgcagaatcctggtgggcaacaagaacgacgaccccgagagaaaggtggtggagaccgaggacgcctacaagttcgccggccagatgggcatccagctgttcgagaccagcgccaaggagaacgtgaacgtggaggagatgttcaactgcatcaccgagctggtgctgagagccaagaaggacaacctggccaagcagcagcagcagcagcagaacgacgtggtgaagctgaccaagaacagcaagagaaagaagagatgctgctag

SEQ ID NO: 78200 - DNA, 261 bp, synthetic construct
  misc_feature 1..261: note = Description of Artificial Sequence: Synthetic coding sequence
  source 1..261: mol_type = other DNA
atggccgaggacatggagaccaagatcaagaactacaagaccgcccccttcgacagcagattccccaaccagaaccagaccagaaactgctggcagaactacctggacttccacagatgccagaaggccatgaccgccaagggcggcgacatcagcgtgtgcgagtggtaccagagagtgtaccagagcctgtgccccaccagctgggtgaccgactgggacgagcagagagccgagggcaccttccccggcaagatctag

SEQ ID NO: 78201 - DNA, 312 bp, synthetic construct
  misc_feature 1..312: note = Description of Artificial Sequence: Synthetic coding sequence
  source 1..312: mol_type = other DNA
atgcacccccacccccagatccccggcagagacctggccggcttcagcaccatggccgaggacatggagaccaagatcaagaactacaagaccgcccccttcgacagcagattccccaaccagaaccagaccagaaactgctggcagaactacctggacttccacagatgccagaaggccatgaccgccaagggcggcgacatcagcgtgtgcgagtggtaccagagagtgtaccagagcctgtgccccaccagctgggtgaccgactgggacgagcagagagccgagggcaccttccccggcaagatctag

SEQ ID NO: 78202 - DNA, 228 bp, synthetic construct
  misc_feature 1..228: note = Description of Artificial Sequence: Synthetic coding sequence
  source 1..228: mol_type = other DNA
atggcccccgaggtgctgcccaagcccagaatgagaggcctgctggccagaagactgagaaaccacatggccgtggccttcgtgctgagcctgggcgtggccgccctgtacaagttcagagtggccgaccagagaaagaaggcctacgccgacttctacagaaactacgacgtgatgaaggacttcgaggagatgagaaaggccggcatcttccagagcgtgaagtag

SEQ ID NO: 78203 - DNA, 228 bp, synthetic construct; identical to SEQ ID NO: 78202
  misc_feature 1..228: note = Description of Artificial Sequence: Synthetic coding sequence
  source 1..228: mol_type = other DNA

SEQ ID NO: 78204 - DNA, 228 bp, synthetic construct; identical to SEQ ID NO: 78202
  misc_feature 1..228: note = Description of Artificial Sequence: Synthetic coding sequence
  source 1..228: mol_type = other DNA

SEQ ID NO: 78205 - DNA, 228 bp, synthetic construct; identical to SEQ ID NO: 78202
  misc_feature 1..228: note = Description of Artificial Sequence: Synthetic coding sequence
  source 1..228: mol_type = other DNA

SEQ ID NO: 78206 - DNA, 228 bp, synthetic construct; identical to SEQ ID NO: 78202
  misc_feature 1..228: note = Description of Artificial Sequence: Synthetic coding sequence
  source 1..228: mol_type = other DNA

SEQ ID NO: 78207 - DNA, 228 bp, synthetic construct; identical to SEQ ID NO: 78202
  misc_feature 1..228: note = Description of Artificial Sequence: Synthetic coding sequence
  source 1..228: mol_type = other DNA

SEQ ID NO: 78208 - DNA, 228 bp, synthetic construct; identical to SEQ ID NO: 78202
  misc_feature 1..228: note = Description of Artificial Sequence: Synthetic coding sequence
  source 1..228: mol_type = other DNA

SEQ ID NO: 78209 - DNA, 228 bp, synthetic construct; identical to SEQ ID NO: 78202
  misc_feature 1..228: note = Description of Artificial Sequence: Synthetic coding sequence
  source 1..228: mol_type = other DNA

SEQ ID NO: 78210 - DNA, 228 bp, synthetic construct; identical to SEQ ID NO: 78202
  misc_feature 1..228: note = Description of Artificial Sequence: Synthetic coding sequence
  source 1..228: mol_type = other DNA

SEQ ID NO: 78211 - DNA, 228 bp, synthetic construct; identical to SEQ ID NO: 78202
  misc_feature 1..228: note = Description of Artificial Sequence: Synthetic coding sequence
  source 1..228: mol_type = other DNA

SEQ ID NO: 78212 - DNA, 240 bp, synthetic construct
  misc_feature 1..240: note = Description of Artificial Sequence: Synthetic coding sequence
  source 1..240: mol_type = other DNA
atgcaggccctgagagtgagccaggccctgatcagaagcttcagcagcaccgccagaaacagattccagaacagagtgagagagaagcagaagctgttccaggaggacaacgacatccccctgtacctgaagggcggcatcgtggacaacatcctgtacagagtgaccatgaccctgtgcctgggcggcaccgtgtacagcctgtacagcctgggctgggccagcttccccagaaactag

SEQ ID NO: 78213 - DNA, 330 bp, synthetic construct
  misc_feature 1..330: note = Description of Artificial Sequence: Synthetic coding sequence
  source 1..330: mol_type = other DNA
tgaagcttctgggtgctgagcctgcccggccccagcagacagcccggccacccccaggccagactgcagggcgagagcccccccaaccccgccggcagcagcagagtgagccaggccctgatcagaagcttcagcagcaccgccagaaacagattccagaacagagtgagagagaagcagaagctgttccaggaggacaacgacatccccctgtacctgaagggcggcatcgtggacaacatcctgtacagagtgaccatgaccctgtgcctgggcggcaccgtgtacagcctgtacagcctgggctgggccagcttccccagaaactag

SEQ ID NO: 78214 - DNA, 2775 bp, synthetic construct
  misc_feature 1..2775: note = Description of Artificial Sequence: Synthetic coding sequence
  source 1..2775: mol_type = other DNA
atgagcagaagcagacagccccccctggtgaccggcatcagccccaacgagggcatcccctggaccaaggtgaccatcagaggcgagaacctgggcaccggccccaccgacctgatcggcctgaccatctgcggccacaactgcctgctgaccgccgagtggatgagcgccagcaagatcgtgtgcagagtgggccaggccaagaacgacaagggcgacatcatcgtgaccaccaagagcggcggcagaggcaccagcaccgtgagcttcaagctgctgaagcccgagaagatcggcatcctggaccagagcgccgtgtgggtggacgagatgaactactacgacatgagaaccgacagaaacaagggcatcccccccctgagcctgagacccgccaaccccctgggcatcgagatcgagaagagcaagttcagccagaaggacctggagatgctgttccacggcatgagcgccgacttcaccagcgagaacttcagcgccgcctggtacctgatcgagaaccacagcaacaccagcttcgagcagctgaagatggccgtgaccaacctgaagagacaggccaacaagaagagcgagggcagcctggcctacgtgaagggcggcctgagcaccttcttcgaggcccaggacgccctgagcgccatccaccagaagctggaggccgacggcaccgagaaggtggagggcagcatgacccagaagctggagaacgtgctgaacagagccagcaacaccgccgacaccctgttccaggaggtgctgggcagaaaggacaaggccgacagcaccagaaacgccctgaacgtgctgcagagattcaagttcctgttcaacctgcccctgaacatcgagagaaacatccagaagggcgactacgacgtggtgatcaacgactacgagaaggccaagagcctgttcggcaagaccgaggtgcaggtgttcaagaagtactacgccgaggtggagaccagaatcgaggccctgagagagctgctgctggacaagctgctggagacccccagcaccctgcacgaccagaagagatacatcagatacctgagcgacctgcacgccagcggcgaccccgcctggcagtgcatcggcgcccagcacaagtggatcctgcagctgatgcacagctgcaaggagggctacgtgaaggacctgaagggcaaccccggcctgcacagccccatgctggacctggacaacgacaccagacccagcgtgctgggccacctgagccagaccgccagcctgaagagaggcagcagcttccagagcggcagagacgacacctggagatacaagaccccccacagagtggccttcgtggagaagctgaccaagctggtgctgagccagctgcccaacttctggaagctgtggatcagctacgtgaacggcagcctgttcagcgagaccgccgagaagagcggccagatcgagagaagcaagaacgtgagacagagacagaacgacttcaagaagatgatccaggaggtgatgcacagcctggtgaagctgaccagaggcgccctgctgcccctgagcatcagagacggcgaggccaagcagtacggcggctgggaggtgaagtgcgagctgagcggccagtggctggcccacgccatccagaccgtgagactgacccacgagagcctgaccgccctggagatccccaacgacctgctgcagaccatccaggacctgatcctggacctgagagtgagatgcgtgatggccaccctgcagcacaccgccgaggagatcaagagactggccgagaaggaggactggatcgtggacaacgagggcctgaccagcctgccctgccagttcgagcagtgcatcgtgtgcagcctgcagagcctgaagggcgtgctggagtgcaagcccggcgaggccagcgtgttccagcagcccaagacccaggaggaggtgtgccagctgagcatcaacatcatgcaggtgttcatctactgcctggagcagctgagcaccaagcccgacgccgacatcgacaccacccacctgagcgtggacgtgagcagccccgacctgttcggcagcatccacgaggacttcagcctgaccagcgagcagagactgctgatcgtgctgagcaactgctgctacctggagagacacaccttcctgaacatcgccgagcacttcgagaagcacaacttccagggcatcgagaagatcacccaggtgagcatggccagcctgaaggagctggaccagagactgttcgagaactacatcgagctgaaggccgaccccatcgtgggcagcctggagcccggcatctacgccggctacttcgactggaaggactgcctgccccccaccggcgtgagaaactacctgaaggaggccctggtgaacatcatcgccgtgcacgccgaggtgttcaccatcagcaaggagctggtgcccagagtgctgagcaaggtgatcgaggccgtgagcgaggagctgagcagactgatgcagtgcgtgagcagcttcagcaagaacggcgccctgcaggccagactggagatctgcgccctgagagacaccgtggccgtgtacctgacccccgagagcaagagcagcttcaagcaggccctggaggccctgccccagctgagcagcggcgccgacaagaagctgctggaggagctgctgaacaagttcaagagcagcatgcacctgcagctgacctgcttccaggccgccagcagcaccatgatgaagacctag

SEQ ID NO: 78215 - DNA, 348 bp, synthetic construct
  misc_feature 1..348: note = Description of Artificial Sequence: Synthetic coding sequence
  source 1..348: mol_type = other DNA
atgcacacccaggacagcgaggtggtgcccgtgcccgcctggcccttcagcctggtggtgttcagctgcggcggctgctggagcgtgaccgccaagatgctgagaaacctgctggccctgagacagatcggccagagaaccatcagcaccgccagcagaagacacttcaagaacaaggtgcccgagaagcagaagctgttccaggaggacgacgagatccccctgtacctgaagggcggcgtggccgacgccctgctgtacagagccaccatgatcctgaccgtgggcggcaccgcctacgccatctacgagctggccgtggccagcttccccaagaagcaggagtag

SEQ ID NO: 78216 - DNA, 348 bp, synthetic construct; identical to SEQ ID NO: 78215
  misc_feature 1..348: note = Description of Artificial Sequence: Synthetic coding sequence
  source 1..348: mol_type = other DNA

SEQ ID NO: 78217 - DNA, 1734 bp, synthetic construct
  misc_feature 1..1734: note = Description of Artificial Sequence: Synthetic coding sequence
  source 1..1734: mol_type = other DNA
atgagcaagcccgagctgaaggaggacaagatgctggaggtgcacttcgtgggcgacgacgacgtgctgaaccacatcctggacagagagggcggcgccaagctgaagaaggagagagcccagctgctggtgaaccccaagaagatcatcaagaagcccgagtacgacctggaggaggacgaccaggaggtgctgaaggaccagaactacgtggagatcatgggcagagacgtgcaggagagcctgaagaacggcagcgccaccggcggcggcaacaaggtgtacagcttccagaacagaaagcacagcgagaagatggccaagctggccagcgagctggccaagaccccccagaagagcgtgagcttcagcctgaagaacgaccccgagatcaccatcaacgtgccccagagcagcaagggccacagcgccagcgacaaggtgcagcccaagaacaacgacaagagcgagttcctgagcaccgcccccagaagcctgagaaagagactgatcgtgcccagaagccacagcgacagcgagagcgagtacagcgccagcaacagcgaggacgacgagggcgtggcccaggagcacgaggaggacaccaacgccgtgatcttcagccagaagatccaggcccagaacagagtggtgagcgcccccgtgggcaaggagacccccagcaagagaatgaagagagacaagaccagcgacctggtggaggagtacttcgaggcccacagcagcagcaaggtgctgaccagcgacagaaccctgcagaagctgaagagagccaagctggaccagcagaccctgagaaacctgctgagcaaggtgagccccagcttcagcgccgagctgaagcagctgaaccagcagtacgagaagctgttccacaagtggatgctgcagctgcacctgggcttcaacatcgtgctgtacggcctgggcagcaagagagacctgctggagagattcagaaccaccatgctgcaggacagcatccacgtggtgatcaacggcttcttccccggcatcagcgtgaagagcgtgctgaacagcatcaccgaggaggtgctggaccacatgggcaccttcagaagcatcctggaccagctggactggatcgtgaacaagttcaaggaggacagcagcctggagctgttcctgctgatccacaacctggacagccagatgctgagaggcgagaagagccagcagatcatcggccagctgagcagcctgcacaacatctacctgatcgccagcatcgaccacctgaacgcccccctgatgtgggaccacgccaagcagagcctgttcaactggctgtggtacgagaccaccacctacagcccctacaccgaggagaccagctacgagaacagcctgctggtgaagcagagcggcagcctgcccctgagcagcctgacccacgtgctgagaagcctgacccccaacgccagaggcatcttcagactgctgatcaagtaccagctggacaaccaggacaaccccagctacatcggcctgagcttccaggacttctaccagcagtgcagagaggccttcctggtgaacagcgacctgaccctgagagcccagctgaccgagttcagagaccacaagctgatcagaaccaagaagggcaccgacggcgtggagtacctgctgatccccgtggacaacggcaccctgaccgacttcctggagaaggaggaggaggaggcctag

SEQ ID NO: 78218 - DNA, 345 bp, synthetic construct
  misc_feature 1..345: note = Description of Artificial Sequence: Synthetic coding sequence
  source 1..345: mol_type = other DNA
atgtactacaagttcagcggcttcacccagaagctggccggcgcctgggccagcgaggcctacagcccccagggcctgaagcccgtggtgagcaccgaggccccccccatcatcttcgccacccccaccaagctgaccagcgacagcaccgtgtacgactacgccggcaagaacaaggtgcccgagctgcagaagttcttccagaaggccgacggcgtgcccgtgtacctgaagagaggcctgcccgaccagatgctgtacagaaccaccatggccctgaccgtgggcggcaccatctactgcctgatcgccctgtacatggccagccagcccaagaacaagtag

SEQ ID NO: 78219 - DNA, 246 bp, synthetic construct
  misc_feature 1..246: note = Description of Artificial Sequence: Synthetic coding sequence
  source 1..246: mol_type = other DNA
atgatgttccccctggccagaaacgccctgagcagcctgaagatccagagcatcctgcagagcatggccagacacagccacgtgaagcacagccccgacttccacgacaagtacggcaacgccgtgctggccagcggcaccgccttctgcgtggccacctgggtgttcaccgccacccagatcggcatcgagtggaacctgagccccgtgggcagagtgacccccaaggagtggaagcaccagtag

SEQ ID NO: 78220 - DNA, 246 bp, synthetic construct; identical to SEQ ID NO: 78219
  misc_feature 1..246: note = Description of Artificial Sequence: Synthetic coding sequence
  source 1..246: mol_type = other DNA

SEQ ID NO: 78221 - DNA, 246 bp, synthetic construct; identical to SEQ ID NO: 78219
  misc_feature 1..246: note = Description of Artificial Sequence: Synthetic coding sequence
  source 1..246: mol_type = other DNA

SEQ ID NO: 78222 - DNA, 99 bp, synthetic construct
  misc_feature 1..99: note = Description of Artificial Sequence: Synthetic coding sequence
  source 1..99: mol_type = other DNA
atgatgttccccctggccagaaacgccctgagcagcctgaagatccagagcatcctgcagagcatggccagacacagccacgtgaagcacagcccctag

SEQ ID NO: 78223 - DNA, 243 bp, synthetic construct
  misc_feature 1..243: note = Description of Artificial Sequence: Synthetic coding sequence
  source 1..243: mol_type = other DNA
atgttccccctggccagaaacgccctgagcagcctgaagatccagagcatcctgcagagcatggccagacacagccacgtgaagcacagccccgacttccacgacaagtacggcaacgccgtgctggccagcggcaccgccttctgcgtggccacctgggtgttcaccgccacccagatcggcatcgagtggaacctgagccccgtgggcagagtgacccccaaggagtggaagcaccagtag

SEQ ID NO: 78224 - DNA, 192 bp, synthetic construct
  misc_feature 1..192: note = Description of Artificial Sequence: Synthetic coding sequence
  source 1..192: mol_type = other DNA
atgctgggccagagcatcagaagattcaccaccagcgtggtgagaagaagccactacgaggagggccccggcaagaacctgcccttcagcgtggagaacaagtggagcctgctggccaagatgtgcctgtacttcggcagcgccttcgccacccccttcctggtggtgagacaccagctgctgaagacctag

SEQ ID NO: 78225 - DNA, 192 bp, synthetic construct; identical to SEQ ID NO: 78224
  misc_feature 1..192: note = Description of Artificial Sequence: Synthetic coding sequence
  source 1..192: mol_type = other DNA

SEQ ID NO: 78226 - DNA, 978 bp, synthetic construct
  misc_feature 1..978: note = Description of Artificial Sequence: Synthetic coding sequence
  source 1..978: mol_type = other DNA
atggccgccgccgccgccagcctgagaggcgtggtgctgggccccagaggcgccggcctgcccggcgccagagccagaggcctgctgtgcagcgccagacccggccagctgcccctgagaaccccccaggccgtggccctgagcagcaagagcggcctgagcagaggcagaaaggtgatgctgagcgccctgggcatgctggccgccggcggcgccggcctggccatggccctgcacagcgccgtgagcgccagcgacctggagctgcacccccccagctacccctggagccacagaggcctgctgagcagcctggaccacaccagcatcagaagaggcttccaggtgtacaagcaggtgtgcgccagctgccacagcatggacttcgtggcctacagacacctggtgggcgtgtgctacaccgaggacgaggccaaggagctggccgccgaggtggaggtgcaggacggccccaacgaggacggcgagatgttcatgagacccggcaagctgttcgactacttccccaagccctaccccaacagcgaggccgccagagccgccaacaacggcgccctgccccccgacctgagctacatcgtgagagccagacacggcggcgaggactacgtgttcagcctgctgaccggctactgcgagccccccaccggcgtgagcctgagagagggcctgtacttcaacccctacttccccggccaggccatcgccatggccccccccatctacaccgacgtgctggagttcgacgacggcacccccgccaccatgagccagatcgccaaggacgtgtgcaccttcctgagatgggccagcgagcccgagcacgaccacagaaagagaatgggcctgaagatgctgatgatgatggccctgctggtgcccctggtgtacaccatcaagagacacaagtggagcgtgctgaagagcagaaagctggcctacagaccccccaagtag

SEQ ID NO: 78227 - DNA, 252 bp, synthetic construct
  misc_feature 1..252: note = Description of Artificial Sequence: Synthetic coding sequence
  source 1..252: mol_type = other DNA
atggagcccttcgtggtgctggtgctgtgcctgagcttcatgctgctgttcagcctgtggagacagagctgcagaagaagaaagctgccccccggccccacccccctgcccatcatcggcaacatgctgcagatcgacgtgaaggacatctgcaagagcttcaccaacgtgagcctgccctacgtgccccccgccaactgcaagggcagccagaagagcatggtgctgtgcagcccctgcatcctggcctag

SEQ ID NO: 78228 - DNA, 219 bp, synthetic construct
  misc_feature 1..219: note = Description of Artificial Sequence: Synthetic coding sequence
  source 1..219: mol_type = other DNA
atggagcccttcgtggtgctggtgctgtgcctgagcttcatgctgctgttcagcctgtggagacagagctgcagaagaagaaagctgccccccggccccacccccctgcccatcatcggcaacatgctgcagatcgacgtgaaggacatctgcaagagcttcaccaacgtgagcctgccctacgtgccccccgccaactgcaagggcgtgctgctgtag

SEQ ID NO: 78229 - DNA, 423 bp, synthetic construct
  misc_feature 1..423: note = Description of Artificial Sequence: Synthetic coding sequence
  source 1..423: mol_type = other DNA
atggacctgatccccaacctggccgtggagacctggctgctgctggccgtgagcctggtgctgctgtacctgtacggcaccagaacccacggcctgttcaagagactgggcatccccggccccacccccctgcccctgctgggcaacgtgctgagctacagacagggcctgtggaagttcgacaccgagtgctacaagaagtacggcaagatgtggggcacctacgagggccagctgcccgtgctggccatcaccgaccccgacgtgatcagaaccgtgctggtgaaggagtgctacagcgtgttcaccaacagaagaatctgcgccaccaccagcaccatcaagatgcagacccacagcgtgaccatgtggctgccccccgccgtgctgcagagccagcacggcgtgtgcctgttcctgtag

SEQ ID NO: 78230 - DNA, 1563 bp, synthetic construct
  misc_feature 1..1563: note = Description of Artificial Sequence: Synthetic coding sequence
  source 1..1563: mol_type = other DNA
atgccccagctgagcctgagcagcctgggcctgtggcccatggccgccagcccctggctgctgctgctgctggtgggcgccagctggctgctggccagaatcctggcctggacctacaccttctacgacaactgctgcagactgagatgcttcccccagccccccaagagaaactggttcctgggccacctgggcctggtgacccccaccgagcagggcatgagagtgctgacccagctggtggccacctacccccagggcttcaaggtgtggatgggccccatcttccccgtgatcagattctgccaccccaacatcatcagaagcgtgatcaacgccagcgccgccatcgtgcccaaggacaaggtgttctacagcttcctgaagccctggctgggcgacggcctgctgctgagcgccggcgagaagtggagcagacacagaagaatgctgacccccgccttccacttcaacatcctgaagccctacatgaagatcttcaacgagagcgtgaacatcatgcacgccaagtggcagctgctggccagcgagggcagcgccagactggacatgttcgagcacatcagcctgatgaccctggacagcctgcagaagtgcgtgttcagcttcgacagccactgccaggagaagcccagcgagtacatcgccgccatcctggagctgagcgccctggtgaccaagagacaccagcagatcctgctgtacatcgacttcctgtactacctgacccccgacggccagagattcagaagagcctgcagactggtgcacgacttcaccgacgccgtgatccaggagagaagaagaaccctgcccagccagggcgtggacgacttcctgcaggccaaggccaagagcaagaccctggacttcatcgacgtgctgctgctgagcaaggacgaggacggcaagaagctgagcgacgaggacatcagagccgaggccgacaccttcatgttcgagggccacgacaccaccgccagcggcctgagctgggtgctgtaccacctggccaagcaccccgagtaccaggagagatgcagacaggaggtgcaggagctgctgaaggacagagagcccaaggagatcgagtgggacgacctggcccagctgcccttcctgaccatgtgcatcaaggagagcctgagactgcacccccccgtgcccgccgtgagcagatgctgcacccaggacatcgtgctgcccgacggcagagtgatccccaagggcatcatctgcctgatcagcgtgttcggcacccaccacaaccccgccgtgtggcccgaccccgaggtgtacgaccccttcagattcgaccccaagaacatcaaggagagaagccccctggccttcatccccttcagcgccggccccagaaactgcatcggccaggccttcgccatggccgagatgaaggtggtgctgggcctgaccctgctgagattcagagtgctgcccgaccacaccgagcccagaagaaagcccgagctggtgctgagagccgagggcggcctgtggctgagagtggagcccctgagctag

SEQ ID NO: 78231 - DNA, 1455 bp, synthetic construct
  misc_feature 1..1455: note = Description of Artificial Sequence: Synthetic coding sequence
  source 1..1455: mol_type = other DNA
atgctgttccccatcagcatgagcgccaccgagttcctgctggccagcgtgatcttctgcctggtgttctgggtgatcagagccagcagaccccaggtgcccaagggcctgaagaacccccccggcccctggggctggcccctgatcggccacatgctgaccctgggcaagaacccccacctggccctgagcagaatgagccagcagtacggcgacgtgctgcagatcagaatcggcagcacccccgtggtggtgctgagcggcctggacaccatcagacaggccctggtgagacagggcgacgacttcaagggcagacccgacctgtacaccttcaccctgatcagcaacggccagagcatgagcttcagccccgacagcggccccgtgtgggccgccagaagaagactggcccagaacggcctgaagagcttcagcatcgccagcgaccccgccagcagcaccagctgctacctggaggagcacgtgagcaaggaggccgaggtgctgatcagcaccctgcaggagctgatggccggccccggccacttcaacccctacagatacgtggtggtgagcgtgaccaacgtgatctgcgccatctgcttcggcagaagatacgaccacaaccaccaggagctgctgagcctggtgaacctgaacgccttcaaggacctgaacgagaagttctacagcttcatgcagaagatggtgaaggagcactacaagaccttcgagaagggccacatcagagacatcaccgacagcctgatcgagcactgccaggagaagcagctggacgagaacgccaacgtgcagctgagcgacgagaagatcatcaacatcgtgctggacctgttcggcgccggcttcgacaccgtgaccaccgccatcagctggagcctgatgtacctggtgatgaaccccagagtgcagagaaagatccaggaggagctggacaccgtgatcggcagaagcagaagacccagactgagcgacagaagccacctgccctacatggaggccttcatcctggagaccttcagacacagcagcttcgtgcccttcaccatcccccacagcaccaccagagacaccagcctgaagggcttctacatccccaagggcagatgcgtgttcgtgaaccagtggcagatcaaccacgaccagaagctgtgggtgaaccccagcgagttcctgcccgagagattcctgacccccgacggcgccatcgacaaggtgctgagcgagaaggtgatcatcttcggcatgggcaagagaaagtgcatcggcgagaccatcgccagatgggaggtgttcctgttcctggccatcctgctgcagagagtggagttcagcgtgcccctgggcgtgaaggtggacatgacccccatctacggcctgaccatgaagcacgcctgctgcgagcacttccagatgcagctgagaagctag

SEQ ID NO: 78232 - DNA, 1539 bp, synthetic construct
  misc_feature 1..1539: note = Description of Artificial Sequence: Synthetic coding sequence
  source 1..1539: mol_type = other DNA
atgctgttccccatcagcatgagcgccaccgagttcctgctggccagcgtgatcttctgcctggtgttctgggtgatcagagccagcagaccccaggtgcccaagggcctgaagaacccccccggcccctggggctggcccctgatcggccacatgctgaccctgggcaagaacccccacctggccctgagcagaatgagccagcagtacggcgacgtgctgcagatcagaatcggcagcacccccgtggtggtgctgagcggcctggacaccatcagacaggccctggtgagacagggcgacgacttcaagggcagacccgacctgtacaccttcaccctgatcagcaacggccagagcatgagcttcagccccgacagcggccccgtgtgggccgccagaagaagactggcccagaacggcctgaagagcttcagcatcgccagcgaccccgccagcagcaccagctgctacctggaggagcacgtgagcaaggaggccgaggtgctgatcagcaccctgcaggagctgatggccggccccggccacttcaacccctacagatacgtggtggtgagcgtgaccaacgtgatctgcgccatctgcttcggcagaagatacgaccacaaccaccaggagctgctgagcctggtgaacctgaacaacaacttcggcgaggtggtgggcagcggcaaccccgccgacttcatccccatcctgagatacctgcccaaccccagcctgaacgccttcaaggacctgaacgagaagttctacagcttcatgcagaagatggtgaaggagcactacaagaccttcgagaagggccacatcagagacatcaccgacagcctgatcgagcactgccaggagaagcagctggacgagaacgccaacgtgcagctgagcgacgagaagatcatcaacatcgtgctggacctgttcggcgccggcttcgacaccgtgaccaccgccatcagctggagcctgatgtacctggtgatgaaccccagagtgcagagaaagatccaggaggagctggacaccgtgatcggcagaagcagaagacccagactgagcgacagaagccacctgccctacatggaggccttcatcctggagaccttcagacacagcagcttcgtgcccttcaccatcccccacagcaccaccagagacaccagcctgaagggcttctacatccccaagggcagatgcgtgttcgtgaaccagtggcagatcaaccacgaccagaagctgtgggtgaaccccagcgagttcctgcccgagagattcctgacccccgacggcgccatcgacaaggtgctgagcgagaaggtgatcatcttcggcatgggcaagagaaagtgcatcggcgagaccatcgccagatgggaggtgttcctgttcctggccatcctgctgcagagagtggagttcagcgtgcccctgggcgtgaaggtggacatgacccccatctacggcctgaccatgaagcacgcctgctgcgagcacttccagatgcagctgagaagctag

SEQ ID NO: 78233 - DNA, 1539 bp, synthetic construct; identical to SEQ ID NO: 78232
  misc_feature 1..1539: note = Description of Artificial Sequence: Synthetic coding sequence
  source 1..1539: mol_type = other DNA

SEQ ID NO: 78234 - DNA, 1452 bp, synthetic construct
  misc_feature 1..1452: note = Description of Artificial Sequence: Synthetic coding sequence
  source 1..1452: mol_type = other DNA
atgctgttccccatcagcatgagcgccaccgagttcctgctggccagcgtgatcttctgcctggtgttctgggtgatcagagccagcagaccccaggtgcccaagggcctgaagaacccccccggcccctggggctggcccctgatcggccacatgctgaccctgggcaagaacccccacctggccctgagcagaatgagccagcagtacggcgacgtgctgcagatcagaatcggcagcacccccgtggtggtgctgagcggcctggacaccatcagacaggccctggtgagacagggcgacgacttcaagggcagacccgacctgtacaccttcaccctgatcagcaacggccagagcatgagcttcagccccgacagcggccccgtgtgggccgccagaagaagactggcccagaacggcctgaagagcttcagcatcgccagcgaccccgccagcagcaccagctgctacctggaggagcacgtgagcaaggaggccgaggtgctgatcagcaccctgcaggagctgatggccggccccggccacttcaacccctacagatacgtggtggtgagcgtgaccaacgtgatctgcgccatctgcttcggcagaagatacgaccacaaccaccaggagctgctgagcctggtgaacctgaacaacaacttcggcgaggtggtgggcagcggcaaccccgccgacttcatccccatcctgagatacctgcccaaccccagcctgaacgccttcaaggacctgaacgagaagttctacagcttcatgcagaagatggtgaaggagcactacaagaccttcgagaagggccacatcagagacatcaccgacagcctgatcgagcactgccaggagaagcagctggacgagaacgccaacgtgcagctgagcgacgagaagatcatcaacatcgtgctggacctgttcggcgccggcttcgacaccgtgaccaccgccatcagctggagcctgatgtacctggtgatgaaccccagagtgcagagaaagatccaggaggagctggacaccgtgatcggcagaagcagaagacccagactgagcgacagaagccacctgccctacatggaggccttcatcctggagaccttcagacacagcagcttcgtgcccttcaccatcccccacagaaagctgtgggtgaaccccagcgagttcctgcccgagagattcctgacccccgacggcgccatcgacaaggtgctgagcgagaaggtgatcatcttcggcatgggcaagagaaagtgcatcggcgagaccatcgccagatgggaggtgttcctgttcctggccatcctgctgcagagagtggagttcagcgtgcccctgggcgtgaaggtggacatgacccccatctacggcctgaccatgaagcacgcctgctgcgagcacttccagatgcagctgagaagctag

SEQ ID NO: 78235 - DNA, 1551 bp, synthetic construct
  misc_feature 1..1551: note = Description of Artificial Sequence: Synthetic coding sequence
  source 1..1551: mol_type = other DNA
atggccctgagccagagcgtgcccttcagcgccaccgagctgctgctggccagcgccatcttctgcctggtgttctgggtgctgaagggcctgagacccagagtgcccaagggcctgaagagcccccccgagccctggggctggcccctgctgggccacgtgctgaccctgggcaagaacccccacctggccctgagcagaatgagccagagatacggcgacgtgctgcagatcagaatcggcagcacccccgtgctggtgctgagcagactggacaccatcagacaggccctggtgagacagggcgacgacttcaagggcagacccgacctgtacaccagcaccctgatcaccgacggccagagcctgaccttcagcaccgacagcggccccgtgtgggccgccagaagaagactggcccagaacgccctgaacaccttcagcatcgccagcgaccccgccagcagcagcagctgctacctggaggagcacgtgagcaaggaggccaaggccctgatcagcagactgcaggagctgatggccggccccggccacttcgacccctacaaccaggtggtggtgagcgtggccaacgtgatcggcgccatgtgcttcggccagcacttccccgagagcagcgacgagatgctgagcctggtgaagaacacccacgagttcgtggagaccgccagcagcggcaaccccctggacttcttccccatcctgagatacctgcccaaccccgccctgcagagattcaaggccttcaaccagagattcctgtggttcctgcagaagaccgtgcaggagcactaccaggacttcgacaagaacagcgtgagagacatcaccggcgccctgttcaagcacagcaagaagggccccagagccagcggcaacctgatcccccaggagaagatcgtgaacctggtgaacgacatcttcggcgccggcttcgacaccgtgaccaccgccatcagctggagcctgatgtacctggtgaccaagcccgagatccagagaaagatccagaaggagctggacaccgtgatcggcagagagagaagacccagactgagcgacagaccccagctgccctacctggaggccttcatcctggagaccttcagacacagcagcttcctgcccttcaccatcccccacagcaccaccagagacaccaccctgaacggcttctacatccccaagaagtgctgcgtgttcgtgaaccagtggcaggtgaaccacgaccccgagctgtgggaggaccccagcgagttcagacccgagagattcctgaccgccgacggcaccgccatcaacaagcccctgagcgagaagatgatgctgttcggcatgggcaagagaagatgcatcggcgaggtgctggccaagtgggagatcttcctgttcctggccatcctgctgcagcagctggagttcagcgtgccccccggcgtgaaggtggacctgacccccatctacggcctgaccatgaagcacgccagatgcgagcacgtgcaggccagactgagattcagcatcaactag

SEQ ID NO: 78236 - DNA, 1512 bp, synthetic construct
  misc_feature 1..1512: note = Description of Artificial Sequence: Synthetic coding sequence
  source 1..1512: mol_type = other DNA
atggccctgagagccaaggccgaggtgtgcatggccgtgccctggctgagcctgcagagagcccaggccctgggcaccagagccgccagagtgcccagaaccgtgctgcccttcgaggccatgcccagaagacccggcaacagatggctgagactgctgcagatctggagagagcagggctacgaggacctgcacctggaggtgcaccagaccttccaggagctgggccccatcttcagatacgacctgggcggcgccggcatggtgtgcgtgatgctgcccgaggacgtggagaagctgcagcaggtggacagcctgcacccccacagaatgagcctggagccctgggtggcctacagacagcacagaggccacaagtgcggcgtgttcctgctgaacggccccgagtggagattcaacagactgagactgaaccccgaggtgctgagccccaacgccgtgcagagattcctgcccatggtggacgccgtggccagagacttcagccaggccctgaagaagaaggtgctgcagaacgccagaggcagcctgaccctggacgtgcagcccagcatcttccactacaccatcgaggccagcaacctggccctgttcggcgagagactgggcctggtgggccacagccccagcagcgccagcctgaacttcctgcacgccctggaggtgatgttcaagagcaccgtgcagctgatgttcatgcccagaagcctgagcagatggaccagccccaaggtgtggaaggagcacttcgaggcctgggactgcatcttccagtacggcgacaactgcatccagaagatctaccaggagctggccttcagcagaccccagcagtacaccagcatcgtggccgagctgctgctgaacgccgagctgagccccgacgccatcaaggccaacagcatggagctgaccgccggcagcgtggacaccaccgtgttccccctgctgatgaccctgttcgagctggccagaaaccccaacgtgcagcaggccctgagacaggagagcctggccgccgccgccagcatcagcgagcacccccagaaggccaccaccgagctgcccctgctgagagccgccctgaaggagaccctgagactgtaccccgtgggcctgttcctggagagagtggccagcagcgacctggtgctgcagaactaccacatccccgccggcaccctggtgagagtgttcctgtacagcctgggcagaaaccccgccctgttccccagacccgagagatacaacccccagagatggctggacatcagaggcagcggcagaaacttctaccacgtgcccttcggcttcggcatgagacagtgcctgggcagaagactggccgaggccgagatgctgctgctgctgcaccacgtgctgaagcacctgcaggtggagaccctgacccaggaggacatcaagatggtgtacagcttcatcctgagacccagcatgttccccctgctgaccttcagagccatcaactag

SEQ ID NO: 78237 - DNA, 1314 bp, synthetic construct
  misc_feature 1..1314: note = Description of Artificial Sequence: Synthetic coding sequence
  source 1..1314: mol_type = other DNA
atggccctgagagccaaggccgaggtgtgcatggccgtgccctggctgagcctgcagagagcccaggccctgggcaccagagccgccagagtgcccagaaccgtgctgcccttcgaggccatgcccagaagacccggcaacagatggctgagactgctgcagatctggagagagcagggctacgaggacctgcacctggaggtgcaccagaccttccaggagctgggccccatcttcagatacgacctgggcggcgccggcatggtgtgcgtgatgctgcccgaggacgtggagaagctgcagcaggtggacagcctgcacccccacagaatgagcctggagccctgggtggcctacagacagcacagaggccacaagtgcggcgtgttcctgctgaacggccccgagtggagattcaacagactgagactgaaccccgaggtgctgagccccaacgccgtgcagagattcctgcccatggtggacgccgtggccagagacttcagccaggccctgaagaagaaggtgctgcagaacgccagaggcagcctgaccctggacgtgcagcccagcatcttccactacaccatcgaggccagcaacctggccctgttcggcgagagactgggcctggtgggccacagccccagcagcgccagcctgaacttcctgcacgccctggaggtgatgttcaagagcaccgtgcagctgatgttcatgcccagaagcctgagcagatggaccagccccaaggtgtggaaggagcacttcgaggcctgggactgcatcttccagtacggcgacaactgcatccagaagatctaccaggagctggccttcagcagaccccagcagtacaccagcatcgtggccgagctgctgctgaacgccgagctgagccccgacgccatcaaggccaacagcatggagctgaccgccggcagcgtggacaccaccgtgttccccctgctgatgaccctgttcgagctggccagaaaccccaacgtgcagcaggccctgagacaggagagcctggccgccgccgccagcatcagcgagcacccccagaaggccaccaccgagctgcccctgctgagagccgccctgaaggagaccctgagactgtaccccgtgggcctgttcctggagagagtggccagcagcgacctggtgctgcagaactaccacatccccgccggcgtgctgaagcacctgcaggtggagaccctgacccaggaggacatcaagatggtgtacagcttcatcctgagacccagcatgttccccctgctgaccttcagagccatcaactag

SEQ ID NO: 78238 - DNA, 1512 bp, synthetic construct
  misc_feature 1..1512: note = Description of Artificial Sequence: Synthetic coding sequence
  source 1..1512: mol_type = other DNA
atggccctgagagccaaggccgaggtgtgcgtggccgccccctggctgagcctgcagagagccagagccctgggcaccagagccgccagagcccccagaaccgtgctgcccttcgaggccatgccccagcaccccggcaacagatggctgagactgctgcagatctggagagagcagggctacgagcacctgcacctggagatgcaccagaccttccaggagctgggccccatcttcagatacaacctgggcggccccagaatggtgtgcgtgatgctgcccgaggacgtggagaagctgcagcaggtggacagcctgcacccctgcagaatgatcctggagccctgggtggcctacagacagcacagaggccacaagtgcggcgtgttcctgctgaacggccccgagtggagattcaacagactgagactgaaccccgacgtgctgagccccaaggccgtgcagagattcctgcccatggtggacgccgtggccagagacttcagccaggccctgaagaagaaggtgctgcagaacgccagaggcagcctgaccctggacgtgcagcccagcatcttccactacaccatcgaggccagcaacctggccctgttcggcgagagactgggcctggtgggccacagccccagcagcgccagcctgaacttcctgcacgccctggaggtgatgttcaagagcaccgtgcagctgatgttcatgcccagaagcctgagcagatggatcagccccaaggtgtggaaggagcacttcgaggcctgggactgcatcttccagtacggcgacaactgcatccagaagatctaccaggagctggccttcaacagaccccagcactacaccggcatcgtggccgagctgctgctgaaggccgagctgagcctggaggccatcaaggccaacagcatggagctgaccgccggcagcgtggacaccaccgccttccccctgctgatgaccctgttcgagctggccagaaaccccgacgtgcagcagatcctgagacaggagagcctggccgccgccgccagcatcagcgagcacccccagaaggccaccaccgagctgcccctgctgagagccgccctgaaggagaccctgagactgtaccccgtgggcctgttcctggagagagtggtgagcagcgacctggtgctgcagaactaccacatccccgccggcaccctggtgcaggtgttcctgtacagcctgggcagaaacgccgccctgttccccagacccgagagatacaacccccagagatggctggacatcagaggcagcggcagaaacttccaccacgtgcccttcggcttcggcatgagacagtgcctgggcagaagactggccgaggccgagatgctgctgctgctgcaccacgtgctgaagcacttcctggtggagaccctgacccaggaggacatcaagatggtgtacagcttcatcctgagacccggcaccagccccctgctgaccttcagagccatcaactag

SEQ ID NO: 78239 - DNA, 1527 bp, synthetic construct
  misc_feature 1..1527: note = Description of Artificial Sequence: Synthetic coding sequence
  source 1..1527: mol_type = other DNA
atgtgggagctggtggccctgctgctgctgaccctggcctacctgttctggcccaagagaagatgccccggcgccaagtaccccaagagcctgctgagcctgcccctggtgggcagcctgcccttcctgcccagacacggccacatgcacaacaacttcttcaagctgcagaagaagtacggccccatctacagcgtgagaatgggcaccaagaccaccgtgatcgtgggccaccaccagctggccaaggaggtgctgatcaagaagggcaaggacttcagcggcagaccccagatggccaccctggacatcgccagcaacaacagaaagggcatcgccttcgccgacagcggcgcccactggcagctgcacagaagactggccatggccaccttcgccctgttcaaggacggcgaccagaagctggagaagatcatctgccaggagatcagcaccctgtgcgacatgctggccacccacaacggccagagcatcgacatcagcttccccgtgttcgtggccgtgaccaacgtgatcagcctgatctgcttcaacaccagctacaagaacggcgaccccgagctgaacgtgatccagaactacaacgagggcatcatcgacaacctgagcaaggacagcctggtggacctggtgccctggctgaagatcttccccaacaagaccctggagaagctgaagagccacgtgaagatcagaaacgacctgctgaacaagatcctggagaactacaaggagaagttcagaagcgacagcatcaccaacatgctggacaccctgatgcaggccaagatgaacagcgacaacggcaacgccggccccgaccaggacagcgagctgctgagcgacaaccacatcctgaccaccatcggcgacatcttcggcgccggcgtggagaccaccaccagcgtggtgaagtggaccctggccttcctgctgcacaacccccaggtgaagaagaagctgtacgaggagatcgaccagaacgtgggcttcagcagaacccccaccatcagcgacagaaacagactgctgctgctggaggccaccatcagagaggtgctgagactgagacccgtggcccccatgctgatcccccacaaggccaacgtggacagcagcatcggcgagttcgccgtggacaagggcaccgaggtgatcatcaacctgtgggccctgcaccacaacgagaaggagtggcaccagcccgaccagttcatgcccgagagattcctgaaccccgccggcacccagctgatcagccccagcgtgagctacctgcccttcggcgccggccccagaagctgcatcggcgagatcctggccagacaggagctgttcctgatcatggcctggctgctgcagagattcgacctggaggtgcccgacgacggccagctgcccagcctggagggcatccccaaggtggtgttcctgatcgacagcttcaaggtgaagatcaaggtgagacaggcctggagagaggcccaggccgagggcagcacctag

SEQ ID NO: 78240 - DNA, 1512 bp, synthetic construct
  misc_feature 1..1512: note = Description of Artificial Sequence: Synthetic coding sequence
  source 1..1512: mol_type = other DNA
atggtgctggagatgctgaaccccatccactacaacatcaccagcatcgtgcccgaggccatgcccgccgccaccatgcccgtgctgctgctgaccggcctgttcctgctggtgtggaactacgagggcaccagcagcatccccggccccggctactgcatgggcatcggccccctgatcagccacggcagattcctgtggatgggcatcggcagcgcctgcaactactacaacagagtgtacggcgagttcatgagagtgtggatcagcggcgaggagaccctgatcatcagcaagagcagcagcatgttccacatcatgaagcacaaccactacagcagcagattcggcagcaagctgggcctgcagtgcatcggcatgcacgagaagggcatcatcttcaacaacaaccccgagctgtggaagaccaccagacccttcttcatgaaggccctgagcggccccggcctggtgagaatggtgaccgtgtgcgccgagagcctgaagacccacctggacagactggaggaggtgaccaacgagagcggctacgtggacgtgctgaccctgctgagaagagtgatgctggacaccagcaacaccctgttcctgagaatccccctggacgagagcgccatcgtggtgaagatccagggctacttcgacgcctggcaggccctgctgatcaagcccgacatcttcttcaagatcagctggctgtacaagaagtacgagaagagcgtgaaggacctgaaggacgccatcgaggtgctgatcgccgagaagagaagaagaatcagcaccgaggagaagctggaggagtgcatggacttcgccaccgagctgatcctggccgagaagagaggcgacctgaccagagagaacgtgaaccagtgcatcctggagatgctgatcgccgcccccgacaccatgagcgtgagcctgttcttcatgctgttcctgatcgccaagcaccccaacgtggaggaggccatcatcaaggagatccagaccgtgatcggcgagagagacatcaagatcgacgacatccagaagctgaaggtgatggagaacttcatctacgagagcatgagataccagcccgtggtggacctggtgatgagaaaggccctggaggacgacgtgatcgacggctaccccgtgaagaagggcaccaacatcatcctgaacatcggcagaatgcacagactggagttcttccccaagcccaacgagttcaccctggagaacttcgccaagaacgtgccctacagatacttccagcccttcggcttcggccccagaggctgcgccggcaagtacatcgccatggtgatgatgaaggccatcctggtgaccctgctgagaagattccacgtgaagaccctgcagggccagtgcgtggagagcatccagaagatccacgacctgagcctgcaccccgacgagaccaagaacatgctggagatgatcttcacccccagaaacagcgacagatgcctggagcactag

SEQ ID NO: 78241 - DNA, 1512 bp, synthetic construct; identical to SEQ ID NO: 78240
  misc_feature 1..1512: note = Description of Artificial Sequence: Synthetic coding sequence
  source 1..1512: mol_type = other DNA

SEQ ID NO: 78242 - DNA, 1512 bp, synthetic construct; identical to SEQ ID NO: 78240
  misc_feature 1..1512: note = Description of Artificial Sequence: Synthetic coding sequence
  source 1..1512: mol_type = other DNA

SEQ ID NO: 78243 - DNA, 501 bp, synthetic construct
  misc_feature 1..501: note = Description of Artificial Sequence: Synthetic coding sequence
  source 1..501: mol_type = other DNA
atggtgctggagatgctgaaccccatccactacaacatcaccagcatcgtgcccgaggccatgcccgccgccaccatgcccgtgctgctgctgaccggcctgttcctgctggtgtggaactacgagggcaccagcagcatccccggccccggctactgcatgggcatcggccccctgatcagccacggcagattcctgtggatgggcatcggcagcgcctgcaactactacaacagagtgtacggcgagttcatgagagtgtggatcagcggcgaggagaccctgatcatcagcaagagcagcagcatgttccacatcatgaagcacaaccactacagcagcagattcggcagcaagctgggcctgcagtgcatcggcatgcacgagaagggcatcatcttcaacaacaaccccgagctgtggaagaccaccagacccttcttcatgaaggccctgagcggccccggcctggtgagaatggtgaccgtgtgcgccgagtag

SEQ ID NO: 78244 - DNA, 657 bp, synthetic construct
  misc_feature 1..657: note = Description of Artificial Sequence: Synthetic coding sequence
  source 1..657: mol_type = other DNA
atggtgctggagatgctgaaccccatccactacaacatcaccagcatcgtgcccgaggccatgcccgccgccaccatgcccgtgctgctgctgaccggcctgttcctgctggtgtggaactacgagggcaccagcagcatccccggccccggctactgcatgggcatcggccccctgatcagccacggcagattcctgtggatgggcatcggcagcgcctgcaactactacaacagagtgtacggcgagttcatgagagtgtggatcagcggcgaggagaccctgatcatcagcaagagcagcagcatgttccacatcatgaagcacaaccactacagcagcagattcggcagcaagctgggcctgcagtgcatcggcatgcacgagaagggcatcatcttcaacaacaaccccgagctgtggaagaccaccagacccttcttcatgaaggccctgagcggccccggcctggtgagaatggtgaccgtgtgcgccgagagcctgaagacccacctggacagactggaggaggtgaccaacgagagcggctacgtggacgtgctgaccctgctgagaagagtgatgctggacaccagcaacaccctgttcctgagaatccccctggacggcaccgagatcttcaccctgaccagctag

SEQ ID NO: 78245 - DNA, 1080 bp, synthetic construct
  misc_feature 1..1080: note = Description of Artificial Sequence: Synthetic coding sequence
  source 1..1080: mol_type = other DNA
atggtgctggagatgctgaaccccatccactacaacatcaccagcatcgtgcccgaggccatgcccgccgccaccatgcccgtgctgctgctgaccggcctgttcctgctggtgtggaactacgagggcaccagcagcatccccggccccggctactgcatgggcatcggccccctgatcagccacggcagattcctgtggatgggcatcggcagcgcctgcaactactacaacagagtgtacggcgagttcatgagagtgtggatcagcggcgaggagaccctgatcatcagcaagagcagcagcatgttccacatcatgaagcacaaccactacagcagcagattcggcagcaagctgggcctgcagtgcatcggcatgcacgagaagggcatcatcttcaacaacaaccccgagctgtggaagaccaccagacccttcttcatgaaggccctgagcggccccggcctggtgagaatggtgaccgtgtgcgccgagagcctgaagacccacctggacagactggaggaggtgaccaacgagagcggctacgtggacgtgctgaccctgctgagaagagtgatgctggacaccagcaacaccctgttcctgagaatccccctggacgagagcgccatcgtggtgaagatccagggctacttcgacgcctggcaggccctgctgatcaagcccgacatcttcttcaagatcagctggctgtacaagaagtacgagaagagcgtgaaggacctgaaggacgccatcgaggtgctgatcgccgagaagagaagaagaatcagcaccgaggagaagctggaggagtgcatggacttcgccaccgagctgatcctggccgagaagagaggcgacctgaccagagagaacgtgaaccagtgcatcctggagatgctgatcgccgcccccgacaccatgagcgtgagcctgttcttcatgctgttcctgatcgccaagcaccccaacgtggaggaggccatcatcaaggagatccagaccgtgatcggcgagagagacatcaagatcgacgacatccagaagctgaagaagcacgacgccaagtag

SEQ ID NO: 78246 - DNA, 1059 bp, synthetic construct
  misc_feature 1..1059: note = Description of Artificial Sequence: Synthetic coding sequence
  source 1..1059: mol_type = other DNA
atggtgctggagatgctgaaccccatccactacaacatcaccagcatcgtgcccgaggccatgcccgccgccaccatgcccgtgctgctgctgaccggcctgttcctgctggtgtggaactacgagggcaccagcagcatccccggccccggctactgcatgggcatcggccccctgatcagccacggcagattcctgtggatgggcatcggcagcgcctgcaactactacaacagagtgtacggcgagttcatgagagtgtggatcagcggcgaggagaccctgatcatcagcaagagcagcagcatgttccacatcatgaagcacaaccactacagcagcagattcggcagcaagctgggcctgcagtgcatcggcatgcacgagaagggcatcatcttcaacaacaaccccgagctgtggaagaccaccagacccttcttcatgaaggccctgagcggccccggcctggtgagaatggtgaccgtgtgcgccgagagcctgaagacccacctggacagactggaggaggtgaccaacgagagcggctacgtggacgtgctgaccctgctgagaagagtgatgctggacaccagcaacaccctgttcctgagaatccccctggacgagagcgccatcgtggtgaagatccagggctacttcgacgcctggcaggccctgctgatcaagcccgacatcttcttcaagatcagctggctgtacaagaagtacgagaagagcgtgaaggacctgaaggacgccatcgaggtgctgatcgccgagaagagaagaagaatcagcaccgaggagaagctggaggagtgcatggacttcgccaccgagctgatcctggccgagaagagaggcgacctgaccagagagaacgtgaaccagtgcatcctggagatgctgatcgccgcccccgacaccatgagcgtgagcctgttcttcatgctgttcctgatcgccaagcaccccaacgtggaggaggccatcatcaaggagatccagaccgtgatcggcgagagagacatcaagatcgacgacatccagaagtag

SEQ ID NO: 78247 - DNA, 729 bp, synthetic construct
  misc_feature 1..729: note = Description of Artificial Sequence: Synthetic coding sequence
  source 1..729: mol_type = other DNA
atggtgctggagatgctgaaccccatccactacaacatcaccagcatcgtgcccgaggccatgcccgccgccaccatgcccgtgctgctgctgaccggcctgttcctgctggtgtggaactacgagggcaccagcagcatccccggccccggctactgcatgggcatcggccccctgatcagccacggcagattcctgtggatgggcatcggcagcgcctgcaactactacaacagagtgtacggcgagttcatgagagtgtggatcagcggcgaggagaccctgatcatcagcaagagcagcagcatgttccacatcatgaagcacaaccactacagcagcagattcggcagcaagctgggcctgcagtgcatcggcatgcacgagaagggcatcatcttcaacaacaaccccgagctgtggaagaccaccagacccttcttcatgaaggccctgagcggccccggcctggtgagaatggtgaccgtgtgcgccgagagcctgaagacccacctggacagactggaggaggtgaccaacgagagcggctacgtggacgtgctgaccctgctgagaagagtgatgctggacaccagcaacaccctgttcctgagaatccccctggacgagagcgccatcgtggtgaagatccagggctacttcgacgcctggcaggccctgctgatcaagcccgacatcttcttcaagatcagctggctgtacaagtag

SEQ ID NO: 78248 - DNA, 546 bp, synthetic construct
  misc_feature 1..546: note = Description of Artificial Sequence: Synthetic coding sequence
  source 1..546: mol_type = other DNA
atggtgctggagatgctgaaccccatccactacaacatcaccagcatcgtgcccgaggccatgcccgccgccaccatgcccgtgctgctgctgaccggcctgttcctgctggtgtggaactacgagggcaccagcagcatccccggccccggctactgcatgggcatcggccccctgatcagccacggcagattcctgtggatgggcatcggcagcgcctgcaactactacaacagagtgtacggcgagttcatgagagtgtggatcagcggcgaggagaccctgatcatcagcaagagcagcagcatgttccacatcatgaagcacaaccactacagcagcagattcggcagcaagctgggcctgcagtgcatcggcatgcacgagaagggcatcatcttcaacaacaaccccgagctgtggaagaccaccagacccttcttcatgaaggccctgagcggccccggcctggtgagaatggtgaccgtgtgcgccgagagcctgaagacccacctgctgctgttcacccccgccagcgtgaactag

SEQ ID NO: 78249 - DNA, 657 bp, synthetic construct; identical to SEQ ID NO: 78244
  misc_feature 1..657: note = Description of Artificial Sequence: Synthetic coding sequence
  source 1..657: mol_type = other DNA

SEQ ID NO: 78250 - DNA, 1059 bp, synthetic construct; identical to SEQ ID NO: 78246
  misc_feature 1..1059: note = Description of Artificial Sequence: Synthetic coding sequence
  source 1..1059: mol_type = other DNA

SEQ ID NO: 78251 - DNA, 852 bp, synthetic construct
  misc_feature 1..852: note = Description of Artificial Sequence: Synthetic coding sequence
  source 1..852: mol_type = other DNA
atggtgctggagatgctgaaccccatccactacaacatcaccagcatcgtgcccgaggccatgcccgccgccaccatgcccgtgctgctgctgaccggcctgttcctgctggtgtggaactacgagggcaccagcagcatccccggccccggctactgcatgggcatcggccccctgatcagccacggcagattcctgtggatgggcatcggcagcgcctgcaactactacaacagagtgtacggcgagttcatgagagtgtggatcagcggcgaggagaccctgatcatcagcaagagcagcagcatgttccacatcatgaagcacaaccactacagcagcagattcggcagcaagctgggcctgcagtgcatcggcatgcacgagaagggcatcatcttcaacaacaaccccgagctgtggaagaccaccagacccttcttcatgaaggccctgagcggccccggcctggtgagaatggtgaccgtgtgcgccgagagcctgaagacccacctggacagactggaggaggtgaccaacgagagcggctacgtggacgtgctgaccctgctgagaagagtgatgctggacaccagcaacaccctgttcctgagaatccccctggacgagagcgccatcgtggtgaagatccagggctacttcgacgcctggcaggccctgctgatcaagcccgacatcttcttcaagatcagctggctgtacaagaagtacgagaagagcgtgaaggacctgaaggacgccatcgaggtgctgatcgccgagaagagaagaagaatcagcaccgaggagaagctggaggagtgcatggacttcgccaccgagctgatctag

SEQ ID NO: 78252 - DNA, 498 bp, synthetic construct
  misc_feature 1..498: note = Description of Artificial Sequence: Synthetic coding sequence
  source 1..498: mol_type = other DNA
atggtgctggagatgctgaaccccatccactacaacatcaccagcatcgtgcccgaggccatgcccgccgccaccatgcccgtgctgctgctgaccggcctgttcctgctggtgtggaactacgagggcaccagcagcatccccggccccggctactgcatgggcatcggccccctgatcagccacggcagattcctgtggatgggcatcggcagcgcctgcaactactacaacagagtgtacggcgagttcatgagagtgtggatcagcggcgaggagaccctgatcatcagcaagagcagcagcatgttccacatcatgaagcacaaccactacagcagcagattcggcagcaagctgggcctgcagtgcatcggcatgcacgagaagggcatcatcttcaacaacaaccccgagctgtggaagaccaccagacccttcttcatgaaggccctgagcggccccggcctggtgagaatggtgaccgtgtgcgcctag

SEQ ID NO: 78253 - DNA, 1512 bp, synthetic construct; identical to SEQ ID NO: 78240
  misc_feature 1..1512: note = Description of Artificial Sequence: Synthetic coding sequence
  source 1..1512: mol_type = other DNA

SEQ ID NO: 78254 - DNA, 519 bp, synthetic construct
  misc_feature 1..519: note = Description of Artificial Sequence: Synthetic coding sequence
  source 1..519: mol_type = other DNA
atggtgctggagatgctgaaccccatccactacaacatcaccagcatcgtgcccgaggccatgcccgccgccaccatgcccgtgctgctgctgaccggcctgttcctgctggtgtggaactacgagggcaccagcagcatccccggccccggctactgcatgggcatcggccccctgatcagccacggcagattcctgtggatgggcatcggcagcgcctgcaactactacaacagagtgtacggcgagttcatgagagtgtggatcagcggcgaggagaccctgatcatcagcaagagcagcagcatgttccacatcatgaagcacaaccactacagcagcagattcggcagcaagctgggcctgcagtgcatcggcatgcacgagaagggcatcatcttcaacaacaaccccgagctgtggaagaccaccagacccttcttcatgaaggccctgagcggccccggcctggtgagaatggtgaccgtgtgcgccgagagcctgaagacccacctgtag

SEQ ID NO: 78255 - DNA, 735 bp, synthetic construct
  misc_feature 1..735: note = Description of Artificial Sequence: Synthetic coding sequence
  source 1..735: mol_type = other DNA
atggtgctggagatgctgaaccccatccactacaacatcaccagcatcgtgcccgaggccatgcccgccgccaccatgcccgtgctgctgctgaccggcctgttcctgctggtgtggaactacgagggcaccagcagcatccccggccccggctactgcatgggcatcggccccctgatcagccacggcagattcctgtggatgggcatcggcagcgcctgcaactactacaacagagtgtacggcgagttcatgagagtgtggatcagcggcgaggagaccctgatcatcagcaagagcagcagcatgttccacatcatgaagcacaaccactacagcagcagattcggcagcaagctgggcctgcagtgcatcggcatgcacgagaagggcatcatcttcaacaacaaccccgagctgtggaagaccaccagacccttcttcatgaaggagagcgccatcgtggtgaagatccagggctacttcgacgcctggcaggccctgctgatcaagcccgacatcttcttcaagatcagctggctgtacaagaagtacgagaagagcgtgaaggacctgaaggacgccatcgaggtgctgatcgccgagaagagaagaagaatcagcaccgaggagaagctggaggagtgcatggacttcgccaccgagctgatcctggccgagaagagaggcgacctgaccagagagaacgtgaaccagtgcatcctggagatgtag

SEQ ID NO: 78256 - DNA, 1485 bp, synthetic construct
  misc_feature 1..1485: note = Description of Artificial Sequence: Synthetic coding sequence
  source 1..1485: mol_type = other DNA
atgctggccagcggcctgctgctggtgaccctgctggcctgcctgaccgtgatggtgctgatgagcgtgtggagacagagaaagagcagaggcaagctgccccccggccccacccccctgcccttcatcggcaactacctgcagctgaacaccgagcagatgtacaacagcctgatgaagatcagcgagagatacggccccgtgttcaccatccacctgggccccagaagagtggtggtgctgtgcggccacgacgccgtgaaggaggccctggtggaccaggccgaggagttcagcggcagaggcgagcaggccaccttcgactggctgttcaagggctacggcgtggccttcagcaacggcgagagagccaagcagctgagaagattcagcatcgccaccctgagaggcttcggcgtgggcaagagaggcatcgaggagagaatccaggaggaggccggcttcctgatcgacgccctgagaggcacccacggcgccaacatcgaccccaccttcttcctgagcagaaccgtgagcaacgtgatcagcagcatcgtgttcggcgacagattcgactacgaggacaaggagttcctgagcctgctgagaatgatgctgggcagcttccagttcaccgccaccagcaccggccagctgtacgagatgttcagcagcgtgatgaagcacctgcccggcccccagcagcaggccttcaaggagctgcagggcctggaggacttcatcgccaagaaggtggagcacaaccagagaaccctggaccccaacagccccagagacttcatcgacagcttcctgatcagaatgcaggaggaggagaagaaccccaacaccgagttctacctgaagaacctggtgatgaccaccctgaacctgttcttcgccggcaccgagaccgtgagcaccaccctgagatacggcttcctgctgctgatgaagcaccccgaggtggaggccaaggtgcacgaggagatcgacagagtgatcggcaagaacagacagcccaagttcgaggacagagccaagatgccctacaccgaggccgtgatccacgagatccagagattcggcgacatgctgcccatgggcctggcccacagagtgaacaaggacaccaagttcagagacttcttcctgcccaagggcaccgaggtgttccccatgctgggcagcgtgctgagagaccccagattcttcagcaaccccagagacttcaacccccagcacttcctggacaagaagggccagttcaagaagagcgacgccttcgtgcccttcagcatcggcaagagatactgcttcggcgagggcctggccagaatggagctgttcctgttcttcaccaccatcatgcagaacttcagattcaagagcccccagagccccaaggacatcgacgtgagccccaagcacgtgggcttcgccaccatccccagaaactacaccatgagcttcctgcccagatag

SEQ ID NO: 78257 - DNA, 1485 bp, synthetic construct
  misc_feature 1..1485: note = Description of Artificial Sequence: Synthetic coding sequence
  source 1..1485: mol_type = other DNA
atgctggccagcggcatgctgctggtggccctgctggtgtgcctgaccgtgatggtgctgatgagcgtgtggcagcagagaaagagcaagggcaagctgccccccggccccacccccctgcccttcatcggcaactacctgcagctgaacaccgagcagatgtacaacagcctgatgaagatcagcgagagatacggccccgtgttcaccatccacctgggccccagaagagtggtggtgctgtgcggccacgacgccgtgagagaggccctggtggaccaggccgaggagttcagcggcagaggcgagcaggccaccttcgactgggtgttcaagggctacggcgtggtgttcagcaacggcgagagagccaagcagctgagaagattcagcatcgccaccctgagagacttcggcgtgggcaagagaggcatcgaggagagaatccaggaggaggccggcttcctgatcgacgccctgagaggcaccggcggcgccaacatcgaccccaccttcttcctgagcagaaccgtgagcaacgtgatcagcagcatcgtgttcggcgacagattcgactacaaggacaaggagttcctgagcctgctgagaatgatgctgggcatcttccagttcaccagcaccagcaccggccagctgtacgagatgttcagcagcgtgatgaagcacctgcccggcccccagcagcaggccttccagctgctgcagggcctggaggacttcatcgccaagaaggtggagcacaaccagagaaccctggaccccaacagccccagagacttcatcgacagcttcctgatcagaatgcaggaggaggagaagaaccccaacaccgagttctacctgaagaacctggtgatgaccaccctgaacctgttcatcggcggcaccgagaccgtgagcaccaccctgagatacggcttcctgctgctgatgaagcaccccgaggtggaggccaaggtgcacgaggagatcgacagagtgatcggcaagaacagacagcccaagttcgaggacagagccaagatgccctacatggaggccgtgatccacgagatccagagattcggcgacgtgatccccatgagcctggccagaagagtgaagaaggacaccaagttcagagacttcttcctgcccaagggcaccgaggtgttccccatgctgggcagcgtgctgagagaccccagcttcttcagcaacccccaggacttcaacccccagcacttcctgaacgagaagggccagttcaagaagagcgacgccttcgtgcccttcagcatcggcaagagaaactgcttcggcgagggcctggccagaatggagctgttcctgttcttcaccaccgtgatgcagaacttcagactgaagagcagccagagccccaaggacatcgacgtgagccccaagcacgtgggcttcgccaccatccccagaaactacaccatgagcttcctgcccagatag

SEQ ID NO: 78258 - DNA, 1332 bp, synthetic construct
  misc_feature 1..1332: note = Description of Artificial Sequence: Synthetic coding sequence
  source 1..1332: mol_type = other DNA
atgctggccagcggcctgctgctggtggccctgctggcctgcctgaccgtgatggtgctgatgagcgtgtggcagcagagaaagagcagaggcaagctgccccccggccccacccccctgcccttcatcggcaactacctgcagctgaacaccgagcacatctgcgacagcatcatgaaggtgagccagggcgtggccttcagcaacggcgagagagccaagcagctgctgagattcgccatcgccaccctgagagacttcggcgtgggcaagagaggcatcgaggagagaatccaggaggagagcggcttcctgatcgaggccatcagaagcacccacggcgccaacatcgaccccaccttcttcctgagcagaaccgtgagcaacgtgatcagcagcatcgtgttcggcgacagattcgactacgaggacaaggagttcctgagcctgctgagcatgatgctgggcatcttccagttcaccagcaccagcaccggccagctgtacgagatgttcagcagcgtgatgaagcacctgcccggcccccagcagcaggccttcaagctgctgcagggcctggaggacttcatcgccaagaaggtggagcacaaccagagaaccctggaccccaacagcccccaggacttcatcgacagcttcctgatccacatgcaggaggaggagaagaaccccaacaccgagttctacctgaagaacctgatgatgagcaccctgaacctgttcatcgccggcaccgagaccgtgagcaccaccctgagatacggcttcctgctgctgatgaagcaccccgaggtggaggccaaggtgcacgaggagatcgacagagtgatcggcaagaacagacagcccaagttcgaggacagaaccaagatgccctacatggaggccgtgatccacgagatccagagattcggcgacgtgatccccatgagcctggccagaagagtgaagaaggacaccaagttcagagacttcttcctgcccaagggcaccgaggtgttccccatgctgggcagcgtgctgagagaccccagcttcttcagcaacccccaggacttcaacccccagcacttcctggacgacaagggccagttcaagaagagcgacgccttcgtgcccttcagcatcggcaagagaaactgcttcggcgagggcctggccagaatggagctgttcctgttcttcaccaccgtgatgcagaacttcagactgaagagcagccagagccccaaggacatcgacgtgagccccaagcacgtggtgttcgccaccatccccagaaactacaccatgagcttcctgcccagatag

SEQ ID NO: 78259 - DNA, 1485 bp, synthetic construct
  misc_feature 1..1485: note = Description of Artificial Sequence: Synthetic coding sequence
  source 1..1485: mol_type = other DNA
atgctggccagcggcctgctgctggtggccctgctggcctgcctgaccgtgatggtgctgatgagcgtgtggcagcagagaaagagcagaggcaagctgccccccggccccacccccctgcccttcatcggcaactacctgcagctgaacaccgagcacatctgcgacagcatcatgaagttcagcgagtgctacggccccgtgttcaccatccacctgggccccagaagagtggtggtgctgtgcggccacgacgccgtgagagaggccctggtggaccaggccgaggagttcagcggcagaggcgagcaggccaccttcgactgggtgttcaagggctacggcgtggccttcagcaacggcgagagagccaagcagctgctgagattcgccatcgccaccctgagagacttcggcgtgggcaagagaggcatcgaggagagaatccaggaggagagcggcttcctgatcgaggccatcagaagcacccacggcgccaacatcgaccccaccttcttcctgagcagaaccgtgagcaacgtgatcagcagcatcgtgttcggcgacagattcgactacgaggacaaggagttcctgagcctgctgagcatgatgctgggcatcttccagttcaccagcaccagcaccggccagctgtacgagatgttcagcagcgtgatgaagcacctgcccggcccccagcagcaggccttcaagctgctgcagggcctggaggacttcatcgccaagaaggtggagcacaaccagagaaccctggaccccaacagcccccaggacttcatcgacagcttcctgatccacatgcaggaggaggagaagaaccccaacaccgagttctacctgaagaacctgatgatgagcaccctgaacctgttcatcgccggcaccgagaccgtgagcaccaccctgagatacggcttcctgctgctgatgaagcaccccgaggtggaggccaaggtgcacgaggagatcgacagagtgatcggcaagaacagacagcccaagttcgaggacagaaccaagatgccctacatggaggccgtgatccacgagatccagagattcggcgacgtgatccccatgagcctggccagaagagtgaagaaggacaccaagttcagagacttcttcctgcccaagggcaccgaggtgttccccatgctgggcagcgtgctgagagaccccagcttcttcagcaacccccaggacttcaacccccagcacttcctggacgacaagggccagttcaagaagagcgacgccttcgtgcccttcagcatcggcaagagaaactgcttcggcgagggcctggccagaatggagctgttcctgttcttcaccaccgtgatgcagaacttcagactgaagagcagccagagccccaaggacatcgacgtgagccccaagcacgtggtgttcgccaccatccccagaaactacaccatgagcttcctgcccagatag

SEQ ID NO: 78260 - DNA, 1476 bp, synthetic construct
  misc_feature 1..1476: note = Description of Artificial Sequence: Synthetic coding sequence
  source 1..1476: mol_type = other DNA
atggagctgagcgtgctgctgttcctggccctgctgaccggcctgctgctgctgctggtgcagagacaccccaacacccacgacagactgccccccggccccagacccctgcccctgctgggcaacctgctgcagatggacagaagaggcctgctgaagagcttcctgagattcagagagaagtacggcgacgtgttcaccgtgcacctgggccccagacccgtggtgatgctgtgcggcgtggaggccatcagagaggccctggtggacaaggccgaggccttcagcggcagaggcaagatcgccatggtggaccccttcttcagaggctacggcgtgatcttcgccaacggcaacagatggaaggtgctgagaagattcagcgtgaccaccatgagagacttcggcatgggcaagagaagcgtggaggagagaatccaggaggaggcccagtgcctgatcgaggagctgagaaagagcaagggcgccctgatggaccccaccttcctgttccagagcatcaccgccaacatcatctgcagcatcgtgttcggcaagagattccactaccaggaccaggagttcctgaagatgctgaacctgttctaccagaccttcagcctgatcagcagcgtgttcggccagctgttcgagctgttcagcggcttcctgaagtacttccccggcgcccacagacaggtgtacaagaacctgcaggagatcaacgcctacatcggccacagcgtggagaagcacagagagaccctggaccccagcgcccccaaggacctgatcgacacctacctgctgcacatggagaaggagaagagcaacgcccacagcgagttcagccaccagaacctgaacctgaacaccctgagcctgttcttcgccggcaccgagaccaccagcaccaccctgagatacggcttcctgctgatgctgaagtacccccacgtggccgagagagtgtacagagagatcgagcaggtgatcggcccccacagaccccccgagctgcacgacagagccaagatgccctacaccgaggccgtgatctacgagatccagagattcagcgacctgctgcccatgggcgtgccccacatcgtgacccagcacaccagcttcagaggctacatcatccccaaggacaccgaggtgttcctgatcctgagcaccgccctgcacgacccccactacttcgagaagcccgacgccttcaaccccgaccacttcctggacgccaacggcgccctgaagaagaccgaggccttcatccccttcagcctgggcaagagaatctgcctgggcgagggcatcgccagagccgagctgttcctgttcttcaccaccatcctgcagaacttcagcatggccagccccgtggcccccgaggacatcgacctgaccccccaggagtgcggcgtgggcaagatcccccccacctaccagatcagattcctgcccagatag

SEQ ID NO: 78261 - DNA, 876 bp, synthetic construct
  misc_feature 1..876: note = Description of Artificial Sequence: Synthetic coding sequence
  source 1..876: mol_type = other DNA
atgagatgcatgctgaccaacagccacccctggtgcggctgcgactggcagttcagagagaagtacggcgacgtgttcaccgtgcacctgggccccagacccgtggtgatgctgtgcggcgtggaggccatcagagaggccctggtggacaaggccgaggccttcagcggcagaggcaagatcgccatggtggaccccttcttcagaggctacggcgtgatcttcgccaacggcaacagatggaaggtgctgagaagattcagcgtgaccaccatgagagacttcggcatgggcaagagaagcgtggaggagagaatccaggaggaggcccagtgcctgatcgaggagctgagaaagagcaaggagagagtgtacagagagatcgagcaggtgatcggcccccacagaccccccgagctgcacgacagagccaagatgccctacaccgaggccgtgatctacgagatccagagattcagcgacctgctgcccatgggcgtgccccacatcgtgacccagcacaccagcttcagaggctacatcatccccaaggacaccgaggtgttcctgatcctgagcaccgccctgcacgacccccactacttcgagaagcccgacgccttcaaccccgaccacttcctggacgccaacggcgccctgaagaagaccgaggccttcatccccttcagcctgggcaagagaatctgcctgggcgagggcatcgccagagccgagctgttcctgttcttcaccaccatcctgcagaacttcagcatggccagccccgtggcccccgaggacatcgacctgaccccccaggagtgcggcgtgggcaagatcccccccacctaccagatcagattcctgcccagatag

SEQ ID NO: 78262 - DNA, 1473 bp, synthetic construct
  misc_feature 1..1473: note = Description of Artificial Sequence: Synthetic coding sequence
  source 1..1473: mol_type = other DNA
atggaccccttcgtggtgctggtgctgtgcctgagctgcctgctgctgctgagcatctggagacagagcagcggcagaggcaagctgccccccggccccacccccctgcccgtgatcggcaacatcctgcagatcgacatcaaggacgtgagcaagagcctgaccaacctgagcaagatctacggccccgtgttcaccctgtacttcggcctggagagaatggtggtgctgcacggctacgaggtggtgaaggaggccctgatcgacctgggcgaggagttcagcggcagaggccacttccccctggccgagagagccaacagaggcttcggcatcgtgttcagcaacggcaagagatggaaggagatcagaagattcagcctgatgaccctgagaaacttcggcatgggcaagagaagcatcgaggacagagtgcaggaggaggccagatgcctggtggaggagctgagaaagaccaaggccagcccctgcgaccccaccttcatcctgggctgcgccccctgcaacgtgatctgcagcatcatcttccagaagagattcgactacaaggaccagcagttcctgaacctgatggagaagctgaacgagaacatcagaatcgtgagcaccccctggatccagatctgcaacaacttccccaccatcatcgactacttccccggcacccacaacaagctgctgaagaacctggccttcatggagagcgacatcctggagaaggtgaaggagcaccaggagagcatggacatcaacaaccccagagacttcatcgactgcttcctgatcaagatggagaaggagaagcagaaccagcagagcgagttcaccatcgagaacctggtgatcaccgccgccgacctgctgggcgccggcaccgagaccaccagcaccaccctgagatacgccctgctgctgctgctgaagcaccccgaggtgaccgccaaggtgcaggaggagatcgagagagtggtgggcagaaacagaagcccctgcatgcaggacagaggccacatgccctacaccgacgccgtggtgcacgaggtgcagagatacatcgacctgatccccaccagcctgccccacgccgtgacctgcgacgtgaagttcagaaactacctgatccccaagggcaccaccatcctgaccagcctgaccagcgtgctgcacgacaacaaggagttccccaaccccgagatgttcgaccccagacacttcctggacgagggcggcaacttcaagaagagcaactacttcatgcccttcagcgccggcaagagaatctgcgtgggcgagggcctggccagaatggagctgttcctgttcctgaccttcatcctgcagaacttcaacctgaagagcctgatcgaccccaaggacctggacaccacccccgtggtgaacggcttcgccagcgtgccccccttctaccagctgtgcttcatccccgtgtag

SEQ ID NO: 78263 - DNA, 1473 bp, synthetic construct
  misc_feature 1..1473: note = Description of Artificial Sequence: Synthetic coding sequence
  source 1..1473: mol_type = other DNA
atggagcccttcgtggtgctggtgctgtgcctgagcttcatgctgctgttcagcctgtggagacagagctgcagaagaagaaagctgccccccggccccacccccctgcccatcatcggcaacatgctgcagatcgacgtgaaggacatctgcaagagcttcaccaacttcagcaaggtgtacggccccgtgttcaccgtgtacttcggcatgaaccccatcgtggtgttccacggctacgaggccgtgaaggaggccctgatcgacaacggcgaggagttcagcggcagaggcaacagccccatcagccagagaatcaccaagggcctgggcatcatcagcagcaacggcaagagatggaaggagatcagaagattcagcctgaccaccctgagaaacttcggcatgggcaagagaagcatcgaggacagagtgcaggaggaggcccactgcctggtggaggagctgagaaagaccaaggccagcccctgcgaccccaccttcatcctgggctgcgccccctgcaacgtgatctgcagcgtggtgttccagaagagattcgactacaaggaccagaacttcctgaccctgatgaagagattcaacgagaacttcagaatcctgaacagcccctggatccaggtgtgcaacaacttccccctgctgatcgactgcttccccggcacccacaacaaggtgctgaagaacgtggccctgaccagaagctacatcagagagaaggtgaaggagcaccaggccagcctggacgtgaacaaccccagagacttcatcgactgcttcctgatcaagatggagcaggagaaggacaaccagaagagcgagttcaacatcgagaacctggtgggcaccgtggccgacctgttcgtggccggcaccgagaccaccagcaccaccctgagatacggcctgctgctgctgctgaagcaccccgaggtgaccgccaaggtgcaggaggagatcgaccacgtgatcggcagacacagaagcccctgcatgcaggacagaagccacatgccctacaccgacgccgtggtgcacgagatccagagatacagcgacctggtgcccaccggcgtgccccacgccgtgaccaccgacaccaagttcagaaactacctgatccccaagggcaccaccatcatggccctgctgaccagcgtgctgcacgacgacaaggagttccccaaccccaacatcttcgaccccggccacttcctggacaagaacggcaacttcaagaagagcgactacttcatgcccttcagcgccggcaagagaatctgcgccggcgagggcctggccagaatggagctgttcctgttcctgaccaccatcctgcagaacttcaacctgaagagcgtggacgacctgaagaacctgaacaccaccgccgtgaccaagggcatcgtgagcctgccccccagctaccagatctgcttcatccccgtgtag

SEQ ID NO: 78264 - DNA, 1374 bp, synthetic construct
  misc_feature 1..1374: note = Description of Artificial Sequence: Synthetic coding sequence
  source 1..1374: mol_type = other DNA
atggagagaagcttcctggaggaggccatcccccagtacctgaaggagctgctgaaggacctggtgggcgcccacatcagcgtgagcgccctggtgaccggcgtgagaggcatggagaacagagccctgaagagcttcagcgccgagctgagcctgagcgcctggctgcccagcgtggccgccctgagcagcctggccgtgaacagccccagcttctgccccttcttcctgggcatcatcagcagcaacggcaagagatggaaggagatcagaagattcagcctgaccaccctgagaaacttcggcatgggcaagagaagcatcgaggacagagtgcaggaggaggcccactgcctggtggaggagctgagaaagaccaaggccagcccctgcgaccccaccttcatcctgggctgcgccccctgcaacgtgatctgcagcgtggtgttccagaagagattcgactacaaggaccagaacttcctgaccctgatgaagagattcaacgagaacttcagaatcctgaacagcccctggatccaggtgtgcaacaacttccccctgctgatcgactgcttccccggcacccacaacaaggtgctgaagaacgtggccctgaccagaagctacatcagagagaaggtgaaggagcaccaggccagcctggacgtgaacaaccccagagacttcatcgactgcttcctgatcaagatggagcaggagaaggacaaccagaagagcgagttcaacatcgagaacctggtgggcaccgtggccgacctgttcgtggccggcaccgagaccaccagcaccaccctgagatacggcctgctgctgctgctgaagcaccccgaggtgaccgccaaggtgcaggaggagatcgaccacgtgatcggcagacacagaagcccctgcatgcaggacagaagccacatgccctacaccgacgccgtggtgcacgagatccagagatacagcgacctggtgcccaccggcgtgccccacgccgtgaccaccgacaccaagttcagaaactacctgatccccaagggcaccaccatcatggccctgctgaccagcgtgctgcacgacgacaaggagttccccaaccccaacatcttcgaccccggccacttcctggacaagaacggcaacttcaagaagagcgactacttcatgcccttcagcgccggcaagagaatctgcgccggcgagggcctggccagaatggagctgttcctgttcctgaccaccatcctgcagaacttcaacctgaagagcgtggacgacctgaagaacctgaacaccaccgccgtgaccaagggcatcgtgagcctgccccccagctaccagatctgcttcatccccgtgtag

SEQ ID NO: 78265 - DNA, 1167 bp, synthetic construct
  misc_feature 1..1167: note = Description of Artificial Sequence: Synthetic coding sequence
  source 1..1167: mol_type = other DNA
atgttcctgcagcccatcgccaagggcatcatcagcagcaacggcaagagatggaaggagatcagaagattcagcctgaccaccctgagaaacttcggcatgggcaagagaagcatcgaggacagagtgcaggaggaggcccactgcctggtggaggagctgagaaagaccaaggccagcccctgcgaccccaccttcatcctgggctgcgccccctgcaacgtgatctgcagcgtggtgttccagaagagattcgactacaaggaccagaacttcctgaccctgatgaagagattcaacgagaacttcagaatcctgaacagcccctggatccaggtgtgcaacaacttccccctgctgatcgactgcttccccggcacccacaacaaggtgctgaagaacgtggccctgaccagaagctacatcagagagaaggtgaaggagcaccaggccagcctggacgtgaacaaccccagagacttcatcgactgcttcctgatcaagatggagcaggagaaggacaaccagaagagcgagttcaacatcgagaacctggtgggcaccgtggccgacctgttcgtggccggcaccgagaccaccagcaccaccctgagatacggcctgctgctgctgctgaagcaccccgaggtgaccgccaaggtgcaggaggagatcgaccacgtgatcggcagacacagaagcccctgcatgcaggacagaagccacatgccctacaccgacgccgtggtgcacgagatccagagatacagcgacctggtgcccaccggcgtgccccacgccgtgaccaccgacaccaagttcagaaactacctgatccccaagggcaccaccatcatggccctgctgaccagcgtgctgcacgacgacaaggagttccccaaccccaacatcttcgaccccggccacttcctggacaagaacggcaacttcaagaagagcgactacttcatgcccttcagcgccggcaagagaatctgcgccggcgagggcctggccagaatggagctgttcctgttcctgaccaccatcctgcagaacttcaacctgaagagcgtggacgacctgaagaacctgaacaccaccgccgtgaccaagggcatcgtgagcctgccccccagctaccagatctgcttcatccccgtgtag

SEQ ID NO: 78266 - DNA, 924 bp, synthetic construct
  misc_feature 1..924: note = Description of Artificial Sequence: Synthetic coding sequence
  source 1..924: mol_type = other DNA
atggccgccaagtgctgcagcaccttcttcctgggctgcgagttcagccagttcctgcccctgttcctgctgggcatcatcagcagcaacggcaagagatggaaggagatcagaagattcagcctgaccaccctgagaaacttcggcatgggcaagagaagcatcgaggacagagtgcaggaggaggcccactgcctggtggaggagctgagaaagaccaaggccagcccctgcgaccccaccttcatcctgggctgcgccccctgcaacgtgatctgcagcgtggtgttccagaagagattcgactacaaggaccagaacttcctgaccctgatgaagagattcaacgagaacttcagaatcctgaacagcccctggatccaggtgtgcaacaacttccccctgctgatcgactgcttccccggcacccacaacaaggtgctgaagaacgtggccctgaccagaagctacatcagagagaaggtgaaggagcaccaggccagcctggacgtgaacaaccccagagacttcatcgactgcttcctgatcaagatggagcaggagaaggacaaccagaagagcgagttcaacatcgagaacctggtgggcaccgtggccgacctgttcgtggccggcaccgagaccaccagcaccaccctgagatacggcctgctgctgctgctgaagcaccccgaggtgaccgccaaggtgcaggaggagatcgaccacgtgatcggcagacacagaagcccctgcatgcaggacagaagccacatgccctacaccgacgccgtggtgcacgagatccagagatacagcgacctggtgcccaccggcgtgccccacgccgtgaccaccgacaccaagttcagaaactacctgatccccaagagcttcgacaacaagatcatgctggccgcctag

SEQ ID NO: 78267 - DNA, 1473 bp, synthetic construct
  misc_feature 1..1473: note = Description of Artificial Sequence: Synthetic coding sequence
  source 1..1473: mol_type = other DNA
atggacagcctggtggtgctggtgctgtgcctgagctgcctgctgctgctgagcctgtggagacagagcagcggcagaggcaagctgccccccggccccacccccctgcccgtgatcggcaacatcctgcagatcggcatcaaggacatcagcaagagcctgaccaacctgagcaaggtgtacggccccgtgttcaccctgtacttcggcctgaagcccatcgtggtgctgcacggctacgaggccgtgaaggaggccctgatcgacctgggcgaggagttcagcggcagaggcatcttccccctggccgagagagccaacagaggcttcggcatcgtgttcagcaacggcaagaagtggaaggagatcagaagattcagcctgatgaccctgagaaacttcggcatgggcaagagaagcatcgaggacagagtgcaggaggaggccagatgcctggtggaggagctgagaaagaccaaggccagcccctgcgaccccaccttcatcctgggctgcgccccctgcaacgtgatctgcagcatcatcttccacaagagattcgactacaaggaccagcagttcctgaacctgatggagaagctgaacgagaacatcaagatcctgagcagcccctggatccagatctgcaacaacttcagccccatcatcgactacttccccggcacccacaacaagctgctgaagaacgtggccttcatgaagagctacatcctggagaaggtgaaggagcaccaggagagcatggacatgaacaacccccaggacttcatcgactgcttcctgatgaagatggagaaggagaagcacaaccagcccagcgagttcaccatcgagagcctggagaacaccgccgtggacctgttcggcgccggcaccgagaccaccagcaccaccctgagatacgccctgctgctgctgctgaagcaccccgaggtgaccgccaaggtgcaggaggagatcgagagagtgatcggcagaaacagaagcccctgcatgcaggacagaagccacatgccctacaccgacgccgtggtgcacgaggtgcagagatacatcgacctgctgcccaccagcctgccccacgccgtgacctgcgacatcaagttcagaaactacctgatccccaagggcaccaccatcctgatcagcctgaccagcgtgctgcacgacaacaaggagttccccaaccccgagatgttcgacccccaccacttcctggacgagggcggcaacttcaagaagagcaagtacttcatgcccttcagcgccggcaagagaatctgcgtgggcgaggccctggccggcatggagctgttcctgttcctgaccagcatcctgcagaacttcaacctgaagagcctggtggaccccaagaacctggacaccacccccgtggtgaacggcttcgccagcgtgccccccttctaccagctgtgcttcatccccgtgtag

SEQ ID NO: 78268 - DNA, 1362 bp, synthetic construct
  misc_feature 1..1362: note = Description of Artificial Sequence: Synthetic coding sequence
  source 1..1362: mol_type = other DNA
atggacagcctggtggtgctggtgctgtgcctgagctgcctgctgctgctgagcctgtggagacagagcagcggcagaggcaagctgccccccggccccacccccctgcccgtgatcggcaacatcctgcagatcggcatcaaggacatcagcaagagcctgaccaacctgagcaaggtgtacggccccgtgttcaccctgtacttcggcctgaagcccatcgtggtgctgcacggctacgaggccgtgaaggaggccctgatcgacctgggcgaggagttcagcggcagaggcatcttccccctggccgagagagccaacagaggcttcggcatcgtgttcagcaacggcaagaagtggaaggagatcagaagattcagcctgatgaccctgagaaacttcggcatgggcaagagaagcatcgaggacagagtgcaggaggaggccagatgcctggtggaggagctgagaaagaccaaggccagcccctgcgaccccaccttcatcctgggctgcgccccctgcaacgtgatctgcagcatcatcttccacaagagattcgactacaaggaccagcagttcctgaacctgatggagaagctgaacgagaacatcaagatcctgagcagcccctggatccagatctgcaacaacttcagccccatcatcgactacttccccggcacccacaacaagctgctgaagaacgtggccttcatgaagagctacatcctggagaaggtgaaggagcaccaggagagcatggacatgaacaacccccaggacttcatcgactgcttcctgatgaagatggagaaggagaagcacaaccagcccagcgagttcaccatcgagagcctggagaacaccgccgtggacctgttcggcgccggcaccgagaccaccagcaccaccctgagatacgccctgctgctgctgctgaagcaccccgaggtgaccgccaaggtgcaggaggagatcgagagagtgatcggcagaaacagaagcccctgcatgcaggacagaagccacatgccctacaccgacgccgtggtgcacgaggtgcagagatacatcgacctgctgcccaccagcctgccccacgccgtgacctgcgacatcaagttcagaaactacctgatccccaagggcaccaccatcctgatcagcctgaccagcgtgctgcacgacaacaaggagttccccaaccccgagatgttcgacccccaccacttcctggacgagggcggcaacttcaagaagagcaagtacttcatgctggtgctgaagatgatcagaaccgagagaaccaagagaaagagagtgggcaagctgttctgggtgagcgtgagagtgacctag

SEQ ID NO: 78269 - DNA, 1341 bp, synthetic construct
  misc_feature 1..1341: note = Description of Artificial Sequence: Synthetic coding sequence
  source 1..1341: mol_type = other DNA
atgggcctggaggccctggtgcccctggccgtgatcgtggccatcttcctgctgctggtggacctgatgcacagaagacagagatgggccgccagatacccccccggccccctgcccctgcccggcctgggcaacctgctgcacgtggacttccagaacaccccctactgcttcgaccagctgagaagaagattcggcgacgtgttcagcctgcagctggcctggacccccgtggtggtgctgaacggcctggccgccgtgagagaggccctggtgacccacggcgaggacaccgccgacagaccccccgtgcccatcacccagatcctgggcttcggccccagaagccagggcagacccttcagacccaacggcctgctggacaaggccgtgagcaacgtgatcgccagcctgacctgcggcagaagattcgagtacgacgaccccagattcctgagactgctggacctggcccaggagggcctgaaggaggagagcggcttcctgagagaggtgctgaacgccgtgcccgtgctgctgcacatccccgccctggccggcaaggtgctgagattccagaaggccttcctgacccagctggacgagctgctgaccgagcacagaatgacctgggaccccgcccagccccccagagacctgaccgaggccttcctggccgagatggagaaggccaagggcaaccccgagagcagcttcaacgacgagaacctgtgcatcgtggtggccgacctgttcagcgccggcatggtgaccaccagcaccaccctggcctggggcctgctgctgatgatcctgcaccccgacgtgcagagaagagtgcagcaggagatcgacgacgtgatcggccaggtgagaagacccgagatgggcgaccaggcccacatgccctacaccaccgccgtgatccacgaggtgcagagattcggcgacatcgtgcccctgggcgtgacccacatgaccagcagagacatcgaggtgcagggcttcagaatccccaagggcaccaccctgatcaccaacctgagcagcgtgctgaaggacgaggccgtgtgggagaagcccttcagattccaccccgagcacttcctggacgcccagggccacttcgtgaagcccgaggccttcctgcccttcagcgccggcagaagagcctgcctgggcgagcccctggccagaatggagctgttcctgttcttcaccagcctgctgcagcacttcagcttcagcgtgcccaccggccagcccagacccagccaccacggcgtgttcgccttcctggtgacccccagcccctacgagctgtgcgccgtgcccagatag

SEQ ID NO: 78270 - DNA, 1494 bp, synthetic construct
  misc_feature 1..1494: note = Description of Artificial Sequence: Synthetic coding sequence
  source 1..1494: mol_type = other DNA
atgggcctggaggccctggtgcccctggccgtgatcgtggccatcttcctgctgctggtggacctgatgcacagaagacagagatgggccgccagatacccccccggccccctgcccctgcccggcctgggcaacctgctgcacgtggacttccagaacaccccctactgcttcgaccagctgagaagaagattcggcgacgtgttcagcctgcagctggcctggacccccgtggtggtgctgaacggcctggccgccgtgagagaggccctggtgacccacggcgaggacaccgccgacagaccccccgtgcccatcacccagatcctgggcttcggccccagaagccagggcgtgttcctggccagatacggccccgcctggagagagcagagaagattcagcgtgagcaccctgagaaacctgggcctgggcaagaagagcctggagcagtgggtgaccgaggaggccgcctgcctgtgcgccgccttcgccaaccacagcggcagacccttcagacccaacggcctgctggacaaggccgtgagcaacgtgatcgccagcctgacctgcggcagaagattcgagtacgacgaccccagattcctgagactgctggacctggcccaggagggcctgaaggaggagagcggcttcctgagagaggtgctgaacgccgtgcccgtgctgctgcacatccccgccctggccggcaaggtgctgagattccagaaggccttcctgacccagctggacgagctgctgaccgagcacagaatgacctgggaccccgcccagccccccagagacctgaccgaggccttcctggccgagatggagaaggccaagggcaaccccgagagcagcttcaacgacgagaacctgtgcatcgtggtggccgacctgttcagcgccggcatggtgaccaccagcaccaccctggcctggggcctgctgctgatgatcctgcaccccgacgtgcagagaagagtgcagcaggagatcgacgacgtgatcggccaggtgagaagacccgagatgggcgaccaggcccacatgccctacaccaccgccgtgatccacgaggtgcagagattcggcgacatcgtgcccctgggcgtgacccacatgaccagcagagacatcgaggtgcagggcttcagaatccccaagggcaccaccctgatcaccaacctgagcagcgtgctgaaggacgaggccgtgtgggagaagcccttcagattccaccccgagcacttcctggacgcccagggccacttcgtgaagcccgaggccttcctgcccttcagcgccggcagaagagcctgcctgggcgagcccctggccagaatggagctgttcctgttcttcaccagcctgctgcagcacttcagcttcagcgtgcccaccggccagcccagacccagccaccacggcgtgttcgccttcctggtgacccccagcccctacgagctgtgcgccgtgcccagatag

SEQ ID NO: 78271 - DNA, 1494 bp, synthetic construct
  misc_feature 1..1494: note = Description of Artificial Sequence: Synthetic coding sequence
  source 1..1494: mol_type = other DNA
atgggcctggaggccctggtgcccctggccgtgatcgtggccatcttcctgctgctggtggacctgatgcacagaagacagagatgggccgccagatacccccccggccccctgcccctgcccggcctgggcaacctgctgcacgtggacttccagaacaccccctactgcttcgaccagctgagaagaagattcggcgacgtgttcagcctgcagctggcctggacccccgtggtggtgctgaacggcctggccgccgtgagagaggccctggtgacccacggcgaggacaccgccgacagaccccccgtgcccatcacccagatcctgggcttcggccccagaggccagggcgtgttcctggccagatacggccccgcctggagagagcagagaagattcagcgtgagcaccctgagaaacctgggcctgggcaagaagagcctggagcagtgggtgaccgaggaggccgcctgcctgtgcgccgccttcgccaaccacagcggcagacccttcagacccaacggcctgctggacaaggccgtgagcaacgtgatcgccagcctgacctgcggcagaagattcgagtacgacgaccccagattcctgagactgctggacctggcccaggagggcctgaaggaggagagcggcttcctgagagaggtgctgaacgccgtgcccgtgctgctgcacatccccgccctggccggcaaggtgctgagattccagaaggccttcctgacccagctggacgagctgctgaccgagcacagaatgacctgggaccccgcccagccccccagagacctgaccgaggccttcctggccgagatggagaaggccaagggcaaccccgagagcagcttcaacgacgagaacctgtgcatcgtggtggccgacctgttcagcgccggcatggtgaccaccagcaccaccctggcctggggcctgctgctgatgatcctgcaccccgacgtgcagagaagagtgcagcaggagatcgacgacgtgatcggccaggtgagaagacccgagatgggcgaccaggcccacatgccctacaccaccgccgtgatccacgaggtgcagagattcggcgacatcgtgcccctgggcgtgacccacatgaccagcagagacatcgaggtgcagggcttcagaatccccaagggcaccaccctgatcaccaacctgagcagcgtgctgaaggacgaggccgtgtgggagaagcccttcagattccaccccgagcacttcctggacgcccagggccacttcgtgaagcccgaggccttcctgcccttcagcgccggcagaagagcctgcctgggcgagcccctggccagaatggagctgttcctgttcttcaccagcctgctgcagcacttcagcttcagcgtgcccaccggccagcccagacccagccaccacggcgtgttcgccttcctggtgacccccagcccctacgagctgtgcgccgtgcccagatag

SEQ ID NO: 78272 - DNA, 1332 bp, synthetic construct
  misc_feature 1..1332: note = Description of Artificial Sequence: Synthetic coding sequence
  source 1..1332: mol_type = other DNA
caggaggccctgaccctgcccctgcagctgagaagaagattcggcgacgtgttcagcctgcagctggcctggacccccgtggtggtgctgaacggcctggccgccgtgagagaggccctggtgacccacggcgaggacaccgccgacagaccccccgtgcccatcacccagatcctgggcttcggccccagaggccagggcgtgttcctggccagatacggccccgcctggagagagcagagaagattcagcgtgagcaccctgagaaacctgggcctgggcaagaagagcctggagcagtgggtgaccgaggaggccgcctgcctgtgcgccgccttcgccaaccacgacgcccccttcgcccccaccgtgagctggaccaagcccaacgtgatcgccagcctgacctgcggcagaagattcgagtacgacgaccccagattcctgagactgctggacctggcccaggagggcctgaaggaggagagcggcttcctgagagaggtgctgaacgccgtgcccgtgctgctgcacatccccgccctggccggcaaggtgctgagattccagaaggccttcctgacccagctggacgagctgctgaccgagcacagaatgacctgggaccccgcccagccccccagagacctgaccgaggccttcctggccgagatggagaaggccaagggcaaccccgagagcagcttcaacgacgagaacctgtgcatcgtggtggccgacctgttcagcgccggcatggtgaccaccagcaccaccctggcctggggcctgctgctgatgatcctgcaccccgacgtgcagagaagagtgcagcaggagatcgacgacgtgatcggccaggtgagaagacccgagatgggcgaccaggcccacatgccctacaccaccgccgtgatccacgaggtgcagagattcggcgacatcgtgcccctgggcgtgacccacatgaccagcagagacatcgaggtgcagggcttcagaatccccaagggcaccaccctgatcaccaacctgagcagcgtgctgaaggacgaggccgtgtgggagaagcccttcagattccaccccgagcacttcctggacgcccagggccacttcgtgaagcccgaggccttcctgcccttcagcgccggcagaagagcctgcctgggcgagcccctggccagaatggagctgttcctgttcttcaccagcctgctgcagcacttcagcttcagcgtgcccaccggccagcccagacccagccaccacggcgtgttcgccttcctggtgacccccagcccctacgagctgtgcgccgtgcccagatag

SEQ ID NO: 78273 - DNA, 1341 bp, synthetic construct
  misc_feature 1..1341: note = Description of Artificial Sequence: Synthetic coding sequence
  source 1..1341: mol_type = other DNA
atgggcctggaggccctggtgcccctggccatgatcgtggccatcttcctgctgctggtggacctgatgcacagaagacagagatgggccgccagatacccccccggccccctgcccctgcccggcctgggcaacctgctgcacgtggacttccagaacaccccctactgcttcgaccagctgagaagaagattcggcgacgtgttcagcctgcagctggcctggacccccgtggtggtgctgaacggcctggccgccgtgagagaggccctggtgacccacggcgaggacaccgccgacagaccccccgtgcccatcacccagatcctgggcttcggccccagaagccagggcagacccttcagacccaacggcctgctggacaaggccgtgagcaacgtgatcgccagcctgacctgcggcagaagattcgagtacgacgaccccagattcctgagactgctggacctggcccaggagggcctgaaggaggagagcggcttcctgagagaggtgctgaacgccgtgcccgtgctgctgcacatccccgccctggccggcaaggtgctgagattccagaaggccttcctgacccagctggacgagctgctgaccgagcacagaatgacctgggaccccgcccagccccccagagacctgaccgaggccttcctggccgagatggagaaggccaagggcaaccccgagagcagcttcaacgacgagaacctgtgcatcgtggtggccgacctgttcagcgccggcatggtgaccaccagcaccaccctggcctggggcctgctgctgatgatcctgcaccccgacgtgcagagaagagtgcagcaggagatcgacgacgtgatcggccaggtgagaagacccgagatgggcgaccaggcccacatgccctacaccaccgccgtgatccacgaggtgcagagattcggcgacatcgtgcccctgggcgtgacccacatgaccagcagagacatcgaggtgcagggcttcagaatccccaagggcaccaccctgatcaccaacctgagcagcgtgctgaaggacgaggccgtgtgggagaagcccttcagattccaccccgagcacttcctggacgcccagggccacttcgtgaagcccgaggccttcctgcccttcagcgccggcagaagagcctgcctgggcgagcccctggccagaatggagctgttcctgttcttcaccagcctgctgcagcacttcagcttcagcgtgcccaccggccagcccagacccagccaccacggcgtgttcgccttcctggtgacccccagcccctacgagctgtgcgccgtgcccagatag

SEQ ID NO: 78274 - DNA, 1482 bp, synthetic construct
  misc_feature 1..1482: note = Description of Artificial Sequence: Synthetic coding sequence
  source 1..1482: mol_type = other DNA
atgagcgccctgggcgtgaccgtggccctgctggtgtgggccgccttcctgctgctggtgagcatgtggagacaggtgcacagcagctggaacctgccccccggccccttccccctgcccatcatcggcaacctgttccagctggagctgaagaacatccccaagagcttcaccagactggcccagagattcggccccgtgttcaccctgtacgtgggcagccagagaatggtggtgatgcacggctacaaggccgtgaaggaggccctgctggactacaaggacgagttcagcggcagaggcgacctgcccgccttccacgcccacagagacagaggcatcatcttcaacaacggccccacctggaaggacatcagaagattcagcctgaccaccctgagaaactacggcatgggcaagcagggcaacgagagcagaatccagagagaggcccacttcctgctggaggccctgagaaagacccagggccagcccttcgaccccaccttcctgatcggctgcgccccctgcaacgtgatcgccgacatcctgttcagaaagcacttcgactacaacgacgagaagttcctgagactgatgtacctgttcaacgagaacttccacctgctgagcaccccctggctgcagctgtacaacaacttccccagcttcctgcactacctgcccggcagccacagaaaggtgatcaagaacgtggccgaggtgaaggagtacgtgagcgagagagtgaaggagcaccaccagagcctggaccccaactgccccagagacctgaccgactgcctgctggtggagatggagaaggagaagcacagcgccgagagactgtacaccatggacggcatcaccgtgaccgtggccgacctgttcttcgccggcaccgagaccaccagcaccaccctgagatacggcctgctgatcctgatgaagtaccccgagatcgaggagaagctgcacgaggagatcgacagagtgatcggccccagcagaatccccgccatcaaggacagacaggagatgccctacatggacgccgtggtgcacgagatccagagattcatcaccctggtgcccagcaacctgccccacgaggccaccagagacaccatcttcagaggctacctgatccccaagggcaccgtggtggtgcccaccctggacagcgtgctgtacgacaaccaggagttccccgaccccgagaagttcaagcccgagcacttcctgaacgagaacggcaagttcaagtacagcgactacttcaagcccttcagcaccggcaagagagtgtgcgccggcgagggcctggccagaatggagctgttcctgctgctgtgcgccatcctgcagcacttcaacctgaagcccctggtggaccccaaggacatcgacctgagccccatccacatcggcttcggctgcatcccccccagatacaagctgtgcgtgatccccagaagctag

SEQ ID NO: 78275 - DNA, 1482 bp, synthetic construct; identical to SEQ ID NO: 78274
  misc_feature 1..1482: note = Description of Artificial Sequence: Synthetic coding sequence
  source 1..1482: mol_type = other DNA

SEQ ID NO: 78276 - DNA, 261 bp, synthetic construct
  misc_feature 1..261: note = Description of Artificial Sequence: Synthetic coding sequence
  source 1..261: mol_type = other DNA
atgagcgccctgggcgtgaccgtggccctgctggtgtgggccgccttcctgctgctggtgagcatgtggagacaggtgcacagcagctggaacctgccccccggccccttccccctgcccatcatcggcaacctgttccagctggagctgaagaacatccccaagagcttcaccagactggcccagagattcggccccgtgttcaccctgtacgtgggcagccagagaatggtggtgatgcacggctacaaggccgtgtag

SEQ ID NO: 78277 - DNA, 1476 bp, synthetic construct
  misc_feature 1..1476: note = Description of Artificial Sequence: Synthetic coding sequence
  source 1..1476: mol_type = other DNA
atggacagcatcagcaccgccatcctgctgctgctgctggccctggtgtgcctgctgctgaccctgagcagcagagacaagggcaagctgccccccggccccagacccctgagcatcctgggcaacctgctgctgctgtgcagccaggacatgctgaccagcctgaccaagctgagcaaggagtacggcagcatgtacaccgtgcacctgggccccagaagagtggtggtgctgagcggctaccaggccgtgaaggaggccctggtggaccagggcgaggagttcagcggcagaggcgactaccccgccttcttcaacttcaccaagggcaacggcatcgccttcagcagcggcgacagatggaaggtgctgagacagttcagcatccagatcctgagaaacttcggcatgggcaagagaagcatcgaggagagaatcctggaggagggcagcttcctgctggccgagctgagaaagaccgagggcgagcccttcgaccccaccttcgtgctgagcagaagcgtgagcaacatcatctgcagcgtgctgttcggcagcagattcgactacgacgacgagagactgctgaccatcatcagactgatcaacgacaacttccagatcatgagcagcccctggggcgagctgtacgacatcttccccagcctgctggactgggtgcccggcccccaccagagaatcttccagaacttcaagtgcctgagagacctgatcgcccacagcgtgcacgaccaccaggccagcctggaccccagaagccccagagacttcatccagtgcttcctgaccaagatggccgaggagaaggaggaccccctgagccacttccacatggacaccctgctgatgaccacccacaacctgctgttcggcggcaccaagaccgtgagcaccaccctgcaccacgccttcctggccctgatgaagtaccccaaggtgcaggccagagtgcaggaggagatcgacctggtggtgggcagagccagactgcccgccctgaaggacagagccgccatgccctacaccgacgccgtgatccacgaggtgcagagattcgccgacatcatccccatgaacctgccccacagagtgaccagagacaccgccttcagaggcttcctgatccccaagggcaccgacgtgatcaccctgctgaacaccgtgcactacgaccccagccagttcctgaccccccaggagttcaaccccgagcacttcctggacgccaaccagagcttcaagaagagccccgccttcatgcccttcagcgccggcagaagactgtgcctgggcgagagcctggccagaatggagctgttcctgtacctgaccgccatcctgcagagcttcagcctgcagcccctgggcgcccccgaggacatcgacctgacccccctgagcagcggcctgggcaacctgcccagacccttccagctgtgcctgagacccagatag

SEQ ID NO: 78278 - DNA, 1509 bp, synthetic construct
  misc_feature 1..1509: note = Description of Artificial Sequence: Synthetic coding sequence
  source 1..1509: mol_type = other DNA
atgctggccgccatgggcagcctggccgccgccctgtgggccgtggtgcaccccagaaccctgctgctgggcaccgtggccttcctgctggccgccgacttcctgaagagaagaagacccaagaactacccccccggcccctggagactgcccttcctgggcaacttcttcctggtggacttcgagcagagccacctggaggtgcagctgttcgtgaagaagtacggcaacctgttcagcctggagctgggcgacatcagcgccgtgctgatcaccggcctgcccctgatcaaggaggccctgatccacatggaccagaacttcggcaacagacccgtgacccccatgagagagcacatcttcaagaagaacggcctgatcatgagcagcggccaggcctggaaggagcagagaagattcaccctgaccgccctgagaaacttcggcctgggcaagaagagcctggaggagagaatccaggaggaggcccagcacctgaccgaggccatcaaggaggagaacggccagcccttcgacccccacttcaagatcaacaacgccgtgagcaacatcatctgcagcatcaccttcggcgagagattcgagtaccaggacagctggttccagcagctgctgaagctgctggacgaggtgacctacctggaggccagcaagacctgccagctgtacaacgtgttcccctggatcatgaagttcctgcccggcccccaccagaccctgttcagcaactggaagaagctgaagctgttcgtgagccacatgatcgacaagcacagaaaggactggaaccccgccgagaccagagacttcatcgacgcctacctgaaggagatgagcaagcacaccggcaaccccaccagcagcttccacgaggagaacctgatctgcagcaccctggacctgttcttcgccggcaccgagaccaccagcaccaccctgagatgggccctgctgtacatggccctgtaccccgagatccaggagaaggtgcaggccgagatcgacagagtgatcggccagggccagcagcccagcaccgccgccagagagagcatgccctacaccaacgccgtgatccacgaggtgcagagaatgggcaacatcatccccctgaacgtgcccagagaggtgaccgtggacaccaccctggccggctaccacctgcccaagggcaccatgatcctgaccaacctgaccgccctgcacagagaccccaccgagtgggccacccccgacaccttcaaccccgaccacttcctggagaacggccagttcaagaagagagaggccttcatgcccttcagcatcggcaagagagcctgcctgggcgagcagctggccagaaccgagctgttcatcttcttcaccagcctgatgcagaagttcaccttcagaccccccaacaacgagaagctgagcctgaagttcagaatgggcatcaccatcagccccgtgagccacagactgtgcgccgtgccccaggtgtag

SEQ ID NO: 78279 - DNA, 1506 bp, synthetic construct
  misc_feature 1..1506: note = Description of Artificial Sequence: Synthetic coding sequence
  source 1..1506: mol_type = other DNA
atgtggaagctgtggagagccgaggagggcgccgccgccctgggcggcgccctgttcctgctgctgttcgccctgggcgtgagacagctgctgaagcagagaagacccatgggcttcccccccggcccccccggcctgcccttcatcggcaacatctacagcctggccgccagcagcgagctgccccacgtgtacatgagaaagcagagccaggtgtacggcgagatcttcagcctggacctgggcggcatcagcaccgtggtgctgaacggctacgacgtggtgaaggagtgcctggtgcaccagagcgagatcttcgccgacagaccctgcctgcccctgttcatgaagatgaccaagatgggcggcctgctgaacagcagatacggcagaggctgggtggaccacagaagactggccgtgaacagcttcagatacttcggctacggccagaagagcttcgagagcaagatcctggaggagaccaagttcttcaacgacgccatcgagacctacaagggcagacccttcgacttcaagcagctgatcaccaacgccgtgagcaacatcaccaacctgatcatcttcggcgagagattcacctacgaggacaccgacttccagcacatgatcgagctgttcagcgagaacgtggagctggccgccagcgccagcgtgttcctgtacaacgccttcccctggatcggcatcctgcccttcggcaagcaccagcagctgttcagaaacgccgccgtggtgtacgacttcctgagcagactgatcgagaaggccagcgtgaacagaaagccccagctgccccagcacttcgtggacgcctacctggacgagatggaccagggcaagaacgaccccagcagcaccttcagcaaggagaacctgatcttcagcgtgggcgagctgatcatcgccggcaccgagaccaccaccaacgtgctgagatgggccatcctgttcatggccctgtaccccaacatccagggccaggtgcagaaggagatcgacctgatcatgggccccaacggcaagcccagctgggacgacaagtgcaagatgccctacaccgaggccgtgctgcacgaggtgctgagattctgcaacatcgtgcccctgggcatcttccacgccaccagcgaggacgccgtggtgagaggctacagcatccccaagggcaccaccgtgatcaccaacctgtacagcgtgcacttcgacgagaagtactggagagaccccgaggtgttccaccccgagagattcctggacagcagcggctacttcgccaagaaggaggccctggtgcccttcagcctgggcagaagacactgcctgggcgagcacctggccagaatggagatgttcctgttcttcaccgccctgctgcagagattccacctgcacttcccccacgagctggtgcccgacctgaagcccagactgggcatgaccctgcagccccagccctacctgatctgcgccgagagaagatag

SEQ ID NO: 78280 - DNA, 1695 bp, synthetic construct
  misc_feature 1..1695: note = Description of Artificial Sequence: Synthetic coding sequence
  source 1..1695: mol_type = other DNA
atggaggccaccggcacctgggccctgctgctggccctggccctgctgctgctgctgaccctggccctgagcggcaccagagccagaggccacctgccccccggccccacccccctgcccctgctgggcaacctgctgcagctgagacccggcgccctgtacagcggcctgatgagactgagcaagaagtacggccccgtgttcaccatctacctgggcccctggagacccgtggtggtgctggtgggccaggaggccgtgagagaggccctgggcggccaggccgaggagttcagcggcagaggcaccgtggccatgctggagggcaccttcgacggccacggcgtgttcttcagcaacggcgagagatggagacagctgagaaagttcaccatgctggccctgagagacctgggcatgggcaagagagagggcgaggagctgatccaggccgaggccagatgcctggtggagaccttccagggcaccgagggcagacccttcgaccccagcctgctgctggcccaggccaccagcaacgtggtgtgcagcctgctgttcggcctgagattcagctacgaggacaaggagttccaggccgtggtgagagccgccggcggcaccctgctgggcgtgagcagccagggcggccagacctacgagatgttcagctggttcctgagacccctgcccggcccccacaagcagctgctgcaccacgtgagcaccctggccgccttcaccgtgagacaggtgcagcagcaccagggcaacctggacgccagcggccccgccagagacctggtggacgccttcctgctgaagatggcccaggaggagcagaaccccggcaccgagttcaccaacaagaacatgctgatgaccgtgatctacctgctgttcgccggcaccatgaccgtgagcaccaccgtgggctacaccctgctgctgctgatgaagtacccccacgtgcagaagtgggtgagagaggagctgaacagagagctgggcgccggccaggcccccagcctgggcgacagaaccagactgccctacaccgacgccgtgctgcacgaggcccagagactgctggccctggtgcccatgggcatccccagaaccctgatgagaaccaccagattcagaggctacaccctgccccagggcaccgaggtgttccccctgctgggcagcatcctgcacgaccccaacatcttcaagcaccccgaggagttcaaccccgacagattcctggacgccgacggcagattcagaaagcacgaggccttcctgcccttcagcctgggcaagagagtgtgcctgggcgagggcctggccaaggccgagctgttcctgttcttcaccaccatcctgcaggccttcagcctggagagcccctgcccccccgacaccctgagcctgaagcccaccgtgagcggcctgttcaacatcccccccgccagcaccgtgggcatggacagagtgaacgtgagcagagtgtacaccgccggcagccacatctacacccccgccgtggtgttcagaagcctgagccacggcccccacgcccacctgacccacgccgccaagatgcacaacagaacccccatccacaactacaagggccacaaggccaccgccggcctggccttccacagacacaagtacagccccagcgccatcaccagcacctag

SEQ ID NO: 78281 - DNA, 1515 bp, synthetic construct
  misc_feature 1..1515: note = Description of Artificial Sequence: Synthetic coding sequence
  source 1..1515: mol_type = other DNA
atggaggccaccggcacctgggccctgctgctggccctggccctgctgctgctgctgaccctggccctgagcggcaccagagccagaggccacctgccccccggccccacccccctgcccctgctgggcaacctgctgcagctgagacccggcgccctgtacagcggcctgatgagactgagcaagaagtacggccccgtgttcaccatctacctgggcccctggagacccgtggtggtgctggtgggccaggaggccgtgagagaggccctgggcggccaggccgaggagttcagcggcagaggcaccgtggccatgctggagggcaccttcgacggccacggcgtgttcttcagcaacggcgagagatggagacagctgagaaagttcaccatgctggccctgagagacctgggcatgggcaagagagagggcgaggagctgatccaggccgaggccagatgcctggtggagaccttccagggcaccgagggcagacccttcgaccccagcctgctgctggcccaggccaccagcaacgtggtgtgcagcctgctgttcggcctgagattcagctacgaggacaaggagttccaggccgtggtgagagccgccggcggcaccctgctgggcgtgagcagccagggcggccagacctacgagatgttcagctggttcctgagacccctgcccggcccccacaagcagctgctgcaccacgtgagcaccctggccgccttcaccgtgagacaggtgcagcagcaccagggcaacctggacgccagcggccccgccagagacctggtggacgccttcctgctgaagatggcccaggaggagcagaaccccggcaccgagttcaccaacaagaacatgctgatgaccgtgatctacctgctgttcgccggcaccatgaccgtgagcaccaccgtgggctacaccctgctgctgctgatgaagtacccccacgtgcagaagtgggtgagagaggagctgaacagagagctgggcgccggccaggcccccagcctgggcgacagaaccagactgccctacaccgacgccgtgctgcacgaggcccagagactgctggccctggtgcccatgggcatccccagaaccctgatgagaaccaccagattcagaggctacaccctgccccagggcaccgaggtgttccccctgctgggcagcatcctgcacgaccccaacatcttcaagcaccccgaggagttcaaccccgacagattcctggacgccgacggcagattcagaaagcacgaggccttcctgcccttcagcctgggcaagagagtgtgcctgggcgagggcctggccaaggccgagctgttcctgttcttcaccaccatcctgcaggccttcagcctggagagcccctgcccccccgacaccctgagcctgaagcccaccgtgagcggcctgttcaacatcccccccgccttccagctgcaggtgagacccaccgacctgcacagcaccacccagaccagatag

SEQ ID NO: 78282 - DNA, 690 bp, synthetic construct
  misc_feature 1..690: note = Description of Artificial Sequence: Synthetic coding sequence
  source 1..690: mol_type = other DNA
atggccatggaggagcagaaccccggcaccgagttcaccaacaagaacatgctgatgaccgtgatctacctgctgttcgccggcaccatgaccgtgagcaccaccgtgggctacaccctgctgctgctgatgaagtacccccacgtgcagaagtgggtgagagaggagctgaacagagagctgggcgccggccaggcccccagcctgggcgacagaaccagactgccctacaccgacgccgtgctgcacgaggcccagagactgctggccctggtgcccatgggcatccccagaaccctgatgagaaccaccagattcagaggctacaccctgccccagggcaccgaggtgttccccctgctgggcagcatcctgcacgaccccaacatcttcaagcaccccgaggagttcaaccccgacagattcctggacgccgacggcagattcagaaagcacgaggccttcctgcccttcagcctgggcaagagagtgtgcctgggcgagggcctggccaaggccgagctgttcctgttcttcaccaccatcctgcaggccttcagcctggagagcccctgcccccccgacaccctgagcctgaagcccaccgtgagcggcctgttcaacatcccccccgccttccagctgcaggtgagacccaccgacctgcacagcaccacccagaccagatag

SEQ ID NO: 78283 - DNA, 1635 bp, synthetic construct
  misc_feature 1..1635: note = Description of Artificial Sequence: Synthetic coding sequence
  source 1..1635: mol_type = other DNA
atgagcagccccggccccagccagccccccgccgaggaccccccctggcccgccagactgctgagagcccccctgggcctgctgagactggaccccagcggcggcgccctgctgctgtgcggcctggtggccctgctgggctggagctggctgagaagaagaagagccagaggcatcccccccggccccaccccctggcccctggtgggcaacttcggccacgtgctgctgccccccttcctgagaagaagaagctggctgagcagcagaaccagagccgccggcatcgaccccagcgtgatcggcccccaggtgctgctggcccacctggccagagtgtacggcagcatcttcagcttcttcatcggccactacctggtggtggtgctgagcgacttccacagcgtgagagaggccctggtgcagcaggccgaggtgttcagcgacagacccagagtgcccctgatcagcatcgtgaccaaggagaagggcgtggtgttcgcccactacggccccgtgtggagacagcagagaaagttcagccacagcaccctgagacacttcggcctgggcaagctgagcctggagcccaagatcatcgaggagttcaagtacgtgaaggccgagatgcagaagcacggcgaggaccccttctgccccttcagcatcatcagcaacgccgtgagcaacatcatctgcagcctgtgcttcggccagagattcgactacaccaacagcgagttcaagaagatgctgggcttcatgagcagaggcctggagatctgcctgaacagccaggtgctgctggtgaacatctgcccctggctgtactacctgcccttcggccccttcaaggagctgagacagatcgagaaggacatcaccagcttcctgaagaagatcatcaaggaccaccaggagagcctggacagagagaacccccaggacttcatcgacatgtacctgctgcacatggaggaggagagaaagaacaacagcaacagcagcttcgacgaggagtacctgttctacatcatcggcgacctgttcatcgccggcaccgacaccaccaccaacagcctgctgtggtgcctgctgtacatgagcctgaaccccgacgtgcaggagaaggtgcacgaggagatcgagagagtgatcggcgccaacagagcccccagcctgaccgacaaggcccagatgccctacaccgaggccaccatcatggaggtgcagagactgaccgtggtggtgcccctggccatcccccacatgaccagcgagaacaccgtgctgcagggctacaccatccccaagggcaccctgatcctgcccaacctgtggagcgtgcacagagaccccgccatctgggagaagcccgaggacttctaccccaacagattcctggacgaccagggccagctgatcaagaaggagaccttcatccccttcggcatcggcaagagagtgtgcatgggcgagcagctggccaagatggagctgttcctgatgttcgtgagcctgatgcagagcttcgccttcgccctgcccgaggacagcaagaagcccctgctgaccggcagattcggcctgaccctggccccccaccccttcaacatcaccatcagcagaagatag

SEQ ID NO: 78284 - DNA, 1506 bp, synthetic construct
  misc_feature 1..1506: note = Description of Artificial Sequence: Synthetic coding sequence
  source 1..1506: mol_type = other DNA
atgagcagccccggccccagccagccccccgccgaggaccccccctggcccgccagactgctgagagcccccctggtgggcaacttcggccacgtgctgctgccccccttcctgagaagaagaagctggctgagcagcagaaccagagccgccggcatcgaccccagcgtgatcggcccccaggtgctgctggcccacctggccagagtgtacggcagcatcttcagcttcttcatcggccactacctggtggtggtgctgagcgacttccacagcgtgagagaggccctggtgcagcaggccgaggtgttcagcgacagacccagagtgcccctgatcagcatcgtgaccaaggagaagggcgtggtgttcgcccactacggccccgtgtggagacagcagagaaagttcagccacagcaccctgagacacttcggcctgggcaagctgagcctggagcccaagatcatcgaggagttcaagtacgtgaaggccgagatgcagaagcacggcgaggaccccttctgccccttcagcatcatcagcaacgccgtgagcaacatcatctgcagcctgtgcttcggccagagattcgactacaccaacagcgagttcaagaagatgctgggcttcatgagcagaggcctggagatctgcctgaacagccaggtgctgctggtgaacatctgcccctggctgtactacctgcccttcggccccttcaaggagctgagacagatcgagaaggacatcaccagcttcctgaagaagatcatcaaggaccaccaggagagcctggacagagagaacccccaggacttcatcgacatgtacctgctgcacatggaggaggagagaaagaacaacagcaacagcagcttcgacgaggagtacctgttctacatcatcggcgacctgttcatcgccggcaccgacaccaccaccaacagcctgctgtggtgcctgctgtacatgagcctgaaccccgacgtgcaggagaaggtgcacgaggagatcgagagagtgatcggcgccaacagagcccccagcctgaccgacaaggcccagatgccctacaccgaggccaccatcatggaggtgcagagactgaccgtggtggtgcccctggccatcccccacatgaccagcgagaacaccgtgctgcagggctacaccatccccaagggcaccctgatcctgcccaacctgtggagcgtgcacagagaccccgccatctgggagaagcccgaggacttctaccccaacagattcctggacgaccagggccagctgatcaagaaggagaccttcatccccttcggcatcggcaagagagtgtgcatgggcgagcagctggccaagatggagctgttcctgatgttcgtgagcctgatgcagagcttcgccttcgccctgcccgaggacagcaagaagcccctgctgaccggcagattcggcctgaccctggccccccaccccttcaacatcaccatcagcagaagatag

SEQ ID NO: 78285 - DNA, 1398 bp, synthetic construct
  misc_feature 1..1398: note = Description of Artificial Sequence: Synthetic coding sequence
  source 1..1398: mol_type = other DNA
atgctgctgctgggcctgctgctgctgctgcccctgctggccggcgccagactgctgtggaactggtggaagctgagaagcctgcacctgccccccctggcccccggcttcctgcacctgctgcagcccgacctgcccatctacctgctgggcctgacccagaagttcggccccatctacagactgcacctgggcctgcaggacaagctggtgagcagaaactaccccgacctgagcctgggcgactacagcctgctgtggaaggcccacaagaagctgaccagaagcgccctgctgctgggcatcagagacagcatggagcccgtggtggagcagctgacccaggagttctgcgagagaatgagagcccagcccggcacccccgtggccatcgaggaggagttcagcctgctgacctgcagcatcatctgctacctgaccttcggcgacaagatcaaggacgacaacctgatgcccgcctactacaagtgcatccaggaggtgctgaagacctggagccactggagcatccagatcgtggacgtgatccccttcctgagattcttccccaaccccggcctgagaagactgaagcaggccatcgagaagagagaccacatcgtggagatgcagctgagacagcacaaggagagcctggtggccggccagtggagagacatgatggactacatgctgcagggcgtggcccagcccagcatggaggagggcagcggccagctgctggagggccacgtgcacatggccgccgtggacctgctgatcggcggcaccgagaccaccgccaacaccctgagctgggccgtggtgttcctgctgcaccaccccgagatccagcagagactgcaggaggagctggaccacgagctgggccccggcgccagcagcagcagagtgccctacaaggacagagccagactgcccctgctgaacgccaccatcgccgaggtgctgagactgagacccgtggtgcccctggccctgccccacagaaccaccagacccagcagcatcagcggctacgacatccccgagggcaccgtgatcatccccaacctgcagggcgcccacctggacgagaccgtgtgggagagaccccacgagttctggcccgacagattcctggagcccggcaagaacagcagagccctggccttcggctgcggcgccagagtgtgcctgggcgagcccctggccagactggagctgttcgtggtgctgaccagactgctgcaggccttcaccctgctgcccagcggcgacgccctgcccagcctgcagcccctgccccactgcagcgtgatcctgaagatgcagcccttccaggtgagactgcagcccagaggcatgggcgcccacagccccggccagagccagtag

SEQ ID NO: 78286 - DNA, 1488 bp, synthetic construct
  misc_feature 1..1488: note = Description of Artificial Sequence: Synthetic coding sequence
  source 1..1488: mol_type = other DNA
atgctgctgctgggcctgctgctgctgctgcccctgctggccggcgccagactgctgtggaactggtggaagctgagaagcctgcacctgccccccctggcccccggcttcctgcacctgctgcagcccgacctgcccatctacctgctgggcctgacccagaagttcggccccatctacagactgcacctgggcctgcaggacgtggtggtgctgaacagcaagagaaccatcgaggaggccatggtgaagaagtgggccgacttcgccggcagacccgagcccctgacctacaagctggtgagcagaaactaccccgacctgagcctgggcgactacagcctgctgtggaaggcccacaagaagctgaccagaagcgccctgctgctgggcatcagagacagcatggagcccgtggtggagcagctgacccaggagttctgcgagagaatgagagcccagcccggcacccccgtggccatcgaggaggagttcagcctgctgacctgcagcatcatctgctacctgaccttcggcgacaagatcaaggacgacaacctgatgcccgcctactacaagtgcatccaggaggtgctgaagacctggagccactggagcatccagatcgtggacgtgatccccttcctgagattcttccccaaccccggcctgagaagactgaagcaggccatcgagaagagagaccacatcgtggagatgcagctgagacagcacaaggagagcctggtggccggccagtggagagacatgatggactacatgctgcagggcgtggcccagcccagcatggaggagggcagcggccagctgctggagggccacgtgcacatggccgccgtggacctgctgatcggcggcaccgagaccaccgccaacaccctgagctgggccgtggtgttcctgctgcaccaccccgagatccagcagagactgcaggaggagctggaccacgagctgggccccggcgccagcagcagcagagtgccctacaaggacagagccagactgcccctgctgaacgccaccatcgccgaggtgctgagactgagacccgtggtgcccctggccctgccccacagaaccaccagacccagcagcatcagcggctacgacatccccgagggcaccgtgatcatccccaacctgcagggcgcccacctggacgagaccgtgtgggagagaccccacgagttctggcccgacagattcctggagcccggcaagaacagcagagccctggccttcggctgcggcgccagagtgtgcctgggcgagcccctggccagactggagctgttcgtggtgctgaccagactgctgcaggccttcaccctgctgcccagcggcgacgccctgcccagcctgcagcccctgccccactgcagcgtgatcctgaagatgcagcccttccaggtgagactgcagcccagaggcatgggcgcccacagccccggccagagccagtag

SEQ ID NO: 78287 - DNA, 1488 bp, synthetic construct; identical to SEQ ID NO: 78286
  misc_feature 1..1488: note = Description of Artificial Sequence: Synthetic coding sequence
  source 1..1488: mol_type = other DNA

SEQ ID NO: 78288 - DNA, 1398 bp, synthetic construct; identical to SEQ ID NO: 78285
  misc_feature 1..1398: note = Description of Artificial Sequence: Synthetic coding sequence
  source 1..1398: mol_type = other DNA

SEQ ID NO: 78289 - DNA, 1398 bp, synthetic construct; identical to SEQ ID NO: 78285
  misc_feature 1..1398: note = Description of Artificial Sequence: Synthetic coding sequence
  source 1..1398: mol_type = other DNA

SEQ ID NO: 78290 - DNA, 1485 bp, synthetic construct
  misc_feature 1..1485: note = Description of Artificial Sequence: Synthetic coding sequence
  source 1..1485: mol_type = other DNA
atgctgctgctgggcctgctgctgctgcccctgctggccggcgccagactgctgtggaactggtggaagctgagaagcctgcacctgccccccctggcccccggcttcctgcacctgctgcagcccgacctgcccatctacctgctgggcctgacccagaagttcggccccatctacagactgcacctgggcctgcaggacgtggtggtgctgaacagcaagagaaccatcgaggaggccatggtgaagaagtgggccgacttcgccggcagacccgagcccctgacctacaagctggtgagcaagaactaccccgacctgagcctgggcgactacagcctgctgtggaaggcccacaagaagctgaccagaagcgccctgctgctgggcatcagagacagcatggagcccgtggtggagcagctgacccaggagttctgcgagagaatgagagcccagcccggcacccccgtggccatcgaggaggagttcagcctgctgacctgcagcatcatctgctacctgaccttcggcgacaagatcaaggacgacaacctgatgcccgcctactacaagtgcatccaggaggtgctgaagacctggagccactggagcatccagatcgtggacgtgatccccttcctgagattcttccccaaccccggcctgagaagactgaagcaggccatcgagaagagagaccacatcgtggagatgcagctgagacagcacaaggagagcctggtggccggccagtggagagacatgatggactacatgctgcagggcgtggcccagcccagcatggaggagggcagcggccagctgctggagggccacgtgcacatggccgccgtggacctgctgatcggcggcaccgagaccaccgccaacaccctgagctgggccgtggtgttcctgctgcaccaccccgagatccagcagagactgcaggaggagctggaccacgagctgggccccggcgccagcagcagcagagtgccctacaaggacagagccagactgcccctgctgaacgccaccatcgccgaggtgctgagactgagacccgtggtgcccctggccctgccccacagaaccaccagacccagcagcatcagcggctacgacatccccgagggcaccgtgatcatccccaacctgcagggcgcccacctggacgagaccgtgtgggagagaccccacgagttctggcccgacagattcctggagcccggcaagaacagcagagccctggccttcggctgcggcgccagagtgtgcctgggcgagcccctggccagactggagctgttcgtggtgctgaccagactgctgcaggccttcaccctgctgcccagcggcgacgccctgcccagcctgcagcccctgccccactgcagcgtgatcctgaagatgcagcccttccaggtgagactgcagcccagaggcatgggcgcccacagccccggccagaaccagtag

SEQ ID NO: 78291 - DNA, 1485 bp, synthetic construct; identical to SEQ ID NO: 78290
  misc_feature 1..1485: note = Description of Artificial Sequence: Synthetic coding sequence
  source 1..1485: mol_type = other DNA

SEQ ID NO: 78292 - DNA, 1488 bp, synthetic construct; identical to SEQ ID NO: 78286
  misc_feature 1..1488: note = Description of Artificial Sequence: Synthetic coding sequence
  source 1..1488: mol_type = other DNA

SEQ ID NO: 78293 - DNA, 1395 bp, synthetic construct
  misc_feature 1..1395: note = Description of Artificial Sequence: Synthetic coding sequence
  source 1..1395: mol_type = other DNA
atgctgctgctgggcctgctgctgctgcccctgctggccggcgccagactgctgtggaactggtggaagctgagaagcctgcacctgccccccctggcccccggcttcctgcacctgctgcagcccgacctgcccatctacctgctgggcctgacccagaagttcggccccatctacagactgcacctgggcctgcaggacaagctggtgagcaagaactaccccgacctgagcctgggcgactacagcctgctgtggaaggcccacaagaagctgaccagaagcgccctgctgctgggcatcagagacagcatggagcccgtggtggagcagctgacccaggagttctgcgagagaatgagagcccagcccggcacccccgtggccatcgaggaggagttcagcctgctgacctgcagcatcatctgctacctgaccttcggcgacaagatcaaggacgacaacctgatgcccgcctactacaagtgcatccaggaggtgctgaagacctggagccactggagcatccagatcgtggacgtgatccccttcctgagattcttccccaaccccggcctgagaagactgaagcaggccatcgagaagagagaccacatcgtggagatgcagctgagacagcacaaggagagcctggtggccggccagtggagagacatgatggactacatgctgcagggcgtggcccagcccagcatggaggagggcagcggccagctgctggagggccacgtgcacatggccgccgtggacctgctgatcggcggcaccgagaccaccgccaacaccctgagctgggccgtggtgttcctgctgcaccaccccgagatccagcagagactgcaggaggagctggaccacgagctgggccccggcgccagcagcagcagagtgccctacaaggacagagccagactgcccctgctgaacgccaccatcgccgaggtgctgagactgagacccgtggtgcccctggccctgccccacagaaccaccagacccagcagcatcagcggctacgacatccccgagggcaccgtgatcatccccaacctgcagggcgcccacctggacgagaccgtgtgggagagaccccacgagttctggcccgacagattcctggagcccggcaagaacagcagagccctggccttcggctgcggcgccagagtgtgcctgggcgagcccctggccagactggagctgttcgtggtgctgaccagactgctgcaggccttcaccctgctgcccagcggcgacgccctgcccagcctgcagcccctgccccactgcagcgtgatcctgaagatgcagcccttccaggtgagactgcagcccagaggcatgggcgcccacagccccggccagaaccagtag

SEQ ID NO: 78294 - DNA, 1398 bp, synthetic construct; identical to SEQ ID NO: 78285
  misc_feature 1..1398: note = Description of Artificial Sequence: Synthetic coding sequence
  source 1..1398: mol_type = other DNA

SEQ ID NO: 78295 - DNA, 1395 bp, synthetic construct; identical to SEQ ID NO: 78293
  misc_feature 1..1395: note = Description of Artificial Sequence: Synthetic coding sequence
  source 1..1395: mol_type = other DNA

SEQ ID NO: 78296 - DNA, 1488 bp, synthetic construct
  misc_feature 1..1488: note = Description of Artificial Sequence: Synthetic coding sequence
  source 1..1488: mol_type = other DNA
atgctgctgctgggcctgctgctgctgctgcccctgctggccggcgccagactgctgtggaactggtggaagctgagaagcctgcacctgctgcccctggcccccggcttcctgcacctgctgcagcccgacctgcccatctacctgctgggcctgacccagaagttcggccccatctacagactgcacctgggcctgcaggacgtggtggtgctgaacagcaagagaaccatcgaggaggccatggtgaagaagtgggccgacttcgccggcagacccgagcccctgacctacaagctggtgagcaagaactaccccgacctgagcctgggcgactacagcctgctgtggaaggcccacaagaagctgaccagaagcgccctgctgctgggcatcagagacagcatggagcccgtggtggagcagctgacccaggagttctgcgagagaatgagagcccagcccggcacccccgtggccatcgaggaggagttcagcctgctgacctgcagcatcatctgctacctgaccttcggcgacaagatcaaggacgacaacctgatgcccgcctactacaagtgcatccaggaggtgctgaagacctggagccactggagcatccagatcgtggacgtgatccccttcctgagattcttccccaaccccggcctgagaagactgaagcaggccatcgagaagagagaccacatcgtggagatgcagctgagacagcacaaggagagcctggtggccggccagtggagagacatgatggactacatgctgcagggcgtggcccagcccagcatggaggagggcagcggccagctgctggagggccacgtgcacatggccgccgtggacctgctgatcggcggcaccgagaccaccgccaacaccctgagctgggccgtggtgttcctgctgcaccaccccgagatccagcagagactgcaggaggagctggaccacgagctgggccccggcgccagcagcagcagagtgccctacaaggacagagccagactgcccctgctgaacgccaccatcgccgaggtgctgagactgagacccgtggtgcccctggccctgccccacagaaccaccagacccagcagcatcagcggctacgacatccccgagggcaccgtgatcatccccaacctgcagggcgcccacctggacgagaccgtgtgggagagaccccacgagttctggcccgacagattcctggagcccggcaagaacagcagagccctggccttcggctgcggcgccagagtgtgcctgggcgagcccctggccagactggagctgttcgtggtgctgaccagactgctgcaggccttcaccctgctgcccagcggcgacgccctgcccagcctgcagcccctgccccactgcagcgtgatcctgaagatgcagcccttccaggtgagactgcagcccagaggcatgggcgcccacagccccggccagaaccagtag

SEQ ID NO: 78297 - DNA, 1488 bp, synthetic construct
  misc_feature 1..1488: note = Description of Artificial Sequence: Synthetic coding sequence
  source 1..1488: mol_type = other DNA
atgctgctgctgggcctgctgctgctgctgcccctgctggccggcgccagactgctgtggaactggtggaagctgagaagcctgcacctgccccccctggcccccggcttcctgcacctgctgcagcccgacctgcccatctacctgctgggcctgacccagaagttcggccccatctacagactgcacctgggcctgcaggacgtggtggtgctgaacagcaagagaaccatcgaggaggccatggtgaagaagtgggccgacttcgccggcagacccgagcccctgacctacaagctggtgagcaagaactaccccgacctgagcctgggcgactacagcctgctgtggaaggcccacaagaagctgaccagaagcgccctgctgctgggcatcagagacagcatggagcccgtggtggagcagctgacccaggagttctgcgagagaatgagagcccagcccggcacccccgtggccatcgaggaggagttcagcctgctgacctgcagcatcatctgctacctgaccttcggcgacaagatcaaggacgacaacctgatgcccgcctactacaagtgcatccaggaggtgctgaagacctggagccactggagcatccagatcgtggacgtgatccccttcctgagattcttccccaaccccggcctgagaagactgaagcaggccatcgagaagagagaccacatcgtggagatgcagctgagacagcacaaggagagcctggtggccggccagtggagagacatgatggactacatgctgcagggcgtggcccagcccagcatggaggagggcagcggccagctgctggagggccacgtgcacatggccgccgtggacctgctgatcggcggcaccgagaccaccgccaacaccctgagctgggccgtggtgttcctgctgcaccaccccgagatccagcagagactgcaggaggagctggaccacgagctgggccccggcgccagcagcagcagagtgccctacaaggacagagccagactgcccctgctgaacgccaccatcgccgaggtgctgagactgagacccgtggtgcccctggccctgccccacagaaccaccagacccagcagcatcagcggctacgacatccccgagggcaccgtgatcatccccaacctgcagggcgcccacctggacgagaccgtgtgggagagaccccacgagttctggcccgacagattcctggagcccggcaagaacagcagagccctggccttcggctgcggcgccagagtgtgcctgggcgagcccctggccagactggagctgttcgtggtgctgaccagactgctgcaggccttcaccctgctgcccagcggcgacgccctgcccagcctgcagcccctgccccactgcagcgtgatcctgaagatgcagcccttccaggtgagactgcagcccagaggcatgggcgcccacagccccggccagaaccagtag

SEQ ID NO: 78298 - DNA, 1398 bp, synthetic construct
  misc_feature 1..1398: note = Description of Artificial Sequence: Synthetic coding sequence
  source 1..1398: mol_type = other DNA
atgctgctgctgggcctgctgctgctgctgcccctgctggccggcgccagactgctgtggaactggtggaagctgagaagcctgcacctgctgcccctggcccccggcttcctgcacctgctgcagcccgacctgcccatctacctgctgggcctgacccagaagttcggccccatctacagactgcacctgggcctgcaggacaagctggtgagcaagaactaccccgacctgagcctgggcgactacagcctgctgtggaaggcccacaagaagctgaccagaagcgccctgctgctgggcatcagagacagcatggagcccgtggtggagcagctgacccaggagttctgcgagagaatgagagcccagcccggcacccccgtggccatcgaggaggagttcagcctgctgacctgcagcatcatctgctacctgaccttcggcgacaagatcaaggacgacaacctgatgcccgcctactacaagtgcatccaggaggtgctgaagacctggagccactggagcatccagatcgtggacgtgatccccttcctgagattcttccccaaccccggcctgagaagactgaagcaggccatcgagaagagagaccacatcgtggagatgcagctgagacagcacaaggagagcctggtggccggccagtggagagacatgatggactacatgctgcagggcgtggcccagcccagcatggaggagggcagcggccagctgctggagggccacgtgcacatggccgccgtggacctgctgatcggcggcaccgagaccaccgccaacaccctgagctgggccgtggtgttcctgctgcaccaccccgagatccagcagagactgcaggaggagctggaccacgagctgggccccggcgccagcagcagcagagtgccctacaaggacagagccagactgcccctgctgaacgccaccatcgccgaggtgctgagactgagacccgtggtgcccctggccctgccccacagaaccaccagacccagcagcatcagcggctacgacatccccgagggcaccgtgatcatccccaacctgcagggcgcccacctggacgagaccgtgtgggagagaccccacgagttctggcccgacagattcctggagcccggcaagaacagcagagccctggccttcggctgcggcgccagagtgtgcctgggcgagcccctggccagactggagctgttcgtggtgctgaccagactgctgcaggccttcaccctgctgcccagcggcgacgccctgcccagcctgcagcccctgccccactgcagcgtgatcctgaagatgcagcccttccaggtgagactgcagcccagaggcatgggcgcccacagccccggccagaaccagtag

SEQ ID NO: 78299 - DNA, 1704 bp, synthetic construct
  misc_feature 1..1704: note = Description of Artificial Sequence: Synthetic coding sequence
  source 1..1704: mol_type = other DNA
atgcacggcagactgaaggtgaagaccagcgaggagcaggccgaggccaagagactggagagagagcagaagctgaagctgtaccagagcgccacccaggccgtgttccagaagagacaggccggcgagctggacgagagcgtgctggagctgaccagccagatcctgggcgccaaccccgacttcgccaccctgtggaactgcagaagagaggtgctgcagcagctggagacccagaagagccccgaggagctggccgccctggtgaaggccgagctgggcttcctggagagctgcctgagagtgaaccccaagagctacggcacctggcaccacagatgctggctgctgggcagactgcccgagcccaactggaccagagagctggagctgtgcgccagattcctggaggtggacgagagaaacttccactgctgggactacagaagattcgtggccacccaggccgccgtgccccccgccgaggagctggccttcaccgacagcctgatcaccagaaacttcagcaactacagcagctggcactacagaagctgcctgctgccccagctgcacccccagcccgacagcggcccccagggcagactgcccgaggacgtgctgctgaaggagctggagctggtgcagaacgccttcttcaccgaccccaacgaccagagcgcctggttctaccacagatggctgctgggcagagccgacccccaggacgccctgagatgcctgcacgtgagcagagacgaggcctgcctgaccgtgagcttcagcagacccctgctggtgggcagcagaatggagatcctgctgctgatggtggacgacagccccctgatcgtggagtggagaacccccgacggcagaaacagacccagccacgtgtggctgtgcgacctgcccgccgccagcctgaacgaccagctgccccagcacaccttcagagtgatctggaccgccggcgacgtgcagaaggagtgcgtgctgctgaagggcagacaggagggctggtgcagagacagcaccaccgacgagcagctgttcagatgcgagctgagcgtggagaagagcaccgtgctgcagagcgagctggagagctgcaaggagctgcaggagctggagcccgagaacaagtggtgcctgctgaccatcatcctgctgatgagagccctggaccccctgctgtacgagaaggagaccctgcagtacttccagaccctgaaggccgtggaccccatgagagccacctacctggacgacctgagaagcaagttcctgctggagaacagcgtgctgaagatggagtacgccgaggtgagagtgctgcacctggcccacaaggacctgaccgtgctgtgccacctggagcagctgctgctggtgacccacctggacctgagccacaacagactgagaaccctgccccccgccctggccgccctgagatgcctggaggtgctgcaggccagcgacaacgccatcgagagcctggacggcgtgaccaacctgcccagactgcaggagctgctgctgtgcaacaacagactgcagcagcccgccgtgctgcagcccctggccagctgccccagactggtgctgctgaacctgcagggcaaccccctgtgccaggccgtgggcatcctggagcagctggccgagctgctgcccagcgtgagcagcgtgctgacctag

SEQ ID NO: 78300 - DNA, 1347 bp, synthetic construct
  misc_feature 1..1347: note = Description of Artificial Sequence: Synthetic coding sequence
  source 1..1347: mol_type = other DNA
atgagcagccccatcagcaagagcagaagcctggccgccttcctgcagcagctgagaagccccagacagccccccagactggtgaccagcaccgcctacaccagcccccagcccagagaggtgcccgtgtgccccctgaccgccggcggcgagacccagaacgccgccgccctgcccggccccaccagctggcccctgctgggcagcctgctgcagatcctgtggaagggcggcctgaagaagcagcacgacaccctggtggagtaccacaagaagtacggcaagatcttcagaatgaagctgggcagcttcgagagcgtgcacctgggcagcccctgcctgctggaggccctgtacagaaccgagagcgcctacccccagagactggagatcaagccctggaaggcctacagagactacagaaaggagggctacggcctgctgatcctggagggcgaggactggcagagagtgagaagcgccttccagaagaagctgatgaagcccggcgaggtgatgaagctggacaacaagatcaacgaggtgctggccgacttcatgggcagaatcgacgagctgtgcgacgagagaggccacgtggaggacctgtacagcgagctgaacaagtggagcttcgagagcatctgcctggtgctgtacgagaagagattcggcctgctgcagaagaacgccggcgacgaggccgtgaacttcatcatggccatcaagaccatgatgagcaccttcggcagaatgatggtgacccccgtggagctgcacaagagcctgaacaccaaggtgtggcaggaccacaccctggcctgggacaccatcttcaagagcgtgaaggcctgcatcgacaacagactggagaagtacagccagcagcccagcgccgacttcctgtgcgacatctaccaccagaacagactgagcaagaaggagctgtacgccgccgtgaccgagctgcagctggccgccgtggagaccaccgccaacagcctgatgtggatcctgtacaacctgagcagaaacccccaggtgcagcagaagctgctgaaggagatccagagcgtgctgcccgagaaccaggtgcccagagccgaggacctgagaaacatgccctacctgaaggcctgcctgaaggagagcatgagactgacccccagcgtgcccttcaccaccagaaccctggacaaggccaccgtgctgggcgagtacgccctgcccaagggcatcgtgagaaagtacgacatccaggccaccgacaacgagcccgtggagatgctgcacagcggcaccctggtgcccagcagagagctgcccatcgccttctgccagagatag

SEQ ID NO: 78301 - DNA, 1371 bp, synthetic construct
  misc_feature 1..1371: note = Description of Artificial Sequence: Synthetic coding sequence
  source 1..1371: mol_type = other DNA
atggacaagctgaacaagatcaccgtgcccgccagccagaagctgagacagctgcagaagatggtgcacgacatcaagaacaacgagggcggcatcatgaacaagatcaagaagctgaaggtgaaggccccccccagcgtgcccagaagagactacgccagcgagagccccgccgacgaggaggagcagtggagcgacgacttcgacagcgactacgagaaccccgacgagcacagcgacagcgagatgtacgtgatgcccgccgaggagaacgccgacgacagctacgagcccccccccgtggagcaggagaccagacccgtgcaccccgccctgcccttcgccagaggcgagtacatcgacaacagaagcagccagagacacagcccccccttcagcaagaccctgcccagcaagcccagctggcccagcgagaaggccagactgaccagcaccctgcccgccctgaccgccctgcagaagccccaggtgccccccaagcccaagggcctgctggaggacgaggccgactacgtggtgcccgtggaggacaacgacgagaactacatccaccccaccgagagcagcagccccccccccgagaaggcccccatggtgaacagaagcaccaagcccaacagcagcacccccgccagcccccccggcaccgccagcggcagaaacagcggcgcctgggagaccaagagccccccccccgccgcccccagccccctgcccagagccggcaagaagcccaccacccccctgaagaccacccccgtggccagccagcagaacgccagcagcgtgtgcgaggagaagcccatccccgccgagagacacagaggcagcagccacagacaggaggccgtgcagagccccgtgttcccccccgcccagaagcagatccaccagaagcccatccccctgcccagattcaccgagggcggcaaccccaccgtggacggccccctgcccagcttcagcagcaacagcaccatcagcgagcaggaggccggcgtgctgtgcaagccctggtacgccggcgcctgcgacagaaagagcgccgaggaggccctgcacagaagcaacaaggacggcagcttcctgatcagaaagagcagcggccacgacagcaagcagccctacaccctggtggtgttcttcaacaagagagtgtacaacatccccgtgagattcatcgaggccaccaagcagtacgccctgggcagaaagaagaacggcgaggagtacttcggcagcgtggccgagatcatcagaaaccaccagcacagccccctggtgctgatcgacagccagaacaacaccaaggacagcaccagactgaagtacgccgtgaaggtgagctag

SEQ ID NO: 78302 - DNA, 1287 bp, synthetic construct
  misc_feature 1..1287: note = Description of Artificial Sequence: Synthetic coding sequence
  source 1..1287: mol_type = other DNA
atgaagagaagaaagtacggcttcatctacaagacccacctgttcggcagacccaccgtgagagtgatgggcgccgacaacgtgagaagaatcctgctgggcgagcacagactggtgagcgtgcactggcccgccagcgtgagaaccatcctgggcagcggctgcctgagcaacctgcacgacagcagccacaagcagagaaagaaggtgatcatgagagccttcagcagagaggccctggagtgctacgtgcccgtgatcaccgaggaggtgggcagcagcctggagcagtggctgagctgcggcgagagaggcctgctggtgtaccccgaggtgaagagactgatgttcagaatcgccatgagaatcctgctgggctgcgagccccagctggccggcgacggcgacagcgagcagcagctggtggaggccttcgaggagatgaccagaaacctgttcagcctgcccatcgacgtgcccttcagcggcctgtacagaggcatgaaggccagaaacctgatccacgccagaatcgagcagaacatcagagccaagatctgcggcctgagagccagcgaggccggccagggctgcaaggacgccctgcagctgctgatcgagcacagctgggagagaggcgagagactggacatgcaggccctgaagcagagcagcaccgagctgctgttcggcggccacgagaccaccgccagcgccgccaccagcctgatcacctacctgggcctgtacccccacgtgctgcagaaggtgagagaggagctgaagagcaagggcctgctgtgcaagagcaaccaggacaacaagctggacatggagatcctggagcagctgaagtacatcggctgcgtgatcaaggagaccctgagactgaacccccccgtgcccggcggcttcagagtggccctgaagaccttcgagctgaacggctaccagatccccaagggctggaacgtgatctacagcatctgcgacacccacgacgtggccgagatcttcaccaacaaggaggagttcaaccccgacagattcatgctgccccaccccgaggacgccagcagattcagcttcatccccttcggcggcggcctgagaagctgcgtgggcaaggagttcgccaagatcctgctgaagatcttcaccgtggagctggccagacactgcgactggcagctgctgaacggcccccccaccatgaagaccagccccaccgtgtaccccgtggacaacctgcccgccagattcacccacttccacggcgagatctag

SEQ ID NO: 78303 - DNA, 1287 bp, synthetic construct; identical to SEQ ID NO: 78302
  misc_feature 1..1287: note = Description of Artificial Sequence: Synthetic coding sequence
  source 1..1287: mol_type = other DNA

SEQ ID NO: 78304 - DNA, 1569 bp, synthetic construct
  misc_feature 1..1569: note = Description of Artificial Sequence: Synthetic coding sequence
  source 1..1569: mol_type = other DNA
atgttcccctggggcctgagctgcctgagcgtgctgggcgccgccggcaccgccctgctgtgcgccggcctgctgctgagcctggcccagcacctgtggaccctgagatggatgctgagcagagacagagccagcaccctgcccctgcccaagggcagcatgggctggcccttcttcggcgagaccctgcactggctggtgcagggcagcagattccacagcagcagaagagagagatacggcaccgtgttcaagacccacctgctgggcagacccgtgatcagagtgagcggcgccgagaacgtgagaaccatcctgctgggcgagcacagactggtgagaagccagtggccccagagcgcccacatcctgctgggcagccacaccctgctgggcgccgtgggcgagccccacagaagaagaagaaaggtgctggccagagtgttcagcagagccgccctggagagatacgtgcccagactgcagggcgccctgagacacgaggtgagaagctggtgcgccgccggcggccccgtgagcgtgtacgacgccagcaaggccctgaccttcagaatggccgccagaatcctgctgggcctgagactggacgaggcccagtgcgccaccctggccagaaccttcgagcagctggtggagaacctgttcagcctgcccctggacgtgcccttcagcggcctgagaaagggcatcagagccagagaccagctgcacagacacctggagggcgccatcagcgagaagctgcacgaggacaaggccgccgagcccggcgacgccctggacctgatcatccacagcgccagagagctgggccacgagcccagcatgcaggagctgaaggagagcgccgtggagctgctgttcgccgccttcttcaccaccgccagcgccagcaccagcctggtgctgctgctgctgcagcaccccgccgccatcgccaagatcagagaggagctggtggcccagggcctgggcagagcctgcggctgcgcccccggcgccgccggcggcagcgagggccccccccccgactgcggctgcgagcccgacctgagcctggccgccctgggcagactgagatacgtggactgcgtggtgaaggaggtgctgagactgctgccccccgtgagcggcggctacagaaccgccctgagaaccttcgagctggacggctaccagatccccaagggctggagcgtgatgtacagcatcagagacacccacgagaccgccgccgtgtacagaagcccccccgagggcttcgaccccgagagattcggcgccgccagagaggacagcagaggcgccagcagcagattccactacatccccttcggcggcggcgccagaagctgcctgggccaggagctggcccaggccgtgctgcagctgctggccgtggagctggtgagaaccgccagatgggagctggccacccccgccttccccgccatgcagaccgtgcccatcgtgcaccccgtggacggcctgagactgttcttccaccccctgacccccagcgtggccggcaacggcctgtgcctgtag

SEQ ID NO: 78305 - DNA, 1596 bp, synthetic construct
  misc_feature 1..1596: note = Description of Artificial Sequence: Synthetic coding sequence
  source 1..1596: mol_type = other DNA
atggccgccctgggctgcgccagactgagatgggccctgagaggcgccggcagaggcctgtgcccccacggcgccagagccaaggccgccatccccgccgccctgcccagcgacaaggccaccggcgcccccggcgccggccccggcgtgagaagaagacagagaagcctggaggagatccccagactgggccagctgagattcttcttccagctgttcgtgcagggctacgccctgcagctgcaccagctgcaggtgctgtacaaggccaagtacggccccatgtggatgagctacctgggcccccagatgcacgtgaacctggccagcgcccccctgctggagcaggtgatgagacaggagggcaagtaccccgtgagaaacgacatggagctgtggaaggagcacagagaccagcacgacctgacctacggccccttcaccaccgagggccaccactggtaccagctgagacaggccctgaaccagagactgctgaagcccgccgaggccgccctgtacaccgacgccttcaacgaggtgatcgacgacttcatgaccagactggaccagctgagagccgagagcgccagcggcaaccaggtgagcgacatggcccagctgttctactacttcgccctggaggccatctgctacatcctgttcgagaagagaatcggctgcctgcagagaagcatccccgaggacaccgtgaccttcgtgagaagcatcggcctgatgttccagaacagcctgtacgccaccttcctgcccaagtggaccagacccgtgctgcccttctggaagagatacctggacggctggaacgccatcttcagcttcggcaagaagctgatcgacgagaagctggaggacatggaggcccagctgcaggccgccggccccgacggcatccaggtgagcggctacctgcacttcctgctggccagcggccagctgagccccagagaggccatgggcagcctgcccgagctgctgatggccggcgtggacaccaccagcaacaccctgacctgggccctgtaccacctgagcaaggaccccgagatccaggaggccctgcacgaggaggtggtgggcgtggtgcccgccggccaggtgccccagcacaaggacttcgcccacatgcccctgctgaaggccgtgctgaaggagaccctgagactgtaccccgtggtgcccaccaacagcagaatcatcgagaaggagatcgaggtggacggcttcctgttccccaagaacacccagttcgtgttctgccactacgtggtgagcagagaccccaccgccttcagcgagcccgagagcttccagccccacagatggctgagaaacagccagcccgccacccccagaatccagcaccccttcggcagcgtgcccttcggctacggcgtgagagcctgcctgggcagaagaatcgccgagctggagatgcagctgctgctggccagactgatccagaagtacaaggtggtgctggcccccgagaccggcgagctgaagagcgtggccagaatcgtgctggtgcccaacaagaaggtgggcctgcagttcctgcagagacagtgctag

SEQ ID NO: 78306 - DNA, 1572 bp, synthetic construct
  misc_feature 1..1572: note = Description of Artificial Sequence: Synthetic coding sequence
  source 1..1572: mol_type = other DNA
atgagcttccacaaggaggacggcgtgaacagcctgtgccagaaggccctgcacatcgtgaccgagctgtgcttcgccggccaggtggagtgggagaagtgcagcggcatcttccccagagacagaggcagccagggcggcagcagcaccgacatcagcgtgagcctgctggccgtggtggtgagcttctgcggcctggccctgctggtggtgagcctgttcgtgttctggaagctgtgctggccctgctggaagagcaagcccgtgaccagcaacatcaccaccctgccccagagcatcagcagcgcccccaccgaggtgttcgagaccgaggagaagaaggagatcaaggagaacgagaagcccgccgtgaaggccatcgagcccgccatcaagatcagccacaccagccccgacatccccgccgaggtgcagaccgccctgaaggagcacctgatcaagcacgccagagtgcagagacagatcaccgagcccaccagcagcaccagacacagcagcttcagaagacacctgcccagacagatgcaggtgagcagcgtggacttcagcatgggcaccgagcccgtgctgcagagaggcgagaccaccaccagcatcggcagaatcaagcccgagctgtacaagcagaagagcgtggacagcgagggcaaccagaacgaggacgtgaagatctgcggcaagctgaacttcaccctgcagtacgactacgagaacgagctgctggtggtgaagatcatcaaggccctggacctgcccgccaaggacttcaccggcaccagcgacccctacgtgaagatgtacctgctgcccgacagaaagaagaagttccagaccagagtgcacagaaagaccctgaaccccctgttcgacgagaccttccagttccccgtggcctacgaccagctgagcaacagaaagctgcacttcagcgtgtacgacttcgacagattcagcagacacgacatgatcggcgaggtgatcctggacaacctgttcgaggtgagcgacctgagcagagaggccaccgtgtggaaggacatccactgcgccaccaccgagagcatcgacctgggcgagatcatgttcagcctgtgctacctgcccaccgccggcagaatgaccctgaccgtgatcaagtgcagaaacctgaaggccatggacatcaccggcagcagcgacccctacgtgaaggtgagcctgatgtgcgagggcagaagactgaagaagagaaagaccaccaccaagaagaacaccctgaaccccgtgtacaacgaggccatcatcttcgacatcccccccgagaacgtggaccaggtgagcctgagcatcgccgtgatggactacgacagagtgggccacaacgaggtgatcggcgtgtgcagaaccggcctggacgccgagggcctgggcagagaccactggaacgagatgctggcctaccacagaaagcccatcacccactggcaccccctgctggagctgcccggcagagccaccagcttcgacagccagggcagctgccccagccccaagccccccagcaccccctag

SEQ ID NO: 78307 - DNA, 1512 bp, synthetic construct
  misc_feature 1..1512: note = Description of Artificial Sequence: Synthetic coding sequence
  source 1..1512: mol_type = other DNA
atggccctgatccccgacctggccatggagacctggctgctgctggccgtgagcctggtgctgctgtacctgtacggcacccacagccacggcctgttcaagaagctgggcatccccggccccacccccctgcccttcctgggcaacatcctgagctaccacaagggcttctgcatgttcgacatggagtgccacaagaagtacggcaaggtgtggggcttctacgacggccagcagcccgtgctggccatcaccgaccccgacatgatcaagaccgtgctggtgaaggagtgctacagcgtgttcaccaacagaagacccttcggccccgtgggcttcatgaagagcgccatcagcatcgccgaggacgaggagtggaagagactgagaagcctgctgagccccaccttcaccagcggcaagctgaaggagatggtgcccatcatcgcccagtacggcgacgtgctggtgagaaacctgagaagagaggccgagaccggcaagcccgtgaccctgaaggacgtgttcggcgcctacagcatggacgtgatcaccagcaccagcttcggcgtgaacatcgacagcctgaacaacccccaggaccccttcgtggagaacaccaagaagctgctgagattcgacttcctggaccccttcttcctgagcatcaccgtgttccccttcctgatccccatcctggaggtgctgaacatctgcgtgttccccagagaggtgaccaacttcctgagaaagagcgtgaagagaatgaaggagagcagactggaggacacccagaagcacagagtggacttcctgcagctgatgatcgacagccagaacagcaaggagaccgagagccacaaggccctgagcgacctggagctggtggcccagagcatcatcttcatcttcgccggctacgagaccaccagcagcgtgctgagcttcatcatgtacgagctggccacccaccccgacgtgcagcagaagctgcaggaggagatcgacgccgtgctgcccaacaaggccccccccacctacgacaccgtgctgcagatggagtacctggacatggtggtgaacgagaccctgagactgttccccatcgccatgagactggagagagtgtgcaagaaggacgtggagatcaacggcatgttcatccccaagggcgtggtggtgatgatccccagctacgccctgcacagagaccccaagtactggaccgagcccgagaagttcctgcccgagagattcagcaagaagaacaaggacaacatcgacccctacatctacacccccttcggcagcggccccagaaactgcatcggcatgagattcgccctgatgaacatgaagctggccctgatcagagtgctgcagaacttcagcttcaagccctgcaaggagacccagatccccctgaagctgagcctgggcggcctgctgcagcccgagaagcccgtggtgctgaaggtggagagcagagacggcaccgtgagcggcgcctag

SEQ ID NO: 78308 - DNA, 1062 bp, synthetic construct
  misc_feature 1..1062: note = Description of Artificial Sequence: Synthetic coding sequence
  source 1..1062: mol_type = other DNA
atggccctgatccccgacctggccatggagacctggctgctgctggccgtgagcctggtgctgctgtacctggtgttcggcgcctacagcatggacgtgatcaccagcaccagcttcggcgtgaacatcgacagcctgaacaacccccaggaccccttcgtggagaacaccaagaagctgctgagattcgacttcctggaccccttcttcctgagcatcaccgtgttccccttcctgatccccatcctggaggtgctgaacatctgcgtgttccccagagaggtgaccaacttcctgagaaagagcgtgaagagaatgaaggagagcagactggaggacacccagaagcacagagtggacttcctgcagctgatgatcgacagccagaacagcaaggagaccgagagccacaaggccctgagcgacctggagctggtggcccagagcatcatcttcatcttcgccggctacgagaccaccagcagcgtgctgagcttcatcatgtacgagctggccacccaccccgacgtgcagcagaagctgcaggaggagatcgacgccgtgctgcccaacaaggccccccccacctacgacaccgtgctgcagatggagtacctggacatggtggtgaacgagaccctgagactgttccccatcgccatgagactggagagagtgtgcaagaaggacgtggagatcaacggcatgttcatccccaagggcgtggtggtgatgatccccagctacgccctgcacagagaccccaagtactggaccgagcccgagaagttcctgcccgagagattcagcaagaagaacaaggacaacatcgacccctacatctacacccccttcggcagcggccccagaaactgcatcggcatgagattcgccctgatgaacatgaagctggccctgatcagagtgctgcagaacttcagcttcaagccctgcaaggagacccagatccccctgaagctgagcctgggcggcctgctgcagcccgagaagcccgtggtgctgaaggtggagagcagagacggcaccgtgagcggcgcctag

SEQ ID NO: 78309 - DNA, 240 bp, synthetic construct
  misc_feature 1..240: note = Description of Artificial Sequence: Synthetic coding sequence
  source 1..240: mol_type = other DNA
atggtgcccatcatcgcccagtacggcgacgtgctggtgagaaacctgagaagagaggccgagaccggcaagcccgtgaccctgaaggacgtgttcggcgcctacagcatggacgtgatcaccagcaccagcttcggcgtgaacatcgacagcctgaacaacccccaggaccccttcgtggagaacaccaagaagctgctgagattcgacttcctggaccccttcttcctgagcatctag

SEQ ID NO: 78310 - DNA, 1068 bp, synthetic construct
  misc_feature 1..1068: note = Description of Artificial Sequence: Synthetic coding sequence
  source 1..1068: mol_type = other DNA
atggccaagctgatcgccctgaccctgctgggcatgggcctggccctgttcagaaaccaccagagcagctaccagaccagactgaacgccctgagagaggtgcagcccgtggagctgcccaactgcaacctggtgaagggcatcgagaccggcagcgaggacctggagatcctgcccaacggcctggccttcatcagcagcggcctgaagtaccccggcatcaagagcttcaaccccaacagccccggcaagatcctgctgatggacctgaacgaggaggaccccaccgtgctggagctgggcatcaccggcagcaagttcgacgtgagcagcttcaacccccacggcatcagcaccttcaccgacgaggacaacgccatgtacctgctggtggtgaaccaccccgacgccaagagcaccgtggagctgttcaagttccaggaggaggagaagagcctgctgcacctgaagaccatcagacacaagctgctgcccaacctgaacgacatcgtggccgtgggccccgagcacttctacggcaccaacgaccactacttcctggacccctacctgcagagctgggagatgtacctgggcctggcctggagctacgtggtgtactacagccccagcgaggtgagagtggtggccgagggcttcgacttcgccaacggcatcaacatcagccccgacggcaagtacgtgtacatcgccgagctgctggcccacaagatccacgtgtacgagaagcacgccaactggaccctgacccccctgaagagcctggacttcaacaccctggtggacaacatcagcgtggaccccgagaccggcgacctgtgggtgggctgccaccccaacggcatgaagatcttcttctacgacagcgagaacccccccgccagcgaggtgctgagaatccagaacatcctgaccgaggagcccaaggtgacccaggtgtacgccgagaacggcaccgtgctgcagggcagcaccgtggccagcgtgtacaagggcaagctgctgatcggcaccgtgttccacaaggccctgtactgcgagctgtag

SEQ ID NO: 78311 - DNA, 1263 bp, synthetic construct
  misc_feature 1..1263: note = Description of Artificial Sequence: Synthetic coding sequence
  source 1..1263: mol_type = other DNA
atggacctgatccccaacttcgccatggagacctgggtgctggtggccaccagcctggtgctgctgtacatctacggcacccacagccacaagctgttcaagaagctgggcatccccggccccacccccctgcccttcctgggcaccatcctgttctacctgagaggcctgtggaacttcgacagagagtgcaacgagaagtacggcgagatgtggggcctgtacgagggccagcagcccatgctggtgatcatggaccccgacatgatcaagaccgtgctggtgaaggagtgctacagcgtgttcaccaaccagatgcccctgggccccatgggcttcctgaagagcgccctgagcttcgccgaggacgaggagtggaagagaatcagaaccctgctgagccccgccttcaccagcgtgaagttcaaggagatggtgcccatcatcagccagtgcggcgacatgctggtgagaagcctgagacaggaggccgagaacagcaagagcatcaacctgaaggacttcttcggcgcctacaccatggacgtgatcaccggcaccctgttcggcgtgaacctggacagcctgaacaacccccaggaccccttcctgaagaacatgaagaagctgctgaagctggacttcctggaccccttcctgctgctgatcagcctgttccccttcctgacccccgtgttcgaggccctgaacatcggcctgttccccaaggacgtgacccacttcctgaagaacagcatcgagagaatgaaggagagcagactgaaggacaagcagaagcacagagtggacttcttccagcagatgatcgacagccagaacagcaaggagaccaagagccacaaggccctgagcgacctggagctggtggcccagagcatcatcatcatcttcgccgcctacgacaccaccagcaccaccctgcccttcatcatgtacgagctggccacccaccccgacgtgcagcagaagctgcaggaggagatcgacgccgtgctgcccaacaaggcccccgtgacctacgacgccctggtgcagatggagtacctggacatggtggtgaacgagaccctgagactgttccccgtggtgagcagagtgaccagagtgtgcaagaaggacatcgagatcaacggcgtgttcatccccaagggcctggccgtgatggtgcccatctacgccctgcaccacgaccccaagtactggaccgagcccgagaagttctgccccgagagaagccactag

SEQ ID NO: 78312 - DNA, 843 bp, synthetic construct
  misc_feature 1..843: note = Description of Artificial Sequence: Synthetic coding sequence
  source 1..843: mol_type = other DNA
atgaacctggagaccggcaacggcccccaccacttccccatgtggagatacgtgggcgagaagcccgaggccggcagcagagagcagcaggtgcaccagctggagagattcctgtggggcctgcaccacggctgcaaccactggcacatcatctggagcgagctgggcttcagccagcagagcaccagaagcctgagcgagaagtacgaggaggccttcaagatcggcttcttcggcagcctgttcaccctgaacatccagagcctggccgtgctgcccagacccgagtgcatggtgagaagcggcctgaccgagaccagcaccagctgggtgagagtgatcctgctgccccagccccccgaggagctgggcctgcagcacagagtggacttcttccagcagatgatcgacagccagaacagcaaggagaccaagagccacaaggccctgagcgacctggagctggtggcccagagcatcatcatcatcttcgccgcctacgacaccaccagcaccaccctgcccttcatcatgtacgagctggccacccaccccgacgtgcagcagaagctgcaggaggagatcgacgccgtgctgcccaacaaggcccccgtgacctacgacgccctggtgcagatggagtacctggacatggtggtgaacgagaccctgagactgttccccgtggtgagcagagtgaccagagtgtgcaagaaggacatcgagatcaacggcgtgttcatccccaagggcctggccgtgatggtgcccatctacgccctgcaccacgaccccaagtactggaccgagcccgagaagttctgccccgagagaagccactag

SEQ ID NO: 78313 - DNA, 1512 bp, synthetic construct
  misc_feature 1..1512: note = Description of Artificial Sequence: Synthetic coding sequence
  source 1..1512: mol_type = other DNA
atggacctgatccccaacttcgccatggagacctgggtgctggtggccaccagcctggtgctgctgtacatctacggcacccacagccacaagctgttcaagaagctgggcatccccggccccacccccctgcccttcctgggcaccatcctgttctacctgagaggcctgtggaacttcgacagagagtgcaacgagaagtacggcgagatgtggggcctgtacgagggccagcagcccatgctggtgatcatggaccccgacatgatcaagaccgtgctggtgaaggagtgctacagcgtgttcaccaaccagatgcccctgggccccatgggcttcctgaagagcgccctgagcttcgccgaggacgaggagtggaagagaatcagaaccctgctgagccccgccttcaccagcgtgaagttcaaggagatggtgcccatcatcagccagtgcggcgacatgctggtgagaagcctgagacaggaggccgagaacagcaagagcatcaacctgaaggacttcttcggcgcctacaccatggacgtgatcaccggcaccctgttcggcgtgaacctggacagcctgaacaacccccaggaccccttcctgaagaacatgaagaagctgctgaagctggacttcctggaccccttcctgctgctgatcagcctgttccccttcctgacccccgtgttcgaggccctgaacatcggcctgttccccaaggacgtgacccacttcctgaagaacagcatcgagagaatgaaggagagcagactgaaggacaagcagaagcacagagtggacttcttccagcagatgatcgacagccagaacagcaaggagaccaagagccacaaggccctgagcgacctggagctggtggcccagagcatcatcatcatcttcgccgcctacgacaccaccagcaccaccctgcccttcatcatgtacgagctggccacccaccccgacgtgcagcagaagctgcaggaggagatcgacgccgtgctgcccaacaaggcccccgtgacctacgacgccctggtgcagatggagtacctggacatggtggtgaacgagaccctgagactgttccccgtggtgagcagagtgaccagagtgtgcaagaaggacatcgagatcaacggcgtgttcatccccaagggcctggccgtgatggtgcccatctacgccctgcaccacgaccccaagtactggaccgagcccgagaagttctgccccgagagattcagcaagaagaacaaggacagcatcgacctgtacagatacatccccttcggcgccggccccagaaactgcatcggcatgagattcgccctgaccaacatcaagctggccgtgatcagagccctgcagaacttcagcttcaagccctgcaaggagacccagatccccctgaagctggacaacctgcccatcctgcagcccgagaagcccatcgtgctgaaggtgcacctgagagacggcatcaccagcggcccctag

SEQ ID NO: 78314 - DNA, 381 bp, synthetic construct
  misc_feature 1..381: note = Description of Artificial Sequence: Synthetic coding sequence
  source 1..381: mol_type = other DNA
atggacctgatccccaacttcgccatggagacctgggtgctggtggccaccagcctggtgctgctgtacatctacggcacccacagccacaagctgttcaagaagctgggcatccccggccccacccccctgcccttcctgggcaccatcctgttctacctgagaggcctgtggaacttcgacagagagtgcaacgagaagttcctgtggggcctgcaccacggctgcaaccactggcacatcatctggagcgagctgggcttcagccagcagagcaccagaagcctgagcgagaagtacgaggaggccttcaagatcggcttcttcggcagcctgttcaccctgaacatcaccctgagcatcagctaccccagcttctag

SEQ ID NO: 78315 - DNA, 225 bp, synthetic construct
  misc_feature 1..225: note = Description of Artificial Sequence: Synthetic coding sequence
  source 1..225: mol_type = other DNA
atggacctgatccccaacttcgccatggagacctgggtgctggtggccaccagcctggtgctgctgtacatctacggcacccacagccacaagctgttcaagaagctgggcatccccggccccacccccctgcccttcctgggcaccatcctgttctacctgagaggcctgtggaacttcgacagagagtgcaacgagaagtacggcgagatgtggggcccctag

SEQ ID NO: 78316 - DNA, 435 bp, synthetic construct
  misc_feature 1..435: note = Description of Artificial Sequence: Synthetic coding sequence
  source 1..435: mol_type = other DNA
atgcccaaggtgaagagaagcagaaaggccccccccgacggctgggagctgatcgagcccaccctggacgagctggaccagaagatgagagaggccgagaccgagccccacgagggcaagagaaaggtggagagcctgtggcccatcttcagaatccaccaccagaagaccagatacatcttcgacctgttctacaagagaaaggccatcagcagagagctgtacgagtactgcatcaaggagggctacgccgacaagaacctgatcgccaagtggaagaagcagggctacgagaacctgtgctgcctgagatgcatccagaccagagacaccaacttcggcaccaactgcatctgcagagtgcccaagagcaagctggaggtgggcagaatcatcgagtgcacccactgcggctgcagaggctgcagcggctag

SEQ ID NO: 78317 - DNA, 120 bp, synthetic construct
  misc_feature 1..120: note = Description of Artificial Sequence: Synthetic coding sequence
  source 1..120: mol_type = other DNA
atggacctgatccccaacctggccgtggagacctggctgctgctggccgtgagcctggtgctgctgtacctgatgagagtgcccaagagcgccaagagccccctgaccaagcagacctag

SEQ ID NO: 78318 - DNA, 1479 bp, synthetic construct
  misc_feature 1..1479: note = Description of Artificial Sequence: Synthetic coding sequence
  source 1..1479: mol_type = other DNA
atgcagctgctgatgctggagctgctgctgctgttcatcgtgtacggcaccagaacccacggcctgttcaagagactgggcatccccggccccacccccctgcccctgctgggcaacgtgctgagctacagacagggcctgtggaagttcgacaccgagtgctacaagaagtacggcaagatgtggggcacctacgagggccagctgcccgtgctggccatcaccgaccccgacgtgatcagaaccgtgctggtgaaggagtgctacagcgtgttcaccaacagaagaagcctgggccccgtgggcttcatgaagagcgccatcagcctggccgaggacgaggagtggaagagaatcagaagcctgctgagccccaccttcaccagcggcaagctgaaggagatgttccccatcatcgcccagtacggcgacgtgctggtgagaaacctgagaagagaggccgagaagggcaagcccgtgaccctgaaggacatcttcggcgcctacagcatggacgtgatcaccggcaccagcttcggcgtgaacatcgacagcctgaacaacccccaggaccccttcgtggagagcaccaagaagttcctgaagttcggcttcctggaccccctgttcctgagcatcatcctgttccccttcctgacccccgtgttcgaggccctgaacgtgagcctgttccccaaggacaccatcaacttcctgagcaagagcgtgaacagaatgaagaagagcagactgaacgacaagcagaagcacagactggacttcctgcagctgatgatcgacagccagaacagcaaggagaccgagagccacaaggccctgagcgacctggagctggccgcccagagcatcatcttcatcttcgccggctacgagaccaccagcagcgtgctgagcttcaccctgtacgagctggccacccaccccgacgtgcagcagaagctgcagaaggagatcgacgccgtgctgcccaacaaggccccccccacctacgacgccgtggtgcagatggagtacctggacatggtggtgaacgagaccctgagactgttccccgtggccatcagactggagagaacctgcaagaaggacgtggagatcaacggcgtgttcatccccaagggcagcatggtggtgatccccacctacgccctgcaccacgaccccaagtactggaccgagcccgaggagttcagacccgagagattcagcaagaagaaggacagcatcgacccctacatctacacccccttcggcaccggccccagaaactgcatcggcatgagattcgccctgatgaacatgaagctggccctgatcagagtgctgcagaacttcagcttcaagccctgcaaggagacccagatccccctgaagctggacacccagggcctgctgcagcccgagaagcccatcgtgctgaaggtggacagcagagacggcaccctgagcggcgagtag

SEQ ID NO: 78319 - DNA, 1602 bp, synthetic construct
  misc_feature 1..1602: note = Description of Artificial Sequence: Synthetic coding sequence
  source 1..1602: mol_type = other DNA
atggacctgatccccaacctggccgtggagacctggctgctgctggccgtgagcctgatcctgctgtacctgtacggcaccagaacccacggcctgttcaagaagctgggcatccccggccccacccccctgcccttcctgggcaacgccctgagcttcagaaagggctactggaccttcgacatggagtgctacaagaagtacagaaaggtgtggggcatctacgactgccagcagcccatgctggccatcaccgaccccgacatgatcaagaccgtgctggtgaaggagtgctacagcgtgttcaccaacagaagacccttcggccccgtgggcttcatgaagaacgccatcagcatcgccgaggacgaggagtggaagagaatcagaagcctgctgagccccaccttcaccagcggcaagctgaaggagatggtgcccatcatcgcccagtacggcgacgtgctggtgagaaacctgagaagagaggccgagaccggcaagcccgtgaccctgaagcacgtgttcggcgcctacagcatggacgtgatcaccagcaccagcttcggcgtgagcatcgacagcctgaacaacccccaggaccccttcgtggagaacaccaagaagctgctgagattcaaccccctggaccccttcgtgctgagcatcaaggtgttccccttcctgacccccatcctggaggccctgaacatcaccgtgttccccagaaaggtgatcagcttcctgaccaagagcgtgaagcagatcaaggagggcagactgaaggagacccagaagcacagagtggacttcctgcagctgatgatcgacagccagaacagcaaggacagcgagacccacaaggccctgagcgacctggagctgatggcccagagcatcatcttcatcttcgccggctacgagaccaccagcagcgtgctgagcttcatcatctacgagctggccacccaccccgacgtgcagcagaaggtgcagaaggagatcgacaccgtgctgcccaacaaggccccccccacctacgacaccgtgctgcagctggagtacctggacatggtggtgaacgagaccctgagactgttccccgtggccatgagactggagagagtgtgcaagaaggacgtggagatcaacggcatgttcatccccaagggcgtggtggtgatgatccccagctacgtgctgcaccacgaccccaagtactggagagagcccgagaagttcctgcccgagagattcagcaagaagaacaaggacaacatcgacccctacatctacacccccttcggcagcggccccagaaactgcatcggcatgagattcgccctggtgaacatgaagctggccctggtgagagtgctgcagaacttcagcttcaagccctgcaaggagacccagatccccctgaagctgagattcggcggcctgctgctgaccgagaagcccatcgtgctgaaggccgagagcagagacgagaccttcgtggacatggagcccatccacatggacttcctgagaagcctggccttccagggcccccacctgtgcttcttctgggagctgctgtgccccaccatcagatag

SEQ ID NO: 78320 - DNA, 1512 bp, synthetic construct
  misc_feature 1..1512: note = Description of Artificial Sequence: Synthetic coding sequence
  source 1..1512: mol_type = other DNA
atggacctgatccccaacctggccgtggagacctggctgctgctggccgtgagcctgatcctgctgtacctgtacggcaccagaacccacggcctgttcaagaagctgggcatccccggccccacccccctgcccttcctgggcaacgccctgagcttcagaaagggctactggaccttcgacatggagtgctacaagaagtacagaaaggtgtggggcatctacgactgccagcagcccatgctggccatcaccgaccccgacatgatcaagaccgtgctggtgaaggagtgctacagcgtgttcaccaacagaagacccttcggccccgtgggcttcatgaagaacgccatcagcatcgccgaggacgaggagtggaagagaatcagaagcctgctgagccccaccttcaccagcggcaagctgaaggagatggtgcccatcatcgcccagtacggcgacgtgctggtgagaaacctgagaagagaggccgagaccggcaagcccgtgaccctgaagcacgtgttcggcgcctacagcatggacgtgatcaccagcaccagcttcggcgtgagcatcgacagcctgaacaacccccaggaccccttcgtggagaacaccaagaagctgctgagattcaaccccctggaccccttcgtgctgagcatcaaggtgttccccttcctgacccccatcctggaggccctgaacatcaccgtgttccccagaaaggtgatcagcttcctgaccaagagcgtgaagcagatcaaggagggcagactgaaggagacccagaagcacagagtggacttcctgcagctgatgatcgacagccagaacagcaaggacagcgagacccacaaggccctgagcgacctggagctgatggcccagagcatcatcttcatcttcgccggctacgagaccaccagcagcgtgctgagcttcatcatctacgagctggccacccaccccgacgtgcagcagaaggtgcagaaggagatcgacaccgtgctgcccaacaaggccccccccacctacgacaccgtgctgcagctggagtacctggacatggtggtgaacgagaccctgagactgttccccgtggccatgagactggagagagtgtgcaagaaggacgtggagatcaacggcatgttcatccccaagggcgtggtggtgatgatccccagctacgtgctgcaccacgaccccaagtactggagagagcccgagaagttcctgcccgagagattcagcaagaagaacaaggacaacatcgacccctacatctacacccccttcggcagcggccccagaaactgcatcggcatgagattcgccctggtgaacatgaagctggccctggtgagagtgctgcagaacttcagcttcaagccctgcaaggagacccagatccccctgaagctgagattcggcggcctgctgctgaccgagaagcccatcgtgctgaaggccgagagcagagacgagaccgtgagcggcgcctag

SEQ ID NO: 78321 - DNA, 1410 bp, synthetic construct
  misc_feature 1..1410: note = Description of Artificial Sequence: Synthetic coding sequence
  source 1..1410: mol_type = other DNA
atggagctgatcagccccaccgtgatcatcatcctgggctgcctggccctgttcctgctgctgcagagaaagaacctgagaagacccccctgcatcaagggctggatcccctggatcggcgtgggcttcgagttcggcaaggcccccctggagttcatcgagaaggccagaatcaagtacggccccatcttcaccgtgttcgccatgggcaacagaatgaccttcgtgaccgaggaggagggcatcaacgtgttcctgaagagcaagaaggtggacttcgagctggccgtgcagaacatcgtgtacagaaccgccagcatccccaagaacgtgttcctggccctgcacgagaagctgtacatcatgctgaagggcaagatgggcaccgtgaacctgcaccagttcaccggccagctgaccgaggagctgcacgagcagctggagaacctgggcacccacggcaccatggacctgaacaacctggtgagacacctgctgtaccccgtgaccgtgaacatgctgttcaacaagagcctgttcagcaccaacaagaagaagatcaaggagttccaccagtacttccaggtgtacgacgaggacttcgagtacggcagccagctgcccgagtgcctgctgagaaactggagcaagagcaagaagtggttcctggagctgttcgagaagaacatccccgacatcaaggcctgcaagagcgccaaggacaacagcatgaccctgctgcaggccaccctggacatcgtggagaccgagaccagcaaggagaacagccccaactacggcctgctgctgctgtgggccagcctgagcaacgccgtgcccgtggccttctggaccctggcctacgtgctgagccaccccgacatccacaaggccatcatggagggcatcagcagcgtgttcggcaaggccggcaaggacaagatcaaggtgagcgaggacgacctggagaacctgctgctgatcaagtggtgcgtgctggagaccatcagactgaaggcccccggcgtgatcaccagaaaggtggtgaagcccgtggagatcctgaactacatcatccccagcggcgacctgctgatgctgagccccttctggctgcacagaaaccccaagtacttccccgagcccgagctgttcaagcccgagagatggaagaaggccaacctggagaagcacagcttcctggactgcttcatggccttcggcagcggcaagttccagtgccccgccagatggttcgccctgctggaggtgcagatgtgcatcatcctgatcctgtacaagtacgactgcagcctgctggaccccctgcccaagcagagctacctgcacctggtgggcgtgccccagcccgagggccagtgcagaatcgagtacaagcagagaatctag

SEQ ID NO: 78322 - DNA, 1560 bp, synthetic construct
  misc_feature 1..1560: note = Description of Artificial Sequence: Synthetic coding sequence
  source 1..1560: mol_type = other DNA
atgagcgtgagcgtgctgagccccagcagactgctgggcgacgtgagcggcatcctgcaggccgccagcctgctgatcctgctgctgctgctgatcaaggccgtgcagctgtacctgcacagacagtggctgctgaaggccctgcagcagttcccctgcccccccagccactggctgttcggccacatccaggagctgcagcaggaccaggagctgcagagaatccagaagtgggtggagaccttccccagcgcctgcccccactggctgtggggcggcaaggtgagagtgcagctgtacgaccccgactacatgaaggtgatcctgggcagaagcgaccccaagagccacggcagctacagattcctggccccctggatcggctacggcctgctgctgctgaacggccagacctggttccagcacagaagaatgctgacccccgccttccactacgacatcctgaagccctacgtgggcctgatggccgacagcgtgagagtgatgctggacaagtgggaggagctgctgggccaggacagccccctggaggtgttccagcacgtgagcctgatgaccctggacaccatcatgaagtgcgccttcagccaccagggcagcatccaggtggacagaaacagccagagctacatccaggccatcagcgacctgaacaacctggtgttcagcagagtgagaaacgccttccaccagaacgacaccatctacagcctgaccagcgccggcagatggacccacagagcctgccagctggcccaccagcacaccgaccaggtgatccagctgagaaaggcccagctgcagaaggagggcgagctggagaagatcaagagaaagagacacctggacttcctggacatcctgctgctggccaagatggagaacggcagcatcctgagcgacaaggacctgagagccgaggtggacaccttcatgttcgagggccacgacaccaccgccagcggcatcagctggatcctgtacgccctggccacccaccccaagcaccaggagagatgcagagaggagatccacagcctgctgggcgacggcgccagcatcacctggaaccacctggaccagatgccctacaccaccatgtgcatcaaggaggccctgagactgtacccccccgtgcccggcatcggcagagagctgagcacccccgtgaccttccccgacggcagaagcctgcccaagggcatcatggtgctgctgagcatctacggcctgcaccacaaccccaaggtgtggcccaaccccgaggtgttcgaccccttcagattcgcccccggcagcgcccagcacagccacgccttcctgcccttcagcggcggcagcagaaactgcatcggcaagcagttcgccatgaacgagctgaaggtggccaccgccctgaccctgctgagattcgagctgctgcccgaccccaccagaatccccatccccatcgccagactggtgctgaagagcaagaacggcatccacctgagactgagaagactgcccaacccctgcgaggacaaggaccagctgtag

SEQ ID NO: 78323 - DNA, 1563 bp, synthetic construct
  misc_feature 1..1563: note = Description of Artificial Sequence: Synthetic coding sequence
  source 1..1563: mol_type = other DNA
atgagcgtgagcgtgctgagccccagcagactgctgggcgacgtgagcggcatcctgcaggccgccagcctgctgatcctgctgctgctgctgatcaaggccgtgcagctgtacctgcacagacagtggctgctgaaggccctgcagcagttcccctgcccccccagccactggctgttcggccacatccaggagctgcagcaggaccaggagctgcagagaatccagaagtgggtggagaccttccccagcgcctgcccccactggctgtggggcggcaaggtgagagtgcagctgtacgaccccgactacatgaaggtgatcctgggcagaagcgaccccaagagccacggcagctacagattcctggccccctggatcggctacggcctgctgctgctgaacggccagacctggttccagcacagaagaatgctgacccccgccttccactacgacatcctgaagccctacgtgggcctgatggccgacagcgtgagagtgatgctggacaagtgggaggagctgctgggccaggacagccccctggaggtgttccagcacgtgagcctgatgaccctggacaccatcatgaagtgcgccttcagccaccagggcagcatccaggtggacagaaacagccagagctacatccaggccatcagcgacctgaacaacctggtgttcagcagagtgagaaacgccttccaccagaacgacaccatctacagcctgaccagcgccggcagatggacccacagagcctgccagctggcccaccagcacaccggcgaccaggtgatccagctgagaaaggcccagctgcagaaggagggcgagctggagaagatcaagagaaagagacacctggacttcctggacatcctgctgctggccaagatggagaacggcagcatcctgagcgacaaggacctgagagccgaggtggacaccttcatgttcgagggccacgacaccaccgccagcggcatcagctggatcctgtacgccctggccacccaccccaagcaccaggagagatgcagagaggagatccacagcctgctgggcgacggcgccagcatcacctggaaccacctggaccagatgccctacaccaccatgtgcatcaaggaggccctgagactgtacccccccgtgcccggcatcggcagagagctgagcacccccgtgaccttccccgacggcagaagcctgcccaagggcatcatggtgctgctgagcatctacggcctgcaccacaaccccaaggtgtggcccaaccccgaggtgttcgaccccttcagattcgcccccggcagcgcccagcacagccacgccttcctgcccttcagcggcggcagcagaaactgcatcggcaagcagttcgccatgaacgagctgaaggtggccaccgccctgaccctgctgagattcgagctgctgcccgaccccaccagaatccccatccccatcgccagactggtgctgaagagcaagaacggcatccacctgagactgagaagactgcccaacccctgcgaggacaaggaccagctgtag

SEQ ID NO: 78324 - DNA, 1368 bp, synthetic construct
  misc_feature 1..1368: note = Description of Artificial Sequence: Synthetic coding sequence
  source 1..1368: mol_type = other DNA
atgagcgtgagcgtgctgagccccagcagactgctgggcgacgtgagcggcatcctgcaggccgccagcctgctgatcctgctgctgctgctgatcaaggccgtgcagctgtacctgcacagacagtggctgctgaaggccctgcagcagttcccctgcccccccagccactggctgttcggccacatccaggagctgcagcaggaccaggagctgcagagaatccagaagtgggtggagaccttccccagcgcctgcccccactggctgtggggcggcaaggtgagagtgcagctgtacgaccccgactacatgaaggtgatcctgggcagaagcgaccccaagagccacggcagctacagattcctggccccctggatcggctacggcctgctgctgctgaacggccagacctggttccagcacagaagaatgctgacccccgccttccactacgacatcctgaagccctacgtgggcctgatggccgacagcgtgagagtgatgctggacaagtgggaggagctgctgggccaggacagccccctggaggtgttccagcacgtgagcctgatgaccctggacaccatcatgaagtgcgccttcagccaccagggcagcatccaggtggacagaaacagccagagctacatccaggccatcagcgacctgaacaacctggtgttcagcagagtgagaaacgccttccaccagaacgacaccatctacagcctgaccagcgccggcagatggacccacagagcctgccagctggcccaccagcacaccgaccaggtgatccagctgagaaaggcccagctgcagaaggagggcgagctggagaagatcaagagaaagagacacctggacttcctggacatcctgctgctggccaagatggagaacggcagcatcctgagcgacaaggacctgagagccgaggtggacaccttcatgttcgagggccacgacaccaccgccagcggcatcagctggatcctgtacgccctggccacccaccccaagcaccaggagagatgcagagaggagatccacagcctgctgggcgacggcgccagcatcacctggaaccacctggaccagatgccctacaccaccatgtgcatcaaggaggccctgagactgtacccccccgtgcccggcatcggcagagagctgagcacccccgtgaccttccccgacggcagaagcctgcccaagggcatcatggtgctgctgagcatctacggcctgcaccacaaccccaaggtgtggcccaaccccgaggtgttcgaccccttcagattcgcccccggcagcgcccagcacagccacgccttcctgcccttcagcggcggcagcagatag

SEQ ID NO: 78325 - DNA, 474 bp, synthetic construct
  misc_feature 1..474: note = Description of Artificial Sequence: Synthetic coding sequence
  source 1..474: mol_type = other DNA
atgaaggtgatcctgggcagaagcgaccccaagagccacggcagctacagattcctggccccctggatcggctacggcctgctgctgctgaacggccagacctggttccagcacagaagaatgctgacccccgccttccactacgacatcctgaagccctacgtgggcctgatggccgacagcgtgagagtgatgctggacaagtgggaggagctgctgggccaggacagccccctggaggtgttccagcacgtgagcctgatgaccctggacaccatcatgaagtgcgccttcagccaccagggcagcatccaggtggacagacccagcgaccccaccgaggagggcagcaccaccgagggcggcggcgccggcgaggaccaggaggaggaggccttcggcttcagcggctacccccccctgggccagaacggcgagtgggagcacctggtgagacagggccccccctgctag

SEQ ID NO: 78326 - DNA, 1575 bp, synthetic construct
  misc_feature 1..1575: note = Description of Artificial Sequence: Synthetic coding sequence
  source 1..1575: mol_type = other DNA
atgccccagctgagcctgagctggctgggcctgggccccgtggccgccagcccctggctgctgctgctgctggtgggcggcagctggctgctggccagagtgctggcctggacctacaccttctacgacaactgcagaagactgcagtgcttcccccagccccccaagcagaactggttctggggccaccagggcctggtgacccccaccgaggagggcatgaagaccctgacccagctggtgaccacctacccccagggcttcaagctgtggctgggccccaccttccccctgctgatcctgtgccaccccgacatcatcagacccatcaccagcgccagcgccgccgtggcccccaaggacatgatcttctacggcttcctgaagccctggctgggcgacggcctgctgctgagcggcggcgacaagtggagcagacacagaagaatgctgacccccgccttccacttcaacatcctgaagccctacatgaagatcttcaacaagagcgtgaacatcatgcacgacaagtggcagagactggccagcgagggcagcgccagactggacatgttcgagcacatcagcctgatgaccctggacagcctgcagaagtgcgtgttcagcttcgagagcaactgccaggagaagcccagcgagtacatcgccgccatcctggagctgagcgccttcgtggagaagagaaaccagcagatcctgctgcacaccgacttcctgtactacctgacccccgacggccagagattcagaagagcctgccacctggtgcacgacttcaccgacgccgtgatccaggagagaagatgcaccctgcccacccagggcatcgacgacttcctgaagaacaaggccaagagcaagaccctggacttcatcgacgtgctgctgctgagcaaggacgaggacggcaaggagctgagcgacgaggacatcagagccgaggccgacaccttcatgttcgagggccacgacaccaccgccagcggcctgagctgggtgctgtaccacctggccaagcaccccgagtaccaggagcagtgcagacaggaggtgcaggagctgctgaaggacagagagcccatcgagatcgagtgggacgacctggcccagctgcccttcctgaccatgtgcatcaaggagagcctgagactgcacccccccgtgcccgtgatcagcagatgctgcacccaggacttcgtgctgcccgacggcagagtgatccccaagggcatcgtgtgcctgatcaacatcatcggcatccactacaaccccaccgtgtggcccgaccccgaggtgtacgaccccttcagattcgaccaggagaacatcaaggagagaagccccctggccttcatccccttcagcgccggccccagaaactgcatcggccaggccttcgccatggccgagatgaaggtggtgctggccctgaccctgctgcacttcagaatcctgcccacccacaccgagcccagaagaaagcccgagctgatcctgagagccgagggcggcctgtggctgagagtggagcccctgggcgccaacagccagtag

SEQ ID NO: 78327 - DNA, 1365 bp, synthetic construct
  misc_feature 1..1365: note = Description of Artificial Sequence: Synthetic coding sequence
  source 1..1365: mol_type = other DNA
atgccccagctgagcctgagctggctgggcctgggccccgtggccgccagcccctggctgctgctgctgctggtgggcggcagctggctgctggccagagtgctggcctggacctacaccttctacgacaactgcagaagactgcagtgcttcccccagccccccaagcagaactggttctggggccaccagggcctggtgacccccaccgaggagggcatgaagaccctgacccagctggtgaccacctacccccagggcttcaagctgtggctgggccccaccttccccctgctgatcctgtgccaccccgacatcatcagacccatcaccagcgccagcgccgccgtggcccccaaggacatgatcttctacggcttcctgaagccctggctgggcgacggcctgctgctgagcggcggcgacaagtggagcagacacagaagaatgctgacccccgccttccacttcaacatcctgaagccctacatgaagatcttcaacaagagcgtgaacatcatgcacgacaagtggcagagactggccagcgagggcagcgccagactggacatgttcgagcacatcagcctgatgaccctggacagcctgcagaagtgcgtgttcagcttcgagagcaactgccaggagaagcccagcgagtacatcgccgccatcctggagctgagcgccttcgtggagaagagaaaccagcagatcctgctgcacaccgacttcctgtactacctgacccccgacggccagagattcagaagagcctgccacctggtgcacgacttcaccgacgccgtgatccaggagagaagatgcaccctgcccacccagggcatcgacgacttcctgaagaacaaggccaagagcaagaccctggacttcatcgacgtgctgctgctgagcaaggacgaggacggcaaggagctgagcgacgaggacatcagagccgaggccgacaccttcatgttcgagggccacgacaccaccgccagcggcctgagctgggtgctgtaccacctggccaagcaccccgagtaccaggagcagtgcagacaggaggtgcaggagctgctgaaggacagagagcccatcgagatcgagtgggacgacctggcccagctgcccttcctgaccatgtgcatcaaggagagcctgagactgcacccccccgtgcccgtgatcagcagatgctgcacccaggacttcgtgctgcccgacggcagagtgatccccaagggcctgagacccctgcccttcagacccagagagcaccagggcgaggtgaccagcggcttctacagcctgctgggcagagcccagaagctgcacagagccggcgtgagacacggctag

SEQ ID NO: 78328 - DNA, 1575 bp, synthetic construct; identical to SEQ ID NO: 78326
  misc_feature 1..1575: note = Description of Artificial Sequence: Synthetic coding sequence
  source 1..1575: mol_type = other DNA

SEQ ID NO: 78329 - DNA, 1575 bp, synthetic construct
  misc_feature 1..1575: note = Description of Artificial Sequence: Synthetic coding sequence
  source 1..1575: mol_type = other DNA
atgagcctgctgagcctgccctggctgggcctgagacccgtggccaccagcccctggctgctgctgctgctggtggtgggcagctggctgctggccagaatcctggcctggacctacgccttctacaacaactgcagaagactgcagtgcttcccccagccccccaagagaaactggttctggggccacctgggcctgatcacccccaccgaggagggcctgaagaacagcacccagatgagcgccacctacagccagggcttcaccatctggctgggccccatcatccccttcatcgtgctgtgccaccccgacaccatcagaagcatcaccaacgccagcgccgccatcgcccccaaggacaacctgttcatcagattcctgaagccctggctgggcgagggcatcctgctgagcggcggcgacaagtggagcagacacagaagaatgctgacccccgccttccacttcaacatcctgaagagctacatcaccatcttcaacaagagcgccaacatcatgctggacaagtggcagcacctggccagcgagggcagcagctgcctggacatgttcgagcacatcagcctgatgaccctggacagcctgcagaagtgcatcttcagcttcgacagccactgccaggagagacccagcgagtacatcgccaccatcctggagctgagcgccctggtggagaagagaagccagcacatcctgcagcacatggacttcctgtactacctgagccacgacggcagaagattccacagagcctgcagactggtgcacgacttcaccgacgccgtgatcagagagagaagaagaaccctgcccacccagggcatcgacgacttcttcaaggacaaggccaagagcaagaccctggacttcatcgacgtgctgctgctgagcaaggacgaggacggcaaggccctgagcgacgaggacatcagagccgaggccgacaccttcatgttcggcggccacgacaccaccgccagcggcctgagctgggtgctgtacaacctggccagacaccccgagtaccaggagagatgcagacaggaggtgcaggagctgctgaaggacagagaccccaaggagatcgagtgggacgacctggcccagctgcccttcctgaccatgtgcgtgaaggagagcctgagactgcacccccccgcccccttcatcagcagatgctgcacccaggacatcgtgctgcccgacggcagagtgatccccaagggcatcacctgcctgatcgacatcatcggcgtgcaccacaaccccaccgtgtggcccgaccccgaggtgtacgaccccttcagattcgaccccgagaacagcaagggcagaagccccctggccttcatccccttcagcgccggccccagaaactgcatcggccaggccttcgccatggccgagatgaaggtggtgctggccctgatgctgctgcacttcagattcctgcccgaccacaccgagcccagaagaaagctggagctgatcatgagagccgagggcggcctgtggctgagagtggagcccctgaacgtgagcctgcagtag

SEQ ID NO: 78330 - DNA, 1575 bp, synthetic construct; identical to SEQ ID NO: 78329
  misc_feature 1..1575: note = Description of Artificial Sequence: Synthetic coding sequence
  source 1..1575: mol_type = other DNA

SEQ ID NO: 78331 - DNA, 1596 bp, synthetic construct
  misc_feature 1..1596: note = Description of Artificial Sequence: Synthetic coding sequence
  source 1..1596: mol_type = other DNA
atgctgcccatcaccgacagactgctgcacctgctgggcctggagaagaccgccttcagaatctacgccgtgagcaccctgctgctgttcctgctgttcttcctgttcagactgctgctgagattcctgagactgtgcagaagcttctacatcacctgcagaagactgagatgcttcccccagccccccagaagaaactggctgctgggccacctgggcatgtacctgcccaacgaggccggcctgcaggacgagaagaaggtgctggacaacatgcaccacgtgctgctggtgtggatgggccccgtgctgcccctgctggtgctggtgcaccccgactacatcaagcccctgctgggcgccagcgccgccatcgcccccaaggacgacctgttctacggcttcctgaagccctggctgggcgacggcctgctgctgagcaagggcgacaagtggagcagacacagaagactgctgacccccgccttccacttcgacatcctgaagccctacatgaagatcttcaaccagagcgccgacatcatgcacgccaagtggagacacctggccgagggcagcgccgtgagcctggacatgttcgagcacatcagcctgatgaccctggacagcctgcagaagtgcgtgttcagctacaacagcaactgccaggagaagatgagcgactacatcagcgccatcatcgagctgagcgccctgagcgtgagaagacagtacagactgcaccactacctggacttcatctactacagaagcgccgacggcagaagattcagacaggcctgcgacatggtgcaccacttcaccaccgaggtgatccaggagagaagaagagccctgagacagcagggcgccgaggcctggctgaaggccaagcagggcaagaccctggacttcatcgacgtgctgctgctggccagagacgaggacggcaaggagctgagcgacgaggacatcagagccgaggccgacaccttcatgttcgagggccacgacaccaccagcagcggcatcagctggatgctgttcaacctggccaagtaccccgagtaccaggagaagtgcagagaggagatccaggaggtgatgaagggcagagagctggaggagctggagtgggacgacctgacccagctgcccttcaccaccatgtgcatcaaggagagcctgagacagtacccccccgtgaccctggtgagcagacagtgcaccgaggacatcaagctgcccgacggcagaatcatccccaagggcatcatctgcctggtgagcatctacggcacccaccacaaccccaccgtgtggcccgacagcaaggtgtacaacccctacagattcgaccccgacaacccccagcagagaagccccctggcctacgtgcccttcagcgccggccccagaaactgcatcggccagagcttcgccatggccgagctgagagtggtggtggccctgaccctgctgagattcagactgagcgtggacagaaccagaaaggtgagaagaaagcccgagctgatcctgagaaccgagaacggcctgtggctgaaggtggagcccctgccccccagagcctag

SEQ ID NO: 78332 - DNA, 1782 bp, synthetic construct
  misc_feature 1..1782: note = Description of Artificial Sequence: Synthetic coding sequence
  source 1..1782: mol_type = other DNA
atggcccccagcggcctgaaggccgtggtgggcgagaagatcctgagcggcgtgatcagaagcgtgaagaaggacggcgagtggaaggtgctgatcatggaccaccccagcatgagaatcctgagcagctgctgcaagatgagcgacatcctggccgagggcatcaccatcgtggaggacatcaacaagagaagagagcccatccccagcctggaggccatctacctgctgagccccaccgagaagagcgtgcaggccctgatcaaggacttccagggcacccccaccttcacctacaaggccgcccacatcttcttcaccgacacctgccccgagcccctgttcagcgagctgggcagaagcagactggccaaggtggtgaagaccctgaaggagatccacctggccttcctgccctacgaggcccaggtgttcagcctggacgccccccacagcacctacaacctgtactgccccttcagagccgaggagagaaccagacagctggaggtgctggcccagcagatcgccaccctgtgcgccaccctgcaggagtaccccgccatcagatacagaaagggccccgaggacaccgcccagctggcccacgccgtgctggccaagctgaacgccttcaaggccgacacccccagcctgggcgagggccccgagaagaccagaagccagctgctgatcatggacagagccgccgaccccgtgagccccctgctgcacgagctgaccttccaggccatggcctacgacctgctggacatcgagcaggacacctacagatacgagaccaccggcctgagcgaggccagagagaaggccgtgctgctggacgaggacgacgacctgtgggtggagctgagacacatgcacatcgccgacgtgagcaagaaggtgaccgagctgctgagaaccttctgcgagagcaagagactgaccaccgacaaggccaacatcaaggacctgagccagatcctgaagaagatgccccagtaccagaaggagctgaacaagtacagcacccacctgcacctggccgacgactgcatgaagcacttcaagggcagcgtggagaagctgtgcagcgtggagcaggacctggccatgggcagcgacgccgagggcgagaagatcaaggacagcatgaagctgatcgtgcccgtgctgctggacgccgccgtgcccgcctacgacaagatcagagtgctgctgctgtacatcctgctgagaaacggcgtgagcgaggagaacctggccaagctgatccagcacgccaacgtgcaggcccacagcagcctgatcagaaacctggagcagctgggcggcaccgtgaccaaccccggcggcagcggcaccagcagcagactggagcccagagagagaatggagcccacctaccagctgagcagatggacccccgtgatcaaggacgtgatggaggacgccgtggaggacagactggacagaaacctgtggcccttcgtgagcgaccccgcccccaccgccagcagccaggccgccgtgagcgccagattcggccactggcacaagaacaaggccggcatcgaggccagagccggccccagactgatcgtgtacgtgatgggcggcgtggccatgagcgagatgagagccgcctacgaggtgaccagagccaccgagggcaagtgggaggtgctgatcggcagcagccacatcctgacccccaccagattcctggacgacctgaaggccctggacaagaagctggaggacatcgccctgccctag

SEQ ID NO: 78333 - DNA, 1344 bp, synthetic construct
  misc_feature 1..1344: note = Description of Artificial Sequence: Synthetic coding sequence
  source 1..1344: mol_type = other DNA
atgagagtgctgacccagctggtggccacctacccccagggcttcaaggtgtggatgggccccatcttccccgtgatcagattctgccaccccaacatcatcagaagcgtgatcaacgccagcgccgccatcgtgcccaaggacaaggtgttctacagcttcctgaagccctggctgggcgacggcctgctgctgagcgccggcgagaagtggagcagacacagaagaatgctgacccccgccttccacttcaacatcctgaagccctacatgaagatcttcaacgagagcgtgaacatcatgcacgccaagtggcagctgctggccagcgagggcagcgccagactggacatgttcgagcacatcagcctgatgaccctggacagcctgcagaagtgcgtgttcagcttcgacagccactgccaggagaagcccagcgagtacatcgccgccatcctggagctgagcgccctggtgaccaagagacaccagcagatcctgctgtacatcgacttcctgtactacctgacccccgacggccagagattcagaagagcctgcagactggtgcacgacttcaccgacgccgtgatccaggagagaagaagaaccctgcccagccagggcgtggacgacttcctgcaggccaaggccaagagcaagaccctggacttcatcgacgtgctgctgctgagcaaggacgaggacggcaagaagctgagcgacgaggacatcagagccgaggccgacaccttcatgttcgagggccacgacaccaccgccagcggcctgagctgggtgctgtaccacctggccaagcaccccgagtaccaggagagatgcagacaggaggtgcaggagctgctgaaggacagagagcccaaggagatcgagtgggacgacctggcccagctgcccttcctgaccatgtgcatcaaggagagcctgagactgcacccccccgtgcccgccgtgagcagatgctgcacccaggacatcgtgctgcccgacggcagagtgatccccaagggcatcatctgcctgatcagcgtgttcggcacccaccacaaccccgccgtgtggcccgaccccgaggtgtacgaccccttcagattcgaccccaagaacatcaaggagagaagccccctggccttcatccccttcagcgccggccccagaaactgcatcggccaggccttcgccatggccgagatgaaggtggtgctgggcctgaccctgctgagattcagagtgctgcccgaccacaccgagcccagaagaaagcccgagctggtgctgagagccgagggcggcctgtggctgagagtggagcccctgagctag

SEQ ID NO: 78334 - DNA, 999 bp, synthetic construct
  misc_feature 1..999: note = Description of Artificial Sequence: Synthetic coding sequence
  source 1..999: mol_type = other DNA
atgcccagcatcaccaccgccgccgccagcggcgtgagcagaagccccggcaacagaaccggcagctgggtgacctgggcctggaagcccagcgagtacatcaccgccatcatggagctgagcgccctggtggtgaagagaaacaaccagttcttcagatacaaggacttcctgtacttcctgaccccctgcggcagaagattccacagagcctgcagactggtgcacgacttcaccgacgccgtgatccaggagagaagaagaaccctgaccagccagggcgtggacgacttcctgcaggccaaggccaagagcaagaccctggacttcatcgacgtgctgctgctgagcgaggacaagaacggcaaggagctgagcgacgaggacatcagagccgaggccgacaccttcatgttcggcggccacgacaccaccgccagcggcctgagctgggtgctgtacaacctggccagacaccccgagtaccaggagagatgcagacaggaggtgcaggagctgctgaaggacagagagcccaaggagatcgagtgggacgacctggcccagctgcccttcctgaccatgtgcctgaaggagagcctgagactgcacccccccatccccaccttcgccagaggctgcacccaggacgtggtgctgcccgacagcagagtgatccccaagggcaacgtgtgcaacatcaacatcttcgccatccaccacaaccccagcgtgtggcccgaccccgaggtgtacgaccccttcagattcgaccccgagaacgcccagaagagaagccccatggccttcatccccttcagcgccggccccagaaactgcatcggccagaagttcgccatggccgagatgaaggtggtgctggccctgaccctgctgagattcagaatcctgcccgaccacagagagcccagaagaacccccgagatcgtgctgagagccgaggacggcctgtggctgagagtggagcccctgggctag

SEQ ID NO: 78335 - DNA, 1560 bp, synthetic construct
  misc_feature 1..1560: note = Description of Artificial Sequence: Synthetic coding sequence
  source 1..1560: mol_type = other DNA
atgagcctgctgagcctgagctggctgggcctgagacccgtggccgccagcccctggctgctgctgctggtggtgggcgccagctggctgctggccagaatcctggcctggacctacgccttctaccacaacggcagaagactgagatgcttcccccagcccagaaagcagaactggttcctgggccacctgggcctggtgacccccaccgaggagggcctgagagtgctgacccagctggtggccacctacccccagggcttcgtgagatggctgggccccatcacccccatcatcaacctgtgccaccccgacatcgtgagaagcgtgatcaacaccagcgacgccatcaccgacaaggacatcgtgttctacaagaccctgaagccctggctgggcgacggcctgctgctgagcgtgggcgacaagtggagacaccacagaagactgacccccgccttccacttcaacatcctgaagccctacatcaagatcttcagcaagagcgccaacatcatgcacgccaagtggcagagactggccatggagggcagcacctgcctggacgtgttcgagcacatcagcctgatgaccctggacagcctgcagaagtgcatcttcagcttcgacagcaactgccaggagaagcccagcgagtacatcaccgccatcatggagctgagcgccctggtggtgaagagaaacaaccagttcttcagatacaaggacttcctgtacttcctgaccccctgcggcagaagattccacagagcctgcagactggtgcacgacttcaccgacgccgtgatccaggagagaagaagaaccctgaccagccagggcgtggacgacttcctgcaggccaaggccaagagcaagaccctggacttcatcgacgtgctgctgctgagcgaggacaagaacggcaaggagctgagcgacgaggacatcagagccgaggccgacaccttcatgttcggcggccacgacaccaccgccagcggcctgagctgggtgctgtacaacctggccagacaccccgagtaccaggagagatgcagacaggaggtgcaggagctgctgaaggacagagagcccaaggagatcgagtgggacgacctggcccagctgcccttcctgaccatgtgcctgaaggagagcctgagactgcacccccccatccccaccttcgccagaggctgcacccaggacgtggtgctgcccgacagcagagtgatccccaagggcaacgtgtgcaacatcaacatcttcgccatccaccacaaccccagcgtgtggcccgaccccgaggtgtacgaccccttcagattcgaccccgagaacgcccagaagagaagccccatggccttcatccccttcagcgccggccccagaaactgcatcggccagaagttcgccatggccgagatgaaggtggtgctggccctgaccctgctgagattcagaatcctgcccgaccacagagagcccagaagaacccccgagatcgtgctgagagccgaggacggcctgtggctgagagtggagcccctgggctag

SEQ ID NO: 78336 - DNA, 804 bp, synthetic construct
  misc_feature 1..804: note = Description of Artificial Sequence: Synthetic coding sequence
  source 1..804: mol_type = other DNA
acccccgccttccacttcaacatcctgaagccctacatcaagatcttcagcaagagcgccaacatcatgcacgccaagtggcagagactggccatggagggcagcacctgcctggacgtgttcgagcacatcagcctgatgaccctggacagcctgcagaagtgcatcttcagcttcgacagcaactgccaggagaagcccagcgagtacatcaccgccatcatggagctgagcgccctggtggtgaagagaaacaaccagttcttcagatacaaggacttcctgtacttcctgaccccctgcggcagaagattccacagagcctgcagactggtgcacgacttcaccgacgccgtgatccaggagagaagaagaaccctgaccagccagggcgtggacgacttcctgcaggccaaggccaagagcaagaccctggacttcatcgacgtgctgctgctgagcgaggacaagaacggcaaggagctgagcgacgaggacatcagagccgaggccgacaccttcatgttcggcggccacgacaccaccgccagcggcctgagctgggtgctgtacaacctggccagacaccccgagtaccaggagagatgcagacaggaggtgcaggagctgctgaaggacagagagcccaaggagatcgagtgggacgacctggcccagctgcccttcctgaccatgtgcctgaaggagagcctgagactgcacccccccatccccaccttcgccagaggctgcacccaggacgtggtgctgcccgacagcagagtgatccccaagggcctgtag

SEQ ID NO: 78337 - DNA, 1512 bp, synthetic construct
  misc_feature 1..1512: note = Description of Artificial Sequence: Synthetic coding sequence
  source 1..1512: mol_type = other DNA
atggccggcctgtggctgggcctggtgtggcagaagctgctgctgtggggcgccgccagcgccctgagcctggccggcgccagcctggtgctgagcctgctgcagagagtggccagctacgccctgctgatgaagcccgacggcagagagttcttccagcagatcatcgagtacaccgaggagtacagacacatgcccctgctgaagctgtgggtgggccccgtgcccatggtggccctgtacaacgccgagaacgtggaggtgatcctgaccagcagcaagcagatcgacaagagcagcatgtacaagttcctggagccctggctgggcctgggcctgctgaccagcaccggcaacaagtggagaagcagaagaaagatgctgacccccaccttccacttcaccatcctggaggacttcctggacatcatgaacgagcaggccaacatcctggtgaagaagctggagaagcacatcaaccaggaggccttcaactgcttcttctacatcaccctgtgcgccctggacatcatctgcgagaccgccatgggcaagaacatcggcgcccagagcaacgacgacagcgagtacgtgagagccgtgtacagaatgagcgagatgatcttcagaagaatcaagatgccctggctgtggctggacctgtggtacctgatgttcaaggagggctgggagcacaagaagagcctgcagatcctgcacaccttcaccaacagcgtgatcgccgagagagccaacgagatgaacgccaacgaggactgcagaggcgacggcagaggcagcgcccccagcaagaacaagagaagagccttcctggacctgctgctgagcgtgaccgacgacgagggcaacagactgagccacgaggacatcagagaggaggtggacaccttcatgttcgagggccacgacaccaccgccgccgccatcaactggagcctgtacctgctgggcagcaaccccgaggtgcagaagaaggtggaccacgagctggacgacgtgttcggcaagagcgacagacccgccaccgtggaggacctgaagaagctgagatacctggagtgcgtgatcaaggagaccctgagactgttccccagcgtgcccctgttcgccagaagcgtgagcgaggactgcgaggtggccggctacagagtgctgaagggcaccgaggccgtgatcatcccctacgccctgcacagagaccccagatacttccccaaccccgaggagttccagcccgagagattcttccccgagaacgcccagggcagacacccctacgcctacgtgcccttcagcgccggccccagaaactgcatcggccagaagttcgccgtgatggaggagaagaccatcctgagctgcatcctgagacacttctggatcgagagcaaccagaagagagaggagctgggcctggagggccagctgatcctgagacccagcaacggcatctggatcaagctgaagagaagaaacgccgacgagagatag

SEQ ID NO: 78338 - DNA, 1578 bp, synthetic construct
  misc_feature 1..1578: note = Description of Artificial Sequence: Synthetic coding sequence
  source 1..1578: mol_type = other DNA
atggccggcctgtggctgggcctggtgtggcagaagctgctgctgtggggcgccgccagcgccctgagcctggccggcgccagcctggtgctgagcctgctgcagagagtggccagctacgccagaaagtggcagcagatgagacccatccccaccgtggccagagcctaccccctggtgggccacgccctgctgatgaagcccgacggcagagagttcttccagcagatcatcgagtacaccgaggagtacagacacatgcccctgctgaagctgtgggtgggccccgtgcccatggtggccctgtacaacgccgagaacgtggaggtgatcctgaccagcagcaagcagatcgacaagagcagcatgtacaagttcctggagccctggctgggcctgggcctgctgaccagcaccggcaacaagtggagaagcagaagaaagatgctgacccccaccttccacttcaccatcctggaggacttcctggacatcatgaacgagcaggccaacatcctggtgaagaagctggagaagcacatcaaccaggaggccttcaactgcttcttctacatcaccctgtgcgccctggacatcatctgcgagaccgccatgggcaagaacatcggcgcccagagcaacgacgacagcgagtacgtgagagccgtgtacagaatgagcgagatgatcttcagaagaatcaagatgccctggctgtggctggacctgtggtacctgatgttcaaggagggctgggagcacaagaagagcctgcagatcctgcacaccttcaccaacagcgtgatcgccgagagagccaacgagatgaacgccaacgaggactgcagaggcgacggcagaggcagcgcccccagcaagaacaagagaagagccttcctggacctgctgctgagcgtgaccgacgacgagggcaacagactgagccacgaggacatcagagaggaggtggacaccttcatgttcgagggccacgacaccaccgccgccgccatcaactggagcctgtacctgctgggcagcaaccccgaggtgcagaagaaggtggaccacgagctggacgacgtgttcggcaagagcgacagacccgccaccgtggaggacctgaagaagctgagatacctggagtgcgtgatcaaggagaccctgagactgttccccagcgtgcccctgttcgccagaagcgtgagcgaggactgcgaggtggccggctacagagtgctgaagggcaccgaggccgtgatcatcccctacgccctgcacagagaccccagatacttccccaaccccgaggagttccagcccgagagattcttccccgagaacgcccagggcagacacccctacgcctacgtgcccttcagcgccggccccagaaactgcatcggccagaagttcgccgtgatggaggagaagaccatcctgagctgcatcctgagacacttctggatcgagagcaaccagaagagagaggagctgggcctggagggccagctgatcctgagacccagcaacggcatctggatcaagctgaagagaagaaacgccgacgagagatag

SEQ ID NO: 78339 - DNA, 1503 bp, synthetic construct
  misc_feature 1..1503: note = Description of Artificial Sequence: Synthetic coding sequence
  source 1..1503: mol_type = other DNA
atgagccccggcctgctgctgctgggcagcgccgtgctgctggccttcggcctgtgctgcaccttcgtgcacagagccagaagcagatacgagcacatccccggcccccccagacccagcttcctgctgggccacctgccctgcttctggaagaaggacgaggtgggcggcagagtgctgcaggacgtgttcctggactgggccaagaagtacggccccgtggtgagagtgaacgtgttccacaagaccagcgtgatcgtgaccagccccgagagcgtgaagaagttcctgatgagcaccaagtacaacaaggacagcaagatgtacagagccctgcagaccgtgttcggcgagagactgttcggccagggcctggtgagcgagtgcaactacgagagatggcacaagcagagaagagtgatcgacctggccttcagcagaagcagcctggtgagcctgatggagaccttcaacgagaaggccgagcagctggtggagatcctggaggccaaggccgacggccagacccccgtgagcatgcaggacatgctgacctacaccgccatggacatcctggccaaggccgccttcggcatggagaccagcatgctgctgggcgcccagaagcccctgagccaggccgtgaagctgatgctggagggcatcaccgccagcagaaacaccctggccaagttcctgcccggcaagagaaagcagctgagagaggtgagagagagcatcagattcctgagacaggtgggcagagactgggtgcagagaagaagagaggccctgaagagaggcgaggaggtgcccgccgacatcctgacccagatcctgaaggccgaggagggcgcccaggacgacgagggcctgctggacaacttcgtgaccttcttcatcgccggccacgagaccagcgccaaccacctggccttcaccgtgatggagctgagcagacagcccgagatcgtggccagactgcaggccgaggtggacgaggtgatcggcagcaagagatacctggacttcgaggacctgggcagactgcagtacctgagccaggtgctgaaggagagcctgagactgtacccccccgcctggggcaccttcagactgctggaggaggagaccctgatcgacggcgtgagagtgcccggcaacacccccctgctgttcagcacctacgtgatgggcagaatggacacctacttcgaggaccccctgaccttcaaccccgacagattcggccccggcgcccccaagcccagattcacctacttccccttcagcctgggccacagaagctgcatcggccagcagttcgcccagatggaggtgaaggtggtgatggccaagctgctgcagagactggagttcagactggtgcccggccagagattcggcctgcaggagcaggccaccctgaagcccctggaccccgtgctgtgcaccctgagacccagaggctggcagcccgccccccccccccccccctgctag

SEQ ID NO: 78340 - DNA, 1212 bp, synthetic construct
  misc_feature 1..1212: note = Description of Artificial Sequence: Synthetic coding sequence
  source 1..1212: mol_type = other DNA
atgagcaccaagtacaacaaggacagcaagatgtacagagccctgcagaccgtgttcggcgagagactgttcggccagggcctggtgagcgagtgcaactacgagagatggcacaagcagagaagagtgatcgacctggccttcagcagaagcagcctggtgagcctgatggagaccttcaacgagaaggccgagcagctggtggagatcctggaggccaaggccgacggccagacccccgtgagcatgcaggacatgctgacctacaccgccatggacatcctggccaaggccgccttcggcatggagaccagcatgctgctgggcgcccagaagcccctgagccaggccgtgaagctgatgctggagggcatcaccgccagcagaaacaccctggccaagttcctgcccggcaagagaaagcagctgagagaggtgagagagagcatcagattcctgagacaggtgggcagagactgggtgcagagaagaagagaggccctgaagagaggcgaggaggtgcccgccgacatcctgacccagatcctgaaggccgaggagggcgcccaggacgacgagggcctgctggacaacttcgtgaccttcttcatcgccggccacgagaccagcgccaaccacctggccttcaccgtgatggagctgagcagacagcccgagatcgtggccagactgcaggccgaggtggacgaggtgatcggcagcaagagatacctggacttcgaggacctgggcagactgcagtacctgagccaggtgctgaaggagagcctgagactgtacccccccgcctggggcaccttcagactgctggaggaggagaccctgatcgacggcgtgagagtgcccggcaacacccccctgctgttcagcacctacgtgatgggcagaatggacacctacttcgaggaccccctgaccttcaaccccgacagattcggccccggcgcccccaagcccagattcacctacttccccttcagcctgggccacagaagctgcatcggccagcagttcgcccagatggaggtgaaggtggtgatggccaagctgctgcagagactggagttcagactggtgcccggccagagattcggcctgcaggagcaggccaccctgaagcccctggaccccgtgctgtgcaccctgagacccagaggctggcagcccgccccccccccccccccctgctag

SEQ ID NO: 78341 - DNA, 1530 bp, synthetic construct
  misc_feature 1..1530: note = Description of Artificial Sequence: Synthetic coding sequence
  source 1..1530: mol_type = other DNA
atggccgccgccgccggcatgctgctgctgggcctgctgcaggccggcggcagcgtgctgggccaggccatggagaaggtgaccggcggcaacctgctgagcatgctgctgatcgcctgcgccttcaccctgagcctggtgtacctgatcagactggccgccggccacctggtgcagctgcccgccggcgtgaagagccccccctacatcttcagccccatccccttcctgggccacgccatcgccttcggcaagagccccatcgagttcctggagaacgcctacgagaagtacggccccgtgttcagcttcaccatggtgggcaagaccttcacctacctgctgggcagcgacgccgccgccctgctgttcaacagcaagaacgaggacctgaacgccgaggacgtgtacagcagactgaccacccccgtgttcggcaagggcgtggcctacgacgtgcccaaccccgtgttcctggagcagaagaagatgctgaagagcggcctgaacatcgcccacttcaagcagcacgtgagcatcatcgagaaggagaccaaggagtacttcgagagctggggcgagagcggcgagaagaacgtgttcgaggccctgagcgagctgatcatcctgaccgccagccactgcctgcacggcaaggagatcagaagccagctgaacgagaaggtggcccagctgtacgccgacctggacggcggcttcagccacgccgcctggctgctgcccggctggctgcccctgcccagcttcagaagaagagacagagcccacagagagatcaaggacatcttctacaaggccatccagaagagaagacagagccaggagaagatcgacgacatcctgcagaccctgctggacgccacctacaaggacggcagacccctgaccgacgacgaggtggccggcatgctgatcggcctgctgctggccggccagcacaccagcagcaccaccagcgcctggatgggcttcttcctggccagagacaagaccctgcagaagaagtgctacctggagcagaagaccgtgtgcggcgagaacctgccccccctgacctacgaccagctgaaggacctgaacctgctggacagatgcatcaaggagaccctgagactgagaccccccatcatgatcatgatgagaatggccagaaccccccagaccgtggccggctacaccatcccccccggccaccaggtgtgcgtgagccccaccgtgaaccagagactgaaggacagctgggtggagagactggacttcaaccccgacagatacctgcaggacaaccccgccagcggcgagaagttcgcctacgtgcccttcggcgccggcagacacagatgcatcggcgagaacttcgcctacgtgcagatcaagaccatctggagcaccatgctgagactgtacgagttcgacctgatcgacggctacttccccaccgtgaactacaccaccatgatccacacccccgagaaccccgtgatcagatacaagagaagaagcaagtag

SEQ ID NO: 78342 - DNA, 1215 bp, synthetic construct
  misc_feature 1..1215: note = Description of Artificial Sequence: Synthetic coding sequence
  source 1..1215: mol_type = other DNA
atggtgggcaagaccttcacctacctgctgggcagcgacgccgccgccctgctgttcaacagcaagaacgaggacctgaacgccgaggacgtgtacagcagactgaccacccccgtgttcggcaagggcgtggcctacgacgtgcccaaccccgtgttcctggagcagaagaagatgctgaagagcggcctgaacatcgcccacttcaagcagcacgtgagcatcatcgagaaggagaccaaggagtacttcgagagctggggcgagagcggcgagaagaacgtgttcgaggccctgagcgagctgatcatcctgaccgccagccactgcctgcacggcaaggagatcagaagccagctgaacgagaaggtggcccagctgtacgccgacctggacggcggcttcagccacgccgcctggctgctgcccggctggctgcccctgcccagcttcagaagaagagacagagcccacagagagatcaaggacatcttctacaaggccatccagaagagaagacagagccaggagaagatcgacgacatcctgcagaccctgctggacgccacctacaaggacggcagacccctgaccgacgacgaggtggccggcatgctgatcggcctgctgctggccggccagcacaccagcagcaccaccagcgcctggatgggcttcttcctggccagagacaagaccctgcagaagaagtgctacctggagcagaagaccgtgtgcggcgagaacctgccccccctgacctacgaccagctgaaggacctgaacctgctggacagatgcatcaaggagaccctgagactgagaccccccatcatgatcatgatgagaatggccagaaccccccagaccgtggccggctacaccatcccccccggccaccaggtgtgcgtgagccccaccgtgaaccagagactgaaggacagctgggtggagagactggacttcaaccccgacagatacctgcaggacaaccccgccagcggcgagaagttcgcctacgtgcccttcggcgccggcagacacagatgcatcggcgagaacttcgcctacgtgcagatcaagaccatctggagcaccatgctgagactgtacgagttcgacctgatcgacggctacttccccaccgtgaactacaccaccatgatccacacccccgagaaccccgtgatcagatacaagagaagaagcaagtag

SEQ ID NO: 78343 - DNA, 1350 bp, synthetic construct
  misc_feature 1..1350: note = Description of Artificial Sequence: Synthetic coding sequence
  source 1..1350: mol_type = other DNA
atgaagcacgagaagagccccccctacatcttcagccccatccccttcctgggccacgccatcgccttcggcaagagccccatcgagttcctggagaacgcctacgagaagtacggccccgtgttcagcttcaccatggtgggcaagaccttcacctacctgctgggcagcgacgccgccgccctgctgttcaacagcaagaacgaggacctgaacgccgaggacgtgtacagcagactgaccacccccgtgttcggcaagggcgtggcctacgacgtgcccaaccccgtgttcctggagcagaagaagatgctgaagagcggcctgaacatcgcccacttcaagcagcacgtgagcatcatcgagaaggagaccaaggagtacttcgagagctggggcgagagcggcgagaagaacgtgttcgaggccctgagcgagctgatcatcctgaccgccagccactgcctgcacggcaaggagatcagaagccagctgaacgagaaggtggcccagctgtacgccgacctggacggcggcttcagccacgccgcctggctgctgcccggctggctgcccctgcccagcttcagaagaagagacagagcccacagagagatcaaggacatcttctacaaggccatccagaagagaagacagagccaggagaagatcgacgacatcctgcagaccctgctggacgccacctacaaggacggcagacccctgaccgacgacgaggtggccggcatgctgatcggcctgctgctggccggccagcacaccagcagcaccaccagcgcctggatgggcttcttcctggccagagacaagaccctgcagaagaagtgctacctggagcagaagaccgtgtgcggcgagaacctgccccccctgacctacgaccagctgaaggacctgaacctgctggacagatgcatcaaggagaccctgagactgagaccccccatcatgatcatgatgagaatggccagaaccccccagaccgtggccggctacaccatcccccccggccaccaggtgtgcgtgagccccaccgtgaaccagagactgaaggacagctgggtggagagactggacttcaaccccgacagatacctgcaggacaaccccgccagcggcgagaagttcgcctacgtgcccttcggcgccggcagacacagatgcatcggcgagaacttcgcctacgtgcagatcaagaccatctggagcaccatgctgagactgtacgagttcgacctgatcgacggctacttccccaccgtgaactacaccaccatgatccacacccccgagaaccccgtgatcagatacaagagaagaagcaagtag

SEQ ID NO: 78344 - DNA, 1515 bp, synthetic construct
  misc_feature 1..1515: note = Description of Artificial Sequence: Synthetic coding sequence
  source 1..1515: mol_type = other DNA
atgatgaccaccagcctgatctggggcatcgccatcgccgcctgctgctgcctgtggctgatcctgggcatcagaagaagacagaccggcgagccccccctggagaacggcctgatcccctacctgggctgcgccctgcagttcggcgccaaccccctggagttcctgagagccaaccagagaaagcacggccacgtgttcacctgcaagctgatgggcaagtacgtgcacttcatcaccaaccccctgagctaccacaaggtgctgtgccacggcaagtacttcgactggaagaagttccacttcgccaccagcgccaaggccttcggccacagaagcatcgaccccatggacggcaacaccaccgagaacatcaacgacaccttcatcaagaccctgcagggccacgccctgaacagcctgaccgagagcatgatggagaacctgcagagaatcatgagaccccccgtgagcagcaacagcaagaccgccgcctgggtgaccgagggcatgtacagcttctgctacagagtgatgttcgaggccggctacctgaccatcttcggcagagacctgaccagaagagacacccagaaggcccacatcctgaacaacctggacaacttcaagcagttcgacaaggtgttccccgccctggtggccggcctgcccatccacatgttcagaaccgcccacaacgccagagagaagctggccgagagcctgagacacgagaacctgcagaagagagagagcatcagcgagctgatcagcctgagaatgttcctgaacgacaccctgagcaccttcgacgacctggagaaggccaagacccacctggtggtgctgtgggccagccaggccaacaccatccccgccaccttctggagcctgttccagatgatcagaaaccccgaggccatgaaggccgccaccgaggaggtgaagagaaccctggagaacgccggccagaaggtgagcctggagggcaaccccatctgcctgagccaggccgagctgaacgacctgcccgtgctggacagcatcatcaaggagagcctgagactgagcagcgccagcctgaacatcagaaccgccaaggaggacttcaccctgcacctggaggacggcagctacaacatcagaaaggacgacatcatcgccctgtacccccagctgatgcacctggaccccgagatctaccccgaccccctgaccttcaagtacgacagatacctggacgagaacggcaagaccaagaccaccttctactgcaacggcctgaagctgaagtactactacatgcccttcggcagcggcgccaccatctgccccggcagactgttcgccatccacgagatcaagcagttcctgatcctgatgctgagctacttcgagctggagctgatcgagggccaggccaagtgcccccccctggaccagagcagagccggcctgggcatcctgccccccctgaacgacatcgagttcaagtacaagttcaagcacctgtag

SEQ ID NO: 78345 - DNA, 1521 bp, synthetic construct
  misc_feature 1..1521: note = Description of Artificial Sequence: Synthetic coding sequence
  source 1..1521: mol_type = other DNA
atggccggcgaggtgagcgccgccaccggcagattcagcctggagagactgggcctgcccggcctggccctggccgccgccctgctgctgctggccctgtgcctgctggtgagaagaaccagaagacccggcgagccccccctgatcaagggctggctgccctacctgggcgtggtgctgaacctgagaaaggaccccctgagattcatgaagaccctgcagaagcagcacggcgacaccttcaccgtgctgctgggcggcaagtacatcaccttcatcctggaccccttccagtaccagctggtgatcaagaaccacaagcagctgagcttcagagtgttcagcaacaagctgctggagaaggccttcagcatcagccagctgcagaagaaccacgacatgaacgacgagctgcacctgtgctaccagttcctgcagggcaagagcctggacatcctgctggagagcatgatgcagaacctgaagcaggtgttcgagccccagctgctgaagaccaccagctgggacaccgccgagctgtaccccttctgcagcagcatcatcttcgagatcaccttcaccaccatctacggcaaggtgatcgtgtgcgacaacaacaagttcatcagcgagctgagagacgacttcctgaagttcgacgacaagttcgcctacctggtgagcaacatccccatcgagctgctgggcaacgtgaagagcatcagagagaagatcatcaagtgcttcagcagcgagaagctggccaagatgcagggctggagcgaggtgttccagagcagacaggacgtgctggagaagtactacgtgcacgaggacctggagatcggcgcccaccacctgggcttcctgtgggccagcgtggccaacaccatccccaccatgttctgggccatgtactacctgctgagacaccccgaggccatggccgccgtgagagacgagatcgacagactgctgcagagcaccggccagaagaagggcagcggcttccccatccacctgaccagagagcagctggacagcctgatctgcctggagagcagcatcttcgaggccctgagactgagcagctacagcaccaccatcagattcgtggaggaggacctgaccctgagcagcgagaccggcgactactgcgtgagaaagggcgacctggtggccatcttcccccccgtgctgcacggcgaccccgagatcttcgaggcccccgaggagttcagatacgacagattcatcgaggacggcaagaagaagaccaccttcttcaagagaggcaagaagctgaagtgctacctgatgcccttcggcaccggcaccagcaagtgccccggcagattcttcgccctgatggagatcaagcagctgctggtgatcctgctgacctacttcgacctggagatcatcgacgacaagcccatcggcctgaactacagcagactgctgttcggcatccagtaccccgacagcgacgtgctgttcagatacaaggtgaagagctag

SEQ ID NO: 78346 - DNA, 1506 bp, synthetic construct
  misc_feature 1..1506: note = Description of Artificial Sequence: Synthetic coding sequence
  source 1..1506: mol_type = other DNA
atggtgctgtggggccccgtgctgggcgccctgctggtggtgatcgccggctacctgtgcctgcccggcatgctgagacagagaagaccctgggagccccccctggacaagggcaccgtgccctggctgggccacgccatggccttcagaaagaacatgttcgagttcctgaagagaatgagaaccaagcacggcgacgtgttcaccgtgcagctgggcggccagtacttcaccttcgtgatggaccccctgagcttcggcagcatcctgaaggacacccagagaaagctggacttcggccagtacgccaagaagctggtgctgaaggtgttcggctacagaagcgtgcagggcgaccacgagatgatccacagcgccagcaccaagcacctgagaggcgacggcctgaaggacctgaacgagaccatgctggacagcctgagcttcgtgatgctgaccagcaagggctggagcctggacgccagctgctggcacgaggacagcctgttcagattctgctactacatcctgttcaccgccggctacctgagcctgttcggctacaccaaggacaaggagcaggacctgctgcaggccggcgagctgttcatggagttcagaaagttcgacctgctgttccccagattcgtgtacagcctgctgtggcccagagagtggctggaggtgggcagactgcagagactgttccacaagatgctgagcgtgagccacagccaggagaaggagggcatcagcaactggctgggcaacatgctgcagttcctgagagagcagggcgtgcccagcgccatgcaggacaagttcaacttcatgatgctgtgggccagccagggcaacaccggccccaccagcttctgggccctgctgtacctgctgaagcaccccgaggccatcagagccgtgagagaggaggccacccaggtgctgggcgaggccagactggagaccaagcagagcttcgccttcaagctgggcgccctgcagcacacccccgtgctggacagcgtggtggaggagaccctgagactgagagccgcccccaccctgctgagactggtgcacgaggactacaccctgaagatgagcagcggccaggagtacctgttcagacacggcgacatcctggccctgttcccctacctgagcgtgcacatggaccccgacatccaccccgagcccaccgtgttcaagtacgacagattcctgaaccccaacggcagcagaaaggtggacttcttcaagaccggcaagaagatccaccactacaccatgccctggggcagcggcgtgagcatctgccccggcagattcttcgccctgagcgaggtgaagctgttcatcctgctgatggtgacccacttcgacctggagctggtggaccccgacacccccctgccccacgtggacccccagagatggggcttcggcaccatgcagcccagccacgacgtgagattcagatacagactgcaccccaccgagtag

SEQ ID NO: 78347 - DNA, 573 bp, synthetic construct
  misc_feature 1..573: note = Description of Artificial Sequence: Synthetic coding sequence
  source 1..573: mol_type = other DNA
atggagaaggtgcccggcgagatggagatcgagagaagagagagaagcgaggagctgagcgaggccgagagaaaggccgtgcaggccatgtgggccagactgtacgccaactgcgaggacgtgggcgtggccatcctggtgagattcttcgtgaacttccccagcgccaagcagtacttcagccagttcaagcacatggaggaccccctggagatggagagaagcccccagctgagaaagcacgcctgcagagtgatgggcgccctgaacaccgtggtggagaacctgcacgaccccgacaaggtgagcagcgtgctggccctggtgggcaaggcccacgccctgaagcacaaggtggagcccgtgtacttcaagatcctgagcggcgtgatcctggaggtggtggccgaggagttcgccagcgacttcccccccgagacccagagagcctgggccaagctgagaggcctgatctacagccacgtgaccgccgcctacaaggaggtgggctgggtgcagcaggtgcccaacgccaccaccccccccgccaccctgcccagcagcggcccctag

SEQ ID NO: 78348 - DNA, 1194 bp, synthetic construct
  misc_feature 1..1194: note = Description of Artificial Sequence: Synthetic coding sequence
  source 1..1194: mol_type = other DNA
atggaggaggacgacagctacgtgcccagcgacctgaccgccgaggagagacaggagctggagaacatcagaagaagaaagcaggagctgctggccgacatccagagactgaaggacgagatcgccgaggtggccaacgagatcgagaacctgggcagcaccgaggagagaaagaacatgcagagaaacaagcaggtggccatgggcagaaagaagttcaacatggaccccaagaagggcatccagttcctgatcgagaacgacctgctgaagaacacctgcgaggacatcgcccagttcctgtacaagggcgagggcctgaacaagaccgccatcggcgactacctgggcgagagagacgagttcaacatccaggtgctgcacgccttcgtggagctgcacgagttcaccgacctgaacctggtgcaggccctgagacagttcctgtggagcttcagactgcccggcgaggcccagaagatcgacagaatgatggaggccttcgcccagagatactgccagtgcaacaacggcgtgttccagagcaccgacacctgctacgtgctgagcttcgccatcatcatgctgaacaccagcctgcacaaccccaacgtgaaggacaagcccaccgtggagagattcatcgccatgaacagaggcatcaacgacggcggcgacctgcccgaggagctgctgagaaacctgtacgagagcatcaagaacgagcccttcaagatccccgaggacgacggcaacgacctgacccacaccttcttcaaccccgacagagagggctggctgctgaagctgggcggcagagtgaagacctggaagagaagatggttcatcctgaccgacaactgcctgtactacttcgagtacaccaccgacaaggagcccagaggcatcatccccctggagaacctgagcatcagagaggtggaggacagcaagaagcccaactgcttcgagctgtacatccccgacaacaaggaccaggtgatcaaggcctgcaagaccgaggccgacggcagagtggtggagggcaaccacaccgtgtacagaatcagcgcccccacccccgaggagaaggaggagtggatcaagtgcatcaaggccgccatcagcagagaccccttctacgagatgctggccgccagaaagaagaaggtgagcagcaccaagagacactag

SEQ ID NO: 78349 - DNA, 1197 bp, synthetic construct
  misc_feature 1..1197: note = Description of Artificial Sequence: Synthetic coding sequence
  source 1..1197: mol_type = other DNA
atggaggaggacgacagctacgtgcccagcgacctgaccgccgaggagagacaggagctggagaacatcagaagaagaaagcaggagctgctggccgacatccagagactgaaggacgagatcgccgaggtggccaacgagatcgagaacctgggcagcaccgaggagagaaagaacatgcagagaaacaagcaggtggccatgggcagaaagaagttcaacatggaccccaagaagggcatccagttcctgatcgagaacgacctgctgaagaacacctgcgaggacatcgcccagttcctgtacaagggcgagggcctgaacaagaccgccatcggcgactacctgggcgagagagacgagttcaacatccaggtgctgcacgccttcgtggagctgcacgagttcaccgacctgaacctggtgcaggccctgagacagttcctgtggagcttcagactgcccggcgaggcccagaagatcgacagaatgatggaggccttcgcccagagatactgccagtgcaacaacggcgtgttccagagcaccgacacctgctacgtgctgagcttcgccatcatcatgctgaacaccagcctgcacaaccccaacgtgaaggacaagcccaccgtggagagattcatcgccatgaacagaggcatcaacgacggcggcgacctgcccgaggagctgctgagaaacctgtacgagagcatcaagaacgagcccttcaagatccccgaggacgacggcaacgacctgacccacaccttcttcaaccccgacagagagggctggctgctgaagctgggcggcggcagagtgaagacctggaagagaagatggttcatcctgaccgacaactgcctgtactacttcgagtacaccaccgacaaggagcccagaggcatcatccccctggagaacctgagcatcagagaggtggaggacagcaagaagcccaactgcttcgagctgtacatccccgacaacaaggaccaggtgatcaaggcctgcaagaccgaggccgacggcagagtggtggagggcaaccacaccgtgtacagaatcagcgcccccacccccgaggagaaggaggagtggatcaagtgcatcaaggccgccatcagcagagaccccttctacgagatgctggccgccagaaagaagaaggtgagcagcaccaagagacactag

SEQ ID NO: 78350 - DNA, 657 bp, synthetic construct
  misc_feature 1..657: note = Description of Artificial Sequence: Synthetic coding sequence
  source 1..657: mol_type = other DNA
atgatggaggccttcgcccagagatactgccagtgcaacaacggcgtgttccagagcaccgacacctgctacgtgctgagcttcgccatcatcatgctgaacaccagcctgcacaaccccaacgtgaaggacaagcccaccgtggagagattcatcgccatgaacagaggcatcaacgacggcggcgacctgcccgaggagctgctgagaaacctgtacgagagcatcaagaacgagcccttcaagatccccgaggacgacggcaacgacctgacccacaccttcttcaaccccgacagagagggctggctgctgaagctggccggcggcagagtgaagacctggaagagaagatggttcatcctgaccgacaactgcctgtactacttcgagtacaccaccgacaaggagcccagaggcatcatccccctggagaacctgagcatcagagaggtggaggacagcaagaagcccaactgcttcgagctgtacatccccgacaacaaggaccaggtgatcaaggcctgcaagaccgaggccgacggcagagtggtggagggcaaccacaccgtgtacagaatcagcgcccccacccccgaggagaaggaggagtggatcaagtgcatcaagttccaggtgagccccggcgagccctag

SEQ ID NO: 78351 - DNA, 1197 bp, synthetic construct; identical to SEQ ID NO: 78349
  misc_feature 1..1197: note = Description of Artificial Sequence: Synthetic coding sequence
  source 1..1197: mol_type = other DNA

SEQ ID NO: 78352 - DNA, 1020 bp, synthetic construct
  misc_feature 1..1020: note = Description of Artificial Sequence: Synthetic coding sequence
  source 1..1020: mol_type = other DNA
atgcagagaaacaagcaggtggccatgggcagaaagaagttcaacatggaccccaagaagggcatccagttcctgatcgagaacgacctgctgaagaacacctgcgaggacatcgcccagttcctgtacaagggcgagggcctgaacaagaccgccatcggcgactacctgggcgagagagacgagttcaacatccaggtgctgcacgccttcgtggagctgcacgagttcaccgacctgaacctggtgcaggccctgagacagttcctgtggagcttcagactgcccggcgaggcccagaagatcgacagaatgatggaggccttcgcccagagatactgccagtgcaacaacggcgtgttccagagcaccgacacctgctacgtgctgagcttcgccatcatcatgctgaacaccagcctgcacaaccccaacgtgaaggacaagcccaccgtggagagattcatcgccatgaacagaggcatcaacgacggcggcgacctgcccgaggagctgctgagaaacctgtacgagagcatcaagaacgagcccttcaagatccccgaggacgacggcaacgacctgacccacaccttcttcaaccccgacagagagggctggctgctgaagctgggcggcggcagagtgaagacctggaagagaagatggttcatcctgaccgacaactgcctgtactacttcgagtacaccaccgacaaggagcccagaggcatcatccccctggagaacctgagcatcagagaggtggaggacagcaagaagcccaactgcttcgagctgtacatccccgacaacaaggaccaggtgatcaaggcctgcaagaccgaggccgacggcagagtggtggagggcaaccacaccgtgtacagaatcagcgcccccacccccgaggagaaggaggagtggatcaagtgcatcaaggccgccatcagcagagaccccttctacgagatgctggccgccagaaagaagaaggtgagcagcaccaagagacactag

SEQ ID NO: 78353 - DNA, 1020 bp, synthetic construct; identical to SEQ ID NO: 78352
  misc_feature 1..1020: note = Description of Artificial Sequence: Synthetic coding sequence
  source 1..1020: mol_type = other DNA

SEQ ID NO: 78354 - DNA, 1080 bp, synthetic construct
  misc_feature 1..1080: note = Description of Artificial Sequence: Synthetic coding sequence
  source 1..1080: mol_type = other DNA
atgagcctgcagagactgctgcagcacagcagcaacggcaacctggccgacttctgcgccggccccgcctacagcagctacagcaccctgaccggcagcctgaccatggacgacaacagaagaatccagatgctggccgacaccgtggccaccctgcccagaggcagaaagcagctggccctgaccagaagcagcagcctgagcgacttcagctggagccagagaaagctggtgaccgtggagaagcaggacaacgagaccttcggcttcgagatccagagctacagaccccagaaccagaacgcctgcagcagcgagatgttcaccctgatctgcaagatccaggaggacagccccgcccactgcgccggcctgcaggccggcgacgtgctggccaacatcaacggcgtgagcaccgagggcttcacctacaagcaggtggtggacctgatcagaagcagcggcaacctgctgaccatcgagaccctgaacggcaccatgatcctgaagagaaccgagctggaggccaagctgcaggtgctgaagcagaccctgaagcagaagtgggtggagtacagaagcctgcagctgcaggagcacagactgctgcacggcgacgccgccaactgccccagcctggagaacatggacctggacgagctgagcctgttcggccccctgcccggccccggccccgccctggtggacagaaacagactgagcagcgagagcagctgcaagagctggctgagcagcatgaccatggacagcgaggacggctaccagacctgcgtgagcgaggacagcagcagaggcgccttcagcagacagaccagcaccgacgacgagtgcttcatccccaaggagggcgacgacttcctgagaagaagcagcagcagaagaaacagaagcatcagcaacaccagcagcggcagcatgagccccctgtgggagggcaacctgagcagcatgttcggcaccctgcccagaaagagcagaaagggcagcgtgagaaagcagctgctgaagttcatccccggcctgcacagagccgtggaggaggaggagagcagattctag

SEQ ID NO: 78355 - DNA, 762 bp, synthetic construct
  misc_feature 1..762: note = Description of Artificial Sequence: Synthetic coding sequence
  source 1..762: mol_type = other DNA
atgttcaccctgatctgcaagatccaggaggacagccccgcccactgcgccggcctgcaggccggcgacgtgctggccaacatcaacggcgtgagcaccgagggcttcacctacaagcaggtggtggacctgatcagaagcagcggcaacctgctgaccatcgagaccctgaacggcaccatgatcctgaagagaaccgagctggaggccaagctgcaggtgctgaagcagaccctgaagcagaagtgggtggagtacagaagcctgcagctgcaggagcacagactgctgcacggcgacgccgccaactgccccagcctggagaacatggacctggacgagctgagcctgttcggccccctgcccggccccggccccgccctggtggacagaaacagactgagcagcgagagcagctgcaagagctggctgagcagcatgaccatggacagcgaggacggctaccagacctgcgtgagcgaggacagcagcagaggcgccttcagcagacagaccagcaccgacgacgagtgcttcatccccaaggagggcgacgacttcctgagaagaagcagcagcagaagaaacagaagcatcagcaacaccagcagcggcagcatgagccccctgtgggagggcaacctgagcagcatgttcggcaccctgcccagaaagagcagaaagggcagcgtgagaaagcagctgctgaagttcatccccggcctgcacagagccgtggaggaggaggagagcagattctag

SEQ ID NO: 78356 - DNA, 1203 bp, synthetic construct
  misc_feature 1..1203: note = Description of Artificial Sequence: Synthetic coding sequence
  source 1..1203: mol_type = other DNA
atggaggacggcgtgtacgagccccccgacctgacccccgaggagagaatggagctggagaacatcagaagaagaaagcaggagctgctggtggagatccagagactgagagaggagctgagcgaggccatgagcgaggtggagggcctggaggccaacgagggcagcaagaccctgcagagaaacagaaagatggccatgggcagaaagaagttcaacatggaccccaagaagggcatccagttcctggtggagaacgagctgctgcagaacacccccgaggagatcgccagattcctgtacaagggcgagggcctgaacaagaccgccatcggcgactacctgggcgagagagaggagctgaacctggccgtgctgcacgccttcgtggacctgcacgagttcaccgacctgaacctggtgcaggccctgagacagttcctgtggagcttcagactgcccggcgaggcccagaagatcgacagaatgatggaggccttcgcccagagatactgcctgtgcaaccccggcgtgttccagagcaccgacacctgctacgtgctgagcttcgccgtgatcatgctgaacaccagcctgcacaaccccaacgtgagagacaagcccggcctggagagattcgtggccatgaacagaggcatcaacgagggcggcgacctgcccgaggagctgctgagaaacctgtacgacagcatcagaaacgagcccttcaagatccccgaggacgacggcaacgacctgacccacaccttcttcaaccccgacagagagggctggctgctgaagctggccggcggcagagtgaagacctggaagagaagatggttcatcctgaccgacaactgcctgtactacttcgagtacaccaccgacaaggagcccagaggcatcatccccctggagaacctgagcatcagagaggtggacgaccccagaaagcccaactgcttcgagctgtacatccccaacaacaagggccagctgatcaaggcctgcaagaccgaggccgacggcagagtggtggagggcaaccacatggtgtacagaatcagcgcccccacccaggaggagaaggacgagtggatcaagagcatccaggccgccgtgagcgtggaccccttctacgagatgctggccgccagaaagaagagaatcagcgtgaagaagaagcaggagcagccctag

SEQ ID NO: 78357 - DNA, 1200 bp, synthetic construct
  misc_feature 1..1200: note = Description of Artificial Sequence: Synthetic coding sequence
  source 1..1200: mol_type = other DNA
atggaggacggcgtgtacgagccccccgacctgacccccgaggagagaatggagctggagaacatcagaagaagaaagcaggagctgctggtggagatccagagactgagagaggagctgagcgaggccatgagcgaggtggagggcctggaggccaacgagggcagcaagaccctgcagagaaacagaaagatggccatgggcagaaagaagttcaacatggaccccaagaagggcatccagttcctggtggagaacgagctgctgcagaacacccccgaggagatcgccagattcctgtacaagggcgagggcctgaacaagaccgccatcggcgactacctgggcgagagagaggagctgaacctggccgtgctgcacgccttcgtggacctgcacgagttcaccgacctgaacctggtgcaggccctgagacagttcctgtggagcttcagactgcccggcgaggcccagaagatcgacagaatgatggaggccttcgcccagagatactgcctgtgcaaccccggcgtgttccagagcaccgacacctgctacgtgctgagcttcgccgtgatcatgctgaacaccagcctgcacaaccccaacgtgagagacaagcccggcctggagagattcgtggccatgaacagaggcatcaacgagggcggcgacctgcccgaggagctgctgagaaacctgtacgacagcatcagaaacgagcccttcaagatccccgaggacgacggcaacgacctgacccacaccttcttcaaccccgacagagagggctggctgctgaagctgggcggcagagtgaagacctggaagagaagatggttcatcctgaccgacaactgcctgtactacttcgagtacaccaccgacaaggagcccagaggcatcatccccctggagaacctgagcatcagagaggtggacgaccccagaaagcccaactgcttcgagctgtacatccccaacaacaagggccagctgatcaaggcctgcaagaccgaggccgacggcagagtggtggagggcaaccacatggtgtacagaatcagcgcccccacccaggaggagaaggacgagtggatcaagagcatccaggccgccgtgagcgtggaccccttctacgagatgctggccgccagaaagaagagaatcagcgtgaagaagaagcaggagcagccctag

SEQ ID NO: 78358 - DNA, 1200 bp, synthetic construct
  misc_feature 1..1200: note = Description of Artificial Sequence: Synthetic coding sequence
  source 1..1200: mol_type = other DNA
atggacgaggacggcggcggcgagggcggcggcgtgcccgaggacctgagcctggaggagagagaggagctgctggacatcagaagaagaaagaaggagctgatcgacgacatcgagagactgaagtacgagatcgccgaggtgatgaccgagatcgacaacctgaccagcgtggaggagagcaagaccacccagagaaacaagcagatcgccatgggcagaaagaagttcaacatggaccccaagaagggcatccagttcctgatcgagaacgacctgctgcagagcagccccgaggacgtggcccagttcctgtacaagggcgagggcctgaacaagaccgtgatcggcgactacctgggcgagagagacgagttcaacatcaaggtgctgcaggccttcgtggagctgcacgagttcgccgacctgaacctggtgcaggccctgagacagttcctgtggagcttcagactgcccggcgaggcccagaagatcgacagaatgatggaggccttcgccagcagatactgcctgtgcaaccccggcgtgttccagagcaccgacacctgctacgtgctgagcttcgccatcatcatgctgaacaccagcctgcacaaccacaacgtgagagacaagcccaccgccgagagattcatcgccatgaacagaggcatcaacgagggcggcgacctgcccgaggagctgctgagaaacctgtacgagagcatcaagaacgagcccttcaagatccccgaggacgacggcaacgacctgacccacaccttcttcaaccccgacagagagggctggctgctgaagctgggcggcagagtgaagacctggaagagaagatggttcatcctgaccgacaactgcctgtactacttcgagtacaccaccgacaaggagcccagaggcatcatccccctggagaacctgagcatcagagaggtggaggaccccagaaagcccaactgcttcgagctgtacaaccccagccacaagggccaggtgatcaaggcctgcaagaccgaggccgacggcagagtggtggagggcaaccacgtggtgtacagaatcagcgcccccagccccgaggagaaggaggagtggatgaagagcatcaaggccagcatcagcagagaccccttctacgacatgctggccaccagaaagagaagaatcgccaacaagaagtag

SEQ ID NO: 78359 - DNA, 945 bp, synthetic construct
  misc_feature 1..945: note = Description of Artificial Sequence: Synthetic coding sequence
  source 1..945: mol_type = other DNA
atggccctgccccagctgcagaccgccatgctggccgccttcctgtgggaccccagagacgtggtgctgaccgcccagcccggcgccgagcagtgcgccgagagcagccagcacatcagaatcctgcagccccagttcagactgatcagactgagattctggaagctgtacatccagagaagagtgcaggcctggcagttcctgtggagcttcagactgcccggcgaggcccagaagatcgacagaatgatggaggccttcgccagcagatactgcctgtgcaaccccggcgtgttccagagcaccgacacctgctacgtgctgagcttcgccatcatcatgctgaacaccagcctgcacaaccacaacgtgagagacaagcccaccgccgagagattcatcgccatgaacagaggcatcaacgagggcggcgacctgcccgaggagctgctgagaaacctgtacgagagcatcaagaacgagcccttcaagatccccgaggacgacggcaacgacctgacccacaccttcttcaaccccgacagagagggctggctgctgaagctgggcggcagagtgaagacctggaagagaagatggttcatcctgaccgacaactgcctgtactacttcgagtacaccaccgacaaggagcccagaggcatcatccccctggagaacctgagcatcagagaggtggaggaccccagaaagcccaactgcttcgagctgtacaaccccagccacaagggccaggtgatcaaggcctgcaagaccgaggccgacggcagagtggtggagggcaaccacgtggtgtacagaatcagcgcccccagccccgaggagaaggaggagtggatgaagagcatcaaggccagcatcagcagagaccccttctacgacatgctggccaccagaaagagaagaatcgccaacaagaagtag

SEQ ID NO: 78360 - DNA, 1185 bp, synthetic construct
  misc_feature 1..1185: note = Description of Artificial Sequence: Synthetic coding sequence
  source 1..1185: mol_type = other DNA
atggacctgtgccaccccgagcccgccgagctgagcagcggcgagaccgaggagctgcagagaatcaagtggcacagaaagcagctgctggaggacatccagaagctgaaggacgagatcgccgacgtgttcgcccagatcgactgcttcgagagcgccgaggagagcagaatggcccagaaggagaaggagctgtgcatcggcagaaagaagttcaacatggaccccgccaagggcatccagtacttcatcgagcacaagctgctgacccccgacgtgcaggacatcgccagattcctgtacaagggcgagggcctgaacaagaccgccatcggcacctacctgggcgagagagaccccatcaacctgcaggtgctgcaggccttcgtggactgccacgagttcgccaacctgaacctggtgcaggccctgagacagttcctgtggagcttcagactgcccggcgaggcccagaagatcgacagaatgatggaggccttcgccaccagatactgcctgtgcaaccccggcgtgttccagagcaccgacacctgctacgtgctgagcttcagcatcatcatgctgaacaccagcctgcacaaccccaacgtgagagacagaccccccttcgagagattcgtgagcatgaacagaggcatcaacaacggcagcgacctgcccgaggaccagctgagaaacctgttcgacagcatcaagagcgagcccttcagcatccccgaggacgacggcaacgacctgacccacaccttcttcaaccccgacagagagggctggctgctgaagctgggcggcagagtgaagacctggaagagaagatggttcatcctgaccgacaactgcctgtactacttcgagttcaccaccgacaaggagcccagaggcatcatccccctggagaacctgagcgtgcagaaggtggacgaccccaagaagcccttctgcctggagctgtacaaccccagctgcagaggccagaagatcaaggcctgcaagaccgacggcgacggcagagtggtggagggcaagcacgagagctacagaatcagcgccaccagcgccgaggagagagaccagtggatcgagagcatcagagccagcatcaccagagtgcccttctacgacctggtgagcaccagaaagaagaagatcgccagcaagcagtag

SEQ ID NO: 78361 - DNA, 474 bp, synthetic construct
  misc_feature 1..474: note = Description of Artificial Sequence: Synthetic coding sequence
  source 1..474: mol_type = other DNA
atggacctgtgccaccccgagcccgccgagctgagcagcggcgagaccgaggagctgcagagaatcaagtggcacagaaagcagctgctggaggacatccagaagctgaaggacgagatcgccgacgtgttcgcccagatcgactgcttcgagagcgccgaggagagcagaatggcccagaaggagaaggagctgtgcatcggcagaaagaagttcaacatggaccccgccaagggcatccagtacttcatcgagcacaagctgctgacccccgacgtgcaggacatcgccagattcctgtacaagggcgagggcctgaacaagaccgccatcggcacctacctgggcgagagagaccccatcaacctgcaggtgctgcaggccttcgtggactgccacgagttcgccaacctgaacctggtgcaggccctgagattcagagagggcgccagcgacctgggcttcggcggctag

SEQ ID NO: 78362 - DNA, 876 bp, synthetic construct
  misc_feature 1..876: note = Description of Artificial Sequence: Synthetic coding sequence
  source 1..876: mol_type = other DNA
gacagaagcaccggccacctgttccccagaggcgtgggcatggacctgtgccaccccgagcccgccgagctgagcagcggcgagaccgaggagctgcagagaatcaagtggcacagaaagcagctgctggaggacatccagaagctgaaggacgagatcgccgacgtgttcgcccagatcgactgcttcgagagcgccgaggagagcagaatggcccagaaggagaaggagctgtgcatcggcagaaagaagttcaacatggaccccgccaagggcatccagtacttcatcgagcacaagctgctgacccccgacgtgcaggacatcgccagattcctgtacaagggcgagggcctgaacaagaccgccatcggcacctacctgggcgagagagaccccatcaacctgcaggtgctgcaggccttcgtggactgccacgagttcgccaacctgaacctggtgcaggccctgagacagttcctgtggagcttcagactgcccggcgaggcccagaagatcgacagaatgatggaggccttcgccaccagatactgcctgtgcaaccccggcgtgttccagagcaccgacacctgctacgtgctgagcttcagcatcatcatgctgaacaccagcctgcacaaccccaacgtgagagacagaccccccttcgagagattcgtgagcatgaacagaggcatcaacaacggcagcgacctgcccgaggaccagctgagagtgacctgggagtgcagccagagaagaagcagagagagaaccttccagaaggaggaggtggccagaaccgaggcctgccccgactgggagagaagaggcgtgcagtgcggcagagagcccctgagacagcaccaggagtag

SEQ ID NO: 78363 - DNA, 444 bp, synthetic construct
  misc_feature 1..444: note = Description of Artificial Sequence: Synthetic coding sequence
  source 1..444: mol_type = other DNA
tgaacccacaccagcggcagcctgagcagcagagacagccaggccggcgacagcgccagcagagccggcggcagagtgaagacctggaagagaagatggttcatcctgaccgacaactgcctgtactacttcgagttcaccaccgacaaggagcccagaggcatcatccccctggagaacctgagcgtgcagaaggtggacgaccccaagaagcccttctgcctggagctgtacaaccccagctgcagaggccagaagatcaaggcctgcaagaccgacggcgacggcagagtggtggagggcaagcacgagagctacagaatcagcgccaccagcgccgaggagagagaccagtggatcgagagcatcagagccagcatcaccagagtgcccttctacgacctggtgagcaccagaaagaagaagatcgccagcaagcagtag

SEQ ID NO: 78364 - DNA, 354 bp, synthetic construct
  misc_feature 1..354: note = Description of Artificial Sequence: Synthetic coding sequence
  source 1..354: mol_type = other DNA
atggacctgtgccaccccgagcccgccgagctgagcagcggcgagaccgaggagctgcagagaatcaagtggcacagaaagcagctgctggaggacatccagaagctgaaggacgagatcgccgacgtgttcgcccagatcgactgcttcgagagcgccgaggagagcagaatggcccagaaggagaaggagctgtgcatcggcagaaagaagttcaacatggaccccgccaagggcatccagtacttcatcgagcacaagctgctgacccccgacgtgcaggacatcgccagattcctgtacaagggcgagggcctgaacaagaccgccatcggcacctacctgggcgagtag

SEQ ID NO: 78365 - DNA, 777 bp, synthetic construct
  misc_feature 1..777: note = Description of Artificial Sequence: Synthetic coding sequence
  source 1..777: mol_type = other DNA
atggtgctgtgcgtgcagggccccagacccctgctggccgtggagagaaccggccagagacccctgtgggcccccagcctggagctgcccaagcccgtgatgcagcccctgcccgccggcgccttcctggaggaggtggccgagggcacccccgcccagaccgagagcgagcccaaggtgctggaccccgaggaggacctgctgtgcatcgccaagaccttcagctacctgagagagagcggctggtactggggcagcatcaccgccagcgaggccagacagcacctgcagaagatgcccgagggcaccttcctggtgagagacagcacccaccccagctacctgttcaccctgagcgtgaagaccaccagaggccccaccaacgtgagaatcgagtacgccgacagcagcttcagactggacagcaactgcctgagcagacccagaatcctggccttccccgacgtggtgagcctggtgcagcactacgtggccagctgcaccgccgacaccagaagcgacagccccgaccccgcccccacccccgccctgcccatgcccaaggaggacgcccccagcgaccccgccctgcccgcccccccccccgccaccgccgtgcacctgaagctggtgcagcccttcgtgagaagaagcagcgccagaagcctgcagcacctgtgcagactggtgatcaacagactggtggccgacgtggactgcctgcccctgcccagaagaatggccgactacctgagacagtaccccttccagctgtag

SEQ ID NO: 78366 - DNA, 828 bp, synthetic construct
  misc_feature 1..828: note = Description of Artificial Sequence: Synthetic coding sequence
  source 1..828: mol_type = other DNA
atgtacctggagcacaccagccactgcccccaccacgacgacgacaccgccatggacacccccctgcccagacccagacccctgctggccgtggagagaaccggccagagacccctgtgggcccccagcctggagctgcccaagcccgtgatgcagcccctgcccgccggcgccttcctggaggaggtggccgagggcacccccgcccagaccgagagcgagcccaaggtgctggaccccgaggaggacctgctgtgcatcgccaagaccttcagctacctgagagagagcggctggtactggggcagcatcaccgccagcgaggccagacagcacctgcagaagatgcccgagggcaccttcctggtgagagacagcacccaccccagctacctgttcaccctgagcgtgaagaccaccagaggccccaccaacgtgagaatcgagtacgccgacagcagcttcagactggacagcaactgcctgagcagacccagaatcctggccttccccgacgtggtgagcctggtgcagcactacgtggccagctgcaccgccgacaccagaagcgacagccccgaccccgcccccacccccgccctgcccatgcccaaggaggacgcccccagcgaccccgccctgcccgcccccccccccgccaccgccgtgcacctgaagctggtgcagcccttcgtgagaagaagcagcgccagaagcctgcagcacctgtgcagactggtgatcaacagactggtggccgacgtggactgcctgcccctgcccagaagaatggccgactacctgagacagtaccccttccagctgtag

SEQ ID NO: 78367 - DNA, 1269 bp, synthetic construct
  misc_feature 1..1269: note = Description of Artificial Sequence: Synthetic coding sequence
  source 1..1269: mol_type = other DNA
atgcccgccggcagaagaggccccgccgcccagagcgccagaagacccccccccctgctgcccctgctgctgctgctgtgcgtgctgggcgcccccagagccggcagcggcgcccacaccgccgtgatcagcccccaggaccccaccctgctgatcggcagcagcctgctggccacctgcagcgtgcacggcgacccccccggcgccaccgccgagggcctgtactggaccctgaacggcagaagactgccccccgagctgagcagagtgctgaacgccagcaccctggccctggccctggccaacctgaacggcagcagacagagaagcggcgacaacctggtgtgccacgccagagacggcagcatcctggccggcagctgcctgtacgtgggcctgccccccgagaagcccgtgaacatcagctgctggagcaagaacatgaaggacctgacctgcagatggacccccggcgcccacggcgagaccttcctgcacaccaactacagcctgaagtacaagctgagatggtacggccaggacaacacctgcgaggagtaccacaccgtgggcccccacagctgccacatccccaaggacctggccctgttcaccccctacgagatctgggtggaggccaccaacagactgggcagcgccagaagcgacgtgctgaccctggacatcctggacgtggtgaccaccgaccccccccccgacgtgcacgtgagcagagtgggcggcctggaggaccagctgagcgtgagatgggtgagcccccccgccctgaaggacttcctgttccaggccaagtaccagatcagatacagagtggaggacagcgtggactggaaggtggtggacgacgtgagcaaccagaccagctgcagactggccggcctgaagcccggcaccgtgtacttcgtgcaggtgagatgcaaccccttcggcatctacggcagcaagaaggccggcatctggagcgagtggagccaccccaccgccgccagcacccccagaagcgagagacccggccccggcggcggcgcctgcgagcccagaggcggcgagcccagcagcggccccgtgagaagagagctgaagcagttcctgggctggctgaagaagcacgcctactgcagcaacctgagcttcagactgtacgaccagtggagagcctggatgcagaagagccacaagaccagaaaccaggacgagggcatcctgcccagcggcagaagaggcaccgccagaggccccgccagatag

SEQ ID NO: 78368 - DNA, 702 bp, synthetic construct
  misc_feature 1..702: note = Description of Artificial Sequence: Synthetic coding sequence
  source 1..702: mol_type = other DNA
atgggcagactggtgctgctgtggggcgccgccgtgttcctgctgggcggctggatggccctgggccagggcggcgccgccgagggcgtgcagatccagatcatctacttcaacctggagaccgtgcaggtgacctggaacgccagcaagtacagcagaaccaacctgaccttccactacagattcaacggcgacgaggcctacgaccagtgcaccaactacctgctgcaggagggccacaccagcggctgcctgctggacgccgagcagagagacgacatcctgtacttcagcatcagaaacggcacccaccccgtgttcaccgccagcagatggatggtgtactacctgaagcccagcagccccaagcacgtgagattcagctggcaccaggacgccgtgaccgtgacctgcagcgacctgagctacggcgacctgctgtacgaggtgcagtacagaagccccttcgacaccgagtggcagacccagagcagaagcgtgacccaggccggcgtgcagtggtgcgacctgtgcctgctgcagcccagcccccccagattcaagagattcagctgcctgagcctgcccagcagctgggactacagacaccccccccccagactggccaacttctgcatcatcagcagagacggcgtgagcccctgctggcccggctggagcagaacctgcgacctgagatag

SEQ ID NO: 78369 - DNA, 771 bp, synthetic construct
  misc_feature 1..771: note = Description of Artificial Sequence: Synthetic coding sequence
  source 1..771: mol_type = other DNA
atgggcagactggtgctgctgtggggcgccgccgtgttcctgctgggcggctggatggccctgggccagggcggcgccgccgagggcgtgcagatccagatcatctacttcaacctggagaccgtgcaggtgacctggaacgccagcaagtacagcagaaccaacctgaccttccactacagattcaacggcgacgaggcctacgaccagtgcaccaactacctgctgcaggagggccacaccagcggctgcctgctggacgccgagcagagagacgacatcctgtacttcagcatcagaaacggcacccaccccgtgttcaccgccagcagatggatggtgtactacctgaagcccagcagccccaagcacgtgagattcagctggcaccaggacgccgtgaccgtgacctgcagcgacctgagctacggcgacctgctgtacgaggtgcagtacagaagccccttcgacaccgagtggcagagcaagcaggagaacacctgcaacgtgaccatcgagggcctggacgccgagaagtgctacagcttctgggtgagagtgaaggccatggaggacgtgtacggccccgacacctaccccagcgactggagcgaggtgacctgctggcagagaggcgagatcagagacgcctgcgccgagacccccaccccccccaagcccaagctgagcaagttcatcctgatcagcagcctggccatcctgctgatggtgagcctgctgctgctgagcctgtggaagctgtggagatag

SEQ ID NO: 78370 - DNA, 768 bp, synthetic construct
  misc_feature 1..768: note = Description of Artificial Sequence: Synthetic coding sequence
  source 1..768: mol_type = other DNA
atgggcagactggtgctgctgtggggcgccgccgtgttcctgctgggcggctggatggccctgggccagggcggcgccgccgagggcgtgcagatccagatcatctacttcaacctggagaccgtgcaggtgacctggaacgccagcaagtacagcagaaccaacctgaccttccactacagattcaacggcgacgaggcctacgaccagtgcaccaactacctgctgcaggagggccacaccagcggctgcctgctggacgccgagcagagagacgacatcctgtacttcagcatcagaaacggcacccaccccgtgttcaccgccagcagatggatggtgtactacctgaagcccagcagccccaagcacgtgagattcagctggcaccaggacgccgtgaccgtgacctgcagcgacctgagctacggcgacctgctgtacgaggtgcagtacagaagccccttcgacaccgagtggcagagcaagcaggagaacacctgcaacgtgaccatcgagggcctggacgccgagaagtgctacagcttctgggtgagagtgaaggccatggaggacgtgtacggccccgacacctaccccagcgactggagcgaggtgacctgctggcagagaggcgagatcagagacgcctgcgccgagacccccaccccccccaagcccaagctgagcaagttcatcctgatcagcagcctggccatcctgctgatggtgagcctgctgctgctgagcctgtggaagctgtggtag

SEQ ID NO: 78371 - DNA, 411 bp, synthetic construct
  misc_feature 1..411: note = Description of Artificial Sequence: Synthetic coding sequence
  source 1..411: mol_type = other DNA
atgagaacccccggccccctgcccgtgctgctgctgctgctggccggcgcccccgccgccagacccaccccccccacctgctacagcagaatgagagccctgagccaggagatcaccagagacttcaacctgctgcaggtgagcgagcccagcgagccctgcgtgagatacctgcccagactgtacctggacatccacaactactgcgtgctggacaagctgagagacttcgtggccagccccccctgctggaaggtggcccaggtggacagcctgaaggacaaggccagaaagctgtacaccatcatgaacagcttctgcagaagagacctggtgttcctgctggacgactgcaacgccctggagtaccccatccccgtgaccaccgtgctgcccgacagacagagatag

SEQ ID NO: 78372 - DNA, 3762 bp, synthetic construct
  misc_feature 1..3762: note = Description of Artificial Sequence: Synthetic coding sequence
  source 1..3762: mol_type = other DNA
atggccgcccaggtgaccctggaggacgccctgagcaacgtggacctgctggaggagctgcccctgcccgaccagcagccctgcatcgagcccccccccagcagcctgctgtaccagcccaacttcaacaccaacttcgaggacagaaacgccttcgtgaccggcatcgccagatacatcgagcaggccaccgtgcacagcagcatgaacgagatgctggaggagggccaggagtacgccgtgatgctgtacacctggagaagctgcagcagagccatcccccaggtgaagtgcaacgagcagcccaacagagtggagatctacgagaagaccgtggaggtgctggagcccgaggtgaccaagctgatgaacttcatgtacttccagagaaacgccatcgagagattctgcggcgaggtgagaagactgtgccacgccgagagaagaaaggacttcgtgagcgaggcctacctgatcaccctgggcaagttcatcaacatgttcgccgtgctggacgagctgaagaacatgaagtgcagcgtgaagaacgaccacagcgcctacaagagagccgcccagttcctgagaaagatggccgacccccagagcatccaggagagccagaacctgagcatgttcctggccaaccacaacaagatcacccagagcctgcagcagcagctggaggtgatcagcggctacgaggagctgctggccgacatcgtgaacctgtgcgtggactactacgagaacagaatgtacctgacccccagcgagaagcacatgctgctgaaggtgatgggcttcggcctgtacctgatggacggcagcgtgagcaacatctacaagctggacgccaagaagagaatcaacctgagcaagatcgacaagtacttcaagcagctgcaggtggtgcccctgttcggcgacatgcagatcgagctggccagatacatcaagaccagcgcccactacgaggagaacaagagcagatggacctgcaccagcagcggcagcagcccccagtacaacatctgcgagcagatgatccagatcagagaggaccacatgagattcatcagcgagctggccagatacagcaacagcgaggtggtgaccggcagcggcagacaggaggcccagaagaccgacgccgagtacagaaagctgttcgacctggccctgcagggcctgcagctgctgagccagtggagcgcccacgtgatggaggtgtacagctggaagctggtgcaccccaccgacaagtacagcaacaaggactgccccgacagcgccgaggagtacgagagagccaccagatacaactacaccagcgaggagaagttcgccctggtggaggtgatcgccatgatcaagggcctgcaggtgctgatgggcagaatggagagcgtgttcaaccacgccatcagacacaccgtgtacgccgccctgcaggacttcagccaggtgaccctgagagagcccctgagacaggccatcaagaagaagaagaacgtgatccagagcgtgctgcaggccatcagaaagaccgtgtgcgactgggagaccggccacgagcccttcaacgaccccgccctgagaggcgagaaggaccccaagagcggcttcgacatcaaggtgcccagaagagccgtgggccccagcagcacccagctgtacatggtgagaaccatgctggagagcctgatcgccgacaagagcggcagcaagaagaccctgagaagcagcctggagggccccaccatcctggacatcgagaagttccacagagagagcttcttctacacccacctgatcaacttcagcgagaccctgcagcagtgctgcgacctgagccagctgtggttcagagagttcttcctggagctgaccatgggcagaagaatccagttccccatcgagatgagcatgccctggatcctgaccgaccacatcctggagaccaaggaggccagcatgatggagtacgtgctgtacagcctggacctgtacaacgacagcgcccactacgccctgaccagattcaacaagcagttcctgtacgacgagatcgaggccgaggtgaacctgtgcttcgaccagttcgtgtacaagctggccgaccagatcttcgcctactacaaggtgatggccggcagcctgctgctggacaagagactgagaagcgagtgcaagaaccagggcgccaccatccacctgccccccagcaacagatacgagaccctgctgaagcagagacacgtgcagctgctgggcagaagcatcgacctgaacagactgatcacccagagagtgagcgccgccatgtacaagagcctggagctggccatcggcagattcgagagcgaggacctgaccagcatcgtggagctggacggcctgctggagatcaacagaatgacccacaagctgctgagcagatacctgaccctggacggcttcgacgccatgttcagagaggccaaccacaacgtgagcgccccctacggcagaatcaccctgcacgtgttctgggagctgaactacgacttcctgcccaactactgctacaacggcagcaccaacagattcgtgagaaccgtgctgcccttcagccaggagttccagagagacaagcagcccaacgcccagccccagtacctgcacggcagcaaggccctgaacctggcctacagcagcatctacggcagctacagaaacttcgtgggccccccccacttccaggtgatctgcagactgctgggctaccagggcatcgccgtggtgatggaggagctgctgaaggtggtgaagagcctgctgcagggcaccatcctgcagtacgtgaagaccctgatggaggtgatgcccaagatctgcagactgcccagacacgagtacggcagccccggcatcctggagttcttccaccaccagctgaaggacatcgtggagtacgccgagctgaagaccgtgtgcttccagaacctgagagaggtgggcaacgccatcctgttctgcctgctgatcgagcagagcctgagcctggaggaggtgtgcgacctgctgcacgccgcccccttccagaacatcctgcccagagtgcacgtgaaggagggcgagagactggacgccaagatgaagagactggagagcaagtacgcccccctgcacctggtgcccctgatcgagagactgggcaccccccagcagatcgccatcgccagagagggcgacctgctgaccaaggagagactgtgctgcggcctgagcatgttcgaggtgatcctgaccagaatcagaagcttcctggacgaccccatctggagaggccccctgcccagcaacggcgtgatgcacgtggacgagtgcgtggagttccacagactgtggagcgccatgcagttcgtgtactgcatccccgtgggcacccacgagttcaccgtggagcagtgcttcggcgacggcctgcactgggccggctgcatgatcatcgtgctgctgggccagcagagaagattcgccgtgctggacttctgctaccacctgctgaaggtgcagaagcacgacggcaaggacgagatcatcaagaacgtgcccctgaagaagatggtggagagaatcagaaagttccagatcctgaacgacgagatcatcaccatcctggacaagtacctgaagagcggcgacggcgagggcacccccgtggagcacgtgagatgcttccagccccccatccaccagagcctggccagcagctag

SEQ ID NO: 78373 - DNA, 3768 bp, synthetic construct
  misc_feature 1..3768: note = Description of Artificial Sequence: Synthetic coding sequence
  source 1..3768: mol_type = other DNA
atgggccccaagcacgtgctgagacagcccggccccagcgagagacaccaccccgaggtgcccgcctggacccccagagccggccccccctgctggctgtgcagacagagatggggctggaccctgcacccccccggcagaggctgccccgccctgctgctgagcgagcccagaatggccgcccaggtgaccctggaggacgccctgagcaacgtggacctgctggaggagctgcccctgcccgaccagcagccctgcatcgagcccccccccagcagcctgctgtaccagaacgagatgctggaggagggccaggagtacgccgtgatgctgtacacctggagaagctgcagcagagccatcccccaggtgaagtgcaacgagcagcccaacagagtggagatctacgagaagaccgtggaggtgctggagcccgaggtgaccaagctgatgaacttcatgtacttccagagaaacgccatcgagagattctgcggcgaggtgagaagactgtgccacgccgagagaagaaaggacttcgtgagcgaggcctacctgatcaccctgggcaagttcatcaacatgttcgccgtgctggacgagctgaagaacatgaagtgcagcgtgaagaacgaccacagcgcctacaagagagccgcccagttcctgagaaagatggccgacccccagagcatccaggagagccagaacctgagcatgttcctggccaaccacaacaagatcacccagagcctgcagcagcagctggaggtgatcagcggctacgaggagctgctggccgacatcgtgaacctgtgcgtggactactacgagaacagaatgtacctgacccccagcgagaagcacatgctgctgaaggtgatgggcttcggcctgtacctgatggacggcagcgtgagcaacatctacaagctggacgccaagaagagaatcaacctgagcaagatcgacaagtacttcaagcagctgcaggtggtgcccctgttcggcgacatgcagatcgagctggccagatacatcaagaccagcgcccactacgaggagaacaagagcagatggacctgcaccagcagcggcagcagcccccagtacaacatctgcgagcagatgatccagatcagagaggaccacatgagattcatcagcgagctggccagatacagcaacagcgaggtggtgaccggcagcggcagacaggaggcccagaagaccgacgccgagtacagaaagctgttcgacctggccctgcagggcctgcagctgctgagccagtggagcgcccacgtgatggaggtgtacagctggaagctggtgcaccccaccgacaagtacagcaacaaggactgccccgacagcgccgaggagtacgagagagccaccagatacaactacaccagcgaggagaagttcgccctggtggaggtgatcgccatgatcaagggcctgcaggtgctgatgggcagaatggagagcgtgttcaaccacgccatcagacacaccgtgtacgccgccctgcaggacttcagccaggtgaccctgagagagcccctgagacaggccatcaagaagaagaagaacgtgatccagagcgtgctgcaggccatcagaaagaccgtgtgcgactgggagaccggccacgagcccttcaacgaccccgccctgagaggcgagaaggaccccaagagcggcttcgacatcaaggtgcccagaagagccgtgggccccagcagcacccagctgtacatggtgagaaccatgctggagagcctgatcgccgacaagagcggcagcaagaagaccctgagaagcagcctggagggccccaccatcctggacatcgagaagttccacagagagagcttcttctacacccacctgatcaacttcagcgagaccctgcagcagtgctgcgacctgagccagctgtggttcagagagttcttcctggagctgaccatgggcagaagaatccagttccccatcgagatgagcatgccctggatcctgaccgaccacatcctggagaccaaggaggccagcatgatggagtacgtgctgtacagcctggacctgtacaacgacagcgcccactacgccctgaccagattcaacaagcagttcctgtacgacgagatcgaggccgaggtgaacctgtgcttcgaccagttcgtgtacaagctggccgaccagatcttcgcctactacaaggtgatggccggcagcctgctgctggacaagagactgagaagcgagtgcaagaaccagggcgccaccatccacctgccccccagcaacagatacgagaccctgctgaagcagagacacgtgcagctgctgggcagaagcatcgacctgaacagactgatcacccagagagtgagcgccgccatgtacaagagcctggagctggccatcggcagattcgagagcgaggacctgaccagcatcgtggagctggacggcctgctggagatcaacagaatgacccacaagctgctgagcagatacctgaccctggacggcttcgacgccatgttcagagaggccaaccacaacgtgagcgccccctacggcagaatcaccctgcacgtgttctgggagctgaactacgacttcctgcccaactactgctacaacggcagcaccaacagattcgtgagaaccgtgctgcccttcagccaggagttccagagagacaagcagcccaacgcccagccccagtacctgcacggcagcaaggccctgaacctggcctacagcagcatctacggcagctacagaaacttcgtgggccccccccacttccaggtgatctgcagactgctgggctaccagggcatcgccgtggtgatggaggagctgctgaaggtggtgaagagcctgctgcagggcaccatcctgcagtacgtgaagaccctgatggaggtgatgcccaagatctgcagactgcccagacacgagtacggcagccccggcatcctggagttcttccaccaccagctgaaggacatcgtggagtacgccgagctgaagaccgtgtgcttccagaacctgcacgccgcccccttccagaacatcctgcccagagtgcacgtgaaggagggcgagagactggacgccaagatgaagagactggagagcaagtacgcccccctgcacctggtgcccctgatcgagagactgggcaccccccagcagatcgccatcgccagagagggcgacctgctgaccaaggagagactgtgctgcggcctgagcatgttcgaggtgatcctgaccagaatcagaagcttcctggacgaccccatctggagaggccccctgcccagcaacggcgtgatgcacgtggacgagtgcgtggagttccacagactgtggagcgccatgcagttcgtgtactgcatccccgtgggcacccacgagttcaccgtggagcagtgcttcggcgacggcctgcactgggccggctgcatgatcatcgtgctgctgggccagcagagaagattcgccgtgctggacttctgctaccacctgctgaaggtgcagaagcacgacggcaaggacgagatcatcaagaacgtgcccctgaagaagatggtggagagaatcagaaagttccagatcctgaacgacgagatcatcaccatcctggacaagtacctgaagagcggcgacggcgagggcacccccgtggagcacgtgagatgcttccagccccccatccaccagagcctggccagcagctag

SEQ ID NO: 78374 - DNA, 2469 bp, synthetic construct
  misc_feature 1..2469: note = Description of Artificial Sequence: Synthetic coding sequence
  source 1..2469: mol_type = other DNA
atggccgagagcctgggcagcgccgagctgctgagacagctgaagagcctgggcatggagagactgctgcacgccgtgaacaccttcctgagacagagctgcacctacctgcccctgctgaccttcggcggcaagaccagcttcgtgagcctggacgtgtacggcaccgaggccaactgcagcgccaccagctgcagcttccccaaggccgccgccacctggcccagaagacaggcccccggccccctgggcgagctggtgagaggcccccccgaccagggcgtggccgagcagagcttcagccacggcctgttcgagttcggcatcaccaacgtgccctgcatcttcagccccccccagatgttcccctggatcatccagctgtacatggtgagaaccatgctggagagcctgatcgccgacaagagcggcagcaagaagaccctgagaagcagcctggagggccccaccatcctggacatcgagaagttccacagagagagcttcttctacacccacctgatcaacttcagcgagaccctgcagcagtgctgcgacctgagccagctgtggttcagagagttcttcctggagctgaccatgggcagaagaatccagttccccatcgagatgagcatgccctggatcctgaccgaccacatcctggagaccaaggaggccagcatgatggagtacgtgctgtacagcctggacctgtacaacgacagcgcccactacgccctgaccagattcaacaagcagttcctgtacgacgagatcgaggccgaggtgaacctgtgcttcgaccagttcgtgtacaagctggccgaccagatcttcgcctactacaaggtgatggccggcagcctgctgctggacaagagactgagaagcgagtgcaagaaccagggcgccaccatccacctgccccccagcaacagatacgagaccctgctgaagcagagacacgtgcagctgctgggcagaagcatcgacctgaacagactgatcacccagagagtgagcgccgccatgtacaagagcctggagctggccatcggcagattcgagagcgaggacctgaccagcatcgtggagctggacggcctgctggagatcaacagaatgacccacaagctgctgagcagatacctgaccctggacggcttcgacgccatgttcagagaggccaaccacaacgtgagcgccccctacggcagaatcaccctgcacgtgttctgggagctgaactacgacttcctgcccaactactgctacaacggcagcaccaacagattcgtgagaaccgtgctgcccttcagccaggagttccagagagacaagcagcccaacgcccagccccagtacctgcacggcagcaaggccctgaacctggcctacagcagcatctacggcagctacagaaacttcgtgggccccccccacttccaggtgatctgcagactgctgggctaccagggcatcgccgtggtgatggaggagctgctgaaggtggtgaagagcctgctgcagggcaccatcctgcagtacgtgaagaccctgatggaggtgatgcccaagatctgcagactgcccagacacgagtacggcagccccggcatcctggagttcttccaccaccagctgaaggacatcgtggagtacgccgagctgaagaccgtgtgcttccagaacctgagagaggtgggcaacgccatcctgttctgcctgctgatcgagcagagcctgagcctggaggaggtgtgcgacctgctgcacgccgcccccttccagaacatcctgcccagagtgcacgtgaaggagggcgagagactggacgccaagatgaagagactggagagcaagtacgcccccctgcacctggtgcccctgatcgagagactgggcaccccccagcagatcgccatcgccagagagggcgacctgctgaccaaggagagactgtgctgcggcctgagcatgttcgaggtgatcctgaccagaatcagaagcttcctggacgaccccatctggagaggccccctgcccagcaacggcgtgatgcacgtggacgagtgcgtggagttccacagactgtggagcgccatgcagttcgtgtactgcatccccgtgggcacccacgagttcaccgtggagcagtgcttcggcgacggcctgcactgggccggctgcatgatcatcgtgctgctgggccagcagagaagattcgccgtgctggacttctgctaccacctgctgaaggtgcagaagcacgacggcaaggacgagatcatcaagaacgtgcccctgaagaagatggtggagagaatcagaaagttccagatcctgaacgacgagatcatcaccatcctggacaagtacctgaagagcggcgacggcgagggcacccccgtggagcacgtgagatgcttccagccccccatccaccagagcctggccagcagctag

SEQ ID NO: 78375 - DNA, 3762 bp, synthetic construct; identical to SEQ ID NO: 78372
  misc_feature 1..3762: note = Description of Artificial Sequence: Synthetic coding sequence
  source 1..3762: mol_type = other DNA

SEQ ID NO: 78376 - DNA, 486 bp, synthetic construct
  misc_feature 1..486: note = Description of Artificial Sequence: Synthetic coding sequence
  source 1..486: mol_type = other DNA
atggccgcccaggtgaccctggaggacgccctgagcaacgtggacctgctggaggagctgcccctgcccgaccagcagccctgcatcgagcccccccccagcagcctgctgtaccagcccaacttcaacaccaacttcgaggacagaaacgccttcgtgaccggcatcgccagatacatcgagcaggccaccgtgcacagcagcatgaacgagatgctggaggagggccaggagtacgccgtgatgctgtacacctggagaagctgcagcagagccatcccccaggtgaagtgcaacgagcagcccaacagagtggagatctacgagaagaccgtggaggtgctggagcccgaggtgaccaagctgatgaacttcatgtacttccagagaaacgccatcgagagattctgcggcgaggtgagaagactgtgccacgccgagagaagaaaggacttcgtgagcgaggcctacctgatcaccctgtag

SEQ ID NO: 78377 - DNA, 456 bp, synthetic construct
  misc_feature 1..456: note = Description of Artificial Sequence: Synthetic coding sequence
  source 1..456: mol_type = other DNA
atggccgcccaggtgaccctggaggacgccctgagcaacgtggacctgctggaggagctgcccctgcccgaccagcagccctgcatcgagcccccccccagcagcctgctgtaccagcccaacttcaacaccaacttcgaggacagaaacgccttcgtgaccggcatcgccagatacatcgagcaggccaccgtgcacagcagcatgaacgagatgctggaggagggccaggagtacgccgtgatgctgtacacctggagaagctgcagcagagccatcccccaggtgaagtgcaacgagcagcccaacagagtggagatctacgagaagaccgtggaggtgctggagcccgaggtgaccaagctgatgaacttcatgtacttccagagaaacgccatcgagagattctgcggcgaggtgagaagactgtgccacgccgagagaagaaaggactag

SEQ ID NO: 78378 - DNA, 3837 bp, synthetic construct
  misc_feature 1..3837: note = Description of Artificial Sequence: Synthetic coding sequence
  source 1..3837: mol_type = other DNA
atgaccacccacgtgaccctggaggacgccctgagcaacgtggacctgctggaggagctgcccctgcccgaccagcagccctgcatcgagcccccccccagcagcatcatgtaccaggccaacttcgacaccaacttcgaggacagaaacgccttcgtgaccggcatcgccagatacatcgagcaggccaccgtgcacagcagcatgaacgagatgctggaggagggccacgagtacgccgtgatgctgtacacctggagaagctgcagcagagccatccccagagtgaagtgcaacgagcagcccaacagagtggagatctacgagaagaccgtggaggtgctggagcccgaggtgaccaagctgatgaagttcatgtacttccagagaaaggccatcgagagattctgcagcgaggtgaagagactgtgccacgccgagagaagaaaggacttcgtgagcgaggcctacctgctgaccctgggcaagttcatcaacatgttcgccgtgctggacgagctgaagaacatgaagtgcagcgtgaagaacgaccacagcgcctacaagagagccgcccagttcctgagaaagatggccgacccccagagcatccaggagagccagaacctgagcatgttcctggccaaccacaacagaatcacccagtgcctgcaccagcagctggaggtgatccccggctacgaggagctgctggccgacatcgtgaacatctgcgtggactactacgagaacaagatgtacctgacccccagcgagaagcacatgctgctgaaggtgatgggcttcggcctgtacctgatggacggcaacgtgagcaacatctacaagctggacgccaagaagagaatcaacctgagcaagatcgacaagttcttcaagcagctgcaggtggtgcccctgttcggcgacatgcagatcgagctggccagatacatcaagaccagcgcccactacgaggagaacaagagcaagtggacctgcacccagagcagcatcagcccccagtacaacatctgcgagcagatggtgcagatcagagacgaccacatcagattcatcagcgagctggccagatacagcaacagcgaggtggtgaccggcagcggcctggacagccagaagagcgacgaggagtacagagagctgttcgacctggccctgagaggcctgcagctgctgagcaagtggagcgcccacgtgatggaggtgtacagctggaagctggtgcaccccaccgacaagttctgcaacaaggactgccccggcaccgccgaggagtacgagagagccaccagatacaactacaccagcgaggagaagttcgccttcgtggaggtgatcgccatgatcaagggcctgcaggtgctgatgggcagaatggagagcgtgttcaaccaggccatcagaaacaccatctacgccgccctgcaggacttcgcccaggtgaccctgagagagcccctgagacaggccgtgagaaagaagaagaacgtgctgatcagcgtgctgcaggccatcagaaagaccatctgcgactgggagggcggcagagagccccccaacgacccctgcctgagaggcgagaaggaccccaagggcggcttcgacatcaaggtgcccagaagagccgtgggccccagcagcacccaggcctgccagtggagccccagagccctgttccaccccaccggcggcacccagggcagaagaggctgcagaagcctgctgtacatggtgagaaccatgctggagagcctgatcgccgacaagagcggcagcaagaagaccctgagaagcagcctggacggccccatcgtgctggccatcgaggacttccacaagcagagcttcttcttcacccacctgctgaacatcagcgaggccctgcagcagtgctgcgacctgagccagctgtggttcagagagttcttcctggagctgaccatgggcagaagaatccagttccccatcgagatgagcatgccctggatcctgaccgaccacatcctggagaccaaggagcccagcatgatggagtacgtgctgtaccccctggacctgtacaacgacagcgcctactacgccctgaccaagttcaagaagcagttcctgtacgacgagatcgaggccgaggtgaacctgtgcttcgaccagttcgtgtacaagctggccgaccagatcttcgcctactacaaggccatggccggcagcgtgctgctggacaagagattcagagccgagtgcaagaactacggcgtgatcatcccctacccccccagcaacagatacgagaccctgctgaagcagagacacgtgcagctgctgggcagaagcatcgacctgaacagactgatcacccagagaatcagcgccgccatgtacaagagcctggaccaggccatcagcagattcgagagcgaggacctgaccagcatcgtggagctggagtggctgctggagatcaacagactgacccacagactgctgtgcaagcacatgaccctggacagcttcgacgccatgttcagagaggccaaccacaacgtgagcgccccctacggcagaatcaccctgcacgtgttctgggagctgaacttcgacttcctgcccaactactgctacaacggcagcaccaacagattcgtgagaaccgccatccccttcacccaggagccccagagagacaagcccgccaacgtgcagccctactacctgtacggcagcaagcccctgaacatcgcctacagccacatctacagcagctacagaaacttcgtgggccccccccacttcaagaccatctgcagactgctgggctaccagggcatcgccgtggtgatggaggagctgctgaagatcgtgaagagcctgctgcagggcaccatcctgcagtacgtgaagaccctgatcgaggtgatgcccaagatctgcagactgcccagacacgagtacggcagccccggcatcctggagttcttccaccaccagctgaaggacatcatcgagtacgccgagctgaagaccgacgtgttccagagcctgagagaggtgggcaacgccatcctgttctgcctgctgatcgagcaggccctgagccaggaggaggtgtgcgacctgctgcacgccgcccccttccagaacatcctgcccagagtgtacatcaaggagggcgagagactggaggtgagaatgaagagactggaggccaagtacgcccccctgcacctggtgcccctgatcgagagactgggcaccccccagcagatcgccatcgccagagagggcgacctgctgaccaaggagagactgtgctgcggcctgagcatgttcgaggtgatcctgaccagaatcagaagctacctgcaggaccccatctggagaggccccccccccaccaacggcgtgatgcacgtggacgagtgcgtggagttccacagactgtggagcgccatgcagttcgtgtactgcatccccgtgggcaccaacgagttcaccgccgagcagtgcttcggcgacggcctgaactgggccggctgcagcatcatcgtgctgctgggccagcagagaagattcgacctgttcgacttctgctaccacctgctgaaggtgcagagacaggacggcaaggacgagatcatcaagaacgtgcccctgaagaagatggccgacagaatcagaaagtaccagatcctgaacaacgaggtgttcgccatcctgaacaagtacatgaagagcgtggagaccgacagcagcaccgtggagcacgtgagatgcttccagccccccatccaccagagcctggccaccacctgctag

SEQ ID NO: 78379 - DNA, 3762 bp, synthetic construct
  misc_feature 1..3762: note = Description of Artificial Sequence: Synthetic coding sequence
  source 1..3762: mol_type = other DNA
atgaccacccacgtgaccctggaggacgccctgagcaacgtggacctgctggaggagctgcccctgcccgaccagcagccctgcatcgagcccccccccagcagcatcatgtaccaggccaacttcgacaccaacttcgaggacagaaacgccttcgtgaccggcatcgccagatacatcgagcaggccaccgtgcacagcagcatgaacgagatgctggaggagggccacgagtacgccgtgatgctgtacacctggagaagctgcagcagagccatccccaaggtgaagtgcaacgagcagcccaacagagtggagatctacgagaagaccgtggaggtgctggagcccgaggtgaccaagctgatgaagttcatgtacttccagagaaaggccatcgagagattctgcagcgaggtgaagagactgtgccacgccgagagaagaaaggacttcgtgagcgaggcctacctgctgaccctgggcaagttcatcaacatgttcgccgtgctggacgagctgaagaacatgaagtgcagcgtgaagaacgaccacagcgcctacaagagagccgcccagttcctgagaaagatggccgacccccagagcatccaggagagccagaacctgagcatgttcctggccaaccacaacagaatcacccagtgcctgcaccagcagctggaggtgatccccggctacgaggagctgctggccgacatcgtgaacatctgcgtggactactacgagaacaagatgtacctgacccccagcgagaagcacatgctgctgaaggtgatgggcttcggcctgtacctgatggacggcaacgtgagcaacatctacaagctggacgccaagaagagaatcaacctgagcaagatcgacaagttcttcaagcagctgcaggtggtgcccctgttcggcgacatgcagatcgagctggccagatacatcaagaccagcgcccactacgaggagaacaagagcaagtggacctgcacccagagcagcatcagcccccagtacaacatctgcgagcagatggtgcagatcagagacgaccacatcagattcatcagcgagctggccagatacagcaacagcgaggtggtgaccggcagcggcctggacagccagaagagcgacgaggagtacagagagctgttcgacctggccctgagaggcctgcagctgctgagcaagtggagcgcccacgtgatggaggtgtacagctggaagctggtgcaccccaccgacaagttctgcaacaaggactgccccggcaccgccgaggagtacgagagagccaccagatacaactacaccagcgaggagaagttcgccttcgtggaggtgatcgccatgatcaagggcctgcaggtgctgatgggcagaatggagagcgtgttcaaccaggccatcagaaacaccatctacgccgccctgcaggacttcgcccaggtgaccctgagagagcccctgagacaggccgtgagaaagaagaagaacgtgctgatcagcgtgctgcaggccatcagaaagaccatctgcgactgggagggcggcagagagccccccaacgacccctgcctgagaggcgagaaggaccccaagggcggcttcgacatcaaggtgcccagaagagccgtgggccccagcagcacccagctgtacatggtgagaaccatgctggagagcctgatcgccgacaagagcggcagcaagaagaccctgagaagcagcctggacggccccatcgtgctggccatcgaggacttccacaagcagagcttcttcttcacccacctgctgaacatcagcgaggccctgcagcagtgctgcgacctgagccagctgtggttcagagagttcttcctggagctgaccatgggcagaagaatccagttccccatcgagatgagcatgccctggatcctgaccgaccacatcctggagaccaaggagcccagcatgatggagtacgtgctgtaccccctggacctgtacaacgacagcgcctactacgccctgaccaagttcaagaagcagttcctgtacgacgagatcgaggccgaggtgaacctgtgcttcgaccagttcgtgtacaagctggccgaccagatcttcgcctactacaaggccatggccggcagcgtgctgctggacaagagattcagagccgagtgcaagaactacggcgtgatcatcccctacccccccagcaacagatacgagaccctgctgaagcagagacacgtgcagctgctgggcagaagcatcgacctgaacagactgatcacccagagaatcagcgccgccatgtacaagagcctggaccaggccatcagcagattcgagagcgaggacctgaccagcatcgtggagctggagtggctgctggagatcaacagactgacccacagactgctgtgcaagcacatgaccctggacagcttcgacgccatgttcagagaggccaaccacaacgtgagcgccccctacggcagaatcaccctgcacgtgttctgggagctgaacttcgacttcctgcccaactactgctacaacggcagcaccaacagattcgtgagaaccgccatccccttcacccaggagccccagagagacaagcccgccaacgtgcagccctactacctgtacggcagcaagcccctgaacatcgcctacagccacatctacagcagctacagaaacttcgtgggccccccccacttcaagaccatctgcagactgctgggctaccagggcatcgccgtggtgatggaggagctgctgaagatcgtgaagagcctgctgcagggcaccatcctgcagtacgtgaagaccctgatcgaggtgatgcccaagatctgcagactgcccagacacgagtacggcagccccggcatcctggagttcttccaccaccagctgaaggacatcatcgagtacgccgagctgaagaccgacgtgttccagagcctgagagaggtgggcaacgccatcctgttctgcctgctgatcgagcaggccctgagccaggaggaggtgtgcgacctgctgcacgccgcccccttccagaacatcctgcccagagtgtacatcaaggagggcgagagactggaggtgagaatgaagagactggaggccaagtacgcccccctgcacctggtgcccctgatcgagagactgggcaccccccagcagatcgccatcgccagagagggcgacctgctgaccaaggagagactgtgctgcggcctgagcatgttcgaggtgatcctgaccagaatcagaagctacctgcaggaccccatctggagaggccccccccccaccaacggcgtgatgcacgtggacgagtgcgtggagttccacagactgtggagcgccatgcagttcgtgtactgcatccccgtgggcaccaacgagttcaccgccgagcagtgcttcggcgacggcctgaactgggccggctgcagcatcatcgtgctgctgggccagcagagaagattcgacctgttcgacttctgctaccacctgctgaaggtgcagagacaggacggcaaggacgagatcatcaagaacgtgcccctgaagaagatggccgacagaatcagaaagtaccagatcctgaacaacgaggtgttcgccatcctgaacaagtacatgaagagcgtggagaccgacagcagcaccgtggagcacgtgagatgcttccagccccccatccaccagagcctggccaccacctgctag

SEQ ID NO: 78380 - DNA, 3762 bp, synthetic construct; identical to SEQ ID NO: 78379
  misc_feature 1..3762: note = Description of Artificial Sequence: Synthetic coding sequence
  source 1..3762: mol_type = other DNA

SEQ ID NO: 78381 - DNA, 2859 bp, synthetic construct
  misc_feature 1..2859: note = Description of Artificial Sequence: Synthetic coding sequence
  source 1..2859: mol_type = other DNA
gagaagagaagaagatggacctgcacccagagcagcatcagcccccagtacaacatctgcgagcagatggtgcagatcagagacgaccacatcagattcatcagcgagctggccagatacagcaacagcgaggtggtgaccggcagcggcctggacagccagaagagcgacgaggagtacagagagctgttcgacctggccctgagaggcctgcagctgctgagcaagtggagcgcccacgtgatggaggtgtacagctggaagctggtgcaccccaccgacaagttctgcaacaaggactgccccggcaccgccgaggagtacgagagagccaccagatacaactacaccagcgaggagaagttcgccttcgtggaggtgatcgccatgatcaagggcctgcaggtgctgatgggcagaatggagagcgtgttcaaccaggccatcagaaacaccatctacgccgccctgcaggacttcgcccaggtgaccctgagagagcccctgagacaggccgtgagaaagaagaagaacgtgctgatcagcgtgctgcaggccatcagaaagaccatctgcgactgggagggcggcagagagccccccaacgacccctgcctgagaggcgagaaggaccccaagggcggcttcgacatcaaggtgcccagaagagccgtgggccccagcagcacccaggcctgccagtggagccccagagccctgttccaccccaccggcggcacccagggcagaagaggctgcagaagcctgctgtacatggtgagaaccatgctggagagcctgatcgccgacaagagcggcagcaagaagaccctgagaagcagcctggacggccccatcgtgctggccatcgaggacttccacaagcagagcttcttcttcacccacctgctgaacatcagcgaggccctgcagcagtgctgcgacctgagccagctgtggttcagagagttcttcctggagctgaccatgggcagaagaatccagttccccatcgagatgagcatgccctggatcctgaccgaccacatcctggagaccaaggagcccagcatgatggagtacgtgctgtaccccctggacctgtacaacgacagcgcctactacgccctgaccaagttcaagaagcagttcctgtacgacgagatcgaggccgaggtgaacctgtgcttcgaccagttcgtgtacaagctggccgaccagatcttcgcctactacaaggccatggccggcagcgtgctgctggacaagagattcagagccgagtgcaagaactacggcgtgatcatcccctacccccccagcaacagatacgagaccctgctgaagcagagacacgtgcagctgctgggcagaagcatcgacctgaacagactgatcacccagagaatcagcgccgccatgtacaagagcctggaccaggccatcagcagattcgagagcgaggacctgaccagcatcgtggagctggagtggctgctggagatcaacagactgacccacagactgctgtgcaagcacatgaccctggacagcttcgacgccatgttcagagaggccaaccacaacgtgagcgccccctacggcagaatcaccctgcacgtgttctgggagctgaacttcgacttcctgcccaactactgctacaacggcagcaccaacagattcgtgagaaccgccatccccttcacccaggagccccagagagacaagcccgccaacgtgcagccctactacctgtacggcagcaagcccctgaacatcgcctacagccacatctacagcagctacagaaacttcgtgggccccccccacttcaagaccatctgcagactgctgggctaccagggcatcgccgtggtgatggaggagctgctgaagatcgtgaagagcctgctgcagggcaccatcctgcagtacgtgaagaccctgatcgaggtgatgcccaagatctgcagactgcccagacacgagtacggcagccccggcatcctggagttcttccaccaccagctgaaggacatcatcgagtacgccgagctgaagaccgacgtgttccagagcctgagagaggtgggcaacgccatcctgttctgcctgctgatcgagcaggccctgagccaggaggaggtgtgcgacctgctgcacgccgcccccttccagaacatcctgcccagagtgtacatcaaggagggcgagagactggaggtgagaatgaagagactggaggccaagtacgcccccctgcacctggtgcccctgatcgagagactgggcaccccccagcagatcgccatcgccagagagggcgacctgctgaccaaggagagactgtgctgcggcctgagcatgttcgaggtgatcctgaccagaatcagaagctacctgcaggaccccatctggagaggccccccccccaccaacggcgtgatgcacgtggacgagtgcgtggagttccacagactgtggagcgccatgcagttcgtgtactgcatccccgtgggcaccaacgagttcaccgccgagcagtgcttcggcgacggcctgaactgggccggctgcagcatcatcgtgctgctgggccagcagagaagattcgacctgttcgacttctgctaccacctgctgaaggtgcagagacaggacggcaaggacgagatcatcaagaacgtgcccctgaagaagatggccgacagaatcagaaagtaccagatcctgaacaacgaggtgttcgccatcctgaacaagtacatgaagagcgtggagaccgacagcagcaccgtggagcacgtgagatgcttccagccccccatccaccagagcctggccaccacctgctag

SEQ ID NO: 78382 - DNA, 651 bp, synthetic construct
  misc_feature 1..651: note = Description of Artificial Sequence: Synthetic coding sequence
  source 1..651: mol_type = other DNA
atggccggcagcgtgctgctggacaagagattcagagccgagtgcaagaactacggcgtgatcatcccctacccccccagcaacagatacgagaccctgctgaagcagagacacgtgcagctgctgggcagaagcatcgacctgaacagactgatcacccagagaatcagcgccgccatgtacaagagcctggaccaggccatcagcagattcgagagcgaggacctgaccagcatcgtggagctggagtggctgctggagatcaacagactgacccacagactgctgtgcaagcacatgaccctggacagcttcgacgccatgttcagagaggccaaccacaacgtgagcgccccctacggcagaatcaccctgcacgtgttctgggagctgaacttcgacttcctgcccaactactgctacaacggcagcaccaacagattcgtgagaaccgccagcttccaccccagaaccaccaccagacagacctgccagagacccgccctgctgcccctgtggatccaggccagccagcactgcctgcagccccacctgcagctgctgcaggagttcagaggcgccaccagcttccaggactacgccgacagctgggtgatcagagccagcctgtggagctggagaaactgctag

SEQ ID NO: 78383 - DNA, 3537 bp, synthetic construct
  misc_feature 1..3537: note = Description of Artificial Sequence: Synthetic coding sequence
  source 1..3537: mol_type = other DNA
atgaccacccacgtgaccctggaggacgccctgagcaacgtggacctgctggaggagctgcccctgcccaacgagcagcccaacagagtggagatctacgagaagaccgtggaggtgctggagcccgaggtgaccaagctgatgaagttcatgtacttccagagaaaggccatcgagagattctgcagcgaggtgaagagactgtgccacgccgagagaagaaaggacttcgtgagcgaggcctacctgctgaccctgggcaagttcatcaacatgttcgccgtgctggacgagctgaagaacatgaagtgcagcgtgaagaacgaccacagcgcctacaagagagccgcccagttcctgagaaagatggccgacccccagagcatccaggagagccagaacctgagcatgttcctggccaaccacaacagaatcacccagtgcctgcaccagcagctggaggtgatccccggctacgaggagctgctggccgacatcgtgaacatctgcgtggactactacgagaacaagatgtacctgacccccagcgagaagcacatgctgctgaaggtgatgggcttcggcctgtacctgatggacggcaacgtgagcaacatctacaagctggacgccaagaagagaatcaacctgagcaagatcgacaagttcttcaagcagctgcaggtggtgcccctgttcggcgacatgcagatcgagctggccagatacatcaagaccagcgcccactacgaggagaacaagagcaagtggacctgcacccagagcagcatcagcccccagtacaacatctgcgagcagatggtgcagatcagagacgaccacatcagattcatcagcgagctggccagatacagcaacagcgaggtggtgaccggcagcggcctggacagccagaagagcgacgaggagtacagagagctgttcgacctggccctgagaggcctgcagctgctgagcaagtggagcgcccacgtgatggaggtgtacagctggaagctggtgcaccccaccgacaagttctgcaacaaggactgccccggcaccgccgaggagtacgagagagccaccagatacaactacaccagcgaggagaagttcgccttcgtggaggtgatcgccatgatcaagggcctgcaggtgctgatgggcagaatggagagcgtgttcaaccaggccatcagaaacaccatctacgccgccctgcaggacttcgcccaggtgaccctgagagagcccctgagacaggccgtgagaaagaagaagaacgtgctgatcagcgtgctgcaggccatcagaaagaccatctgcgactgggagggcggcagagagccccccaacgacccctgcctgagaggcgagaaggaccccaagggcggcttcgacatcaaggtgcccagaagagccgtgggccccagcagcacccagctgtacatggtgagaaccatgctggagagcctgatcgccgacaagagcggcagcaagaagaccctgagaagcagcctggacggccccatcgtgctggccatcgaggacttccacaagcagagcttcttcttcacccacctgctgaacatcagcgaggccctgcagcagtgctgcgacctgagccagctgtggttcagagagttcttcctggagctgaccatgggcagaagaatccagttccccatcgagatgagcatgccctggatcctgaccgaccacatcctggagaccaaggagcccagcatgatggagtacgtgctgtaccccctggacctgtacaacgacagcgcctactacgccctgaccaagttcaagaagcagttcctgtacgacgagatcgaggccgaggtgaacctgtgcttcgaccagttcgtgtacaagctggccgaccagatcttcgcctactacaaggccatggccggcagcgtgctgctggacaagagattcagagccgagtgcaagaactacggcgtgatcatcccctacccccccagcaacagatacgagaccctgctgaagcagagacacgtgcagctgctgggcagaagcatcgacctgaacagactgatcacccagagaatcagcgccgccatgtacaagagcctggaccaggccatcagcagattcgagagcgaggacctgaccagcatcgtggagctggagtggctgctggagatcaacagactgacccacagactgctgtgcaagcacatgaccctggacagcttcgacgccatgttcagagaggccaaccacaacgtgagcgccccctacggcagaatcaccctgcacgtgttctgggagctgaacttcgacttcctgcccaactactgctacaacggcagcaccaacagattcgtgagaaccgccatccccttcacccaggagccccagagagacaagcccgccaacgtgcagccctactacctgtacggcagcaagcccctgaacatcgcctacagccacatctacagcagctacagaaacttcgtgggccccccccacttcaagaccatctgcagactgctgggctaccagggcatcgccgtggtgatggaggagctgctgaagatcgtgaagagcctgctgcagggcaccatcctgcagtacgtgaagaccctgatcgaggtgatgcccaagatctgcagactgcccagacacgagtacggcagccccggcatcctggagttcttccaccaccagctgaaggacatcatcgagtacgccgagctgaagaccgacgtgttccagagcctgagagaggtgggcaacgccatcctgttctgcctgctgatcgagcaggccctgagccaggaggaggtgtgcgacctgctgcacgccgcccccttccagaacatcctgcccagagtgtacatcaaggagggcgagagactggaggtgagaatgaagagactggaggccaagtacgcccccctgcacctggtgcccctgatcgagagactgggcaccccccagcagatcgccatcgccagagagggcgacctgctgaccaaggagagactgtgctgcggcctgagcatgttcgaggtgatcctgaccagaatcagaagctacctgcaggaccccatctggagaggccccccccccaccaacggcgtgatgcacgtggacgagtgcgtggagttccacagactgtggagcgccatgcagttcgtgtactgcatccccgtgggcaccaacgagttcaccgccgagcagtgcttcggcgacggcctgaactgggccggctgcagcatcatcgtgctgctgggccagcagagaagattcgacctgttcgacttctgctaccacctgctgaaggtgcagagacaggacggcaaggacgagatcatcaagaacgtgcccctgaagaagatggccgacagaatcagaaagtaccagatcctgaacaacgaggtgttcgccatcctgaacaagtacatgaagagcgtggagaccgacagcagcaccgtggagcacgtgagatgcttccagccccccatccaccagagcctggccaccacctgctag

SEQ ID NO: 78384 - DNA, 4617 bp, synthetic construct
  misc_feature 1..4617: note = Description of Artificial Sequence: Synthetic coding sequence
  source 1..4617: mol_type = other DNA
atggagcccagaatggagagctgcctggcccaggtgctgcagaaggacgtgggcaagagactgcaggtgggccaggagctgatcgactacttcagcgacaagcagaagagcgccgacctggagcacgaccagaccatgctggacaagctggtggacggcctggccaccagctgggtgaacagcagcaactacaaggtggtgctgctgggcatggacatcctgagcgccctggtgaccagactgcaggacagattcaaggcccagatcggcaccgtgctgcccagcctgatcgacagactgggcgacgccaaggacagcgtgagagagcaggaccagaccctgctgctgaagatcatggaccaggccgccaacccccagtacgtgtgggacagaatgctgggcggcttcaagcacaagaacttcagaaccagagagggcatctgcctgtgcctgatcgccaccctgaacgccagcggcgcccagaccctgaccctgagcaagatcgtgccccacatctgcaacctgctgggcgaccccaacagccaggtgagagacgccgccatcaacagcctggtggagatctacagacacgtgggcgagagagtgagagccgacctgagcaagaagggcctgccccagagcagactgaacgtgatcttcaccaagttcgacgaggtgcagaagagcggcaacatgatccagagcgccaacgacaagaacttcgacgacgaggacagcgtggacggcaacagacccagcagcgccagcagcaccagcagcaaggccccccccagcagcagaagaaacgtgggcatgggcaccaccagaagactgggcagcagcaccctgggcagcaagagcagcgccgccaaggagggcgccggcgccgtggacgaggaggacttcatcaaggccttcgacgacgtgcccgtggtgcagatctacagcagcagagacctggaggagagcatcaacaagatcagagagatcctgagcgacgacaagcacgactgggagcagagagtgaacgccctgaagaagatcagaagcctgctgctggccggcgccgccgagtacgacaacttcttccagcacctgagactgctggacggcgccttcaagctgagcgccaaggacctgagaagccaggtggtgagagaggcctgcatcaccctgggccacctgagcagcgtgctgggcaacaagttcgaccacggcgccgaggccatcatgcccaccatcttcaacctgatccccaacagcgccaagatcatggccaccagcggcgtggtggccgtgagactgatcatcagacacacccacatccccagactgatccccgtgatcaccagcaactgcaccagcaagagcgtggccgtgagaagaagatgcttcgagttcctggacctgctgctgcaggagtggcagacccacagcctggagagacacatcagcgtgctggccgagaccatcaagaagggcatccacgacgccgacagcgaggccagaatcgaggccagaaagtgctactggggcttccacagccacttcagcagagaggccgagcacctgtaccacaccctggagagcagctaccagaaggccctgcagagccacctgaagaacagcgacagcatcgtgagcctgccccagagcgacagaagcagcagcagcagccaggagagcctgaacagacccctgagcgccaagagaagccccaccggcagcaccaccagcagagccagcaccgtgagcaccaagagcgtgagcaccaccggcagcctgcagagaagcagaagcgacatcgacgtgaacgccgccgccagcgccaagagcaaggtgagcagcagcagcggcaccacccccttcagcagcgccgccgccctgccccccggcagctacgccagcctgggcagaatcagaaccagaagacagagcagcggcagcgccaccaacgtggccagcacccccgacaacagaggcagaagcagagccaaggtggtgagccagagccagagaagcagaagcgccaaccccgccggcgccggcagcagaagcagcagccccggcaagctgctgggcagcggctacggcggcctgaccggcggcagcagcagaggcccccccgtgacccccagcagcgagaagagaagcaagatccccagaagccagggctgcagcagagagaccagccccaacagaatcggcctggccagaagcagcagaatccccagacccagcatgagccagggctgcagcagagacaccagcagagagagcagcagagacaccagccccgccagaggcttcccccccctggacagattcggcctgggccagcccggcagaatccccggcagcgtgaacgccatgagagtgctgagcaccagcaccgacctggaggccgccgtggccgacgccctgaagaagcccgtgagaagaagatacgagccctacggcatgtacagcgacgacgacgccaacagcgacgccagcagcgtgtgcagcgagagaagctacggcagcagaaacggcggcatcccccactacctgagacagaccgaggacgtggccgaggtgctgaaccactgcgccagcagcaactggagcgagagaaaggagggcctgctgggcctgcagaacctgctgaagagccagagaaccctgagcagagtggagctgaagagactgtgcgagatcttcaccagaatgttcgccgacccccacagcaagagagtgttcagcatgttcctggagaccctggtggacttcatcatcatccacaaggacgacctgcaggactggctgttcgtgctgctgacccagctgctgaagaagatgggcgccgacctgctgggcagcgtgcaggccaaggtgcagaaggccctggacgtgaccagagacagcttccccttcgaccagcagttcaacatcctgatgagattcatcgtggaccagacccagacccccaacctgaaggtgaaggtggccatcctgaagtacatcgagagcctggccagacagatggaccccaccgacttcgtgaacagcagcgagaccagactggccgtgagcagaatcatcacctggaccaccgagcccaagagcagcgacgtgagaaaggccgcccagatcgtgctgatcagcctgttcgagctgaacacccccgagttcaccatgctgctgggcgccctgcccaagaccttccaggacggcgccaccaagctgctgcacaaccacctgaagaacagcagcaacaccagcgtgggcagccccagcaacaccatcggcagaacccccagcagacacaccagcagcagaaccagccccctgaccagccccaccaactgcagccacggcggcctgagccccagcagactgtggggctggagcgccgacggcctggccaagcaccccccccccttcagccagcccaacagcatccccaccgcccccagccacaaggccctgagaagaagctacagccccagcatgctggactacgacaccgagaacctgaacagcgaggagatctacagcagcctgagaggcgtgaccgaggccatcgagaagttcagcttcagaagccaggaggacctgaacgagcccatcaagagagacggcaagaaggagtgcgacatcgtgagcagagacggcggcgccgccagccccgccaccgagggcagaggcggcagcgaggtggagggcggcagaaccgccctggacaacaagaccagcctgctgaacacccagccccccagagccttccccggccccagagccagagactacaacccctacccctacagcgacgccatcaacacctacgacaagaccgccctgaaggaggccgtgttcgacgacgacatggagcagctgagagacgtgcccatcgaccacagcgacctggtggccgacctgctgaaggagctgagcaaccacaacgagagagtggaggagagaaagggcgccctgctggagctgctgaagatcaccagagaggacagcctgggcgtgtgggaggagcacttcaagaccatcctgctgctgctgctggagaccctgggcgacaaggaccacagcatcagagccctggccctgagagtgctgagagagatcctgagaaaccagcccgccagattcaagaactacgccgagctgaccatcatgaagaccctggaggcccacaaggacagccacaaggaggtggtgagagccgccgaggaggccgccagcaccctggccagcagcatccaccccgagcagtgcatcaaggtgctgtgccccatcatccagaccgccgactaccccatcaacctggccgccatcaagatgcagaccaaggtggtggagagaatcgccaaggagagcctgctgcagctgctggtggacatcatccccggcctgctgcagggctacgacaacaccgagagcagcgtgagaaaggccagcgtgttctgcctggtggccatctacagcgtgatcggcgaggacctgaagccccacctggcccagctgaccggcagcaagatgaagctgctgaacctgtacatcaagagagcccagaccaccaacagcaacagcagcagcagcagcgacgtgagcacccacagctag

SEQ ID NO: 78385 - DNA, 4437 bp, synthetic construct
  misc_feature 1..4437: note = Description of Artificial Sequence: Synthetic coding sequence
  source 1..4437: mol_type = other DNA
atggagcccagaatggagagctgcctggcccaggtgctgcagaaggacgtgggcaagagactgcaggtgggccaggagctgatcgactacttcagcgacaagcagaagagcgccgacctggagcacgaccagaccatgctggacaagctggtggacggcctggccaccagctgggtgaacagcagcaactacaaggtggtgctgctgggcatggacatcctgagcgccctggtgaccagactgcaggacagattcaaggcccagatcggcaccgtgctgcccagcctgatcgacagactgggcgacgccaaggacagcgtgagagagcaggaccagaccctgctgctgaagatcatggaccaggccgccaacccccagtacgtgtgggacagaatgctgggcggcttcaagcacaagaacttcagaaccagagagggcatctgcctgtgcctgatcgccaccctgaacgccagcggcgcccagaccctgaccctgagcaagatcgtgccccacatctgcaacctgctgggcgaccccaacagccaggtgagagacgccgccatcaacagcctggtggagatctacagacacgtgggcgagagagtgagagccgacctgagcaagaagggcctgccccagagcagactgaacgtgatcttcaccaagttcgacgaggtgcagaagagcggcaacatgatccagagcgccaacgacaagaacttcgacgacgaggacagcgtggacggcaacagacccagcagcgccagcagcaccagcagcaaggccccccccagcagcagaagaaacgtgggcatgggcaccaccagaagactgggcagcagcaccctgggcagcaagagcagcgccgccaaggagggcgccggcgccgtggacgaggaggacttcatcaaggccttcgacgacgtgcccgtggtgcagatctacagcagcagagacctggaggagagcatcaacaagatcagagagatcctgagcgacgacaagcacgactgggagcagagagtgaacgccctgaagaagatcagaagcctgctgctggccggcgccgccgagtacgacaacttcttccagcacctgagactgctggacggcgccttcaagctgagcgccaaggacctgagaagccaggtggtgagagaggcctgcatcaccctgggccacctgagcagcgtgctgggcaacaagttcgaccacggcgccgaggccatcatgcccaccatcttcaacctgatccccaacagcgccaagatcatggccaccagcggcgtggtggccgtgagactgatcatcagacacacccacatccccagactgatccccgtgatcaccagcaactgcaccagcaagagcgtggccgtgagaagaagatgcttcgagttcctggacctgctgctgcaggagtggcagacccacagcctggagagacacatcagcgtgctggccgagaccatcaagaagggcatccacgacgccgacagcgaggccagaatcgaggccagaaagtgctactggggcttccacagccacttcagcagagaggccgagcacctgtaccacaccctggagagcagctaccagaaggccctgcagagccacctgaagaacagcgacagcatcgtgagcctgccccagagcgacagaagcagcagcagcagccaggagagcctgaacagacccctgagcgccaagagaagccccaccggcagcaccaccagcagagccagcaccgtgagcaccaagagcgtgagcaccaccggcagcctgcagagaagcagaagcgacatcgacgtgaacgccgccgccagcgccaagagcaaggtgagcagcagcagcggcaccacccccttcagcagcgccgccgccctgccccccggcagctacgccagcctggacggcaccaccaccaaggccgagggcagaatcagaaccagaagacagagcagcggcagcgccaccaacgtggccagcacccccgacaacagaggcagaagcagagccaaggtggtgagccagagccagagaagcagaagcgccaaccccgccggcgccggcagcagaagcagcagccccggcaagctgctgggcagcggctacggcggcctgaccggcggcagcagcagaggcccccccgtgacccccagcagcgagaagagaagcaagatccccagaagccagggctgcagcagagagaccagccccaacagaatcggcctggacagattcggcctgggccagcccggcagaatccccggcagcgtgaacgccatgagagtgctgagcaccagcaccgacctggaggccgccgtggccgacgccctgctgctgggcgacagcagaagcaagaagaagcccgtgagaagaagatacgagccctacggcatgtacagcgacgacgacgccaacagcgacgccagcagcgtgtgcagcgagagaagctacggcagcagaaacggcggcatcccccactacctgagacagaccgaggacgtggccgaggtgctgaaccactgcgccagcagcaactggagcgagagaaaggagggcctgctgggcctgcagaacctgctgaagagccagagaaccctgagcagagtggagctgaagagactgtgcgagatcttcaccagaatgttcgccgacccccacagcaaggtgttcagcatgttcctggagaccctggtggacttcatcatcatccacaaggacgacctgcaggactggctgttcgtgctgctgacccagctgctgaagaagatgggcgccgacctgctgggcagcgtgcaggccaaggtgcagaaggccctggacgtgaccagagacagcttccccttcgaccagcagttcaacatcctgatgagattcatcgtggaccagacccagacccccaacctgaaggtgaaggtggccatcctgaagtacatcgagagcctggccagacagatggaccccaccgacttcgtgaacagcagcgagaccagactggccgtgagcagaatcatcacctggaccaccgagcccaagagcagcgacgtgagaaaggccgcccagatcgtgctgatcagcctgttcgagctgaacacccccgagttcaccatgctgctgggcgccctgcccaagaccttccaggacggcgccaccaagctgctgcacaaccacctgaagaacagcagcaacaccagcgtgggcagccccagcaacaccatcggcagaacccccagcagacacaccagcagcagaaccagccccctgaccagccccaccaactgcagccacggcggcctgagccccagcatgctggactacgacaccgagaacctgaacagcgaggagatctacagcagcctgagaggcgtgaccgaggccatcgagaagttcagcttcagaagccaggaggacctgaacgagcccatcaagagagacggcaagaaggagtgcgacatcgtgagcagagacggcggcgccgccagccccgccaccgagggcagaggcggcagcgaggtggagggcggcagaaccgccctggacaacaagaccagcctgctgaacacccagccccccagagccttccccggccccagagccagagactacaacccctacccctacagcgacgccatcaacacctacgacaagaccgccctgaaggaggccgtgttcgacgacgacatggagcagctgagagacgtgcccatcgaccacagcgacctggtggccgacctgctgaaggagctgagcaaccacaacgagagagtggaggagagaaagggcgccctgctggagctgctgaagatcaccagagaggacagcctgggcgtgtgggaggagcacttcaagaccatcctgctgctgctgctggagaccctgggcgacaaggaccacagcatcagagccctggccctgagagtgctgagagagatcctgagaaaccagcccgccagattcaagaactacgccgagctgaccatcatgaagaccctggaggcccacaaggacagccacaaggaggtggtgagagccgccgaggaggccgccagcaccctggccagcagcatccaccccgagcagtgcatcaaggtgctgtgccccatcatccagaccgccgactaccccatcaacctggccgccatcaagatgcagaccaaggtggtggagagaatcgccaaggagagcctgctgcagctgctggtggacatcatccccggcctgctgcagggctacgacaacaccgagagcagcgtgagaaaggccagcgtgttctgcctggtggccatctacagcgtgatcggcgaggacctgaagccccacctggcccagctgaccggcagcaagatgaagctgctgaacctgtacatcaagagagcccagaccaccaacagcaacagcagcagcagcagcgacgtgagcacccacagctag

SEQ ID NO: 78386 - DNA, 4416 bp, synthetic construct
  misc_feature 1..4416: note = Description of Artificial Sequence: Synthetic coding sequence
  source 1..4416: mol_type = other DNA
atggagcccagaatggagagctgcctggcccaggtgctgcagaaggacgtgggcaagagactgcaggtgggccaggagctgatcgactacttcagcgacaagcagaagagcgccgacctggagcacgaccagaccatgctggacaagctggtggacggcctggccaccagctgggtgaacagcagcaactacaaggtggtgctgctgggcatggacatcctgagcgccctggtgaccagactgcaggacagattcaaggcccagatcggcaccgtgctgcccagcctgatcgacagactgggcgacgccaaggacagcgtgagagagcaggaccagaccctgctgctgaagatcatggaccaggccgccaacccccagtacgtgtgggacagaatgctgggcggcttcaagcacaagaacttcagaaccagagagggcatctgcctgtgcctgatcgccaccctgaacgccagcggcgcccagaccctgaccctgagcaagatcgtgccccacatctgcaacctgctgggcgaccccaacagccaggtgagagacgccgccatcaacagcctggtggagatctacagacacgtgggcgagagagtgagagccgacctgagcaagaagggcctgccccagagcagactgaacgtgatcttcaccaagttcgacgaggtgcagaagagcggcaacatgatccagagcgccaacgacaagaacttcgacgacgaggacagcgtggacggcaacagacccagcagcgccagcagcaccagcagcaaggccccccccagcagcagaagaaacgtgggcatgggcaccaccagaagactgggcagcagcaccctgggcagcaagagcagcgccgccaaggagggcgccggcgccgtggacgaggaggacttcatcaaggccttcgacgacgtgcccgtggtgcagatctacagcagcagagacctggaggagagcatcaacaagatcagagagatcctgagcgacgacaagcacgactgggagcagagagtgaacgccctgaagaagatcagaagcctgctgctggccggcgccgccgagtacgacaacttcttccagcacctgagactgctggacggcgccttcaagctgagcgccaaggacctgagaagccaggtggtgagagaggcctgcatcaccctgggccacctgagcagcgtgctgggcaacaagttcgaccacggcgccgaggccatcatgcccaccatcttcaacctgatccccaacagcgccaagatcatggccaccagcggcgtggtggccgtgagactgatcatcagacacacccacatccccagactgatccccgtgatcaccagcaactgcaccagcaagagcgtggccgtgagaagaagatgcttcgagttcctggacctgctgctgcaggagtggcagacccacagcctggagagacacatcagcgtgctggccgagaccatcaagaagggcatccacgacgccgacagcgaggccagaatcgaggccagaaagtgctactggggcttccacagccacttcagcagagaggccgagcacctgtaccacaccctggagagcagctaccagaaggccctgcagagccacctgaagaacagcgacagcatcgtgagcctgccccagagcgacagaagcagcagcagcagccaggagagcctgaacagacccctgagcgccaagagaagccccaccggcagcaccaccagcagagccagcaccgtgagcaccaagagcgtgagcaccaccggcagcctgcagagaagcagaagcgacatcgacgtgaacgccgccgccagcgccaagagcaaggtgagcagcagcagcggcaccacccccttcagcagcgccgccgccctgccccccggcagctacgccagcctgggcagaatcagaaccagaagacagagcagcggcagcgccaccaacgtggccagcacccccgacaacagaggcagaagcagagccaaggtggtgagccagagccagagaagcagaagcgccaaccccgccggcgccggcagcagaagcagcagccccggcaagctgctgggcagcggctacggcggcctgaccggcggcagcagcagaggcccccccgtgacccccagcagcgagaagagaagcaagatccccagaagccagggctgcagcagagagaccagccccaacagaatcggcctggacagattcggcctgggccagcccggcagaatccccggcagcgtgaacgccatgagagtgctgagcaccagcaccgacctggaggccgccgtggccgacgccctgctgctgggcgacagcagaagcaagaagaagcccgtgagaagaagatacgagccctacggcatgtacagcgacgacgacgccaacagcgacgccagcagcgtgtgcagcgagagaagctacggcagcagaaacggcggcatcccccactacctgagacagaccgaggacgtggccgaggtgctgaaccactgcgccagcagcaactggagcgagagaaaggagggcctgctgggcctgcagaacctgctgaagagccagagaaccctgagcagagtggagctgaagagactgtgcgagatcttcaccagaatgttcgccgacccccacagcaagctggtgttcagcatgttcctggagaccctggtggacttcatcatcatccacaaggacgacctgcaggactggctgttcgtgctgctgacccagctgctgaagaagatgggcgccgacctgctgggcagcgtgcaggccaaggtgcagaaggccctggacgtgaccagagacagcttccccttcgaccagcagttcaacatcctgatgagattcatcgtggaccagacccagacccccaacctgaaggtgaaggtggccatcctgaagtacatcgagagcctggccagacagatggaccccaccgacttcgtgaacagcagcgagaccagactggccgtgagcagaatcatcacctggaccaccgagcccaagagcagcgacgtgagaaaggccgcccagatcgtgctgatcagcctgttcgagctgaacacccccgagttcaccatgctgctgggcgccctgcccaagaccttccaggacggcgccaccaagctgctgcacaaccacctgaagaacagcagcaacaccagcgtgggcagccccagcaacaccatcggcagaacccccagcagacacaccagcagcagaaccagccccctgaccagccccaccaactgcagccacggcggcctgagccccagcatgctggactacgacaccgagaacctgaacagcgaggagatctacagcagcctgagaggcgtgaccgaggccatcgagaagttcagcttcagaagccaggaggacctgaacgagcccatcaagagagacggcaagaaggagtgcgacatcgtgagcagagacggcggcgccgccagccccgccaccgagggcagaggcggcagcgaggtggagggcggcagaaccgccctggacaacaagaccagcctgctgaacacccagccccccagagccttccccggccccagagccagagactacaacccctacccctacagcgacgccatcaacacctacgacaagaccgccctgaaggaggccgtgttcgacgacgacatggagcagctgagagacgtgcccatcgaccacagcgacctggtggccgacctgctgaaggagctgagcaaccacaacgagagagtggaggagagaaagggcgccctgctggagctgctgaagatcaccagagaggacagcctgggcgtgtgggaggagcacttcaagaccatcctgctgctgctgctggagaccctgggcgacaaggaccacagcatcagagccctggccctgagagtgctgagagagatcctgagaaaccagcccgccagattcaagaactacgccgagctgaccatcatgaagaccctggaggcccacaaggacagccacaaggaggtggtgagagccgccgaggaggccgccagcaccctggccagcagcatccaccccgagcagtgcatcaaggtgctgtgccccatcatccagaccgccgactaccccatcaacctggccgccatcaagatgcagaccaaggtggtggagagaatcgccaaggagagcctgctgcagctgctggtggacatcatccccggcctgctgcagggctacgacaacaccgagagcagcgtgagaaaggccagcgtgttctgcctggtggccatctacagcgtgatcggcgaggacctgaagccccacctggcccagctgaccggcagcaagatgaagctgctgaacctgtacatcaagagagcccagaccaccaacagcaacagcagcagcagcagcgacgtgagcacccacagctag

SEQ ID NO: 78387 - DNA, 2115 bp, synthetic construct
  misc_feature 1..2115: note = Description of Artificial Sequence: Synthetic coding sequence
  source 1..2115: mol_type = other DNA
tgaaccaagttcgacgaggtgcagaagagcggcaacatgatccagagcgccaacgacaagaacttcgacgacgaggacagcgtggacggcaacagacccagcagcgccagcagcaccagcagcaaggccccccccagcagcagaagaaacgtgggcatgggcaccaccagaagactgggcagcagcaccctgggcagcaagagcagcgccgccaaggagggcgccggcgccgtggacgaggaggacttcatcaaggccttcgacgacgtgcccgtggtgcagatctacagcagcagagacctggaggagagcatcaacaagatcagagagatcctgagcgacgacaagcacgactgggagcagagagtgaacgccctgaagaagatcagaagcctgctgctggccggcgccgccgagtacgacaacttcttccagcacctgagactgctggacggcgccttcaagctgagcgccaaggacctgagaagccaggtggtgagagaggcctgcatcaccctgggccacctgagcagcgtgctgggcaacaagttcgaccacggcgccgaggccatcatgcccaccatcttcaacctgatccccaacagcgccaagatcatggccaccagcggcgtggtggccgtgagactgatcatcagacacacccacatccccagactgatccccgtgatcaccagcaactgcaccagcaagagcgtggccgtgagaagaagatgcttcgagttcctggacctgctgctgcaggagtggcagacccacagcctggagagacacatcagcgtgctggccgagaccatcaagaagggcatccacgacgccgacagcgaggccagaatcgaggccagaaagtgctactggggcttccacagccacttcagcagagaggccgagcacctgtaccacaccctggagagcagctaccagaaggccctgcagagccacctgaagaacagcgacagcatcgtgagcctgccccagagcgacagaagcagcagcagcagccaggagagcctgaacagacccctgagcgccaagagaagccccaccggcagcaccaccagcagagccagcaccgtgagcaccaagagcgtgagcaccaccggcagcctgcagagaagcagaagcgacatcgacgtgaacgccgccgccagcgccaagagcaaggtgagcagcagcagcggcaccacccccttcagcagcgccgccgccctgccccccggcagctacgccagcctgggcagaatcagaaccagaagacagagcagcggcagcgccaccaacgtggccagcacccccgacaacagaggcagaagcagagccaaggtggtgagccagagccagagaagcagaagcgccaaccccgccggcgccggcagcagaagcagcagccccggcaagctgctgggcagcggctacggcggcctgaccggcggcagcagcagaggcccccccgtgacccccagcagcgagaagagaagcaagatccccagaagccagggctgcagcagagagaccagccccaacagaatcggcctggacagattcggcctgggccagcccggcagaatccccggcagcgtgaacgccatgagagtgctgagcaccagcaccgacctggaggccgccgtggccgacgccctgctgctgggcgacagcagaagcaagaagaagcccgtgagaagaagatacgagccctacggcatgtacagcgacgacgacgccaacagcgacgccagcagcgtgtgcagcgagagaagctacggcagcagaaacggcggcatcccccactacctgagacagaccgaggacgtggccgaggtgctgaaccactgcgccagcagcaactggagcgagagaaaggagggcctgctgggcctgcagaacctgctgaagagccagagaaccctgagcagagtggagctgaagagactgtgcgagatcttcaccagaatgttcgccgacccccacagcaagatcgccgacagcgaggccgagtgcgaggacaaggagggcaacctgttccccagcgaggtgagctgcaccgtgagcttccagtacgtgttcggcgacagctgcggcttctacaacaacagctag

SEQ ID NO: 78388 - DNA, 4485 bp, synthetic construct
  misc_feature 1..4485: note = Description of Artificial Sequence: Synthetic coding sequence
  source 1..4485: mol_type = other DNA
atggagcccagaatggagagctgcctggcccaggtgctgcagaaggacgtgggcaagagactgcaggtgggccaggagctgatcgactacttcagcgacaagcagaagagcgccgacctggagcacgaccagaccatgctggacaagctggtggacggcctggccaccagctgggtgaacagcagcaactacaaggtggtgctgctgggcatggacatcctgagcgccctggtgaccagactgcaggacagattcaaggcccagatcggcaccgtgctgcccagcctgatcgacagactgggcgacgccaaggacagcgtgagagagcaggaccagaccctgctgctgaagatcatggaccaggccgccaacccccagtacgtgtgggacagaatgctgggcggcttcaagcacaagaacttcagaaccagagagggcatctgcctgtgcctgatcgccaccctgaacgccagcggcgcccagaccctgaccctgagcaagatcgtgccccacatctgcaacctgctgggcgaccccaacagccaggtgagagacgccgccatcaacagcctggtggagatctacagacacgtgggcgagagagtgagagccgacctgagcaagaagggcctgccccagagcagactgaacgtgatcttcaccaagttcgacgaggtgcagaagagcggcaacatgatccagagcgccaacgacaagaacttcgacgacgaggacagcgtggacggcaacagacccagcagcgccagcagcaccagcagcaaggccccccccagcagcagaagaaacgtgggcatgggcaccaccagaagactgggcagcagcaccctgggcagcaagagcagcgccgccaaggagggcgccggcgccgtggacgaggaggacttcatcaaggccttcgacgacgtgcccgtggtgcagatctacagcagcagagacctggaggagagcatcaacaagatcagagagatcctgagcgacgacaagcacgactgggagcagagagtgaacgccctgaagaagatcagaagcctgctgctggccggcgccgccgagtacgacaacttcttccagcacctgagactgctggacggcgccttcaagctgagcgccaaggacctgagaagccaggtggtgagagaggcctgcatcaccctgggccacctgagcagcgtgctgggcaacaagttcgaccacggcgccgaggccatcatgcccaccatcttcaacctgatccccaacagcgccaagatcatggccaccagcggcgtggtggccgtgagactgatcatcagacacacccacatccccagactgatccccgtgatcaccagcaactgcaccagcaagagcgtggccgtgagaagaagatgcttcgagttcctggacctgctgctgcaggagtggcagacccacagcctggagagacacatcagcgtgctggccgagaccatcaagaagggcatccacgacgccgacagcgaggccagaatcgaggccagaaagtgctactggggcttccacagccacttcagcagagaggccgagcacctgtaccacaccctggagagcagctaccagaaggccctgcagagccacctgaagaacagcgacagcatcgtgagcctgccccagagcgacagaagcagcagcagcagccaggagagcctgaacagacccctgagcgccaagagaagccccaccggcagcaccaccagcagagccagcaccgtgagcaccaagagcgtgagcaccaccggcagcctgcagagaagcagaagcgacatcgacgtgaacgccgccgccagcgccaagagcaaggtgagcagcagcagcggcaccacccccttcagcagcgccgccgccctgccccccggcagctacgccagcctgggcagaatcagaaccagaagacagagcagcggcagcgccaccaacgtggccagcacccccgacaacagaggcagaagcagagccaaggtggtgagccagagccagagaagcagaagcgccaaccccgccggcgccggcagcagaagcagcagccccggcaagctgctgggcagcggctacggcggcctgaccggcggcagcagcagaggcccccccgtgacccccagcagcgagaagagaagcaagatccccagaagccagggctgcagcagagagaccagccccaacagaatcggcctggacagattcggcctgggccagcccggcagaatccccggcagcgtgaacgccatgagagtgctgagcaccagcaccgacctggaggccgccgtggccgacgccctggtgagaggcaccagcaccggcaagaagaagcccgtgagaagaagatacgagccctacggcatgtacagcgacgacgacgccaacagcgacgccagcagcgtgtgcagcgagagaagctacggcagcagaaacggcggcatcccccactacctgagacagaccgaggacgtggccgaggtgctgaaccactgcgccagcagcaactggagcgagagaaaggagggcctgctgggcctgcagaacctgctgaagagccagagaaccctgagcagagtggagctgaagagactgtgcgagatcttcaccagaatgttcgccgacccccacagcaagatcgccgacagcgaggccgagtgcgaggacaaggagggcaacctgttccccagcgaggtgagctgcaccagagtgttcagcatgttcctggagaccctggtggacttcatcatcatccacaaggacgacctgcaggactggctgttcgtgctgctgacccagctgctgaagaagatgggcgccgacctgctgggcagcgtgcaggccaaggtgcagaaggccctggacgtgaccagagacagcttccccttcgaccagcagttcaacatcctgatgagattcatcgtggaccagacccagacccccaacctgaaggtgaaggtggccatcctgaagtacatcgagagcctggccagacagatggaccccaccgacttcgtgaacagcagcgagaccagactggccgtgagcagaatcatcacctggaccaccgagcccaagagcagcgacgtgagaaaggccgcccagatcgtgctgatcagcctgttcgagctgaacacccccgagttcaccatgctgctgggcgccctgcccaagaccttccaggacggcgccaccaagctgctgcacaaccacctgaagaacagcagcaacaccagcgtgggcagccccagcaacaccatcggcagaacccccagcagacacaccagcagcagaaccagccccctgaccagccccaccaactgcagccacggcggcctgagccccagcatgctggactacgacaccgagaacctgaacagcgaggagatctacagcagcctgagaggcgtgaccgaggccatcgagaagttcagcttcagaagccaggaggacctgaacgagcccatcaagagagacggcaagaaggagtgcgacatcgtgagcagagacggcggcgccgccagccccgccaccgagggcagaggcggcagcgaggtggagggcggcagaaccgccctggacaacaagaccagcctgctgaacacccagccccccagagccttccccggccccagagccagagactacaacccctacccctacagcgacgccatcaacacctacgacaagaccgccctgaaggaggccgtgttcgacgacgacatggagcagctgagagacgtgcccatcgaccacagcgacctggtggccgacctgctgaaggagctgagcaaccacaacgagagagtggaggagagaaagggcgccctgctggagctgctgaagatcaccagagaggacagcctgggcgtgtgggaggagcacttcaagaccatcctgctgctgctgctggagaccctgggcgacaaggaccacagcatcagagccctggccctgagagtgctgagagagatcctgagaaaccagcccgccagattcaagaactacgccgagctgaccatcatgaagaccctggaggcccacaaggacagccacaaggaggtggtgagagccgccgaggaggccgccagcaccctggccagcagcatccaccccgagcagtgcatcaaggtgctgtgccccatcatccagaccgccgactaccccatcaacctggccgccatcaagatgcagaccaaggtggtggagagaatcgccaaggagagcctgctgcagctgctggtggacatcatccccggcctgctgcagggctacgacaacaccgagagcagcgtgagaaaggccagcgtgttctgcctggtggccatctacagcgtgatcggcgaggacctgaagccccacctggcccagctgaccggcagcaagatgaagctgctgaacctgtacatcaagagagcccagaccaccaacagcaacagcagcagcagcagcgacgtgagcacccacagctag

SEQ ID NO: 78389 - DNA, 4434 bp, synthetic construct
  misc_feature 1..4434: note = Description of Artificial Sequence: Synthetic coding sequence
  source 1..4434: mol_type = other DNA
atggagcccagaatggagagctgcctggcccaggtgctgcagaaggacgtgggcaagagactgcaggtgggccaggagctgatcgactacttcagcgacaagcagaagagcgccgacctggagcacgaccagaccatgctggacaagctggtggacggcctggccaccagctgggtgaacagcagcaactacaaggtggtgctgctgggcatggacatcctgagcgccctggtgaccagactgcaggacagattcaaggcccagatcggcaccgtgctgcccagcctgatcgacagactgggcgacgccaaggacagcgtgagagagcaggaccagaccctgctgctgaagatcatggaccaggccgccaacccccagtacgtgtgggacagaatgctgggcggcttcaagcacaagaacttcagaaccagagagggcatctgcctgtgcctgatcgccaccctgaacgccagcggcgcccagaccctgaccctgagcaagatcgtgccccacatctgcaacctgctgggcgaccccaacagccaggtgagagacgccgccatcaacagcctggtggagatctacagacacgtgggcgagagagtgagagccgacctgagcaagaagggcctgccccagagcagactgaacgtgatcttcaccaagttcgacgaggtgcagaagagcggcaacatgatccagagcgccaacgacaagaacttcgacgacgaggacagcgtggacggcaacagacccagcagcgccagcagcaccagcagcaaggccccccccagcagcagaagaaacgtgggcatgggcaccaccagaagactgggcagcagcaccctgggcagcaagagcagcgccgccaaggagggcgccggcgccgtggacgaggaggacttcatcaaggccttcgacgacgtgcccgtggtgcagatctacagcagcagagacctggaggagagcatcaacaagatcagagagatcctgagcgacgacaagcacgactgggagcagagagtgaacgccctgaagaagatcagaagcctgctgctggccggcgccgccgagtacgacaacttcttccagcacctgagactgctggacggcgccttcaagctgagcgccaaggacctgagaagccaggtggtgagagaggcctgcatcaccctgggccacctgagcagcgtgctgggcaacaagttcgaccacggcgccgaggccatcatgcccaccatcttcaacctgatccccaacagcgccaagatcatggccaccagcggcgtggtggccgtgagactgatcatcagacacacccacatccccagactgatccccgtgatcaccagcaactgcaccagcaagagcgtggccgtgagaagaagatgcttcgagttcctggacctgctgctgcaggagtggcagacccacagcctggagagacacatcagcgtgctggccgagaccatcaagaagggcatccacgacgccgacagcgaggccagaatcgaggccagaaagtgctactggggcttccacagccacttcagcagagaggccgagcacctgtaccacaccctggagagcagctaccagaaggccctgcagagccacctgaagaacagcgacagcatcgtgagcctgccccagagcgacagaagcagcagcagcagccaggagagcctgaacagacccctgagcgccaagagaagccccaccggcagcaccaccagcagagccagcaccgtgagcaccaagagcgtgagcaccaccggcagcctgcagagaagcagaagcgacatcgacgtgaacgccgccgccagcgccaagagcaaggtgagcagcagcagcggcaccacccccttcagcagcgccgccgccctgccccccggcagctacgccagcctggagagcagacacatgagagaggacatggagtacatcggcctggacagcggcagaatcagaaccagaagacagagcagcggcagcgccaccaacgtggccagcacccccgacaacagaggcagaagcagagccaaggtggtgagccagagccagcccggcagcagaagcagcagccccggcaagctgctgggcagcggctacggcggcctgaccggcggcagcagcagaggcccccccgtgacccccagcagcgagaagagaagcaagatccccagaagccagggctgcagcagagagaccagccccaacagaatcggcctggacagattcggcctgggccagcccggcagaatccccggcagcgtgaacgccatgagagtgctgagcaccagcaccgacctggaggccgccgtggccgacgccctgctgctgggcgacagcagaagcaagaagcccgtgagaagaagatacgagccctacggcatgtacagcgacgacgacgccaacagcgacgccagcagcgtgtgcagcgagagaagctacggcagcagaaacggcggcatcccccactacctgagacagaccgaggacgtggccgaggtgctgaaccactgcgccagcagcaactggagcgagagaaaggagggcctgctgggcctgcagaacctgctgaagagccagagaaccctgagcagagtggagctgaagagactgtgcgagatcttcaccagaatgttcgccgacccccacagcaagagagtgttcagcatgttcctggagaccctggtggacttcatcatcatccacaaggacgacctgcaggactggctgttcgtgctgctgacccagctgctgaagaagatgggcgccgacctgctgggcagcgtgcaggccaaggtgcagaaggccctggacgtgaccagagacagcttccccttcgaccagcagttcaacatcctgatgagattcatcgtggaccagacccagacccccaacctgaaggtgaaggtggccatcctgaagtacatcgagagcctggccagacagatggaccccaccgacttcgtgaacagcagcgagaccagactggccgtgagcagaatcatcacctggaccaccgagcccaagagcagcgacgtgagaaaggccgcccagatcgtgctgatcagcctgttcgagctgaacacccccgagttcaccatgctgctgggcgccctgcccaagaccttccaggacggcgccaccaagctgctgcacaaccacctgaagaacagcagcaacaccagcgtgggcagccccagcaacaccatcggcagaacccccagcagacacaccagcagcagaaccagccccctgaccagccccaccaactgcagccacggcggcctgagccccagcatgctggactacgacaccgagaacctgaacagcgaggagatctacagcagcctgagaggcgtgaccgaggccatcgagaagttcagcttcagaagccaggaggacctgaacgagcccatcaagagagacggcaagaaggagtgcgacatcgtgagcagagacggcggcgccgccagccccgccaccgagggcagaggcggcagcgaggtggagggcggcagaaccgccctggacaacaagaccagcctgctgaacacccagccccccagagccttccccggccccagagccagagactacaacccctacccctacagcgacgccatcaacacctacgacaagaccgccctgaaggaggccgtgttcgacgacgacatggagcagctgagagacgtgcccatcgaccacagcgacctggtggccgacctgctgaaggagctgagcaaccacaacgagagagtggaggagagaaagggcgccctgctggagctgctgaagatcaccagagaggacagcctgggcgtgtgggaggagcacttcaagaccatcctgctgctgctgctggagaccctgggcgacaaggaccacagcatcagagccctggccctgagagtgctgagagagatcctgagaaaccagcccgccagattcaagaactacgccgagctgaccatcatgaagaccctggaggcccacaaggacagccacaaggaggtggtgagagccgccgaggaggccgccagcaccctggccagcagcatccaccccgagcagtgcatcaaggtgctgtgccccatcatccagaccgccgactaccccatcaacctggccgccatcaagatgcagaccaaggtggtggagagaatcgccaaggagagcctgctgcagctgctggtggacatcatccccggcctgctgcagggctacgacaacaccgagagcagcgtgagaaaggccagcgtgttctgcctggtggccatctacagcgtgatcggcgaggacctgaagccccacctggcccagctgaccggcagcaagatgaagctgctgaacctgtacatcaagagagcccagaccaccaacagcaacagcagcagcagcagcgacgtgagcacccacagctag

SEQ ID NO: 78390 - DNA, 3768 bp, synthetic construct
  misc_feature 1..3768: note = Description of Artificial Sequence: Synthetic coding sequence
  source 1..3768: mol_type = other DNA
atgctgcagaactgcagcgacaagaacttcgacgacgaggacagcgtggacggcaacagacccagcagcgccagcagcaccagcagcaaggccccccccagcagcagaagaaacgtgggcatgggcaccaccagaagactgggcagcagcaccctgggcagcaagagcagcgccgccaaggagggcgccggcgccgtggacgaggaggacttcatcaaggccttcgacgacgtgcccgtggtgcagatctacagcagcagagacctggaggagagcatcaacaagatcagagagatcctgagcgacgacaagcacgactgggagcagagagtgaacgccctgaagaagatcagaagcctgctgctggccggcgccgccgagtacgacaacttcttccagcacctgagactgctggacggcgccttcaagctgagcgccaaggacctgagaagccaggtggtgagagaggcctgcatcaccctgggccacctgagcagcgtgctgggcaacaagttcgaccacggcgccgaggccatcatgcccaccatcttcaacctgatccccaacagcgccaagatcatggccaccagcggcgtggtggccgtgagactgatcatcagacacacccacatccccagactgatccccgtgatcaccagcaactgcaccagcaagagcgtggccgtgagaagaagatgcttcgagttcctggacctgctgctgcaggagtggcagacccacagcctggagagacacatcagcgtgctggccgagaccatcaagaagggcatccacgacgccgacagcgaggccagaatcgaggccagaaagtgctactggggcttccacagccacttcagcagagaggccgagcacctgtaccacaccctggagagcagctaccagaaggccctgcagagccacctgaagaacagcgacagcatcgtgagcctgccccagagcgacagaagcagcagcagcagccaggagagcctgaacagacccctgagcgccaagagaagccccaccggcagcaccaccagcagagccagcaccgtgagcaccaagagcgtgagcaccaccggcagcctgcagagaagcagaagcgacatcgacgtgaacgccgccgccagcgccaagagcaaggtgagcagcagcagcggcaccacccccttcagcagcgccgccgccctgccccccggcagctacgccagcctgggcagaatcagaaccagaagacagagcagcggcagcgccaccaacgtggccagcacccccgacaacagaggcagaagcagagccaaggtggtgagccagagccagagaagcagaagcgccaaccccgccggcgccggcagcagaagcagcagccccggcaagctgctgggcagcggctacggcggcctgaccggcggcagcagcagaggcccccccgtgacccccagcagcgagaagagaagcaagatccccagaagccagggctgcagcagagagaccagccccaacagaatcggcctggacagattcggcctgggccagcccggcagaatccccggcagcgtgaacgccatgagagtgctgagcaccagcaccgacctggaggccgccgtggccgacgccctgaagaagcccgtgagaagaagatacgagccctacggcatgtacagcgacgacgacgccaacagcgacgccagcagcgtgtgcagcgagagaagctacggcagcagaaacggcggcatcccccactacctgagacagaccgaggacgtggccgaggtgctgaaccactgcgccagcagcaactggagcgagagaaaggagggcctgctgggcctgcagaacctgctgaagagccagagaaccctgagcagagtggagctgaagagactgtgcgagatcttcaccagaatgttcgccgacccccacagcaagatcgccgacagcgaggccgagtgcgaggacaaggagggcaacctgttccccagcgaggtgagctgcaccagagtgttcagcatgttcctggagaccctggtggacttcatcatcatccacaaggacgacctgcaggactggctgttcgtgctgctgacccagctgctgaagaagatgggcgccgacctgctgggcagcgtgcaggccaaggtgcagaaggccctggacgtgaccagagacagcttccccttcgaccagcagttcaacatcctgatgagattcatcgtggaccagacccagacccccaacctgaaggtgaaggtggccatcctgaagtacatcgagagcctggccagacagatggaccccaccgacttcgtgaacagcagcgagaccagactggccgtgagcagaatcatcacctggaccaccgagcccaagagcagcgacgtgagaaaggccgcccagatcgtgctgatcagcctgttcgagctgaacacccccgagttcaccatgctgctgggcgccctgcccaagaccttccaggacggcgccaccaagctgctgcacaaccacctgaagaacagcagcaacaccagcgtgggcagccccagcaacaccatcggcagaacccccagcagacacaccagcagcagaaccagccccctgaccagccccaccaactgcagccacggcggcctgagccccagcatgctggactacgacaccgagaacctgaacagcgaggagatctacagcagcctgagaggcgtgaccgaggccatcgagaagttcagcttcagaagccaggaggacctgaacgagcccatcaagagagacggcaagaaggagtgcgacatcgtgagcagagacggcggcgccgccagccccgccaccgagggcagaggcggcagcgaggtggagggcggcagaaccgccctggacaacaagaccagcctgctgaacacccagccccccagagccttccccggccccagagccagagactacaacccctacccctacagcgacgccatcaacacctacgacaagaccgccctgaaggaggccgtgttcgacgacgacatggagcagctgagagacgtgcccatcgaccacagcgacctggtggccgacctgctgaaggagctgagcaaccacaacgagagagtggaggagagaaagggcgccctgctggagctgctgaagatcaccagagaggacagcctgggcgtgtgggaggagcacttcaagaccatcctgctgctgctgctggagaccctgggcgacaaggaccacagcatcagagccctggccctgagagtgctgagagagatcctgagaaaccagcccgccagattcaagaactacgccgagctgaccatcatgaagaccctggaggcccacaaggacagccacaaggaggtggtgagagccgccgaggaggccgccagcaccctggccagcagcatccaccccgagcagtgcatcaaggtgctgtgccccatcatccagaccgccgactaccccatcaacctggccgccatcaagatgcagaccaaggtggtggagagaatcgccaaggagagcctgctgcagctgctggtggacatcatccccggcctgctgcagggctacgacaacaccgagagcagcgtgagaaaggccagcgtgttctgcctggtggccatctacagcgtgatcggcgaggacctgaagccccacctggcccagctgaccggcagcaagatgaagctgctgaacctgtacatcaagagagcccagaccaccaacagcaacagcagcagcagcagcgacgtgagcacccacagctag

SEQ ID NO: 78391 - DNA, 3738 bp, synthetic construct
  misc_feature 1..3738: note = Description of Artificial Sequence: Synthetic coding sequence
  source 1..3738: mol_type = other DNA
atgaccaccggcaaggacaagaacttcgacgacgaggacagcgtggacggcaacagacccagcagcgccagcagcaccagcagcaaggccccccccagcagcagaagaaacgtgggcatgggcaccaccagaagactgggcagcagcaccctgggcagcaagagcagcgccgccaaggagggcgccggcgccgtggacgaggaggacttcatcaaggccttcgacgacgtgcccgtggtgcagatctacagcagcagagacctggaggagagcatcaacaagatcagagagatcctgagcgacgacaagcacgactgggagcagagagtgaacgccctgaagaagatcagaagcctgctgctggccggcgccgccgagtacgacaacttcttccagcacctgagactgctggacggcgccttcaagctgagcgccaaggacctgagaagccaggtggtgagagaggcctgcatcaccctgggccacctgagcagcgtgctgggcaacaagttcgaccacggcgccgaggccatcatgcccaccatcttcaacctgatccccaacagcgccaagatcatggccaccagcggcgtggtggccgtgagactgatcatcagacacacccacatccccagactgatccccgtgatcaccagcaactgcaccagcaagagcgtggccgtgagaagaagatgcttcgagttcctggacctgctgctgcaggagtggcagacccacagcctggagagacacatcagcgtgctggccgagaccatcaagaagggcatccacgacgccgacagcgaggccagaatcgaggccagaaagtgctactggggcttccacagccacttcagcagagaggccgagcacctgtaccacaccctggagagcagctaccagaaggccctgcagagccacctgaagaacagcgacagcatcgtgagcctgccccagagcgacagaagcagcagcagcagccaggagagcctgaacagacccctgagcgccaagagaagccccaccggcagcaccaccagcagagccagcaccgtgagcaccaagagcgtgagcaccaccggcagcctgcagagaagcagaagcgacatcgacgtgaacgccgccgccagcgccaagagcaaggtgagcagcagcagcggcaccacccccttcagcagcgccgccgccctgccccccggcagctacgccagcctggacggcaccaccaccaaggccgagggcagaatcagaaccagaagacagagcagcggcagcgccaccaacgtggccagcacccccgacaacagaggcagaagcagagccaaggtggtgagccagagccagagaagcagaagcgccaaccccgccggcgccggcagcagaagcagcagccccggcaagctgctgggcagcggctacggcggcctgaccggcggcagcagcagaggcccccccgtgacccccagcagcgagaagagaagcaagatccccagaagccagggctgcagcagagagaccagccccaacagaatcggcctggacagattcggcctgggccagcccggcagaatccccggcagcgtgaacgccatgagagtgctgagcaccagcaccgacctggaggccgccgtggccgacgccctgctgctgggcgacagcagaagcaagaagcccgtgagaagaagatacgagccctacggcatgtacagcgacgacgacgccaacagcgacgccagcagcgtgtgcagcgagagaagctacggcagcagaaacggcggcatcccccactacctgagacagaccgaggacgtggccgaggtgctgaaccactgcgccagcagcaactggagcgagagaaaggagggcctgctgggcctgcagaacctgctgaagagccagagaaccctgagcagagtggagctgaagagactgtgcgagatcttcaccagaatgttcgccgacccccacagcaaggtgttcagcatgttcctggagaccctggtggacttcatcatcatccacaaggacgacctgcaggactggctgttcgtgctgctgacccagctgctgaagaagatgggcgccgacctgctgggcagcgtgcaggccaaggtgcagaaggccctggacgtgaccagagacagcttccccttcgaccagcagttcaacatcctgatgagattcatcgtggaccagacccagacccccaacctgaaggtgaaggtggccatcctgaagtacatcgagagcctggccagacagatggaccccaccgacttcgtgaacagcagcgagaccagactggccgtgagcagaatcatcacctggaccaccgagcccaagagcagcgacgtgagaaaggccgcccagatcgtgctgatcagcctgttcgagctgaacacccccgagttcaccatgctgctgggcgccctgcccaagaccttccaggacggcgccaccaagctgctgcacaaccacctgaagaacagcagcaacaccagcgtgggcagccccagcaacaccatcggcagaacccccagcagacacaccagcagcagaaccagccccctgaccagccccaccaactgcagccacggcggcctgagccccagcatgctggactacgacaccgagaacctgaacagcgaggagatctacagcagcctgagaggcgtgaccgaggccatcgagaagttcagcttcagaagccaggaggacctgaacgagcccatcaagagagacggcaagaaggagtgcgacatcgtgagcagagacggcggcgccgccagccccgccaccgagggcagaggcggcagcgaggtggagggcggcagaaccgccctggacaacaagaccagcctgctgaacacccagccccccagagccttccccggccccagagccagagactacaacccctacccctacagcgacgccatcaacacctacgacaagaccgccctgaaggaggccgtgttcgacgacgacatggagcagctgagagacgtgcccatcgaccacagcgacctggtggccgacctgctgaaggagctgagcaaccacaacgagagagtggaggagagaaagggcgccctgctggagctgctgaagatcaccagagaggacagcctgggcgtgtgggaggagcacttcaagaccatcctgctgctgctgctggagaccctgggcgacaaggaccacagcatcagagccctggccctgagagtgctgagagagatcctgagaaaccagcccgccagattcaagaactacgccgagctgaccatcatgaagaccctggaggcccacaaggacagccacaaggaggtggtgagagccgccgaggaggccgccagcaccctggccagcagcatccaccccgagcagtgcatcaaggtgctgtgccccatcatccagaccgccgactaccccatcaacctggccgccatcaagatgcagaccaaggtggtggagagaatcgccaaggagagcctgctgcagctgctggtggacatcatccccggcctgctgcagggctacgacaacaccgagagcagcgtgagaaaggccagcgtgttctgcctggtggccatctacagcgtgatcggcgaggacctgaagccccacctggcccagctgaccggcagcaagatgaagctgctgaacctgtacatcaagagagcccagaccaccaacagcaacagcagcagcagcagcgacgtgagcacccacagctag

SEQ ID NO: 78392 - DNA, 2988 bp, synthetic construct
  misc_feature 1..2988: note = Description of Artificial Sequence: Synthetic coding sequence
  source 1..2988: mol_type = other DNA
atgggcctgagaaaccacttccccggcgaggccgagaccctgtacaacagcctggagcccagctaccagaagagcctgcagacctacctgaagagcagcggcagcgtggccagcctgccccagagcgacagaagcagcagcagcagccaggagagcctgaacagacccttcagcagcaagtggagcaccgccaaccccagcaccgtggccggcagagtgagcgccggcagcagcaaggccagcagcctgcccggcagcctgcagagaagcagaagcgacatcgacgtgaacgccgccgccggcgccaaggcccaccacgccgccggccagagcgtgagaagcggcagactgggcgccggcgccctgaacgccggcagctacgccagcctggaggacaccagcgacaagctggacggcaccgccagcgaggacggcagagtgagagccaagctgagcgcccccctggccggcatgggcaacgccaaggccgacagcagaggcagaagcagaaccaagatggtgagccagagccagcccggcagcagaagcggcagccccggcagagtgctgaccaccaccgccctgagcaccgtgagcagcggcgtgcagagagtgctggtgaacagcgccagcgcccagaagagaagcaagatccccagaagccagggctgcagcagagaggccagccccagcagactgagcgtggccagaagcagcagaatccccagacccagcgtgagccagggctgcagcagagaggccagcagagagagcagcagagacaccagccccgtgagaagcttccagcccctgggccccggctacggcatcagccagagcagcagactgagcagcagcgtgagcgccatgagagtgctgaacaccggcagcgacgtggaggaggccgtggccgacgccctgaagaagcccgccagaagaagatacgagagctacggcatgcacagcgacgacgacgccaacagcgacgccagcagcgcctgcagcgagagaagctacagcagcagaaacggcagcatccccacctacatgagacagaccgaggacgtggccgaggtgctgaacagatgcgccagcagcaactggagcgagagaaaggagggcctgctgggcctgcagaacctgctgaagaaccagagaaccctgagcagagtggagctgaagagactgtgcgagatcttcaccagaatgttcgccgacccccacggcaagagagtgttcagcatgttcctggagaccctggtggacttcatccaggtgcacaaggacgacctgcaggactggctgttcgtgctgctgacccagctgctgaagaagatgggcgccgacctgctgggcagcgtgcaggccaaggtgcagaaggccctggacgtgaccagagagagcttccccaacgacctgcagttcaacatcctgatgagattcaccgtggaccagacccagacccccagcctgaaggtgaaggtggccatcctgaagtacatcgagaccctggccaagcagatggaccccggcgacttcatcaacagcagcgagaccagactggccgtgagcagagtgatcacctggaccaccgagcccaagagcagcgacgtgagaaaggccgcccagagcgtgctgatcagcctgttcgagctgaacacccccgagttcaccatgctgctgggcgccctgcccaagaccttccaggacggcgccaccaagctgctgcacaaccacctgagaaacaccggcaacggcacccagagcagcatgggcagccccctgaccagacccacccccagaagccccgccaactggagcagccccctgaccagccccaccaacaccagccagaacaccctgagccccagcgccttcgactacgacaccgagaacatgaacagcgaggacatctacagcagcctgagaggcgtgaccgaggccatccagaacttcagcttcagaagccaggaggacatgaacgagcccctgaagagagacagcaagaaggacgacggcgacagcatgtgcggcggccccggcatgagcgaccccagagccggcggcgacgccaccgacagcagccagaccgccctggacaacaaggccagcctgctgcacagcatgcccacccacagcagccccagaagcagagactacaacccctacaactacagcgacagcatcagccccttcaacaagagcgccctgaaggaggccatgttcgacgacgacgccgaccagttccccgacgacctgagcctggaccacagcgacctggtggccgagctgctgaaggagctgagcaaccacaacgagagagtggaggagagaaagatcgccctgtacgagctgatgaagctgacccaggaggagagcttcagcgtgtgggacgagcacttcaagaccatcctgctgctgctgctggagaccctgggcgacaaggagcccaccatcagagccctggccctgaaggtgctgagagagatcctgagacaccagcccgccagattcaagaactacgccgagctgaccgtgatgaagaccctggaggcccacaaggacccccacaaggaggtggtgagaagcgccgaggaggccgccagcgtgctggccaccagcatcagccccgagcagtgcatcaaggtgctgtgccccatcatccagaccgccgactaccccatcaacctggccgccatcaagatgcagaccaaggtgatcgagagagtgagcaaggagaccctgaacctgctgctgcccgagatcatgcccggcctgatccagggctacgacaacagcgagagcagcgtgagaaaggcctgcgtgttctgcctggtggccgtgcacgccgtgatcggcgacgagctgaagccccacctgagccagctgaccggcagcaagatgaagctgctgaacctgtacatcaagagagcccagaccggcagcggcggcgccgaccccaccaccgacgtgagcggccagagctag

SEQ ID NO: 78393 - DNA, 1296 bp, synthetic construct
  misc_feature 1..1296: note = Description of Artificial Sequence: Synthetic coding sequence
  source 1..1296: mol_type = other DNA
atgagaagactgatctgcaagagaatctgcgactacaagagcttcgacgacgaggagagcgtggacggcaacagacccagcagcgccgccagcgccttcaaggtgcccgcccccaagaccagcggcaaccccgccaacagcgccagaaagcccggcagcgccggcggccccaaggtgggcggcgccagcaaggagggcggcgccggcgccgtggacgaggacgacttcatcaaggccttcaccgacgtgcccagcatccagatctacagcagcagagagctggaggagaccctgaacaagatcagagagatcctgagcgacgacaagcacgactgggaccagagagccaacgccctgaagaagatcagaagcctgctggtggccggcgccgcccagtacgactgcttcttccagcacctgagactgctggacggcgccctgaagctgagcgccaaggacctgagaagccaggtggtgagagaggcctgcatcaccgtggcccacctgagcaccgtgctgggcaacaagttcgaccacggcgccgaggccatcgtgcccaccctgttcaacctggtgcccaacagcgccaaggtgatggccaccagcggctgcgccgccatcagattcatcatcagacacacccacgtgcccagactgatccccctgatcaccagcaactgcaccagcaagagcgtgcccgtgagaagaagaagcttcgagttcctggacctgctgctgcaggagtggcagacccacagcctggagagacacgccgccgtgctggtggagaccatcaagaagggcatccacgacgccgacgccgaggccagagtggaggccagaaagacctacatgggcctgagaaaccacttccccggcgaggccgagaccctgtacaacagcctggagcccagctaccagaagagcctgcagacctacctgaagagcagcggcagcgtggccagcctgccccagagcgacagaagcagcagcagcagccaggagagcctgaacagacccttcagcagcaagtggagcaccgccaaccccagcaccgtggccggcagagtgagcgccggcagcagcaaggccagcagcctgcccggcagcctgcagagaagcagaagcgacatcgacgtgaacgccgccgccggcgccaaggcccaccacgccgccggccagagcgtgagaagcggcagactgggcgccggcgccctgaacgccggcagctacgccagcctggagtgcgaggccttctggagaagcggcagaaccgccaagctgtacagcgtgtag

SEQ ID NO: 78394 - DNA, 4518 bp, synthetic construct
  misc_feature 1..4518: note = Description of Artificial Sequence: Synthetic coding sequence
  source 1..4518: mol_type = other DNA
atggagcccagaagcatggagtacttctgcgcccaggtgcagcagaaggacgtgggcggcagactgcaggtgggccaggagctgctgctgtacctgggcgcccccggcgccatcagcgacctggaggaggacctgggcagactgggcaagaccgtggacgccctgaccggctgggtgggcagcagcaactacagagtgagcctgatgggcctggagatcctgagcgccttcgtggacagactgagcaccagattcaagagctacgtggccatggtgatcgtggccctgatcgacagaatgggcgacgccaaggacaaggtgagagacgaggcccagaccctgatcctgaagctgatggaccaggtggccccccccatgtacatctgggagcagctggccagcggcttcaagcacaagaacttcagaagcagagagggcgtgtgcctgtgcctgatcgagaccctgaacatcttcggcgcccagcccctggtgatcagcaagctgatcccccacctgtgcatcctgttcggcgacagcaacagccaggtgagagacgccgccatcctggccatcgtggagatctacagacacgtgggcgagaaggtgagaatggacctgtacaagagaggcatcccccccgccagactggagatgatcttcgccaagttcgacgaggtgcagagcagcggcggcatgatcctgagcgtgtgcaaggacaagagcttcgacgacgaggagagcgtggacggcaacagacccagcagcgccgccagcgccttcaaggtgcccgcccccaagaccagcggcaaccccgccaacagcgccagaaagcccggcagcgccggcggccccaaggtgggcggcgccagcaaggagggcggcgccggcgccgtggacgaggacgacttcatcaaggccttcaccgacgtgcccagcatccagatctacagcagcagagagctggaggagaccctgaacaagatcagagagatcctgagcgacgacaagcacgactgggaccagagagccaacgccctgaagaagatcagaagcctgctggtggccggcgccgcccagtacgactgcttcttccagcacctgagactgctggacggcgccctgaagctgagcgccaaggacctgagaagccaggtggtgagagaggcctgcatcaccgtggcccacctgagcaccgtgctgggcaacaagttcgaccacggcgccgaggccatcgtgcccaccctgttcaacctggtgcccaacagcgccaaggtgatggccaccagcggctgcgccgccatcagattcatcatcagacacacccacgtgcccagactgatccccctgatcaccagcaactgcaccagcaagagcgtgcccgtgagaagaagaagcttcgagttcctggacctgctgctgcaggagtggcagacccacagcctggagagacacgccgccgtgctggtggagaccatcaagaagggcatccacgacgccgacgccgaggccagagtggaggccagaaagacctacatgggcctgagaaaccacttccccggcgaggccgagaccctgtacaacagcctggagcccagctaccagaagagcctgcagacctacctgaagagcagcggcagcgtggccagcctgccccagagcgacagaagcagcagcagcagccaggagagcctgaacagacccttcagcagcaagtggagcaccgccaaccccagcaccgtggccggcagagtgagcgccggcagcagcaaggccagcagcctgcccggcagcctgcagagaagcagaagcgacatcgacgtgaacgccgccgccggcgccaaggcccaccacgccgccggccagagcgtgagaagcggcagactgggcgccggcgccctgaacgccggcagctacgccagcctggaggacaccagcgacaagctggacggcaccgccagcgaggacggcagagtgagagccaagctgagcgcccccctggccggcatgggcaacgccaaggccgacagcagaggcagaagcagaaccaagatggtgagccagagccagcccggcagcagaagcggcagccccggcagagtgctgaccaccaccgccctgagcaccgtgagcagcggcgtgcagagagtgctggtgaacagcgccagcgcccagaagagaagcaagatccccagaagccagggctgcagcagagaggccagccccagcagactgagcgtggccagaagcagcagaatccccagacccagcgtgagccagggctgcagcagagaggccagcagagagagcagcagagacaccagccccgtgagaagcttccagcccctgggccccggctacggcatcagccagagcagcagactgagcagcagcgtgagcgccatgagagtgctgaacaccggcagcgacgtggaggaggccgtggccgacgccctgaagaagcccgccagaagaagatacgagagctacggcatgcacagcgacgacgacgccaacagcgacgccagcagcgcctgcagcgagagaagctacagcagcagaaacggcagcatccccacctacatgagacagaccgaggacgtggccgaggtgctgaacagatgcgccagcagcaactggagcgagagaaaggagggcctgctgggcctgcagaacctgctgaagaaccagagaaccctgagcagagtggagctgaagagactgtgcgagatcttcaccagaatgttcgccgacccccacggcaaggtgttcagcatgttcctggagaccctggtggacttcatccaggtgcacaaggacgacctgcaggactggctgttcgtgctgctgacccagctgctgaagaagatgggcgccgacctgctgggcagcgtgcaggccaaggtgcagaaggccctggacgtgaccagagagagcttccccaacgacctgcagttcaacatcctgatgagattcaccgtggaccagacccagacccccagcctgaaggtgaaggtggccatcctgaagtacatcgagaccctggccaagcagatggaccccggcgacttcatcaacagcagcgagaccagactggccgtgagcagagtgatcacctggaccaccgagcccaagagcagcgacgtgagaaaggccgcccagagcgtgctgatcagcctgttcgagctgaacacccccgagttcaccatgctgctgggcgccctgcccaagaccttccaggacggcgccaccaagctgctgcacaaccacctgagaaacaccggcaacggcacccagagcagcatgggcagccccctgaccagacccacccccagaagccccgccaactggagcagccccctgaccagccccaccaacaccagccagaacaccctgagccccagcgccttcgactacgacaccgagaacatgaacagcgaggacatctacagcagcctgagaggcgtgaccgaggccatccagaacttcagcttcagaagccaggaggacatgaacgagcccctgaagagagacagcaagaaggacgacggcgacagcatgtgcggcggccccggcatgagcgaccccagagccggcggcgacgccaccgacagcagccagaccgccctggacaacaaggccagcctgctgcacagcatgcccacccacagcagccccagaagcagagactacaacccctacaactacagcgacagcatcagccccttcaacaagagcgccctgaaggaggccatgttcgacgacgacgccgaccagttccccgacgacctgagcctggaccacagcgacctggtggccgagctgctgaaggagctgagcaaccacaacgagagagtggaggagagaaagatcgccctgtacgagctgatgaagctgacccaggaggagagcttcagcgtgtgggacgagcacttcaagaccatcctgctgctgctgctggagaccctgggcgacaaggagcccaccatcagagccctggccctgaaggtgctgagagagatcctgagacaccagcccgccagattcaagaactacgccgagctgaccgtgatgaagaccctggaggcccacaaggacccccacaaggaggtggtgagaagcgccgaggaggccgccagcgtgctggccaccagcatcagccccgagcagtgcatcaaggtgctgtgccccatcatccagaccgccgactaccccatcaacctggccgccatcaagatgcagaccaaggtgatcgagagagtgagcaaggagaccctgaacctgctgctgcccgagatcatgcccggcctgatccagggctacgacaacagcgagagcagcgtgagaaaggcctgcgtgttctgcctggtggccgtgcacgccgtgatcggcgacgagctgaagccccacctgagccagctgaccggcagcaagatgaagctgctgaacctgtacatcaagagagcccagaccggcagcggcggcgccgaccccaccaccgacgtgagcggccagagctag

SEQ ID NO: 78395 - DNA, 4542 bp, synthetic construct
  misc_feature 1..4542: note = Description of Artificial Sequence: Synthetic coding sequence
  source 1..4542: mol_type = other DNA
atggagcccagaagcatggagtacttctgcgcccaggtgcagcagaaggacgtgggcggcagactgcaggtgggccaggagctgctgctgtacctgggcgcccccggcgccatcagcgacctggaggaggacctgggcagactgggcaagaccgtggacgccctgaccggctgggtgggcagcagcaactacagagtgagcctgatgggcctggagatcctgagcgccttcgtggacagactgagcaccagattcaagagctacgtggccatggtgatcgtggccctgatcgacagaatgggcgacgccaaggacaaggtgagagacgaggcccagaccctgatcctgaagctgatggaccaggtggccccccccatgtacatctgggagcagctggccagcggcttcaagcacaagaacttcagaagcagagagggcgtgtgcctgtgcctgatcgagaccctgaacatcttcggcgcccagcccctggtgatcagcaagctgatcccccacctgtgcatcctgttcggcgacagcaacagccaggtgagagacgccgccatcctggccatcgtggagatctacagacacgtgggcgagaaggtgagaatggacctgtacaagagaggcatcccccccgccagactggagatgatcttcgccaagttcgacgaggtgcagagcagcggcggcatgatcctgagcgtgtgcaaggacaagagcttcgacgacgaggagagcgtggacggcaacagacccagcagcgccgccagcgccttcaaggtgcccgcccccaagaccagcggcaaccccgccaacagcgccagaaagcccggcagcgccggcggccccaaggtgggcggcgccagcaaggagggcggcgccggcgccgtggacgaggacgacttcatcaaggccttcaccgacgtgcccagcatccagatctacagcagcagagagctggaggagaccctgaacaagatcagagagatcctgagcgacgacaagcacgactgggaccagagagccaacgccctgaagaagatcagaagcctgctggtggccggcgccgcccagtacgactgcttcttccagcacctgagactgctggacggcgccctgaagctgagcgccaaggacctgagaagccaggtggtgagagaggcctgcatcaccgtggcccacctgagcaccgtgctgggcaacaagttcgaccacggcgccgaggccatcgtgcccaccctgttcaacctggtgcccaacagcgccaaggtgatggccaccagcggctgcgccgccatcagattcatcatcagacacacccacgtgcccagactgatccccctgatcaccagcaactgcaccagcaagagcgtgcccgtgagaagaagaagcttcgagttcctggacctgctgctgcaggagtggcagacccacagcctggagagacacgccgccgtgctggtggagaccatcaagaagggcatccacgacgccgacgccgaggccagagtggaggccagaaagacctacatgggcctgagaaaccacttccccggcgaggccgagaccctgtacaacagcctggagcccagctaccagaagagcctgcagacctacctgaagagcagcggcagcgtggccagcctgccccagagcgacagaagcagcagcagcagccaggagagcctgaacagacccttcagcagcaagtggagcaccgccaaccccagcaccgtggccggcagagtgagcgccggcagcagcaaggccagcagcctgcccggcagcctgcagagaagcagaagcgacatcgacgtgaacgccgccgccggcgccaaggcccaccacgccgccggccagagcgtgagaagcggcagactgggcgccggcgccctgaacgccggcagctacgccagcctggaggacaccagcgacaagctggacggcaccgccagcgaggacggcagagtgagagccaagctgagcgcccccctggccggcatgggcaacgccaaggccgacagcagaggcagaagcagaaccaagatggtgagccagagccagcccggcagcagaagcggcagccccggcagagtgctgaccaccaccgccctgagcaccgtgagcagcggcgtgcagagagtgctggtgaacagcgccagcgcccagaagagaagcaagatccccagaagccagggctgcagcagagaggccagccccagcagactgagcgtggccagaagcagcagaatccccagacccagcgtgagccagggctgcagcagagaggccagcagagagagcagcagagacaccagccccgtgagaagcttccagcccctgggccccggctacggcatcagccagagcagcagactgagcagcagcgtgagcgccatgagagtgctgaacaccggcagcgacgtggaggaggccgtggccgacgccctgctgctgggcgacatcagaaccaagaagaagcccgccagaagaagatacgagagctacggcatgcacagcgacgacgacgccaacagcgacgccagcagcgcctgcagcgagagaagctacagcagcagaaacggcagcatccccacctacatgagacagaccgaggacgtggccgaggtgctgaacagatgcgccagcagcaactggagcgagagaaaggagggcctgctgggcctgcagaacctgctgaagaaccagagaaccctgagcagagtggagctgaagagactgtgcgagatcttcaccagaatgttcgccgacccccacggcaaggtgttcagcatgttcctggagaccctggtggacttcatccaggtgcacaaggacgacctgcaggactggctgttcgtgctgctgacccagctgctgaagaagatgggcgccgacctgctgggcagcgtgcaggccaaggtgcagaaggccctggacgtgaccagagagagcttccccaacgacctgcagttcaacatcctgatgagattcaccgtggaccagacccagacccccagcctgaaggtgaaggtggccatcctgaagtacatcgagaccctggccaagcagatggaccccggcgacttcatcaacagcagcgagaccagactggccgtgagcagagtgatcacctggaccaccgagcccaagagcagcgacgtgagaaaggccgcccagagcgtgctgatcagcctgttcgagctgaacacccccgagttcaccatgctgctgggcgccctgcccaagaccttccaggacggcgccaccaagctgctgcacaaccacctgagaaacaccggcaacggcacccagagcagcatgggcagccccctgaccagacccacccccagaagccccgccaactggagcagccccctgaccagccccaccaacaccagccagaacaccctgagccccagcgccttcgactacgacaccgagaacatgaacagcgaggacatctacagcagcctgagaggcgtgaccgaggccatccagaacttcagcttcagaagccaggaggacatgaacgagcccctgaagagagacagcaagaaggacgacggcgacagcatgtgcggcggccccggcatgagcgaccccagagccggcggcgacgccaccgacagcagccagaccgccctggacaacaaggccagcctgctgcacagcatgcccacccacagcagccccagaagcagagactacaacccctacaactacagcgacagcatcagccccttcaacaagagcgccctgaaggaggccatgttcgacgacgacgccgaccagttccccgacgacctgagcctggaccacagcgacctggtggccgagctgctgaaggagctgagcaaccacaacgagagagtggaggagagaaagatcgccctgtacgagctgatgaagctgacccaggaggagagcttcagcgtgtgggacgagcacttcaagaccatcctgctgctgctgctggagaccctgggcgacaaggagcccaccatcagagccctggccctgaaggtgctgagagagatcctgagacaccagcccgccagattcaagaactacgccgagctgaccgtgatgaagaccctggaggcccacaaggacccccacaaggaggtggtgagaagcgccgaggaggccgccagcgtgctggccaccagcatcagccccgagcagtgcatcaaggtgctgtgccccatcatccagaccgccgactaccccatcaacctggccgccatcaagatgcagaccaaggtgatcgagagagtgagcaaggagaccctgaacctgctgctgcccgagatcatgcccggcctgatccagggctacgacaacagcgagagcagcgtgagaaaggcctgcgtgttctgcctggtggccgtgcacgccgtgatcggcgacgagctgaagccccacctgagccagctgaccggcagcaagatgaagctgctgaacctgtacatcaagagagcccagaccggcagcggcggcgccgaccccaccaccgacgtgagcggccagagctag

SEQ ID NO: 78396 - DNA, 4545 bp, synthetic construct
  misc_feature 1..4545: note = Description of Artificial Sequence: Synthetic coding sequence
  source 1..4545: mol_type = other DNA
atggagcccagaagcatggagtacttctgcgcccaggtgcagcagaaggacgtgggcggcagactgcaggtgggccaggagctgctgctgtacctgggcgcccccggcgccatcagcgacctggaggaggacctgggcagactgggcaagaccgtggacgccctgaccggctgggtgggcagcagcaactacagagtgagcctgatgggcctggagatcctgagcgccttcgtggacagactgagcaccagattcaagagctacgtggccatggtgatcgtggccctgatcgacagaatgggcgacgccaaggacaaggtgagagacgaggcccagaccctgatcctgaagctgatggaccaggtggccccccccatgtacatctgggagcagctggccagcggcttcaagcacaagaacttcagaagcagagagggcgtgtgcctgtgcctgatcgagaccctgaacatcttcggcgcccagcccctggtgatcagcaagctgatcccccacctgtgcatcctgttcggcgacagcaacagccaggtgagagacgccgccatcctggccatcgtggagatctacagacacgtgggcgagaaggtgagaatggacctgtacaagagaggcatcccccccgccagactggagatgatcttcgccaagttcgacgaggtgcagagcagcggcggcatgatcctgagcgtgtgcaaggacaagagcttcgacgacgaggagagcgtggacggcaacagacccagcagcgccgccagcgccttcaaggtgcccgcccccaagaccagcggcaaccccgccaacagcgccagaaagcccggcagcgccggcggccccaaggtgggcgccggcgccagcaaggagggcggcgccggcgccgtggacgaggacgacttcatcaaggccttcaccgacgtgcccagcatccagatctacagcagcagagagctggaggagaccctgaacaagatcagagagatcctgagcgacgacaagcacgactgggaccagagagccaacgccctgaagaagatcagaagcctgctggtggccggcgccgcccagtacgactgcttcttccagcacctgagactgctggacggcgccctgaagctgagcgccaaggacctgagaagccaggtggtgagagaggcctgcatcaccgtggcccacctgagcaccgtgctgggcaacaagttcgaccacggcgccgaggccatcgtgcccaccctgttcaacctggtgcccaacagcgccaaggtgatggccaccagcggctgcgccgccatcagattcatcatcagacacacccacgtgcccagactgatccccctgatcaccagcaactgcaccagcaagagcgtgcccgtgagaagaagaagcttcgagttcctggacctgctgctgcaggagtggcagacccacagcctggagagacacgccgccgtgctggtggagaccatcaagaagggcatccacgacgccgacgccgaggccagagtggaggccagaaagacctacatgggcctgagaaaccacttccccggcgaggccgagaccctgtacaacagcctggagcccagctaccagaagagcctgcagacctacctgaagagcagcggcagcgtggccagcctgccccagagcgacagaagcagcagcagcagccaggagagcctgaacagacccttcagcagcaagtggagcaccgccaaccccagcaccgtggccggcagagtgagcgccggcagcagcaaggccagcagcctgcccggcagcctgcagagaagcagaagcgacatcgacgtgaacgccgccgccggcgccaaggcccaccacgccgccggccagagcgtgagaagcggcagactgggcgccggcgccctgaacgccggcagctacgccagcctggaggacaccagcgacaagctggacggcaccgccagcgaggacggcagagtgagagccaagctgagcgcccccctggccggcatgggcaacgccaaggccgacagcagaggcagaagcagaaccaagatggtgagccagagccagcccggcagcagaagcggcagccccggcagagtgctgaccaccaccgccctgagcaccgtgagcagcggcgtgcagagagtgctggtgaacagcgccagcgcccagaagagaagcaagatccccagaagccagggctgcagcagagaggccagccccagcagactgagcgtggccagaagcagcagaatccccagacccagcgtgagccagggctgcagcagagaggccagcagagagagcagcagagacaccagccccgtgagaagcttccagcccctgggccccggctacggcatcagccagagcagcagactgagcagcagcgtgagcgccatgagagtgctgaacaccggcagcgacgtggaggaggccgtggccgacgccctgctgctgggcgacatcagaaccaagaagaagcccgccagaagaagatacgagagctacggcatgcacagcgacgacgacgccaacagcgacgccagcagcgcctgcagcgagagaagctacagcagcagaaacggcagcatccccacctacatgagacagaccgaggacgtggccgaggtgctgaacagatgcgccagcagcaactggagcgagagaaaggagggcctgctgggcctgcagaacctgctgaagaaccagagaaccctgagcagagtggagctgaagagactgtgcgagatcttcaccagaatgttcgccgacccccacggcaaggtgttcagcatgttcctggagaccctggtggacttcatccaggtgcacaaggacgacctgcaggactggctgttcgtgctgctgacccagctgctgaagaagatgggcgccgacctgctgggcagcgtgcaggccaaggtgcagaaggccctggacgtgaccagagagagcttccccaacgacctgcagttcaacatcctgatgagattcaccgtggaccagacccagacccccagcctgaaggtgaaggtggccatcctgaagtacatcgagaccctggccaagcagatggaccccggcgacttcatcaacagcagcgagaccagactggccgtgagcagagtgatcacctggaccaccgagcccaagagcagcgacgtgagaaaggccgcccagagcgtgctgatcagcctgttcgagctgaacacccccgagttcaccatgctgctgggcgccctgcccaagaccttccaggacggcgccaccaagctgctgcacaaccacctgagaaacaccggcaacggcacccagagcagcatgggcagccccctgaccagacccacccccagaagccccgccaactggagcagccccctgaccagccccaccaacaccagccagaacaccctgagccccagcgccttcgactacgacaccgagaacatgaacagcgaggacatctacagcagcctgagaggcgtgaccgaggccatccagaacttcagcttcagaagccaggaggacatgaacgagcccctgaagagagacagcaagaaggacgacggcgacagcatgtgcggcggccccggcatgagcgaccccagagccggcggcgacgccaccgacagcagccagaccgccctggacaacaaggccagcctgctgcacagcatgcccacccacagcagccccagaagcagagactacaacccctacaactacagcgacagcatcagccccttcaacaagagcgccctgaaggaggccatgttcgacgacgacgccgaccagttccccgacgacctgagcctggaccacagcgacctggtggccgagctgctgaaggagctgagcaaccacaacgagagagtggaggagagaaagatcgccctgtacgagctgatgaagctgacccaggaggagagcttcagcgtgtgggacgagcacttcaagaccatcctgctgctgctgctggagaccctgggcgacaaggagcccaccatcagagccctggccctgaaggtgctgagagagatcctgagacaccagcccgccagattcaagaactacgccgagctgaccgtgatgaagaccctggaggcccacaaggacccccacaaggaggtggtgagaagcgccgaggaggccgccagcgtgctggccaccagcatcagccccgagcagtgcatcaaggtgctgtgccccatcatccagaccgccgactaccccatcaacctggccgccatcaagatgcagaccaaggtgatcgagagagtgagcaaggagaccctgaacctgctgctgcccgagatcatgcccggcctgatccagggctacgacaacagcgagagcagcgtgagaaaggcctgcgtgttctgcctggtggccgtgcacgccgtgatcggcgacgagctgaagccccacctgagccagctgaccggcagcaagatgaagctgctgaacctgtacatcaagagagcccagaccggcagcggcggcgccgaccccaccaccgacgtgagcggccagagctag

SEQ ID NO: 78397 - DNA, 3882 bp, synthetic construct
  misc_feature 1..3882: note = Description of Artificial Sequence: Synthetic coding sequence
  source 1..3882: mol_type = other DNA
atggccatgggcgacgacaagagcttcgacgacgaggagagcgtggacggcaacagacccagcagcgccgccagcgccttcaaggtgcccgcccccaagaccagcggcaaccccgccaacagcgccagaaagcccggcagcgccggcggccccaaggtgggcggcgccagcaaggagggcggcgccggcgccgtggacgaggacgacttcatcaaggccttcaccgacgtgcccagcatccagatctacagcagcagagagctggaggagaccctgaacaagatcagagagatcctgagcgacgacaagcacgactgggaccagagagccaacgccctgaagaagatcagaagcctgctggtggccggcgccgcccagtacgactgcttcttccagcacctgagactgctggacggcgccctgaagctgagcgccaaggacctgagaagccaggtggtgagagaggcctgcatcaccgtggcccacctgagcaccgtgctgggcaacaagttcgaccacggcgccgaggccatcgtgcccaccctgttcaacctggtgcccaacagcgccaaggtgatggccaccagcggctgcgccgccatcagattcatcatcagacacacccacgtgcccagactgatccccctgatcaccagcaactgcaccagcaagagcgtgcccgtgagaagaagaagcttcgagttcctggacctgctgctgcaggagtggcagacccacagcctggagagacacgccgccgtgctggtggagaccatcaagaagggcatccacgacgccgacgccgaggccagagtggaggccagaaagacctacatgggcctgagaaaccacttccccggcgaggccgagaccctgtacaacagcctggagcccagctaccagaagagcctgcagacctacctgaagagcagcggcagcgtggccagcctgccccagagcgacagaagcagcagcagcagccaggagagcctgaacagacccttcagcagcaagtggagcaccgccaaccccagcaccgtggccggcagagtgagcgccggcagcagcaaggccagcagcctgcccggcagcctgcagagaagcagaagcgacatcgacgtgaacgccgccgccggcgccaaggcccaccacgccgccggccagagcgtgagaagcggcagactgggcgccggcgccctgaacgccggcagctacgccagcctggaggacaccagcgacaagctggacggcaccgccagcgaggacggcagagtgagagccaagctgagcgcccccctggccggcatgggcaacgccaaggccgacagcagaggcagaagcagaaccaagatggtgagccagagccagcccggcagcagaagcggcagccccggcagagtgctgaccaccaccgccctgagcaccgtgagcagcggcgtgcagagagtgctggtgaacagcgccagcgcccagaagagaagcaagatccccagaagccagggctgcagcagagaggccagccccagcagactgagcgtggccagaagcagcagaatccccagacccagcgtgagccagggctgcagcagagaggccagcagagagagcagcagagacaccagccccgtgagaagcttccagcccctggccagcagacaccacagcagaagcaccggcgccctgtacgcccccgaggtgtacggcgccagcggccccggctacggcatcagccagagcagcagactgagcagcagcgtgagcgccatgagagtgctgaacaccggcagcgacgtggaggaggccgtggccgacgccctgaagaagcccgccagaagaagatacgagagctacggcatgcacagcgacgacgacgccaacagcgacgccagcagcgcctgcagcgagagaagctacagcagcagaaacggcagcatccccacctacatgagacagaccgaggacgtggccgaggtgctgaacagatgcgccagcagcaactggagcgagagaaaggagggcctgctgggcctgcagaacctgctgaagaaccagagaaccctgagcagagtggagctgaagagactgtgcgagatcttcaccagaatgttcgccgacccccacggcaaggtgttcagcatgttcctggagaccctggtggacttcatccaggtgcacaaggacgacctgcaggactggctgttcgtgctgctgacccagctgctgaagaagatgggcgccgacctgctgggcagcgtgcaggccaaggtgcagaaggccctggacgtgaccagagagagcttccccaacgacctgcagttcaacatcctgatgagattcaccgtggaccagacccagacccccagcctgaaggtgaaggtggccatcctgaagtacatcgagaccctggccaagcagatggaccccggcgacttcatcaacagcagcgagaccagactggccgtgagcagagtgatcacctggaccaccgagcccaagagcagcgacgtgagaaaggccgcccagagcgtgctgatcagcctgttcgagctgaacacccccgagttcaccatgctgctgggcgccctgcccaagaccttccaggacggcgccaccaagctgctgcacaaccacctgagaaacaccggcaacggcacccagagcagcatgggcagccccctgaccagacccacccccagaagccccgccaactggagcagccccctgaccagccccaccaacaccagccagaacaccctgagccccagcgccttcgactacgacaccgagaacatgaacagcgaggacatctacagcagcctgagaggcgtgaccgaggccatccagaacttcagcttcagaagccaggaggacatgaacgagcccctgaagagagacagcaagaaggacgacggcgacagcatgtgcggcggccccggcatgagcgaccccagagccggcggcgacgccaccgacagcagccagaccgccctggacaacaaggccagcctgctgcacagcatgcccacccacagcagccccagaagcagagactacaacccctacaactacagcgacagcatcagccccttcaacaagagcgccctgaaggaggccatgttcgacgacgacgccgaccagttccccgacgacctgagcctggaccacagcgacctggtggccgagctgctgaaggagctgagcaaccacaacgagagagtggaggagagaaagatcgccctgtacgagctgatgaagctgacccaggaggagagcttcagcgtgtgggacgagcacttcaagaccatcctgctgctgctgctggagaccctgggcgacaaggagcccaccatcagagccctggccctgaaggtgctgagagagatcctgagacaccagcccgccagattcaagaactacgccgagctgaccgtgatgaagaccctggaggcccacaaggacccccacaaggaggtggtgagaagcgccgaggaggccgccagcgtgctggccaccagcatcagccccgagcagtgcatcaaggtgctgtgccccatcatccagaccgccgactaccccatcaacctggccgccatcaagatgcagaccaaggtgatcgagagagtgagcaaggagaccctgaacctgctgctgcccgagatcatgcccggcctgatccagggctacgacaacagcgagagcagcgtgagaaaggcctgcgtgttctgcctggtggccgtgcacgccgtgatcggcgacgagctgaagccccacctgagccagctgaccggcagcaagatgaagctgctgaacctgtacatcaagagagcccagaccggcagcggcggcgccgaccccaccaccgacgtgagcggccagagctag

SEQ ID NO: 78398 - DNA, 3192 bp, synthetic construct
  misc_feature 1..3192: note = Description of Artificial Sequence: Synthetic coding sequence
  source 1..3192: mol_type = other DNA
atgagaagactgatctgcaagagaatctgcgactacaagagcttcgacgacgaggagagcgtggacggcaacagacccagcagcgccgccagcgccttcaaggtgcccgcccccaagaccagcggcaaccccgccaacagcgccagaaagcccggcagcgccggcggccccaaggtgggcgagctgctgagcatcatgatctacagcagcagagagctggaggagaccctgaacaagatcagagagatcctgagcgacgacaagcacgactgggaccagagagccaacgccctgaagaagatcagaagcctgctggtggccggcgccgcccagtacgactgcttcttccagcacctgagactgctggacggcgccctgaagctgagcgccaaggacctgagaagccaggtggtgagagaggcctgcatcaccgtggcccacctgagcaccgtgctgggcaacaagttcgaccacggcgccgaggccatcgtgcccaccctgttcaacctggtgcccaacagcgccaaggtgatggccaccagcggctgcgccgccatcagattcatcatcagacacacccacgtgcccagactgatccccctgatcaccagcaactgcaccagcaagagcgtgcccgtgagaagaagaagcttcgagttcctggacctgctgctgcaggagtggcagacccacagcctggagagacacgccgccgtgctggtggagaccatcaagaagggcatccacgacgccgacgccgaggccagagtggaggccagaaagacctacatgggcctgagaaaccacttccccggcgaggccgagaccctgtacaacagcctggagcccagctaccagaagagcctgcagacctacctgaagagcagcggcagcgtggccagcctgccccagagcgacagaagcagcagcagcagccaggagagcctgaacagacccttcagcagcaagtggagcaccgccaaccccagcaccgtggccggcagagtgagcgccggcagcagcaaggccagcagcctgcccggcagcctgcagagaagcagaagcgacatcgacgtgaacgccgccgccggcgccaaggcccaccacgccgccggccagagcgtgagaagcggcagactgggcgccggcgccctgaacgccggcagctacgccagcctggaggacaccagcgacaagctggacgacctgttcagcgacaacggcagagtgagagccaagctgagcgcccccctggccggcatgggcaacgccaaggccgacagcagaggcagaagcagaaccaagatggtgagccagagccagagaagcagcagccccgacaagaacgagggcagccagagcgccaacaccatcggcgccggcagcagaagcggcagccccggcagagtgctgaccaccaccgccctgagcaccgtgagcagcggcgtgcagagagtgctggtgaacagcgccagcgcccagaagagaagcaagatccccagaagccagggctgcagcagagaggccagccccagcagactgagcgtggccagaagcagcagaatccccagacccagcgtgagccagggctgcagcagagaggccagcagagagagcagcagagacaccagccccgtgagaagcttccagcccctgggccccggctacggcatcagccagagcagcagactgagcagcagcgtgagcgccatgagagtgctgaacaccggcagcgacgtggaggaggccgtggccgacgccctggtgctgttcgacttcaagaccaagaagaagcccgccagaagaagatacgagagctacggcatgcacagcgacgacgacgccaacagcgacgccagcagcgcctgcagcgagagaagctacagcagcagaaacggcagcatccccacctacatgagacagaccgaggacgtggccgaggtgctgaacagatgcgccagcagcaactggagcgagagaaaggagggcctgctgggcctgcagaacctgctgaagaaccagagaaccctgagcagagtggagctgaagagactgtgcgagatcttcaccagaatgttcgccgacccccacggcaaggtgttcagcatgttcctggagaccctggtggacttcatccaggtgcacaaggacgacctgcaggactggctgttcgtgctgctgacccagctgctgaagaagatgggcgccgacctgctgggcagcgtgcaggccaaggtgcagaaggccctggacgtgaccagagagagcttccccaacgacctgcagttcaacatcctgatgagattcaccgtggaccagacccagacccccagcctgaaggtgaaggtggccatcctgaagtacatcgagaccctggccaagcagatggaccccggcgacttcatcaacagcagcgagaccagactggccgtgagcagagtgatcacctggaccaccgagcccaagagcagcgacgtgagaaaggccgcccagagcgtgctgatcagcctgttcgagctgaacacccccgagttcaccatgctgctgggcgccctgcccaagaccttccaggacggcgccaccaagctgctgcacaaccacctgagaaacaccggcaacggcacccagagcagcatgggcagccccctgaccagacccacccccagaagccccgccaactggagcagccccctgaccagccccaccaacaccagccagaacaccctgagccccagcgccttcgactacgacaccgagaacatgaacagcgaggacatctacagcagcctgagaggcgtgaccgaggccatccagaacttcagcttcagaagccaggaggacatgaacgagcccctgaagagagacagcaagaaggacgacggcgacagcatgtgcggcggccccggcatgagcgaccccagagccggcggcgacgccaccgacagcagccagaccgccctggacaacaaggccagcctgctgcacagcatgcccacccacagcagccccagaagcagagactacaacccctacaactacagcgacagcatcagccccttcaacaagagcgccctgaaggaggccatgttcgacgacgacgccgaccagttccccgacgacctgagcctggaccacagcgacctggtggccgagctgctgaaggagctgagcaaccacaacgagagagtgtag

SEQ ID NO: 78399 - DNA, 1680 bp, synthetic construct
  misc_feature 1..1680: note = Description of Artificial Sequence: Synthetic coding sequence
  source 1..1680: mol_type = other DNA
atgcccccccccagccccgacagcgagaacggcttctaccccggcctgcccagcagcatgaaccccgccttcttccccagcttcagccccgtgagcccccacggctgcaccggcctgagcgtgcccaccagcggcggcggcggcggcggcttcggcggccccttcagcgccaccgccgtgccccccccccccccccccgccatgaacatcccccagcagcagccccccccccccgccgccccccagcagccccagagcagaagaagccccgtgagcccccagctgcagcagcagcaccaggccgccgccgccgccttcctgcagcagagaaacagctacaaccaccaccagcccctgctgaagcagagcccctggagcaaccaccagagcagcggctggggcaccggcagcatgagctggggcgccatgcacggcagagaccacagaagaaccggcaacatgggcatccccggcaccatgaaccagatcagccccctgaagaagcccttcagcggcaacgtgatcgccccccccaagttcaccagaagcacccccagcctgacccccaagagctggatcgaggacaacgtgttcagaaccgacaacaacagcaacaccctgctgcccctgcaggacagaagcagaatgtacgacagcctgaacatgcacagcctggagaacagcctgatcgacatcatgagagccgagcacgaccccctgaagggcagactgagctacccccaccccggcaccgacaacctgctgatgctgaacggcagaagcagcctgttccccatcgacgacggcctgctggacgacggccacagcgaccaggtgggcgtgctgaacagccccacctgctacagcgcccaccagaacggcgagagaatcgagagattcagcagaaaggtgttcgtgggcggcctgccccccgacatcgacgaggacgagatcaccgccagcttcagaagattcggccccctggtggtggactggccccacaaggccgagagcaagagctacttcccccccaagggctacgccttcctgctgttccaggaggagagcagcgtgcaggccctgatcgacgcctgcatcgaggaggacggcaagctgtacctgtgcgtgagcagccccaccatcaaggacaagcccgtgcagatcagaccctggaacctgagcgacagcgacttcgtgatggacggcagccagcccctggaccccagaaagaccatcttcgtgggcggcgtgcccagacccctgagagccgtggagctggccatgatcatggacagactgtacggcggcgtgtgctacgccggcatcgacaccgaccccgagctgaagtaccccaagggcgccggcagagtggccttcagcaaccagcagagctacatcgccgccatcagcgccagattcgtgcagctgcagcacggcgacatcgacaagagagtggaggtgaagccctacgtgctggacgaccagatgtgcgacgagtgccagggcgccagatgcggcggcaagttcgcccccttcttctgcgccaacgtgacctgcctgcagtactactgcgagttctgctgggccaacatccacagcagagccggcagagagttccacaagcccctggtgaaggagggcgccgacagacccagacagatccacttcagatggaactag

SEQ ID NO: 78400 - DNA, 1731 bp, synthetic construct
  misc_feature 1..1731: note = Description of Artificial Sequence: Synthetic coding sequence
  source 1..1731: mol_type = other DNA
atgcccccccccagccccgacagcgagaacggcttctaccccggcctgcccagcagcatgaaccccgccttcttccccagcttcagccccgtgagcccccacggctgcaccggcctgagcgtgccccccccccccgccatgaacatcccccagcagcagccccccccccccgccgccccccagcagccccagagcagaagaagccccgtgagcccccagctgcagcagcagcaccaggccgccgccgccgccttcctgcagcagagaaacagctacaaccaccaccagcccctgctgaagcagagcccctggagcaaccaccagagcagcggctggggcaccggcagcatgagctggggcgccatgcacggcagagaccacagaagaaccggcaacatgggcatccccggcaccatgaaccagatcagccccctgaagaagcccttcagcggcaacgtgatcgccccccccaagttcaccagaagcacccccagcctgacccccaagagctggatcgaggacaacgtgttcagaaccgacaacaacagcaacaccctgctgcccctgcaggtgagaagcagcctgcagctgcccgcctggggcagcgacagcctgcaggacagctggtgcaccgccgccggcaccagcagaatcgaccaggacagaagcagaatgtacgacagcctgaacatgcacagcctggagaacagcctgatcgacatcatgagagccgagcacgaccccctgaagggcagactgagctacccccaccccggcaccgacaacctgctgatgctgaacgccagaagctacggcagaagaagaggcagaagcagcctgttccccatcgacgacggcctgctggacgacggccacagcgaccaggtgggcgtgctgaacagccccacctgctacagcgcccaccagaacggcgagagaatcgagagattcagcagaaaggtgttcgtgggcggcctgccccccgacatcgacgaggacgagatcaccgccagcttcagaagattcggccccctggtggtggactggccccacaaggccgagagcaagagctacttcccccccaagggctacgccttcctgctgttccaggaggagagcagcgtgcaggccctgatcgacgcctgcatcgaggaggacggcaagctgtacctgtgcgtgagcagccccaccatcaaggacaagcccgtgcagatcagaccctggaacctgagcgacagcgacttcgtgatggacggcagccagcccctggaccccagaaagaccatcttcgtgggcggcgtgcccagacccctgagagccgtggagctggccatgatcatggacagactgtacggcggcgtgtgctacgccggcatcgacaccgaccccgagctgaagtaccccaagggcgccggcagagtggccttcagcaaccagcagagctacatcgccgccatcagcgccagattcgtgcagctgcagcacggcgacatcgacaagagagtggaggtgaagccctacgtgctggacgaccagatgtgcgacgagtgccagggcgccagatgcggcggcaagttcgcccccttcttctgcgccaacgtgacctgcctgcagtactactgcgagttctgctgggccaacatccacagcagagccggcagagagttccacaagcccctggtgaaggagggcgccgacagacccagacagatccacttcagatggaactag

SEQ ID NO: 78401 - DNA, 1704 bp, synthetic construct
  misc_feature 1..1704: note = Description of Artificial Sequence: Synthetic coding sequence
  source 1..1704: mol_type = other DNA
atgcccccccccagccccgacagcgagaacggcttctaccccggcctgcccagcagcatgaaccccgccttcttccccagcttcagccccgtgagcccccacggctgcaccggcctgagcgtgcccaccagcggcggcggcggcggcggcttcggcggccccttcagcgccaccgccgtgccccccccccccccccccgccatgaacatcccccagcagcagccccccccccccgccgccccccagcagccccagagcagaagaagccccgtgagcccccagctgcagcagcagcaccaggccgccgccgccgccttcctgcagcagagaaacagctacaaccaccaccagcccctgctgaagcagagcccctggagcaaccaccagagcagcggctggggcaccggcagcatgagctggggcgccatgcacggcagagaccacagaagaaccggcaacatgggcatccccggcaccatgaaccagatcagccccctgaagaagcccttcagcggcaacgtgatcgccccccccaagttcaccagaagcacccccagcctgacccccaagagctggatcgaggacaacgtgttcagaaccgacaacaacagcaacaccctgctgcccctgcaggacagaagcagaatgtacgacagcctgaacatgcacagcctggagaacagcctgatcgacatcatgagagccgagcacgaccccctgaagggcagactgagctacccccaccccggcaccgacaacctgctgatgctgaacgccagaagctacggcagaagaagaggcagaagcagcctgttccccatcgacgacggcctgctggacgacggccacagcgaccaggtgggcgtgctgaacagccccacctgctacagcgcccaccagaacggcgagagaatcgagagattcagcagaaaggtgttcgtgggcggcctgccccccgacatcgacgaggacgagatcaccgccagcttcagaagattcggccccctggtggtggactggccccacaaggccgagagcaagagctacttcccccccaagggctacgccttcctgctgttccaggaggagagcagcgtgcaggccctgatcgacgcctgcatcgaggaggacggcaagctgtacctgtgcgtgagcagccccaccatcaaggacaagcccgtgcagatcagaccctggaacctgagcgacagcgacttcgtgatggacggcagccagcccctggaccccagaaagaccatcttcgtgggcggcgtgcccagacccctgagagccgtggagctggccatgatcatggacagactgtacggcggcgtgtgctacgccggcatcgacaccgaccccgagctgaagtaccccaagggcgccggcagagtggccttcagcaaccagcagagctacatcgccgccatcagcgccagattcgtgcagctgcagcacggcgacatcgacaagagagtggaggtgaagccctacgtgctggacgaccagatgtgcgacgagtgccagggcgccagatgcggcggcaagttcgcccccttcttctgcgccaacgtgacctgcctgcagtactactgcgagttctgctgggccaacatccacagcagagccggcagagagttccacaagcccctggtgaaggagggcgccgacagacccagacagatccacttcagatggaactag

SEQ ID NO: 78402 - DNA, 1689 bp, synthetic construct
  misc_feature 1..1689: note = Description of Artificial Sequence: Synthetic coding sequence
  source 1..1689: mol_type = other DNA
atgcccccccccagccccgacagcgagaacggcttctaccccggcctgcccagcagcatgaaccccgccttcttccccagcttcagccccgtgagcccccacggctgcaccggcctgagcgtgcccaccagcggcggcggcggcggcggcttcggcggccccttcagcgccaccgccgtgccccccccccccccccccgccatgaacatcccccagcagcagccccccccccccgccgccccccagcagccccagagcagaagaagccccgtgagcccccagctgcagcagcagcaccaggccgccgccgccgccttcctgcagcagagaaacagctacaaccaccaccagcccctgctgaagcagagcccctggagcaaccaccagagcagcggctggggcaccggcagcatgagctggggcgccatgcacggcagagaccacagaagaaccggcaacatgggcatccccggcaccatgaaccagatcagccccctgaagaagcccttcagcggcaacgtgatcgccccccccaagttcaccagaagcacccccagcctgacccccaagagctggatcgaggacaacgtgttcagaaccgacaacaacagcaacaccctgctgcccctgcaggtgagaatggacagaagcagaatgtacgacagcctgaacatgcacagcctggagaacagcctgatcgacatcatgagagccgagcacgaccccctgaagggcagactgagctacccccaccccggcaccgacaacctgctgatgctgaacggcagaagcagcctgttccccatcgacgacggcctgctggacgacggccacagcgaccaggtgggcgtgctgaacagccccacctgctacagcgcccaccagaacggcgagagaatcgagagattcagcagaaaggtgttcgtgggcggcctgccccccgacatcgacgaggacgagatcaccgccagcttcagaagattcggccccctggtggtggactggccccacaaggccgagagcaagagctacttcccccccaagggctacgccttcctgctgttccaggaggagagcagcgtgcaggccctgatcgacgcctgcatcgaggaggacggcaagctgtacctgtgcgtgagcagccccaccatcaaggacaagcccgtgcagatcagaccctggaacctgagcgacagcgacttcgtgatggacggcagccagcccctggaccccagaaagaccatcttcgtgggcggcgtgcccagacccctgagagccgtggagctggccatgatcatggacagactgtacggcggcgtgtgctacgccggcatcgacaccgaccccgagctgaagtaccccaagggcgccggcagagtggccttcagcaaccagcagagctacatcgccgccatcagcgccagattcgtgcagctgcagcacggcgacatcgacaagagagtggaggtgaagccctacgtgctggacgaccagatgtgcgacgagtgccagggcgccagatgcggcggcaagttcgcccccttcttctgcgccaacgtgacctgcctgcagtactactgcgagttctgctgggccaacatccacagcagagccggcagagagttccacaagcccctggtgaaggagggcgccgacagacccagacagatccacttcagatggaactag

SEQ ID NO: 78403 - DNA, 3024 bp, synthetic construct
  misc_feature 1..3024: note = Description of Artificial Sequence: Synthetic coding sequence
  source 1..3024: mol_type = other DNA
atgagagacttcggcttcggcgtgctgcagaccgcccccctgagaagcagcagccccggccccctgttctgcggcgaggcctacggcccctacgccgtgggcagcgtgaaccccctgcccagcgccacccccttcggccccctgagccccccccccctgcccgtgaccggcttcctggaggccgccagccccttcagcgtgcccctgggcggcggcgccggcagccccgccgccgccgccagcagcagcagccccttcctggcccaccagcagaccatgcaggacgagctgctgctgggcctgacccagcagcccgccagacccctgagcggcgccgccgccaccgagaagctgcccgaccaccaccccggcggcggcaccatcgccggcgtgacccacctgctgcccagccaggacttcaagcccagcctgcaccaccccagcagcagcagcgccagcagctgctgctgctgcagaaccagcagcccccaggacttcagcaagagacagcagcagcagctgagcagccagaagagaaaggagttcagccccccccacctgccccacccccccgacagcaagcccccccccccccccccccccctgcactgccccggcagattcagccccccccccccccccgccggccccctgctgcagcccgcccagctggcccagagacagcagcagcagcccccccagcagttcagcctgctgcaccagcagcacctgagcccccaggacttcgcccccagacagagacccgccgacctgccccccctgccccagctgccccccagcccccccgccgcccccagaagaagacacggcggcgccggcagccccagaaagacccccgccgccggcgagggcagcgccgccgagagccccaacgccggcctggccagcagcacccccgtgaaccccgcccccggcagcatggagagccccaaccaccccctgctgaacagccccagcaacctgctgcccggcggcgccctgggcgccggcgccttcagcagcctgcagagccccgacctgccccaccccggcggcggcggcggcggcggcggcggcggcccccccggcggcggcggcggcggcggcagcgccagccccccccccctgcccggcttcggcaccccctggagcgtgcagaccgccagcccccccccccagccccagcagcccccccccacccagccccagcagcagcccccccccccccagcagcccccccagccccagccccagccccccggcagcagcgccaccacccccggcggcggcagcggcggcagcctgagcgccatgcccccccccagccccgacagcgagaacggcttctaccccggcctgcccagcagcatgaaccccgccttcttccccagcttcagccccgtgagcccccacggctgcaccggcctgagcgtgcccaccagcggcggcggcggcggcggcttcggcggccccttcagcgccaccgccgtgccccccccccccccccccgccatgaacatcccccagcagcagccccccccccccgccgccccccagcagccccagagcagaagaagccccgtgagcccccagctgcagcagcagcaccaggccgccgccgccgccttcctgcagcagagaaacagctacaaccaccaccagcccctgctgaagcagagcccctggagcaaccaccagagcagcggctggggcaccggcagcatgagctggggcgccatgcacggcagagaccacagaagaaccggcaacatgggcatccccggcaccatgaaccagatcagccccctgaagaagcccttcagcggcaacgtgatcgccccccccaagttcaccagaagcacccccagcctgacccccaagagctggatcgaggacaacgtgttcagaaccgacaacaacagcaacaccctgctgcccctgcaggtgagaatggacagaagcagaatgtacgacagcctgaacatgcacagcctggagaacagcctgatcgacatcatgagagccgagcacgaccccctgaagggcagactgagctacccccaccccggcaccgacaacctgctgatgctgaacgccagaagctacggcagaagaagaggcagaagcagcctgttccccatcgacgacggcctgctggacgacggccacagcgaccaggtgggcgtgctgaacagccccacctgctacagcgcccaccagaacggcgagagaatcgagagattcagcagaaaggtgttcgtgggcggcctgccccccgacatcgacgaggacgagatcaccgccagcttcagaagattcggccccctggtggtggactggccccacaaggccgagagcaagagctacttcccccccaagggctacgccttcctgctgttccaggaggagagcagcgtgcaggccctgatcgacgcctgcatcgaggaggacggcaagctgtacctgtgcgtgagcagccccaccatcaaggacaagcccgtgcagatcagaccctggaacctgagcgacagcgacttcgtgatggacggcagccagcccctggaccccagaaagaccatcttcgtgggcggcgtgcccagacccctgagagccgtggagctggccatgatcatggacagactgtacggcggcgtgtgctacgccggcatcgacaccgaccccgagctgaagtaccccaagggcgccggcagagtggccttcagcaaccagcagagctacatcgccgccatcagcgccagattcgtgcagctgcagcacggcgacatcgacaagagagtggaggtgaagccctacgtgctggacgaccagatgtgcgacgagtgccagggcgccagatgcggcggcaagttcgcccccttcttctgcgccaacgtgacctgcctgcagtactactgcgagttctgctgggccaacatccacagcagagccggcagagagttccacaagcccctggtgaaggagggcgccgacagacccagacagatccacttcagatggaactag

SEQ ID NO: 78404 - DNA, 1770 bp, synthetic construct
  misc_feature 1..1770: note = Description of Artificial Sequence: Synthetic coding sequence
  source 1..1770: mol_type = other DNA
atgcccccccccagccccgacagcgagaacggcttctaccccggcctgcccagcagcatgaaccccgccttcttccccagcttcagccccgtgagcccccacggctgcaccggcctgagcgtgcccaccagcggcggcggcggcggcggcttcggcggccccttcagcgccaccgccgtgccccccccccccccccccgccatgaacatcccccagcagcagccccccccccccgccgccccccagcagccccagagcagaagaagccccgtgagcccccagctgcagcagcagcaccaggccgccgccgccgccttcctgcagcagagaaacagctacaaccaccaccagcccctgctgaagcagagcccctggagcaaccaccagagcagcggctggggcaccggcagcatgagctggggcgccatgcacggcagagaccacagaagaaccggcaacatgggcatccccggcaccatgaaccagatcagccccctgaagaagcccttcagcggcaacgtgatcgccccccccaagttcaccagaagcacccccagcctgacccccaagagctggatcgaggacaacgtgttcagaaccgacaacaacagcaacaccctgctgcccctgcaggtgagaagcagcctgcagctgcccgcctggggcagcgacagcctgcaggacagctggtgcaccgccgccggcaccagcagaatcgaccaggacagaagcagaatgtacgacagcctgaacatgcacagcctggagaacagcctgatcgacatcatgagagccgagcacgaccccctgaagggcagactgagctacccccaccccggcaccgacaacctgctgatgctgaacggcagaagcagcctgttccccatcgacgacggcctgctggacgacggccacagcgaccaggtgggcgtgctgaacagccccacctgctacagcgcccaccagaacggcgagagaatcgagagattcagcagaaaggtgttcgtgggcggcctgccccccgacatcgacgaggacgagatcaccgccagcttcagaagattcggccccctggtggtggactggccccacaaggccgagagcaagagctacttcccccccaagggctacgccttcctgctgttccaggaggagagcagcgtgcaggccctgatcgacgcctgcatcgaggaggacggcaagctgtacctgtgcgtgagcagccccaccatcaaggacaagcccgtgcagatcagaccctggaacctgagcgacagcgacttcgtgatggacggcagccagcccctggaccccagaaagaccatcttcgtgggcggcgtgcccagacccctgagagccgtggagctggccatgatcatggacagactgtacggcggcgtgtgctacgccggcatcgacaccgaccccgagctgaagtaccccaagggcgccggcagagtggccttcagcaaccagcagagctacatcgccgccatcagcgccagattcgtgcagctgcagcacggcgacatcgacaagagagtggaggtgaagccctacgtgctggacgaccagatgtgcgacgagtgccagggcgccagatgcggcggcaagttcgcccccttcttctgcgccaacgtgacctgcctgcagtactactgcgagttctgctgggccaacatccacagcagagccggcagagagttccacaagcccctggtgaaggagggcgccgacagacccagacagatccacttcagatggaactag

SEQ ID NO: 78405 - DNA, 3105 bp, synthetic construct
  misc_feature 1..3105: note = Description of Artificial Sequence: Synthetic coding sequence
  source 1..3105: mol_type = other DNA
atgagagacttcggcttcggcgtgctgcagaccgcccccctgagaagcagcagccccggccccctgttctgcggcgaggcctacggcccctacgccgtgggcagcgtgaaccccctgcccagcgccacccccttcggccccctgagccccccccccctgcccgtgaccggcttcctggaggccgccagccccttcagcgtgcccctgggcggcggcgccggcagccccgccgccgccgccagcagcagcagccccttcctggcccaccagcagaccatgcaggacgagctgctgctgggcctgacccagcagcccgccagacccctgagcggcgccgccgccaccgagaagctgcccgaccaccaccccggcggcggcaccatcgccggcgtgacccacctgctgcccagccaggacttcaagcccagcctgcaccaccccagcagcagcagcgccagcagctgctgctgctgcagaaccagcagcccccaggacttcagcaagagacagcagcagcagctgagcagccagaagagaaaggagttcagccccccccacctgccccacccccccgacagcaagcccccccccccccccccccccctgcactgccccggcagattcagccccccccccccccccgccggccccctgctgcagcccgcccagctggcccagagacagcagcagcagcccccccagcagttcagcctgctgcaccagcagcacctgagcccccaggacttcgcccccagacagagacccgccgacctgccccccctgccccagctgccccccagcccccccgccgcccccagaagaagacacggcggcgccggcagccccagaaagacccccgccgccggcgagggcagcgccgccgagagccccaacgccggcctggccagcagcacccccgtgaaccccgcccccggcagcatggagagccccaaccaccccctgctgaacagccccagcaacctgctgcccggcggcgccctgggcgccggcgccttcagcagcctgcagagccccgacctgccccaccccggcggcggcggcggcggcggcggcggcggcccccccggcggcggcggcggcggcggcagcgccagccccccccccctgcccggcttcggcaccccctggagcgtgcagaccgccagcccccccccccagccccagcagcccccccccacccagccccagcagcagcccccccccccccagcagcccccccagccccagccccagccccccggcagcagcgccaccacccccggcggcggcagcggcggcagcctgagcgccatgcccccccccagccccgacagcgagaacggcttctaccccggcctgcccagcagcatgaaccccgccttcttccccagcttcagccccgtgagcccccacggctgcaccggcctgagcgtgcccaccagcggcggcggcggcggcggcttcggcggccccttcagcgccaccgccgtgccccccccccccccccccgccatgaacatcccccagcagcagccccccccccccgccgccccccagcagccccagagcagaagaagccccgtgagcccccagctgcagcagcagcaccaggccgccgccgccgccttcctgcagcagagaaacagctacaaccaccaccagcccctgctgaagcagagcccctggagcaaccaccagagcagcggctggggcaccggcagcatgagctggggcgccatgcacggcagagaccacagaagaaccggcaacatgggcatccccggcaccatgaaccagatcagccccctgaagaagcccttcagcggcaacgtgatcgccccccccaagttcaccagaagcacccccagcctgacccccaagagctggatcgaggacaacgtgttcagaaccgacaacaacagcaacaccctgctgcccctgcaggtgagaagcagcctgcagctgcccgcctggggcagcgacagcctgcaggacagctggtgcaccgccgccggcaccagcagaatcgaccaggacagaagcagaatgtacgacagcctgaacatgcacagcctggagaacagcctgatcgacatcatgagagccgagcacgaccccctgaagggcagactgagctacccccaccccggcaccgacaacctgctgatgctgaacgccagaagctacggcagaagaagaggcagaagcagcctgttccccatcgacgacggcctgctggacgacggccacagcgaccaggtgggcgtgctgaacagccccacctgctacagcgcccaccagaacggcgagagaatcgagagattcagcagaaaggtgttcgtgggcggcctgccccccgacatcgacgaggacgagatcaccgccagcttcagaagattcggccccctggtggtggactggccccacaaggccgagagcaagagctacttcccccccaagggctacgccttcctgctgttccaggaggagagcagcgtgcaggccctgatcgacgcctgcatcgaggaggacggcaagctgtacctgtgcgtgagcagccccaccatcaaggacaagcccgtgcagatcagaccctggaacctgagcgacagcgacttcgtgatggacggcagccagcccctggaccccagaaagaccatcttcgtgggcggcgtgcccagacccctgagagccgtggagctggccatgatcatggacagactgtacggcggcgtgtgctacgccggcatcgacaccgaccccgagctgaagtaccccaagggcgccggcagagtggccttcagcaaccagcagagctacatcgccgccatcagcgccagattcgtgcagctgcagcacggcgacatcgacaagagagtggaggtgaagccctacgtgctggacgaccagatgtgcgacgagtgccagggcgccagatgcggcggcaagttcgcccccttcttctgcgccaacgtgacctgcctgcagtactactgcgagttctgctgggccaacatccacagcagagccggcagagagttccacaagcccctggtgaaggagggcgccgacagacccagacagatccacttcagatggaactag

SEQ ID NO: 78406 - DNA, 3081 bp, synthetic construct
  misc_feature 1..3081: note = Description of Artificial Sequence: Synthetic coding sequence
  source 1..3081: mol_type = other DNA
atgagagacttcggcttcggcgtgctgcagaccgcccccctgagaagcagcagccccggccccctgttctgcggcgaggcctacggcccctacgccgtgggcagcgtgaaccccctgcccagcgccacccccttcggccccctgagccccccccccctgcccgtgaccggcttcctggaggccgccagccccttcagcgtgcccctgggcggcggcgccggcagccccgccgccgccgccagcagcagcagccccttcctggcccaccagcagaccatgcaggacgagctgctgctgggcctgacccagcagcccgccagacccctgagcggcgccgccgccaccgagaagctgcccgaccaccaccccggcggcggcaccatcgccggcgtgacccacctgctgcccagccaggacttcaagcccagcctgcaccaccccagcagcagcagcgccagcagctgctgctgctgcagaaccagcagcccccaggacttcagcaagagacagcagcagcagctgagcagccagaagagaaaggagttcagccccccccacctgccccacccccccgacagcaagcccccccccccccccccccccctgcactgccccggcagattcagccccccccccccccccgccggccccctgctgcagcccgcccagctggcccagagacagcagcagcagcccccccagcagttcagcctgctgcaccagcagcacctgagcccccaggacttcgcccccagacagagacccgccgacctgccccccctgccccagctgccccccagcccccccgccgcccccagaagaagacacggcggcgccggcagccccagaaagacccccgccgccggcgagggcagcgccgccgagagccccaacgccggcctggccagcagcacccccgtgaaccccgcccccggcagcatggagagccccaaccaccccctgctgaacagccccagcaacctgctgcccggcggcgccctgggcgccggcgccttcagcagcctgcagagccccgacctgccccaccccggcggcggcggcggcggcggcggcggcggcccccccggcggcggcggcggcggcggcagcgccagccccccccccctgcccggcttcggcaccccctggagcgtgcagaccgccagcccccccccccagccccagcagcccccccccacccagccccagcagcagcccccccccccccagcagcccccccagccccagccccagccccccggcagcagcgccaccacccccggcggcggcagcggcggcagcctgagcgccatgcccccccccagccccgacagcgagaacggcttctaccccggcctgcccagcagcatgaaccccgccttcttccccagcttcagccccgtgagcccccacggctgcaccggcctgagcgtgcccaccagcggcggcggcggcggcggcttcggcggccccttcagcgccaccgccgtgccccccccccccccccccgccatgaacatcccccagcagcagccccccccccccgccgccccccagcagccccagagcagaagaagccccgtgagcccccagctgcagcagcagcaccaggccgccgccgccgccttcctgcagcagagaaacagctacaaccaccaccagcccctgctgaagcagagcccctggagcaaccaccagagcagcggctggggcaccggcagcatgagctggggcgccatgcacggcagagaccacagaagaaccggcaacatgggcatccccggcaccatgaaccagatcagccccctgaagaagcccttcagcggcaacgtgatcgccccccccaagttcaccagaagcacccccagcctgacccccaagagctggatcgaggacaacgtgttcagaaccgacaacaacagcaacaccctgctgcccctgcaggtgagaagcagcctgcagctgcccgcctggggcagcgacagcctgcaggacagctggtgcaccgccgccggcaccagcagaatcgaccaggacagaagcagaatgtacgacagcctgaacatgcacagcctggagaacagcctgatcgacatcatgagagccgagcacgaccccctgaagggcagactgagctacccccaccccggcaccgacaacctgctgatgctgaacggcagaagcagcctgttccccatcgacgacggcctgctggacgacggccacagcgaccaggtgggcgtgctgaacagccccacctgctacagcgcccaccagaacggcgagagaatcgagagattcagcagaaaggtgttcgtgggcggcctgccccccgacatcgacgaggacgagatcaccgccagcttcagaagattcggccccctggtggtggactggccccacaaggccgagagcaagagctacttcccccccaagggctacgccttcctgctgttccaggaggagagcagcgtgcaggccctgatcgacgcctgcatcgaggaggacggcaagctgtacctgtgcgtgagcagccccaccatcaaggacaagcccgtgcagatcagaccctggaacctgagcgacagcgacttcgtgatggacggcagccagcccctggaccccagaaagaccatcttcgtgggcggcgtgcccagacccctgagagccgtggagctggccatgatcatggacagactgtacggcggcgtgtgctacgccggcatcgacaccgaccccgagctgaagtaccccaagggcgccggcagagtggccttcagcaaccagcagagctacatcgccgccatcagcgccagattcgtgcagctgcagcacggcgacatcgacaagagagtggaggtgaagccctacgtgctggacgaccagatgtgcgacgagtgccagggcgccagatgcggcggcaagttcgcccccttcttctgcgccaacgtgacctgcctgcagtactactgcgagttctgctgggccaacatccacagcagagccggcagagagttccacaagcccctggtgaaggagggcgccgacagacccagacagatccacttcagatggaactag

SEQ ID NO: 78407 - DNA, 2097 bp, synthetic construct
  misc_feature 1..2097: note = Description of Artificial Sequence: Synthetic coding sequence
  source 1..2097: mol_type = other DNA
atgcaggacgacctgctgatggacaagagcaagacccagccccagccccagcagcagcagagacagcagcagcagccccagcccgagagcagcgtgagcgaggcccccagcacccccctgagcagcgagacccccaagcccgaggagaacagcgccgtgcccgccctgagccccgccgccgccccccccgcccccaacggccccgacaagatgcagatggagagccccctgctgcccggcctgagcttccaccagcccccccagcagcccccccccccccaggagcccgccgcccccggcgccagcctgagccccagcttcggcagcacctggagcaccggcaccaccaacgccgtggaggacagcttcttccagggcatcacccccgtgaacggcaccatgctgttccagaacttcccccaccacgtgaaccccgtgttcggcggcaccttcagcccccagatcggcctggcccagacccagcaccaccagcagccccccccccccgcccccgccccccagcccgcccagcccgcccagcccccccaggcccagcccccccagcagagaagaagccccgccagccccagccaggccccctacgcccagagaagcgccgccgccgcctacggccaccagcccatcatgaccagcaagcccagcagcagcagcgccgtggccgccgccgccgccgccgccgccgccagcagcgccagcagcagctggaacacccaccagagcgtgaacgccgcctggagcgcccccagcaacccctggggcggcctgcaggccggcagagaccccagaagagccgtgggcgtgggcgtgggcgtgggcgtgggcgtgcccagccccctgaaccccatcagccccctgaagaagcccttcagcagcaacgtgatcgccccccccaagttccccagagccgcccccctgaccagcaagagctggatggaggacaacgccttcagaaccgacaacggcaacaacctgctgcccttccaggacagaagcagaccctacgacaccttcaacctgcacagcctggagaacagcctgatggacatgatcagaaccgaccacgagcccctgaagggcaagcactacccccccagcggcccccccatgagcttcgccgacatcatgtggagaaaccacttcgccggcagaatgggcatcaacttccaccaccccggcaccgacaacatcatggccctgaacaacgccttcctggacgacagccacggcgaccaggccctgagcagcggcctgagcagccccaccagatgccagaacggcgagagagtggagagatacagcagaaaggtgttcgtgggcggcctgccccccgacatcgacgaggacgagatcaccgccagcttcagaagattcggccccctggtggtggactggccccacaaggccgagagcaagagctacttcccccccaagggctacgccttcctgctgttccaggaggagagcagcgtgcaggccctgatcgacgcctgcctggaggaggacggcaagctgtacctgtgcgtgagcagccccaccatcaaggacaagcccgtgcagatcagaccctggaacctgagcgacagcgacttcgtgatggacggcagccagcccctggaccccagaaagaccatcttcgtgggcggcgtgcccagacccctgagagccgtggagctggccatgatcatggacagactgtacggcggcgtgtgctacgccggcatcgacaccgaccccgagctgaagtaccccaagggcgccggcagagtggccttcagcaaccagcagagctacatcgccgccatcagcgccagattcgtgcagctgcagcacaacgacatcgacaagagagtggaggtgaagccctacgtgctggacgaccagatgtgcgacgagtgccagggcaccagatgcggcggcaagttcgcccccttcttctgcgccaacgtgacctgcctgcagtactactgcgagtactgctgggccagcatccacagcagagccggcagagagttccacaagcccctggtgaaggagggcggcgacagacccagacacgtgcccttcagatggagctag

SEQ ID NO: 78408 - DNA, 2055 bp, synthetic construct
  misc_feature 1..2055: note = Description of Artificial Sequence: Synthetic coding sequence
  source 1..2055: mol_type = other DNA
atgcaggacgacctgctgatggacaagagcaagacccagccccagccccagcagcagcagagacagcagcagcagccccagcccgagagcagcgtgagcgaggcccccagcacccccctgagcagcgagacccccaagcccgaggagaacagcgccgtgcccgccctgagccccgccgccgccccccccgcccccaacggccccgacaagatgcagatggagagccccctgctgcccggcctgagcttccaccagcccccccagcagcccccccccccccaggagcccgccgcccccggcgccagcctgagccccagcttcggcagcacctggagcaccggcaccaccaacgccgtggaggacagcttcttccagggcatcacccccgtgaacggcaccatgctgttccagaacttcccccaccacgtgaaccccgtgttcggcggcaccttcagcccccagatcggcctggcccagacccagcaccaccagcagccccccccccccgcccccgccccccagcccgcccagcccgcccagcccccccaggcccagcccccccagcagagaagaagccccgccagccccagccaggccccctacgcccagagaagcgccgccgccgcctacggccaccagcccatcatgaccagcaagcccagcagcagcagcgccgtggccgccgccgccgccgccgccgccgccagcagcgccagcagcagctggaacacccaccagagcgtgaacgccgcctggagcgcccccagcaacccctggggcggcctgcaggccggcagagaccccagaagagccgtgggcgtgggcgtgggcgtgggcgtgggcgtgcccagccccctgaaccccatcagccccctgaagaagcccttcagcagcaacgtgatcgccccccccaagttccccagagccgcccccctgaccagcaagagctggatggaggacaacgccttcagaaccgacaacggcaacaacctgctgcccttccaggacagaagcagaccctacgacaccttcaacctgcacagcctggagaacagcctgatggacatgatcagaaccgaccacgagcccctgaagggcagaatgggcatcaacttccaccaccccggcaccgacaacatcatggccctgaacagcagaagcagcctgttccccttcgaggacgccttcctggacgacagccacggcgaccaggccctgagcagcggcctgagcagccccaccagatgccagaacggcgagagagtggagagatacagcagaaaggtgttcgtgggcggcctgccccccgacatcgacgaggacgagatcaccgccagcttcagaagattcggccccctggtggtggactggccccacaaggccgagagcaagagctacttcccccccaagggctacgccttcctgctgttccaggaggagagcagcgtgcaggccctgatcgacgcctgcctggaggaggacggcaagctgtacctgtgcgtgagcagccccaccatcaaggacaagcccgtgcagatcagaccctggaacctgagcgacagcgacttcgtgatggacggcagccagcccctggaccccagaaagaccatcttcgtgggcggcgtgcccagacccctgagagccgtggagctggccatgatcatggacagactgtacggcggcgtgtgctacgccggcatcgacaccgaccccgagctgaagtaccccaagggcgccggcagagtggccttcagcaaccagcagagctacatcgccgccatcagcgccagattcgtgcagctgcagcacaacgacatcgacaagagagtggaggtgaagccctacgtgctggacgaccagatgtgcgacgagtgccagggcaccagatgcggcggcaagttcgcccccttcttctgcgccaacgtgacctgcctgcagtactactgcgagtactgctgggccagcatccacagcagagccggcagagagttccacaagcccctggtgaaggagggcggcgacagacccagacacgtgcccttcagatggagctag

SEQ ID NO: 78409 - DNA, 2055 bp, synthetic construct; identical to SEQ ID NO: 78408
  misc_feature 1..2055: note = Description of Artificial Sequence: Synthetic coding sequence
  source 1..2055: mol_type = other DNA

SEQ ID NO: 78410 - DNA, 2190 bp, synthetic construct
  misc_feature 1..2190: note = Description of Artificial Sequence: Synthetic coding sequence
  source 1..2190: mol_type = other DNA
atgggcgactacggcttcggcgtgctggtgcagagcaacaccggcaacaagagcgccttccccgtgagattccacccccacctgcagcccccccaccaccaccagaacgccacccccagccccgccgccttcatcaacaacaacaccgccgccaacggcagcagcgccggcagcgcctggctgttccccgcccccgccacccacaacatccaggacgagatcctgggcagcgagaaggccaagagccagcagcaggagcagcaggaccccctggagaagcagcagctgagccccagccccggccaggaggccggcatcctgcccgagaccgagaaggccaagagcgaggagaaccagggcgacaacagcagcgagaacggcaacggcaaggagaagatcagaatcgagagccccgtgctgaccggcttcgactaccaggaggccaccggcctgggcaccagcacccagcccctgaccagcagcgccagcagcctgaccggcttcagcaactggagcgccgccatcgcccccagcagcagcaccatcatcaacgaggacgccagcttcttccaccagggcggcgtgcccgccgccagcgccaacaacggcgccctgctgttccagaacttcccccaccacgtgagccccggcttcggcggcagcttcagcccccagatcggccccctgagccagcaccacccccaccacccccacttccagcaccaccacagccagcaccagcagcagagaagaagccccgccagcccccaccccccccccttcacccacagaaacgccgccttcaaccagctgccccacctggccaacaacctgaacaagccccccagcccctggagcagctaccagagccccagccccacccccagcagcagctggagccccggcggcggcggctacggcggctggggcggcagccagggcagagaccacagaagaggcctgaacggcggcatcacccccctgaacagcatcagccccctgaagaagaacttcgccagcaaccacatccagctgcagaagtacgccagacccagcagcgccttcgcccccaagagctggatggaggacagcctgaacagagccgacaacatcttccccttccccgacagacccagaaccttcgacatgcacagcctggagagcagcctgatcgacatcatgagagccgagaacgacaccatcaagggcagactgaactacagctaccccggcagcgacagcagcctgctgatcaacgccagaacctacggcagaagaagaggccagagcagcctgttccccatggaggacggcttcctggacgacggcagaggcgaccagcccctgcacagcggcctgggcagcccccactgcttcagccaccagaacggcgagagagtggagagatacagcagaaaggtgttcgtgggcggcctgccccccgacatcgacgaggacgagatcaccgccagcttcagaagattcggccccctgatcgtggactggccccacaaggccgagagcaagagctacttcccccccaagggctacgccttcctgctgttccaggacgagagcagcgtgcaggccctgatcgacgcctgcatcgaggaggacggcaagctgtacctgtgcgtgagcagccccaccatcaaggacaagcccgtgcagatcagaccctggaacctgagcgacagcgacttcgtgatggacggcagccagcccctggaccccagaaagaccatcttcgtgggcggcgtgcccagacccctgagagccgtggagctggccatgatcatggacagactgtacggcggcgtgtgctacgccggcatcgacaccgaccccgagctgaagtaccccaagggcgccggcagagtggccttcagcaaccagcagagctacatcgccgccatcagcgccagattcgtgcagctgcagcacggcgagatcgacaagagagtggaggtgaagccctacgtgctggacgaccagctgtgcgacgagtgccagggcgccagatgcggcggcaagttcgcccccttcttctgcgccaacgtgacctgcctgcagtactactgcgagtactgctgggccgccatccacagcagagccggcagagagttccacaagcccctggtgaaggagggcggcgacagacccagacacatcagcttcagatggaactag

SEQ ID NO: 78411 - DNA, 2139 bp, synthetic construct
  misc_feature 1..2139: note = Description of Artificial Sequence: Synthetic coding sequence
  source 1..2139: mol_type = other DNA
atgggcgactacggcttcggcgtgctggtgcagagcaacaccggcaacaagagcgccttccccgtgagattccacccccacctgcagcccccccaccaccaccagaacgccacccccagccccgccgccttcatcaacaacaacaccgccgccaacggcagcagcgccggcagcgcctggctgttccccgcccccgccacccacaacatccaggacgagatcctgggcagcgagaaggccaagagccagcagcaggagcagcaggaccccctggagaagcagcagctgagccccagccccggccaggaggccggcatcctgcccgagaccgagaaggccaagagcgaggagaaccagggcgacaacagcagcgagaacggcaacggcaaggagaagatcagaatcgagagccccgtgctgaccggcttcgactaccaggaggccaccggcctgggcaccagcacccagcccctgaccagcagcgccagcagcctgaccggcttcagcaactggagcgccgccatcgcccccagcagcagcaccatcatcaacgaggacgccagcttcttccaccagggcggcgtgcccgccgccagcgccaacaacggcgccctgctgttccagaacttcccccaccacgtgagccccggcttcggcggcagcttcagcccccagatcggccccctgagccagcaccacccccaccacccccacttccagcaccaccacagccagcaccagcagcagagaagaagccccgccagcccccaccccccccccttcacccacagaaacgccgccttcaaccagctgccccacctggccaacaacctgaacaagccccccagcccctggagcagctaccagagccccagccccacccccagcagcagctggagccccggcggcggcggctacggcggctggggcggcagccagggcagagaccacagaagaggcctgaacggcggcatcacccccctgaacagcatcagccccctgaagaagaacttcgccagcaaccacatccagctgcagaagtacgccagacccagcagcgccttcgcccccaagagctggatggaggacagcctgaacagagccgacaacatcttccccttccccgacagacccagaaccttcgacatgcacagcctggagagcagcctgatcgacatcatgagagccgagaacgacaccatcaaggccagaacctacggcagaagaagaggccagagcagcctgttccccatggaggacggcttcctggacgacggcagaggcgaccagcccctgcacagcggcctgggcagcccccactgcttcagccaccagaacggcgagagagtggagagatacagcagaaaggtgttcgtgggcggcctgccccccgacatcgacgaggacgagatcaccgccagcttcagaagattcggccccctgatcgtggactggccccacaaggccgagagcaagagctacttcccccccaagggctacgccttcctgctgttccaggacgagagcagcgtgcaggccctgatcgacgcctgcatcgaggaggacggcaagctgtacctgtgcgtgagcagccccaccatcaaggacaagcccgtgcagatcagaccctggaacctgagcgacagcgacttcgtgatggacggcagccagcccctggaccccagaaagaccatcttcgtgggcggcgtgcccagacccctgagagccgtggagctggccatgatcatggacagactgtacggcggcgtgtgctacgccggcatcgacaccgaccccgagctgaagtaccccaagggcgccggcagagtggccttcagcaaccagcagagctacatcgccgccatcagcgccagattcgtgcagctgcagcacggcgagatcgacaagagagtggaggtgaagccctacgtgctggacgaccagctgtgcgacgagtgccagggcgccagatgcggcggcaagttcgcccccttcttctgcgccaacgtgacctgcctgcagtactactgcgagtactgctgggccgccatccacagcagagccggcagagagttccacaagcccctggtgaaggagggcggcgacagacccagacacatcagcttcagatggaactag

SEQ ID NO: 78412 - DNA, 2049 bp, synthetic construct
  misc_feature 1..2049: note = Description of Artificial Sequence: Synthetic coding sequence
  source 1..2049: mol_type = other DNA
atgagcacccccgccgtgccccaggacctgcagctgccccccagccagagagcccagagcgccttcaaggagcagagaagacagaagctgaaggagcacctgctgagaagaaagaccctgttcgcctacaagcaggagaacgagatgctgagcagcagagaccagagagtggtgaccagcgaggaccaggtgcaggagggcaccaaggtgctgaagctgaagaccaagatggccgacaaggagaacatgaagagacccgccgagagcaagaacaacaccgtggtgggcaagcactgcatccccctgaagcccagcaacgagctgaccaacagcaccgtggtgatcgacacccacaagcccaaggacagcaaccagaccccccacctgctgctgaccgaggacgacccccagagccagcacatgaccctgagccaggccttccacctgaagaacaacagcaagaagaagcagatgaccaccgagaagcagaagcaggacgccaacatgcccaagaagcccgtgctgggcagctacagaggccagatcgtgcagagcaagatcaacagcttcagaaagcccctgcaggtgaaggacgagagcagcgccgccaccaagaagctgagcgccaccatccccaaggccaccaagccccagcccgtgaacaccagcagcgtgaccgtgaagagcaacagaagcagcaacatgaccgccaccaccaagttcgtgagcaccaccagccagaacacccagctggtgagaccccccatcagaagccaccacagcaacaccagagacaccgtgaagcagggcatcagcagaaccagcgccaacgtgaccatcagaaagggcccccacgagaaggagctgctgcagagcaagaccgccctgagcagcgtgaagaccagcagcagccagggcatcatcagaaacaagaccctgagcagaagcatcgccagcgaggtgatcgccagacccgccagcctgagcaacgacaagctgatggagaagagcgagcccgtggaccagagaagacacaccgccggcaaggccatcgtggacagcagaagcgcccagcccaaggagaccagcgaggagagaaaggccagactgagcgagtggaaggccggcaagggcagagtgctgaagagaccccccaacagcgtggtgacccagcacgagcccgccggccagaacgagaagcccgtgggcagcttctggaccaccatggccgaggaggacgagcagagactgttcaccgagaaggtgaacaacaccttcagcgagtgcctgaacctgatcaacgagggctgccccaaggaggacatcctggtgaccctgaacgacctgatcaagaacatccccgacgccaagaagctggtgaagtactggatctgcctggccctgatcgagcccatcaccagccccatcgagaacatcatcgccatctacgagaaggccatcctggccggcgcccagcccatcgaggagatgagacacaccatcgtggacatcctgaccatgaagagccaggagaaggccaacctgggcgagaacatggagaagagctgcgccagcaaggaggaggtgaaggaggtgagcatcgaggacaccggcgtggacgtggaccccgagaagctggagatggagagcaagctgcacagaaacctgctgttccaggactgcgagaaggagcaggacaacaagaccaaggaccccacccacgacgtgaagacccccaacaccgagaccagaaccagctgcctgatcaagtacaacgtgagcaccaccccctacctgcagagcgtgaagaagaaggtgcagttcgacggcaccaacagcgccttcaaggagctgaagttcctgacccccgtgagaagaagcagaagactgcaggagaagaccagcaagctgcccgacatgctgaaggaccactacccctgcgtgagcagcctggagcagctgaccgagctgggcagagagaccgacgccttcgtgtgcagacccaacgccgccctgtgcagagtgtactacgaggccgacaccacctag

SEQ ID NO: 78413 - DNA, 1485 bp, synthetic construct
  misc_feature 1..1485: note = Description of Artificial Sequence: Synthetic coding sequence
  source 1..1485: mol_type = other DNA
atgagcacccccgccgtgccccaggacctgcagctgccccccagccagagagcccagagcgccttcaaggagcagagaagacagaagctgaaggagcacctgctgagaagaaagaccctgttcgcctacaagcaggagaacgagatgctgagcagcagagaccagagagtggtgaccagcgaggaccaggtgcaggagggcaccaaggtgctgaagctgaagaccaagatggccgacaaggagaacatgaagagacccgccgagagcaagaacaacaccgtggtgggcaagcactgcatccccctgaagcccagcaacgagctgaccaacagcaccgtggtgatcgacacccacaagcccaaggacagcaaccagaccccccacctgctgctgaccgaggacgacccccagagccagcacatgaccctgagccaggccttccacctgaagaacaacagcaagaagaagcagatgaccaccgagaagcagaagcaggacgccaacatgcccaagaagcccgtgctgggcagctacagaggccagatcgtgcagagcaagatcaacagcttcagaaagcccctgcaggtgaaggacgagagcagcgccgccaccaagaagctgagcgccaccatccccaaggccaccaagccccagcccgtgaacaccagcagcgtgaccgtgaagagcaacagaagcagcaacatgaccgccaccaccaagttcgtgagcaccaccagccagaacacccagctggtgagaccccccatcagaagccaccacagcaacaccagagacaccgtgaagcagggcatcagcagaaccagcgccaacgtgaccatcagaaagggcccccacgagaaggagctgctgcagagcaagaccgccctgagcagcgtgaagaccagcagcagccagggcatcatcagaaacaagaccctgagcagaagcatcgccagcgaggtgatcgccagacccgccagcctgagcaacgacaagctgatggagaagagcgagcccgtggaccagagaagacacaccgccggcaaggccatcgtggacagcagaagcgcccagcccaaggagaccagcgaggagagaaaggccagactgagcgagtggaaggccggcaagggcagagtgctgaagagaccccccaacagcgtggtgacccagcacgagcccgccggccagaacgagaagcccgtgggcagcttctggaccaccatggccgaggaggacgagcagagactgttcaccgagaaggtgaacaacaccttcagcgagtgcctgaacctgatcaacgagggctgccccaaggaggacatcctggtgaccctgaacgacctgatcaagaacatccccgacgccaagaagctggtgaagtactggatctgcctggccctgatcgagcccatcaccagccccatcgagaacatcatcgccatctacgagaaggccatcctggccggcgcccaggtgagatag

SEQ ID NO: 78414 - DNA, 2052 bp, synthetic construct
  misc_feature 1..2052: note = Description of Artificial Sequence: Synthetic coding sequence
  source 1..2052: mol_type = other DNA
atgagcacccccgccgtgccccaggacctgcagctgccccccagccagagagcccagagcgccttcaaggagcagagaagacagaagctgaaggagcacctgctgagaagaaagaccctgttcgcctacaagcaggagaacgagatgctgagcagcagcagagaccagagagtggtgaccagcgaggaccaggtgcaggagggcaccaaggtgctgaagctgaagaccaagatggccgacaaggagaacatgaagagacccgccgagagcaagaacaacaccgtggtgggcaagcactgcatccccctgaagcccagcaacgagctgaccaacagcaccgtggtgatcgacacccacaagcccaaggacagcaaccagaccccccacctgctgctgaccgaggacgacccccagagccagcacatgaccctgagccaggccttccacctgaagaacaacagcaagaagaagcagatgaccaccgagaagcagaagcaggacgccaacatgcccaagaagcccgtgctgggcagctacagaggccagatcgtgcagagcaagatcaacagcttcagaaagcccctgcaggtgaaggacgagagcagcgccgccaccaagaagctgagcgccaccatccccaaggccaccaagccccagcccgtgaacaccagcagcgtgaccgtgaagagcaacagaagcagcaacatgaccgccaccaccaagttcgtgagcaccaccagccagaacacccagctggtgagaccccccatcagaagccaccacagcaacaccagagacaccgtgaagcagggcatcagcagaaccagcgccaacgtgaccatcagaaagggcccccacgagaaggagctgctgcagagcaagaccgccctgagcagcgtgaagaccagcagcagccagggcatcatcagaaacaagaccctgagcagaagcatcgccagcgaggtgatcgccagacccgccagcctgagcaacgacaagctgatggagaagagcgagcccgtggaccagagaagacacaccgccggcaaggccatcgtggacagcagaagcgcccagcccaaggagaccagcgaggagagaaaggccagactgagcgagtggaaggccggcaagggcagagtgctgaagagaccccccaacagcgtggtgacccagcacgagcccgccggccagaacgagaagcccgtgggcagcttctggaccaccatggccgaggaggacgagcagagactgttcaccgagaaggtgaacaacaccttcagcgagtgcctgaacctgatcaacgagggctgccccaaggaggacatcctggtgaccctgaacgacctgatcaagaacatccccgacgccaagaagctggtgaagtactggatctgcctggccctgatcgagcccatcaccagccccatcgagaacatcatcgccatctacgagaaggccatcctggccggcgcccagcccatcgaggagatgagacacaccatcgtggacatcctgaccatgaagagccaggagaaggccaacctgggcgagaacatggagaagagctgcgccagcaaggaggaggtgaaggaggtgagcatcgaggacaccggcgtggacgtggaccccgagaagctggagatggagagcaagctgcacagaaacctgctgttccaggactgcgagaaggagcaggacaacaagaccaaggaccccacccacgacgtgaagacccccaacaccgagaccagaaccagctgcctgatcaagtacaacgtgagcaccaccccctacctgcagagcgtgaagaagaaggtgcagttcgacggcaccaacagcgccttcaaggagctgaagttcctgacccccgtgagaagaagcagaagactgcaggagaagaccagcaagctgcccgacatgctgaaggaccactacccctgcgtgagcagcctggagcagctgaccgagctgggcagagagaccgacgccttcgtgtgcagacccaacgccgccctgtgcagagtgtactacgaggccgacaccacctag

SEQ ID NO: 78415 - DNA, 1488 bp, synthetic construct
  misc_feature 1..1488: note = Description of Artificial Sequence: Synthetic coding sequence
  source 1..1488: mol_type = other DNA
atgagcacccccgccgtgccccaggacctgcagctgccccccagccagagagcccagagcgccttcaaggagcagagaagacagaagctgaaggagcacctgctgagaagaaagaccctgttcgcctacaagcaggagaacgagatgctgagcagcagcagagaccagagagtggtgaccagcgaggaccaggtgcaggagggcaccaaggtgctgaagctgaagaccaagatggccgacaaggagaacatgaagagacccgccgagagcaagaacaacaccgtggtgggcaagcactgcatccccctgaagcccagcaacgagctgaccaacagcaccgtggtgatcgacacccacaagcccaaggacagcaaccagaccccccacctgctgctgaccgaggacgacccccagagccagcacatgaccctgagccaggccttccacctgaagaacaacagcaagaagaagcagatgaccaccgagaagcagaagcaggacgccaacatgcccaagaagcccgtgctgggcagctacagaggccagatcgtgcagagcaagatcaacagcttcagaaagcccctgcaggtgaaggacgagagcagcgccgccaccaagaagctgagcgccaccatccccaaggccaccaagccccagcccgtgaacaccagcagcgtgaccgtgaagagcaacagaagcagcaacatgaccgccaccaccaagttcgtgagcaccaccagccagaacacccagctggtgagaccccccatcagaagccaccacagcaacaccagagacaccgtgaagcagggcatcagcagaaccagcgccaacgtgaccatcagaaagggcccccacgagaaggagctgctgcagagcaagaccgccctgagcagcgtgaagaccagcagcagccagggcatcatcagaaacaagaccctgagcagaagcatcgccagcgaggtgatcgccagacccgccagcctgagcaacgacaagctgatggagaagagcgagcccgtggaccagagaagacacaccgccggcaaggccatcgtggacagcagaagcgcccagcccaaggagaccagcgaggagagaaaggccagactgagcgagtggaaggccggcaagggcagagtgctgaagagaccccccaacagcgtggtgacccagcacgagcccgccggccagaacgagaagcccgtgggcagcttctggaccaccatggccgaggaggacgagcagagactgttcaccgagaaggtgaacaacaccttcagcgagtgcctgaacctgatcaacgagggctgccccaaggaggacatcctggtgaccctgaacgacctgatcaagaacatccccgacgccaagaagctggtgaagtactggatctgcctggccctgatcgagcccatcaccagccccatcgagaacatcatcgccatctacgagaaggccatcctggccggcgcccagcacatctag

SEQ ID NO: 78416 - DNA, 5919 bp, synthetic construct
  misc_feature 1..5919: note = Description of Artificial Sequence: Synthetic coding sequence
  source 1..5919: mol_type = other DNA
atgggcgacgacagcgagtggctgaagctgcccgtggaccagaagtgcgagcacaagctgtggaaggccagactgagcggctacgaggaggccctgaagatcttccagaagatcaaggacgagaagagccccgagtggagcaagttcctgggcctgatcaagaagttcgtgaccgacagcaacgccgtggtgcagctgaagggcctggaggccgccctggtgtacgtggagaacgcccacgtggccggcaagaccaccggcgaggtggtgagcggcgtggtgagcaaggtgttcaaccagcccaaggccaaggccaaggagctgggcatcgagatctgcctgatgtacatcgagatcgagaagggcgaggccgtgcaggaggagctgctgaagggcctggacaacaagaaccccaagatcatcgtggcctgcatcgagaccctgagaaaggccctgagcgagttcggcagcaagatcatcctgctgaagcccatcatcaaggtgctgcccaagctgttcgagagcagagagaaggccgtgagagacgaggccaagctgatcgccgtggagatctacagatggatcagagacgccctgagaccccccctgcagaacatcaacagcgtgcagctgaaggagctggaggaggagtgggtgaagctgcccaccagcgcccccagacccaccagattcctgagaagccagcaggagctggaggccaagctggagcagcagcagagcgccggcggcgacgccgagggcggcggcgacgacggcgacgaggtgccccagatcgacgcctacgagctgctggaggccgtggagatcctgagcaagctgcccaaggacttctacgacaagatcgaggccaagaagtggcaggagagaaaggaggccctggagagcgtggaggtgctgatcaagaaccccaagctggaggccggcgactacgccgacctggtgaaggccctgaagaaggtggtgggcaaggacaccaacgtgatgctggtggccctggccgccaagtgcctgaccggcctggccgtgggcctgagaaagaagttcggccagtacgccggccacgtggtgcccaccatcctggagaagttcaaggagaagaagccccaggtggtgcaggccctgcaggaggccatcgacgccatcttcctgaccaccaccctgcagaacatcagcgaggacgtgctggccgtgatggacaacaagaaccccaccatcaagcagcagaccagcctgttcatcgccagaagcttcagacactgcaccgccagcaccctgcccaagagcctgctgaagcccttctgcgccgccctgctgaagcacatcaacgacagcgcccccgaggtgagagacgccgccttcgaggccctgggcaccgccctgaaggtggtgggcgagaaggccgtgaaccccttcctggccgacgtggacaagctgaagctggacaagatcaaggagtgcagcgagaaggtggagctgatccacggcaagaaggccggcctggccgccgacaagaaggagttcaagcccctgcccggcagaaccgccgccagcggcgccgccggcgacaaggacaccaaggacatcagcgcccccaagcccggccccctgaagaaggcccccgccgccaaggccggcggcccccccaagaagggcaagcccgccgcccccggcggcgccggcaacaccggcaccaagaacaagaagggcctggagaccaaggagatcgtggagcccgagctgagcatcgaggtgtgcgaggagaaggccagcgccgtgctgccccccacctgcatccagctgctggacagcagcaactggaaggagagactggcctgcatggaggagttccagaaggccgtggagctgatggacagaaccgagatgccctgccaggccctggtgagaatgctggccaagaagcccggctggaaggagaccaacttccaggtgatgcagatgaagctgcacatcgtggccctgatcgcccagaagggcaacttcagcaagaccagcgcccaggtggtgctggacggcctggtggacaagatcggcgacgtgaagtgcggcaacaacgccaaggaggccatgaccgccatcgccgaggcctgcatgctgccctggaccgccgagcaggtggtgagcatggccttcagccagaagaaccccaagaaccagagcgagaccctgaactggctgagcaacgccatcaaggagttcggcttcagcggcctgaacgtgaaggccttcatcagcaacgtgaagaccgccctggccgccaccaaccccgccgtgagaaccgccgccatcaccctgctgggcgtgatgtacctgtacgtgggccccagcctgagaatgttcttcgaggacgagaagcccgccctgctgagccagatcgacgccgagttcgagaagatgcagggccagagcccccccgcccccaccagaggcatcagcaagcacagcaccagcggcaccgacgagggcgaggacggcgacgagcccgacgacggcagcaacgacgtggtggacctgctgcccagaaccgagatcagcgacaagatcaccagcgagctggtgagcaagatcggcgacaagaactggaagatcagaaaggagggcctggacgaggtggccggcatcatcaacgacgccaagttcatccagcccaacatcggcgagctgcccaccgccctgaagggcagactgaacgacagcaacaagatcctggtgcagcagaccctgaacatcctgcagcagctggccgtggccatgggccccaacatcaagcagcacgtgaagaacctgggcatccccatcatcaccgtgctgggcgacagcaagaacaacgtgagagccgccgccctggccaccgtgaacgcctgggccgagcagaccggcatgaaggagtggctggagggcgaggacctgagcgaggagctgaagaaggagaaccccttcctgagacaggagctgctgggctggctggccgagaagctgcccaccctgagaagcacccccaccgacctgatcctgtgcgtgccccacctgtacagctgcctggaggacagaaacggcgacgtgagaaagaaggcccaggacgccctgcccttcttcatgatgcacctgggctacgagaagatggccaaggccaccggcaagctgaagcccaccagcaaggaccaggtgctggccatgctggagaaggccaaggtgaacatgcccgccaagcccgccccccccaccaaggccaccagcaagcccatgggcggcagcgcccccgccaagttccagcccgccagcgcccccgccgaggactgcatcagcagcagcaccgagcccaagcccgaccccaagaaggccaaggcccccggcctgagcagcaaggccaagagcgcccagggcaagaagatgcccagcaagaccagcctgaaggaggacgaggacaagagcggccccatcttcatcgtggtgcccaacggcaaggagcagagaatgaaggacgagaagggcctgaaggtgctgaagtggaacttcaccacccccagagacgagtacatcgagcagctgaagacccagatgagcagctgcgtggccaagtggctgcaggacgagatgttccacagcgacttccagcaccacaacaaggccctggccgtgatggtggaccacctggagagcgagaaggagggcgtgatcggctgcctggacctgatcctgaagtggctgaccctgagattcttcgacaccaacaccagcgtgctgatgaaggccctggagtacctgaagctgctgttcaccctgctgagcgaggaggagtaccacctgaccgagaacgaggccagcagcttcatcccctacctggtggtgaaggtgggcgagcccaaggacgtgatcagaaaggacgtgagagccatcctgaacagaatgtgcctggtgtaccccgccagcaagatgttccccttcatcatggagggcaccaagagcaagaacagcaagcagagagccgagtgcctggaggagctgggctgcctggtggagagctacggcatgaacgtgtgccagcccacccccggcaaggccctgaaggagatcgccgtgcacatcggcgacagagacaacgccgtgagaaacgccgccctgaacaccatcgtgaccgtgtacaacgtgcacggcgaccaggtgttcaagctgatcggcaacctgagcgagaaggacatgagcatgctggaggagagaatcaagagaagcgccaagagacccagcgccgcccccatcaagcaggtggaggagaagccccagagagcccagaacatcagcagcaacgccaacatgctgagaaagggccccgccgaggacatgagcagcaagctgaaccaggccagaagcatgagcggccaccccgaggccgcccagatggtgagaagagagttccagctggacctggacgagatcgagaacgacaacggcaccgtgagatgcgagatgcccgagctggtgcagcacaagctggacgacatcttcgagcccgtgctgatccccgagcccaagatcagagccgtgagcccccacttcgacgacatgcacagcaacaccgccagcaccatcaacttcatcatcagccaggtggccagcggcgacatcaacaccagcatccaggccctgacccagctgttccagatcgagagcctggccagagaggccagcaccggcgtgctgaaggacctgatgcacggcctgatcaccctgatgctggacagcagaatcgaggacctggaggagggccagcaggtgatcagaagcgtgaacctgctggtggtgaaggtgctggagaagagcgaccagaccaacatcctgagcgccctgctggtgctgctgcaggacagcctgctggccaccgccagcagccccaagttcagcgagctggtgatgaagtgcctgtggagaatggtgagactgctgcccgacaccatcaacagcatcaacctggacagaatcctgctggacatccacatcttcatgaaggtgttccccaaggagaagctgaagcagtgcaagagcgagttccccatcagaaccctgaagaccctgctgcacaccctgtgcaagctgaagggccccaagatcctggaccacctgaccatgatcgacaacaagaacgagagcgagctggaggcccacctgtgcagaatgatgaagcacagcatggaccagaccggcagcaagagcgacaaggagaccgagaagggcgccagcagaatcgacgagaagagcagcaaggccaaggtgaacgacttcctggccgagatcttcaagaagatcggcagcaaggagaacaccaaggagggcctggccgagctgtacgagtacaagaagaagtacagcgacgccgacatcgagcccttcctgaagaacagcagccagttcttccagagctacgtggagagaggcctgagagtgatcgagatggagagagagggcaagggcagaatcagcaccagcaccggcatcagcccccagatggaggtgacctgcgtgcccacccccaccagcaccgtgagcagcatcggcaacaccaacggcgaggaggtgggccccagcgtgtacctggagagactgaagatcctgagacagagatgcggcctggacaacaccaagcaggacgacagaccccccctgaccagcctgctgagcaagcccgccgtgcccaccgtggccagcagcaccgacatgctgcacagcaagctgagccagctgagagagagcagagagcagcaccagcacagcgacctggacagcaaccagacccacagcagcggcaccgtgaccagcagcagcagcaccgccaacatcgacgacctgaagaagagactggagagaatcaagagcagcagaaagtag

SEQ ID NO: 78417 - DNA, 5919 bp, synthetic construct; identical to SEQ ID NO: 78416
  misc_feature 1..5919: note = Description of Artificial Sequence: Synthetic coding sequence
  source 1..5919: mol_type = other DNA

SEQ ID NO: 78418 - DNA, 906 bp, synthetic construct
  misc_feature 1..906: note = Description of Artificial Sequence: Synthetic coding sequence
  source 1..906: mol_type = other DNA
atgggcgacgacagcgagtggctgaagctgcccgtggaccagaagtgcgagcacaagctgtggaaggccagactgagcggctacgaggaggccctgaagatcttccagaagatcaaggacgagaagagccccgagtggagcaagttcctgggcctgatcaagaagttcgtgaccgacagcaacgccgtggtgcagctgaagggcctggaggccgccctggtgtacgtggagaacgcccacgtggccggcaagaccaccggcgaggtggtgagcggcgtggtgagcaaggtgttcaaccagcccaaggccaaggccaaggagctgggcatcgagatctgcctgatgtacatcgagatcgagaagggcgaggccgtgcaggaggagctgctgaagggcctggacaacaagaaccccaagatcatcgtggcctgcatcgagaccctgagaaaggccctgagcgagttcggcagcaagatcatcctgctgaagcccatcatcaaggtgctgcccaagctgttcgagagcagagagaaggccgtgagagacgaggccaagctgatcgccgtggagatctacagatggatcagagacgccctgagaccccccctgcagaacatcaacagcgtgcagctgaaggagctggaggaggagtgggtgaagctgcccaccagcgcccccagacccaccagattcctgagaagccagcaggagctggaggccaagctggagcagcagcagagcgccggcggcgacgccgagggcggcggcgacgacggcgacgaggtgccccagatcgacgcctacgagctgctggaggccgtggagatcctgagcaagcccaagaccttcatgaccaagctgagacagaagaacggcaagagagagaagagaccctggagcctgtag

SEQ ID NO: 78419 - DNA, 6120 bp, synthetic construct
  misc_feature 1..6120: note = Description of Artificial Sequence: Synthetic coding sequence
  source 1..6120: mol_type = other DNA
atgggcgacgacagcgagtggctgaagctgcccgtggaccagaagtgcgagcacaagctgtggaaggccagactgagcggctacgaggaggccctgaagatcttccagaagatcaaggacgagaagagccccgagtggagcaagttcctgggcctgatcaagaagttcgtgaccgacagcaacgccgtggtgcagctgaagggcctggaggccgccctggtgtacgtggagaacgcccacgtggccggcaagaccaccggcgaggtggtgagcggcgtggtgagcaaggtgttcaaccagcccaaggccaaggccaaggagctgggcatcgagatctgcctgatgtacatcgagatcgagaagggcgaggccgtgcaggaggagctgctgaagggcctggacaacaagaaccccaagatcatcgtggcctgcatcgagaccctgagaaaggccctgagcgagttcggcagcaagatcatcctgctgaagcccatcatcaaggtgctgcccaagctgttcgagagcagagagaaggccgtgagagacgaggccaagctgatcgccgtggagatctacagatggatcagagacgccctgagaccccccctgcagaacatcaacagcgtgcagctgaaggagctggaggaggagtgggtgaagctgcccaccagcgcccccagacccaccagattcctgagaagccagcaggagctggaggccaagctggagcagcagcagagcgccggcggcgacgccgagggcggcggcgacgacggcgacgaggtgccccagatcgacgcctacgagctgctggaggccgtggagatcctgagcaagctgcccaaggacttctacgacaagatcgaggccaagaagtggcaggagagaaaggaggccctggagagcgtggaggtgctgatcaagaaccccaagctggaggccggcgactacgccgacctggtgaaggccctgaagaaggtggtgggcaaggacaccaacgtgatgctggtggccctggccgccaagtgcctgaccggcctggccgtgggcctgagaaagaagttcggccagtacgccggccacgtggtgcccaccatcctggagaagttcaaggagaagaagccccaggtggtgcaggccctgcaggaggccatcgacgccatcttcctgaccaccaccctgcagaacatcagcgaggacgtgctggccgtgatggacaacaagaaccccaccatcaagcagcagaccagcctgttcatcgccagaagcttcagacactgcaccgccagcaccctgcccaagagcctgctgaagcccttctgcgccgccctgctgaagcacatcaacgacagcgcccccgaggtgagagacgccgccttcgaggccctgggcaccgccctgaaggtggtgggcgagaaggccgtgaaccccttcctggccgacgtggacaagctgaagctggacaagatcaaggagtgcagcgagaaggtggagctgatccacggcaagaaggccggcctggccgccgacaagaaggagttcaagcccctgcccggcagaaccgccgccagcggcgccgccggcgacaaggacaccaaggacatcagcgcccccaagcccggccccctgaagaaggcccccgccgccaaggccggcggcccccccaagaagggcaagcccgccgcccccggcggcgccggcaacaccggcaccaagaacaagaagggcctggagaccaaggagatcgtggagcccgagctgagcatcgaggtgtgcgaggagaaggccagcgccgtgctgccccccacctgcatccagctgctggacagcagcaactggaaggagagactggcctgcatggaggagttccagaaggccgtggagctgatggacagaaccgagatgccctgccaggccctggtgagaatgctggccaagaagcccggctggaaggagaccaacttccaggtgatgcagatgaagctgcacatcgtggccctgatcgcccagaagggcaacttcagcaagaccagcgcccaggtggtgctggacggcctggtggacaagatcggcgacgtgaagtgcggcaacaacgccaaggaggccatgaccgccatcgccgaggcctgcatgctgccctggaccgccgagcaggtggtgagcatggccttcagccagaagaaccccaagaaccagagcgagaccctgaactggctgagcaacgccatcaaggagttcggcttcagcggcctgaacgtgaaggccttcatcagcaacgtgaagaccgccctggccgccaccaaccccgccgtgagaaccgccgccatcaccctgctgggcgtgatgtacctgtacgtgggccccagcctgagaatgttcttcgaggacgagaagcccgccctgctgagccagatcgacgccgagttcgagaagatgcagggccagagcccccccgcccccaccagaggcatcagcaagcacagcaccagcggcaccgacgagggcgaggacggcgacgagcccgacgacggcagcaacgacgtggtggacctgctgcccagaaccgagatcagcgacaagatcaccagcgagctggtgagcaagatcggcgacaagaactggaagatcagaaaggagggcctggacgaggtggccggcatcatcaacgacgccaagttcatccagcccaacatcggcgagctgcccaccgccctgaagggcagactgaacgacagcaacaagatcctggtgcagcagaccctgaacatcctgcagcagctggccgtggccatgggccccaacatcaagcagcacgtgaagaacctgggcatccccatcatcaccgtgctgggcgacagcaagaacaacgtgagagccgccgccctggccaccgtgaacgcctgggccgagcagaccggcatgaaggagtggctggagggcgaggacctgagcgaggagctgaagaaggagaaccccttcctgagacaggagctgctgggctggctggccgagaagctgcccaccctgagaagcacccccaccgacctgatcctgtgcgtgccccacctgtacagctgcctggaggacagaaacggcgacgtgagaaagaaggcccaggacgccctgcccttcttcatgatgcacctgggctacgagaagatggccaaggccaccggcaagctgaagcccaccagcaaggaccaggtgctggccatgctggagaaggccaaggtgaacatgcccgccaagcccgccccccccaccaaggccaccagcaagcccatgggcggcagcgcccccgccaagttccagcccgccagcgcccccgccgaggactgcatcagcagcagcaccgagcccaagcccgaccccaagaaggccaaggcccccggcctgagcagcaaggccaagagcgcccagggcaagaagatgcccagcaagaccagcctgaaggaggacgaggacaagagcggccccatcttcatcgtggtgcccaacggcaaggagcagagaatgaaggacgagaagggcctgaaggtgctgaagtggaacttcaccacccccagagacgagtacatcgagcagctgaagacccagatgagcagctgcgtggccaagtggctgcaggacgagatgttccacagcgacttccagcaccacaacaaggccctggccgtgatggtggaccacctggagagcgagaaggagggcgtgatcggctgcctggacctgatcctgaagtggctgaccctgagattcttcgacaccaacaccagcgtgctgatgaaggccctggagtacctgaagctgctgttcaccctgctgagcgaggaggagtaccacctgaccgagaacgaggccagcagcttcatcccctacctggtggtgaaggtgggcgagcccaaggacgtgatcagaaaggacgtgagagccatcctgaacagaatgtgcctggtgtaccccgccagcaagatgttccccttcatcatggagggcaccaagagcaagaacagcaagcagagagccgagtgcctggaggagctgggctgcctggtggagagctacggcatgaacgtgtgccagcccacccccggcaaggccctgaaggagatcgccgtgcacatcggcgacagagacaacgccgtgagaaacgccgccctgaacaccatcgtgaccgtgtacaacgtgcacggcgaccaggtgttcaagctgatcggcaacctgagcgagaaggacatgagcatgctggaggagagaatcaagagaagcgccaagagacccagcgccgcccccatcaagcaggtggaggagaagccccagagagcccagaacatcagcagcaacgccaacatgctgagaaagggccccgccgaggacatgagcagcaagctgaaccaggccagaagcatgagcggccaccccgaggccgcccagatggtgagaagagagttccagctggacctggacgagatcgagaacgacaacggcaccgtgagatgcgagatgcccgagctggtgcagcacaagctggacgacatcttcgagcccgtgctgatccccgagcccaagatcagagccgtgagcccccacttcgacgacatgcacagcaacaccgccagcaccatcaacttcatcatcagccaggtggccagcggcgacatcaacaccagcatccaggccctgacccagatcgacgaggtgctgagacaggaggacaaggccgaggccatgagcggccacatcgaccagttcctgatcgccaccttcatgcagctgagactgatctacaacacccacatggccgacgagaagctggagaaggacgagatcatcaagctgtacagctgcatcatcggcaacatgatcagcctgttccagatcgagagcctggccagagaggccagcaccggcgtgctgaaggacctgatgcacggcctgatcaccctgatgctggacagcagaatcgaggacctggaggagggccagcaggtgatcagaagcgtgaacctgctggtggtgaaggtgctggagaagagcgaccagaccaacatcctgagcgccctgctggtgctgctgcaggacagcctgctggccaccgccagcagccccaagttcagcgagctggtgatgaagtgcctgtggagaatggtgagactgctgcccgacaccatcaacagcatcaacctggacagaatcctgctggacatccacatcttcatgaaggtgttccccaaggagaagctgaagcagtgcaagagcgagttccccatcagaaccctgaagaccctgctgcacaccctgtgcaagctgaagggccccaagagctgcatgtgcctgccccagatcctggaccacctgaccatgatcgacaacaagaacgagagcgagctggaggcccacctgtgcagaatgatgaagcacagcatggaccagaccggcagcaagagcgacaaggagaccgagaagggcgccagcagaatcgacgagaagagcagcaaggccaaggtgaacgacttcctggccgagatcttcaagaagatcggcagcaaggagaacaccaaggagggcctggccgagctgtacgagtacaagaagaagtacagcgacgccgacatcgagcccttcctgaagaacagcagccagttcttccagagctacgtggagagaggcctgagagtgatcgagatggagagagagggcaagggcagaatcagcaccagcaccggcatcagcccccagatggaggtgacctgcgtgcccacccccaccagcaccgtgagcagcatcggcaacaccaacggcgaggaggtgggccccagcgtgtacctggagagactgaagatcctgagacagagatgcggcctggacaacaccaagcaggacgacagaccccccctgaccagcctgctgagcaagcccgccgtgcccaccgtggccagcagcaccgacatgctgcacagcaagctgagccagctgagagagagcagagagcagcaccagcacagcgacctggacagcaaccagacccacagcagcggcaccgtgaccagcagcagcagcaccgccaacatcgacgacctgaagaagagactggagagaatcaagagcagcagaaagtag

SEQ ID NO: 78420 - DNA, 456 bp, synthetic construct
  misc_feature 1..456: note = Description of Artificial Sequence: Synthetic coding sequence
  source 1..456: mol_type = other DNA
atgggcgacgacagcgagtggctgaagctgcccgtggaccagaagtgcgagcacaagctgtggaaggccagactgagcggctacgaggaggccctgaagatcttccagaagatcaaggacgagaagagccccgagtggagcaagttcctgggcctgatcaagaagttcgtgaccgacagcaacgccgtggtgcagctgaagggcctggaggccgccctggtgtacgtggagaacgcccacgtggccggcaagaccaccggcgaggtggtgagcggcgtggtgagcaaggtgttcaaccagcccaaggccaaggccaaggagctgggcatcgagatctgcctgatgtacatcgagatcgagaagggcgaggccgtgcaggaggagctgctgaagggcctggacaacaagaaccccaagatcatcgtggcctgcatcgagaccctgagaaaggcctag

SEQ ID NO: 78421 - DNA, 6099 bp, synthetic construct
  misc_feature 1..6099: note = Description of Artificial Sequence: Synthetic coding sequence
  source 1..6099: mol_type = other DNA
atgggcgacgacagcgagtggctgaagctgcccgtggaccagaagtgcgagcacaagctgtggaaggccagactgagcggctacgaggaggccctgaagatcttccagaagatcaaggacgagaagagccccgagtggagcaagttcctgggcctgatcaagaagttcgtgaccgacagcaacgccgtggtgcagctgaagggcctggaggccgccctggtgtacgtggagaacgcccacgtggccggcaagaccaccggcgaggtggtgagcggcgtggtgagcaaggtgttcaaccagcccaaggccaaggccaaggagctgggcatcgagatctgcctgatgtacatcgagatcgagaagggcgaggccgtgcaggaggagctgctgaagggcctggacaacaagaaccccaagatcatcgtggcctgcatcgagaccctgagaaaggccctgagcgagttcggcagcaagatcatcctgctgaagcccatcatcaaggtgctgcccaagctgttcgagagcagagagaaggccgtgagagacgaggccaagctgatcgccgtggagatctacagatggatcagagacgccctgagaccccccctgcagaacatcaacagcgtgcagctgaaggagctggaggaggagtgggtgaagctgcccaccagcgcccccagacccaccagattcctgagaagccagcaggagctggaggccaagctggagcagcagcagagcgccggcggcgacgccgagggcggcggcgacgacggcgacgaggtgccccagatcgacgcctacgagctgctggaggccgtggagatcctgagcaagctgcccaaggacttctacgacaagatcgaggccaagaagtggcaggagagaaaggaggccctggagagcgtggaggtgctgatcaagaaccccaagctggaggccggcgactacgccgacctggtgaaggccctgaagaaggtggtgggcaaggacaccaacgtgatgctggtggccctggccgccaagtgcctgaccggcctggccgtgggcctgagaaagaagttcggccagtacgccggccacgtggtgcccaccatcctggagaagttcaaggagaagaagccccaggtggtgcaggccctgcaggaggccatcgacgccatcttcctgaccaccaccctgcagaacatcagcgaggacgtgctggccgtgatggacaacaagaaccccaccatcaagcagcagaccagcctgttcatcgccagaagcttcagacactgcaccgccagcaccctgcccaagagcctgctgaagcccttctgcgccgccctgctgaagcacatcaacgacagcgcccccgaggtgagagacgccgccttcgaggccctgggcaccgccctgaaggtggtgggcgagaaggccgtgaaccccttcctggccgacgtggacaagctgaagctggacaagatcaaggagtgcagcgagaaggtggagctgatccacggcaagaaggccggcctggccgccgacaagaaggagttcaagcccctgcccggcagaaccgccgccagcggcgccgccggcgacaaggacaccaaggacatcagcgcccccaagcccggccccctgaagaaggcccccgccgccaaggccggcggcccccccaagaagggcaagcccgccgcccccggcggcgccggcaacaccggcaccaagaacaagaagggcctggagaccaaggagatcgtggagcccgagctgagcatcgaggtgtgcgaggagaaggccagcgccgtgctgccccccacctgcatccagctgctggacagcagcaactggaaggagagactggcctgcatggaggagttccagaaggccgtggagctgatggacagaaccgagatgccctgccaggccctggtgagaatgctggccaagaagcccggctggaaggagaccaacttccaggtgatgcagatgaagctgcacatcgtggccctgatcgcccagaagggcaacttcagcaagaccagcgcccaggtggtgctggacggcctggtggacaagatcggcgacgtgaagtgcggcaacaacgccaaggaggccatgaccgccatcgccgaggcctgcatgctgccctggaccgccgagcaggtggtgagcatggccttcagccagaagaaccccaagaaccagagcgagaccctgaactggctgagcaacgccatcaaggagttcggcttcagcggcctgaacgtgaaggccttcatcagcaacgtgaagaccgccctggccgccaccaaccccgccgtgagaaccgccgccatcaccctgctgggcgtgatgtacctgtacgtgggccccagcctgagaatgttcttcgaggacgagaagcccgccctgctgagccagatcgacgccgagttcgagaagatgcagggccagagcccccccgcccccaccagaggcatcagcaagcacagcaccagcggcaccgacgagggcgaggacggcgacgagcccgacgacggcagcaacgacgtggtggacctgctgcccagaaccgagatcagcgacaagatcaccagcgagctggtgagcaagatcggcgacaagaactggaagatcagaaaggagggcctggacgaggtggccggcatcatcaacgacgccaagttcatccagcccaacatcggcgagctgcccaccgccctgaagggcagactgaacgacagcaacaagatcctggtgcagcagaccctgaacatcctgcagcagctggccgtggccatgggccccaacatcaagcagcacgtgaagaacctgggcatccccatcatcaccgtgctgggcgacagcaagaacaacgtgagagccgccgccctggccaccgtgaacgcctgggccgagcagaccggcatgaaggagtggctggagggcgaggacctgagcgaggagctgaagaaggagaaccccttcctgagacaggagctgctgggctggctggccgagaagctgcccaccctgagaagcacccccaccgacctgatcctgtgcgtgccccacctgtacagctgcctggaggacagaaacggcgacgtgagaaagaaggcccaggacgccctgcccttcttcatgatgcacctgggctacgagaagatggccaaggccaccggcaagctgaagcccaccagcaaggaccaggtgctggccatgctggagaaggccaaggtgaacatgcccgccaagcccgccccccccaccaaggccaccagcaagcccatgggcggcagcgcccccgccaagttccagcccgccagcgcccccgccgaggactgcatcagcagcagcaccgagcccaagcccgaccccaagaaggccaaggcccccggcctgagcagcaaggccaagagcgcccagggcaagaagatgcccagcaagaccagcctgaaggaggacgaggacaagagcggccccatcttcatcgtggtgcccaacggcaaggagcagagaatgaaggacgagaagggcctgaaggtgctgaagtggaacttcaccacccccagagacgagtacatcgagcagctgaagacccagatgagcagctgcgtggccaagtggctgcaggacgagatgttccacagcgacttccagcaccacaacaaggccctggccgtgatggtggaccacctggagagcgagaaggagggcgtgatcggctgcctggacctgatcctgaagtggctgaccctgagattcttcgacaccaacaccagcgtgctgatgaaggccctggagtacctgaagctgctgttcaccctgctgagcgaggaggagtaccacctgaccgagaacgaggccagcagcttcatcccctacctggtggtgaaggtgggcgagcccaaggacgtgatcagaaaggacgtgagagccatcctgaacagaatgtgcctggtgtaccccgccagcaagatgttccccttcatcatggagggcaccaagagcaagaacagcaagcagagagccgagtgcctggaggagctgggctgcctggtggagagctacggcatgaacgtgtgccagcccacccccggcaaggccctgaaggagatcgccgtgcacatcggcgacagagacaacgccgtgagaaacgccgccctgaacaccatcgtgaccgtgtacaacgtgcacggcgaccaggtgttcaagctgatcggcaacctgagcgagaaggacatgagcatgctggaggagagaatcaagagaagcgccaagagacccagcgccgcccccatcaagcaggtggaggagaagccccagagagcccagaacatcagcagcaacgccaacatgctgagaaagggccccgccgaggacatgagcagcaagctgaaccaggccagaagcatgagcggccaccccgaggccgcccagatggtgagaagagagttccagctggacctggacgagatcgagaacgacaacggcaccgtgagatgcgagatgcccgagctggtgcagcacaagctggacgacatcttcgagcccgtgctgatccccgagcccaagatcagagccgtgagcccccacttcgacgacatgcacagcaacaccgccagcaccatcaacttcatcatcagccaggtggccagcggcgacatcaacaccagcatccaggccctgacccagatcgacgaggtgctgagacaggaggacaaggccgaggccatgagcggccacatcgaccagttcctgatcgccaccttcatgcagctgagactgatctacaacacccacatggccgacgagaagctggagaaggacgagatcatcaagctgtacagctgcatcatcggcaacatgatcagcctgttccagatcgagagcctggccagagaggccagcaccggcgtgctgaaggacctgatgcacggcctgatcaccctgatgctggacagcagaatcgaggacctggaggagggccagcaggtgatcagaagcgtgaacctgctggtggtgaaggtgctggagaagagcgaccagaccaacatcctgagcgccctgctggtgctgctgcaggacagcctgctggccaccgccagcagccccaagttcagcgagctggtgatgaagtgcctgtggagaatggtgagactgctgcccgacaccatcaacagcatcaacctggacagaatcctgctggacatccacatcttcatgaaggtgttccccaaggagaagctgaagcagtgcaagagcgagttccccatcagaaccctgaagaccctgctgcacaccctgtgcaagctgaagggccccaagatcctggaccacctgaccatgatcgacaacaagaacgagagcgagctggaggcccacctgtgcagaatgatgaagcacagcatggaccagaccggcagcaagagcgacaaggagaccgagaagggcgccagcagaatcgacgagaagagcagcaaggccaaggtgaacgacttcctggccgagatcttcaagaagatcggcagcaaggagaacaccaaggagggcctggccgagctgtacgagtacaagaagaagtacagcgacgccgacatcgagcccttcctgaagaacagcagccagttcttccagagctacgtggagagaggcctgagagtgatcgagatggagagagagggcaagggcagaatcagcaccagcaccggcatcagcccccagatggaggtgacctgcgtgcccacccccaccagcaccgtgagcagcatcggcaacaccaacggcgaggaggtgggccccagcgtgtacctggagagactgaagatcctgagacagagatgcggcctggacaacaccaagcaggacgacagaccccccctgaccagcctgctgagcaagcccgccgtgcccaccgtggccagcagcaccgacatgctgcacagcaagctgagccagctgagagagagcagagagcagcaccagcacagcgacctggacagcaaccagacccacagcagcggcaccgtgaccagcagcagcagcaccgccaacatcgacgacctgaagaagagactggagagaatcaagagcagcagaaagtag

SEQ ID NO: 78422 - DNA, 1020 bp, synthetic construct
  misc_feature 1..1020: note = Description of Artificial Sequence: Synthetic coding sequence
  source 1..1020: mol_type = other DNA
atgaaggacagcctggtgctgctgggcagagtgcccgcccaccccgacagcagatgctggttcctggcctggaaccccgccggcaccctgctggccagctgcggcggcgacagaagaatcagaatctggggcaccgagggcgacagctggatctgcaagagcgtgctgagcgagggccaccagagaaccgtgagaaaggtggcctggagcccctgcggcaactacctggccagcgccagcttcgacgccaccacctgcatctggaagaagaaccaggacgacttcgagtgcgtgaccaccctggagggccacgagaacgaggtgaagagcgtggcctgggcccccagcggcaacctgctggccacctgcagcagagacaagagcgtgtgggtgtgggaggtggacgaggaggacgagtacgagtgcgtgagcgtgctgaacagccacacccaggacgtgaagcacgtggtgtggcaccccagccaggagctgctggccagcgccagctacgacgacaccgtgaagctgtacagagaggaggaggacgactgggtgtgctgcgccaccctggagggccacgagagcaccgtgtggagcctggccttcgaccccagcggccagagactggccagctgcagcgacgacagaaccgtgagaatctggagacagtacctgcccggcaacgagcagggcgtggcctgcagcggcagcgaccccagctggaagtgcatctgcaccctgagcggcttccacagcagaaccatctacgacatcgcctggtgccagctgaccggcgccctggccaccgcctgcggcgacgacgccatcagagtgttccaggaggaccccaacagcgacccccagcagcccaccttcagcctgaccgcccacctgcaccaggcccacagccaggacgtgaactgcgtggcctggaaccccaaggagcccggcctgctggccagctgcagcgacgacggcgaggtggccttctggaagtaccagagacccgagggcctgtag

SEQ ID NO: 78423 - DNA, 1380 bp, synthetic construct
  misc_feature 1..1380: note = Description of Artificial Sequence: Synthetic coding sequence
  source 1..1380: mol_type = other DNA
atggccgccagcggcgccgtggagcccggcccccccggcgccgccgtggcccccagccccgcccccgcccccccccccgcccccgaccacctgttcagacccatcagcgccgaggacgaggagcagcagcccaccgagatcgagagcctgtgcatgaactgctactgcaacggcatgaccagactgctgctgaccaagatccccttcttcagagagatcatcgtgagcagcttcagctgcgagcactgcggctggaacaacaccgagatccagagcgccggcagaatccaggaccagggcgtgagatacaccctgagcgtgagagccctggaggacatgaacagagaggtggtgaagaccgacagcgccgccaccagaatccccgagctggacttcgagatccccgccttcagccagaagggcgccctgaccaccgtggagggcctgatcaccagagccatcagcggcctggagcaggaccagcccgccagaagagccaacaaggacgccaccgccgagagaatcgacgagttcatcgtgaagctgaaggagctgaagcaggtggccagccccttcaccctgatcatcgacgaccccagcggcaacagcttcgtggagaacccccacgccccccagaaggacgacgccctggtgatcacccactacaacagaaccagacagcaggaggagatgctgggcctgcaggaggaggcccccgccgagaagcccgaggaggaggacctgagaaacgaggtgctgcagttcagcaccaactgccccgagtgcaacgcccccgcccagaccaacatgaagctggtgcagatcccccacttcaaggaggtgatcatcatggccaccaactgcgagaactgcggccacagaaccaacgaggtgaagagcggcggcgccgtggagcccctgggcaccagaatcaccctgcacatcaccgacgccagcgacatgaccagagacctgctgaagagcgagacctgcagcgtggagatccccgagctggagttcgagctgggcatggccgtgctgggcggcaagttcaccaccctggagggcctgctgaaggacatcagagagctggtgaccaagaaccccttcaccctgggcgacagcagcaaccccggccagaccgagagactgcaggagttcagccagaagatggaccagatcatcgagggcaacatgaaggcccacttcatcatggacgaccccgccggcaacagctacctgcagaacgtgtacgcccccgaggacgaccccgagatgaaggtggagagatacaagagaaccttcgaccagaacgaggagctgggcctgaacgacatgaagaccgagggctacgaggccggcctggccccccagagatag

SEQ ID NO: 78424 - DNA, 585 bp, synthetic construct
  misc_feature 1..585: note = Description of Artificial Sequence: Synthetic coding sequence
  source 1..585: mol_type = other DNA
atgtgggtgaagctgctgagcatcgtggccgagttctgcttcagccccttcctggtgaccgacgaggagaccgccagcgacgccctggagagaaacagcctgagcagccaggacccccagcagcccaccagcaccgtgagcgtgaccgaggacagcagcaccagcgagatcgacaaggaggagaaggagcagaccacccaggaccccgacctgaccaccgaggccaacccccagtacctgggcctggccagaaagaagagcggcatcctgctgctgaccctggtgagcttcctgatcttcatcctgttcatcatcgtgcagctgttcatcatgaagctgagaaaggcccacgtgatctggaagaaggagaacgaggtgagcgagcacaccctggagagctacagaagcagaagcaacaacgaggagaccagcagcgaggagaagaacggccagagcagccaccccatgagatgcatgaactacatcaccaagctgtacagcgaggccaagaccaagagaaaggagaacgtgcagcacagcaagctggaggagaagcacatccaggtgcccgagagcatcgtgtag

SEQ ID NO: 78425 - DNA, 525 bp, synthetic construct
  misc_feature 1..525: note = Description of Artificial Sequence: Synthetic coding sequence
  source 1..525: mol_type = other DNA
atggcctgcctgggcttccagagacacaaggcccagctgaacctggccaccagaacctggccctgcaccctgctgttcttcctgctgttcatccccgtgttctgcaaggccatgcacgtggcccagcccgccgtggtgctggccagcagcagaggcatcgccagcttcgtgtgcgagtacgccagccccggcaaggccaccgaggtgagagtgaccgtgctgagacaggccgacagccaggtgaccgaggtgtgcgccgccacctacatgatgggcaacgagctgaccttcctggacgacagcatctgcaccggcaccagcagcggcaaccaggtgaacctgaccatccagggcctgagagccatggacaccggcctgtacatctgcaaggtggagctgatgtacccccccccctactacctgggcatcggcaacggcacccagatctacgtgatcgccaaggagaagaagcccagctacaacagaggcctgtgcgagaacgcccccaacagagccagaatgtag

SEQ ID NO: 78426 - DNA, 672 bp, synthetic construct
  misc_feature 1..672: note = Description of Artificial Sequence: Synthetic coding sequence
  source 1..672: mol_type = other DNA
atggcctgcctgggcttccagagacacaaggcccagctgaacctggccaccagaacctggccctgcaccctgctgttcttcctgctgttcatccccgtgttctgcaaggccatgcacgtggcccagcccgccgtggtgctggccagcagcagaggcatcgccagcttcgtgtgcgagtacgccagccccggcaaggccaccgaggtgagagtgaccgtgctgagacaggccgacagccaggtgaccgaggtgtgcgccgccacctacatgatgggcaacgagctgaccttcctggacgacagcatctgcaccggcaccagcagcggcaaccaggtgaacctgaccatccagggcctgagagccatggacaccggcctgtacatctgcaaggtggagctgatgtacccccccccctactacctgggcatcggcaacggcacccagatctacgtgatcgaccccgagccctgccccgacagcgacttcctgctgtggatcctggccgccgtgagcagcggcctgttcttctacagcttcctgctgaccgccgtgagcctgagcaagatgctgaagaagagaagccccctgaccaccggcgtgtacgtgaagatgccccccaccgagcccgagtgcgagaagcagttccagccctacttcatccccatcaactag

SEQ ID NO: 78427 - DNA, 414 bp, synthetic construct
  misc_feature 1..414: note = Description of Artificial Sequence: Synthetic coding sequence
  source 1..414: mol_type = other DNA
atgcacgtggcccagcccgccgtggtgctggccagcagcagaggcatcgccagcttcgtgtgcgagtacgccagccccggcaaggccaccgaggtgagagtgaccgtgctgagacaggccgacagccaggtgaccgaggtgtgcgccgccacctacatgatgggcaacgagctgaccttcctggacgacagcatctgcaccggcaccagcagcggcaaccaggtgaacctgaccatccagggcctgagagccatggacaccggcctgtacatctgcaaggtggagctgatgtacccccccccctactacctgggcatcggcaacggcacccagatctacgtgatcgccaaggagaagaagcccagctacaacagaggcctgtgcgagaacgcccccaacagagccagaatgtag

SEQ ID NO: 78428 - DNA, 171 bp, synthetic construct
  misc_feature 1..171: note = Description of Artificial Sequence: Synthetic coding sequence
  source 1..171: mol_type = other DNA
atggcctgcctgggcttccagagacacaaggcccagctgaacctggccaccagaacctggccctgcaccctgctgttcttcctgctgttcatccccgtgttctgcaaggtgccccccaccgagcccgagtgcgagaagcagttccagccctacttcatccccatcaactag

SEQ ID NO: 78429 - DNA, 660 bp, synthetic construct
  misc_feature 1..660: note = Description of Artificial Sequence: Synthetic coding sequence
  source 1..660: mol_type = other DNA
atggccagcgccggcgacacccaggccggccccagagacgccgccgaccagaacttcgactacatgttcaagctgctgctgatcggcaacagcagcgtgggcaagaccagcttcctgttcagatacgccgacgacagcttcacccccgccttcgtgagcaccgtgggcatcgacttcaaggtgaagaccgtgtacagacacgacaagagaatcaagctgcagatctgggacaccgccggccaggagagatacagaaccatcaccaccgcctactacagaggcgccatgggcttcctgctgatgtacgacatcgccaaccaggagagcttcgccgccgtgcaggactgggccacccagatcaagacctacagctgggacaacgcccaggtgatcctggtgggcaacaagtgcgacctggaggacgagagagtggtgcccgccgaggacggcagaagactggccgacgacctgggcttcgagttcttcgaggccagcgccaaggagaacatcaacgtgaagcaggtgttcgagagactggtggacgtgatctgcgagaagatgaacgagagcctggagcccagcagcagcagcggcagcaacggcaagggccccgccgtgggcgacgcccccgccccccagcccagcagctgcagctgctag

SEQ ID NO: 78430 - DNA, 1566 bp, synthetic construct
  misc_feature 1..1566: note = Description of Artificial Sequence: Synthetic coding sequence
  source 1..1566: mol_type = other DNA
atgctgcccagaagacccctggcctggcccgcctggctgctgagaggcgcccccggcgccgccggcagctggggcagacccgtgggccccctggccagaagaggctgctgcagcgcccccggcacccccgaggtgcccctgaccagagagagataccccgtgagaagactgcccttcagcaccgtgagcaagcaggacctggccgccttcgagagaatcgtgcccggcggcgtggtgaccgaccccgaggccctgcaggcccccaacgtggactggctgagaaccctgagaggctgcagcaaggtgctgctgagacccagaaccagcgaggaggtgagccacatcctgagacactgccacgagagaaacctggccgtgaacccccagggcggcaacaccggcatggtgggcggcagcgtgcccgtgttcgacgagatcatcctgagcaccgccagaatgaacagagtgctgagcttccacagcgtgagcggcatcctggtgtgccaggccggctgcgtgctggaggagctgagcagatacgtggaggagagagacttcatcatgcccctggacctgggcgccaagggcagctgccacatcggcggcaacgtggccaccaacgccggcggcctgagattcctgagatacggcagcctgcacggcaccgtgctgggcctggaggtggtgctggccgacggcaccgtgctggactgcctgaccagcctgagaaaggacaacaccggctacgacctgaagcagctgttcatcggcagcgagggcaccctgggcatcatcaccaccgtgagcatcctgtgcccccccaagcccagagccgtgaacgtggccttcctgggctgccccggcttcgccgaggtgctgcagaccttcagcacctgcaagggcatgctgggcgagatcctgagcgccttcgagttcatggacgccgtgtgcatgcagctggtgggcagacacctgcacctggccagccccgtgcaggagagccccttctacgtgctgatcgagaccagcggcagcaacgccggccacgacgccgagaagctgggccacttcctggagcacgccctgggcagcggcctggtgaccgacggcaccatggccaccgaccagagaaaggtgaagatgctgtgggccctgagagagagaatcaccgaggccctgagcagagacggctacgtgtacaagtacgacctgagcctgcccgtggagagactgtacgacatcgtgaccgacctgagagccagactgggcccccacgccaagcacgtggtgggctacggccacctgggcgacggcaacctgcacctgaacgtgaccgccgaggccttcagccccagcctgctggccgccctggagccccacgtgtacgagtggaccgccggccagcagggcagcgtgagcgccgagcacggcgtgggcttcagaaagagagacgtgctgggctacagcaagccccccggcgccctgcagctgatgcagcagctgaaggccctgctggaccccaagggcatcctgaacccctacaagaccctgcccagccaggcctag

SEQ ID NO: 78431 - DNA, 960 bp, synthetic construct
  misc_feature 1..960: note = Description of Artificial Sequence: Synthetic coding sequence
  source 1..960: mol_type = other DNA
atgctgcccagaagacccctggcctggcccgcctggctgctgagaggcgcccccggcgccgccggcagctggggcagacccgtgggccccctggccagaagaggctgctgcagcgcccccggcacccccgaggtgcccctgaccagagagagataccccgtgagaagactgcccttcagcaccgtgagcaagcaggacctggccgccttcgagagaatcgtgcccggcggcgtggtgaccgaccccgaggccctgcaggcccccaacgtggactggctgagaaccctgagaggctgcagcaaggtgctgctgagacccagaaccagcgaggaggtgagccacatcctgagacactgccacgagagaaacctggccgtgaacccccagggcggcaacaccggcatggtgggcggcagcgtgcccgtgttcgacgagatcatcctgagcaccgccagaatgaacagagtgctgagcttccacagcgtgagcggcatcctggtgtgccaggccggctgcgtgctggaggagctgagcagatacgtggaggagagagacttcatcatgcccctggacctgggcgccaagggcagctgccacatcggcggcaacgtggccaccaacgccggcggcctgagattcctgagatacggcagcctgcacggcaccgtgctgggcctggaggtggtgctggccgacggcaccgtgctggactgcctgaccagcctgagaaaggacaacaccggctacgacctgaagcagctgttcatcggcagcgagggcaccctgggcatcatcaccaccgtgagcatcctgtgcccccccaagcccagagccgtgaacgtggccttcctggtgacctgcgtgccccccgcctgcggccccggcagccccagacccgccagactgccccaccccgccctgagaacccccggcgtgtgcccccagcccctgagactgtag

SEQ ID NO: 78432 - DNA, 1164 bp, synthetic construct
  misc_feature 1..1164: note = Description of Artificial Sequence: Synthetic coding sequence
  source 1..1164: mol_type = other DNA
atggtgggcggcagcgtgcccgtgttcgacgagatcatcctgagcaccgccagaatgaacagagtgctgagcttccacagcgtgagcggcatcctggtgtgccaggccggctgcgtgctggaggagctgagcagatacgtggaggagagagacttcatcatgcccctggacctgggcgccaagggcagctgccacatcggcggcaacgtggccaccaacgccggcggcctgagattcctgagatacggcagcctgcacggcaccgtgctgggcctggaggtggtgctggccgacggcaccgtgctggactgcctgaccagcctgagaaaggacaacaccggctacgacctgaagcagctgttcatcggcagcgagggcaccctgggcatcatcaccaccgtgagcatcctgtgcccccccaagcccagagccgtgaacgtggccttcctgggctgccccggcttcgccgaggtgctgcagaccttcagcacctgcaagggcatgctgggcgagatcctgagcgccttcgagttcatggacgccgtgtgcatgcagctggtgggcagacacctgcacctggccagccccgtgcaggagagccccttctacgtgctgatcgagaccagcggcagcaacgccggccacgacgccgagaagctgggccacttcctggagcacgccctgggcagcggcctggtgaccgacggcaccatggccaccgaccagagaaaggtgaagatgctgtgggccctgagagagagaatcaccgaggccctgagcagagacggctacgtgtacaagtacgacctgagcctgcccgtggagagactgtacgacatcgtgaccgacctgagagccagactgggcccccacgccaagcacgtggtgggctacggccacctgggcgacggcaacctgcacctgaacgtgaccgccgaggccttcagccccagcctgctggccgccctggagccccacgtgtacgagtggaccgccggccagcagggcagcgtgagcgccgagcacggcgtgggcttcagaaagagagacgtgctgggctacagcaagccccccggcgccctgcagctgatgcagcagctgaaggccctgctggaccccaagggcatcctgaacccctacaagaccctgcccagccaggcctag

SEQ ID NO: 78433 - DNA, 978 bp, synthetic construct
  misc_feature 1..978: note = Description of Artificial Sequence: Synthetic coding sequence
  source 1..978: mol_type = other DNA
atgctgcccagaagacccctggcctggcccgcctggctgctgagaggcgcccccggcgccgccggcagctggggcagacccgtgggccccctggccagaagaggctgctgcagcgcccccggcacccccgaggtgcccctgaccagagagagataccccgtgagaagactgcccttcagcaccgtgagcaagcaggacctggccgccttcgagagaatcgtgcccggcggcgtggtgaccgaccccgaggccctgcaggcccccaacgtggactggctgagaaccctgagaggctgcagcaaggtgctgctgagacccagaaccagcgaggaggtgagccacatcctgagacactgccacgagagaaacctggccgtgaacccccagggcggcaacaccggcatggtgggcggcagcgtgcccgtgttcgacgagatcatcctgagcaccgccagaatgaacagagtgctgagcttccacagcgtgagcggcatcctggtgtgccaggccggctgcgtgctggaggagctgagcagatacgtggaggagagagacttcatcatgcccctggacctgggcgccaagggcagctgccacatcggcggcaacgtggccaccaacgccggcggcctgagattcctgagatacggcagcctgcacggcaccgtgctgggcctggaggtggtgctggccgacggcaccgtgctggactgcctgaccagcctgagaaaggacaacaccggctacgacctgaagcagctgttcatcggcagcgagggcaccctgggcatcatcaccaccgtgagcatcctgtgcccccccaagcccagagccgtgaacgtggccttcctggtgacctgcgtgccccccgcctgcggccccggcagccccagacccgccagactgccccaccccgccctgagaacccccggcctgagacaggagagcctggccagcagctgccacgcccacgtgtag

SEQ ID NO: 78434 - DNA, 426 bp, synthetic construct
  misc_feature 1..426: note = Description of Artificial Sequence: Synthetic coding sequence
  source 1..426: mol_type = other DNA
atgctgtgggccctgagagagagaatcaccgaggccctgagcagagacggctacgtgtacaagtacgacctgagcctgcccgtggagagactgtacgacatcgtgaccgacctgagagccagactgggcccccacgccaagcacgtggtgggctacggccacctgggcgacggcaacctgcacctgaacgtgaccgccgaggccttcagccccagcctgctggccgccctggagccccacgtgtacgagtggaccgccggccagcagggcagcgtgagcgccgagcacggcgtgggcttcagaaagagagacgtgctgggctacagcaagccccccggcgccctgcagctgatgcagcagctgaaggccctgctggaccccaagggcatcctgaacccctacaagaccctgcccagccaggcctag

SEQ ID NO: 78435 - DNA, 609 bp, synthetic construct
  misc_feature 1..609: note = Description of Artificial Sequence: Synthetic coding sequence
  source 1..609: mol_type = other DNA
atgagcttcccccccctgtggcccaccagacacgtgcccgccagccaccccacctgccccctgctgcccggcccctgctgctgcccccactgcctgtgcgacagcgccccccccagcctgccctgccccaccctggtgcagggcgccagcagacccatcctgatcctgagagccttccccggcccctgccacagcgtgccctgccacgacctgaagctgcaggtgggcgccagccccttcagacacggctgcccccccagcgtgagatgccccagcagactgatcgccggcgtgcccggctgcagcgtgctgagctggagcctgggccacagcctgagcggcatcgacagcagagtgggcgccacccccggcctgggccacagcctgagctgggtgagagccccccccggcctgggccacagcctgagcggcgtgggcgccacccccggcctgggccacctgctgagcggcgtgggcgccagccccggcgaggacaccgagcacgccgccgccctgaccccctgcggcgtgccccccgtgcccggctgcagaagccacagccagcccctgagccacctggtgagcagcagcagatgctgcggcccctag

SEQ ID NO: 78436 - DNA, 849 bp, synthetic construct
  misc_feature 1..849: note = Description of Artificial Sequence: Synthetic coding sequence
  source 1..849: mol_type = other DNA
atggccctgagctgcagcagctggtgcagaagcccccagtggaagttcgaggccagcaagagccacgccaaccacagacccatctgcctgagccccagaatctggcccggcagcgccagcgccaccagcaccgtgtgcagcagcagcgagagcttcctgcccagaggcccccccgccgtgagcctgctgctgcacggcccccccaccgtgagcttcccccccccctggcccacccaccacgtgctgcccagccccgtggcccaccccccctgcccctgcctgccccccgacatgcccctggagctgcccggcccctgctgctgcccccactgcctgtgcgacagcgccccccccagcctgccctgccccaccctggtgcagggcgccagcagacccatcctgatcctgagagccttccccggcccctgccacagcgtgccctgccacgacctgaagctgcaggtgggcgccagccccttcagacacggctgcccccccagcgtgagatgccccagcagactgatcgccggcgtgcccggctgcagcgtgctgagctggagcctgggccacagcctgagcggcatcgacagcagagtgggcgccacccccggcctgggccacagcctgagctgggtgagagccccccccggcctgggccacagcctgagcggcgtgggcgccacccccggcctgggccacctgctgagcggcgtgggcgccagccccggcgaggacaccgagcacgccgccgccctgaccccctgcggcgtgccccccgtgcccggctgcagaagccacagccagcccctgagccacctggtgagcagcagcagatgctgcggcccctag

SEQ ID NO: 78437 - DNA, 1245 bp, synthetic construct
  misc_feature 1..1245: note = Description of Artificial Sequence: Synthetic coding sequence
  source 1..1245: mol_type = other DNA
atgggcggcctgagcgccagacccaccgccggcagaaccgaccccgccggcacctgctggggccaggaccccggcagcaagatggccaccgtgatccccggccccctgagcctgggcgaggacttctacagagaggccatcgagcactgcagaagctacaacgccagactgtgcgccgagagaagcctgagactgcccttcctggacagccagaccggcgtggcccagaacaactgctacatctggatggagaagacccacagaggccccggcctggcccccggccagatctacacctaccccgccagatgctggagaaagaagagaagactgaacatcctggaggaccccagactgagaccctgcgagtacaagatcgactgcgaggcccccctgaagaaggagggcggcctgcccgagggccccgtgctggaggccctgctgtgcgccgagaccggcgagaagaagatcgagctgaaggaggaggagaccatcatggactgccagaagcagcagctgctggagttcccccacgacctggaggtggaggacctggaggacgacatccccagaagaaagaacagagccaagggcaaggcctacggcatcggcggcctgagaaagagacaggacaccgccagcctggaggacagagacaagccctacgtgtgcgacatctgcggcaagagatacaagaacagacccggcctgagctaccactacacccacacccacctggccgaggaggagggcgaggagaacgccgagagacacgccctgcccttccacagaaagaacaaccacaagcagttctacaaggagctggcctgggtgcccgaggcccagagaaagcacaccgccaagaaggcccccgacggcaccgtgatccccaacggctactgcgacttctgcctgggcggcagcaagaagaccggctgccccgaggacctgatcagctgcgccgactgcggcagaagcggccaccccagctgcctgcagttcaccgtgaacatgaccgccgccgtgagaacctacagatggcagtgcatcgagtgcaagagctgcagcctgtgcggcaccagcgagaacgacgaccagctgctgttctgcgacgactgcgacagaggctaccacatgtactgcctgagcccccccatggccgagccccccgagggcagctggagctgccacctgtgcctgagacacctgaaggagaaggccagcgcctacatcaccctgacctag

SEQ ID NO: 78438 - DNA, 1074 bp, synthetic construct
  misc_feature 1..1074: note = Description of Artificial Sequence: Synthetic coding sequence
  source 1..1074: mol_type = other DNA
atggccaccgtgatccacaaccccctgaaggccctgggcgaccagttctacaaggaggccatcgagcactgcagaagctacaacagcagactgtgcgccgagagaagcgtgagactgcccttcctggacagccagaccggcgtggcccagaacaactgctacatctggatggagaagagacacagaggccccggcctggcccccggccagctgtacacctaccccgccagatgctggagaaagaagagaagactgcacccccccgaggaccccaagctgagactgctggagatcaagcccgaggtggagctgcccctgaagaaggacggcttcaccagcgagagcaccaccctggaggccctgctgagaggcgagggcgtggagaagaaggtggacgccagagaggaggagagcatccaggagatccagagagtgctggagaacgacgagaacgtggaggagggcaacgaggaggaggacctggaggaggacatccccaagagaaagaacagaaccagaggcagagccagaggcagcgccggcggcagaagaagacacgacgccgccagccaggaggaccacgacaagccctacgtgtgcgacatctgcggcaagagatacaagaacagacccggcctgagctaccactacgcccacacccacctggccagcgaggagggcgacgaggcccaggaccaggagaccagaagcccccccaaccacagaaacgagaaccacagaccccagaagggccccgacggcaccgtgatccccaacaactactgcgacttctgcctgggcggcagcaacatgaacaagaagagcggcagacccgaggagctggtgagctgcgccgactgcggcagaagcgcccacctgggcggcgagggcagaaaggagaaggaggccgccgccgccgccagaaccaccgaggacctgttcggcagcaccagcgagagcgacaccagcaccttccacggcttcgacgaggacgacctggaggagcccagaagctgcagaggcagaagaagcggcagaggcagccccaccgccgacaagaagggcagctgctag

SEQ ID NO: 78439 - DNA, 999 bp, synthetic construct
  misc_feature 1..999: note = Description of Artificial Sequence: Synthetic coding sequence
  source 1..999: mol_type = other DNA
atggagaagacccacagaggccccggcctggcccccggccagatctacacctaccccgccagatgctggagaaagaagagaagactgaacatcctggaggaccccagactgagaccctgcgagtacaagatcgactgcgaggcccccctgaagaaggagggcggcctgcccgagggccccgtgctggaggccctgctgtgcgccgagaccggcgagaagaagatcgagctgaaggaggaggagaccatcatggactgccagaagcagcagctgctggagttcccccacgacctggaggtggaggacctggaggacgacatccccagaagaaagaacagagccaagggcaaggcctacggcatcggcggcctgagaaagagacaggacaccgccagcctggaggacagagacaagccctacgtgtgcgacatctgcggcaagagatacaagaacagacccggcctgagctaccactacacccacacccacctggccgaggaggagggcgaggagaacgccgagagacacgccctgcccttccacagaaagaacaaccacaagcagttctacaaggagctggcctgggtgcccgaggcccagagaaagcacaccgccaagaaggcccccgacggcaccgtgatccccaacggctactgcgacttctgcctgggcggcagcaagaagaccggctgccccgaggacctgatcagctgcgccgactgcggcagaagcggccaccccagctgcctgcagttcaccgtgaacatgaccgccgccgtgagaacctacagatggcagtgcatcgagtgcaagagctgcagcctgtgcggcaccagcgagaacgacgaccagctgctgttctgcgacgactgcgacagaggctaccacatgtactgcctgagcccccccatggccgagccccccgagggcagctggagctgccacctgtgcctgagacacctgaaggagaaggccagcgcctacatcaccctgacctag

SEQ ID NO: 78440 - DNA, 1143 bp, synthetic construct
  misc_feature 1..1143: note = Description of Artificial Sequence: Synthetic coding sequence
  source 1..1143: mol_type = other DNA
atgggcggcctgagcgccagacccaccgccggcagaaccgaccccgccggcacctgctggggccaggaccccggcagcaagatggccaccgtgatccccggccccctgagcctgggcgaggacttctacagagaggccatcgagcactgcagaagctacaacgccagactgtgcgccgagagaagcctgagactgcccttcctggacagccagaccggcgtggcccagaacaactgctacatctggatggagaagacccacagaggccccggcctggcccccggccagatctacacctaccccgccagatgctggagaaagaagagaagactgaacatcctggaggaccccagactgagaccctgcgagtacaagatcgactgcgaggcccccctgaagaaggagggcggcctgcccgagggccccgtgctggaggccctgctgtgcgccgagaccggcgagaagaagatcgagctgaaggaggaggagaccatcatggactgccagaagcagcagctgctggagttcccccacgacctggaggtggaggacctggaggacgacatccccagaagaaagaacagagccaagggcaaggcctacggcatcggcggcctgagaaagagacaggacaccgccagcctggaggacagagacaagccctacgtgtgcgacaagttctacaaggagctggcctgggtgcccgaggcccagagaaagcacaccgccaagaaggcccccgacggcaccgtgatccccaacggctactgcgacttctgcctgggcggcagcaagaagaccggctgccccgaggacctgatcagctgcgccgactgcggcagaagcggccaccccagctgcctgcagttcaccgtgaacatgaccgccgccgtgagaacctacagatggcagtgcatcgagtgcaagagctgcagcctgtgcggcaccagcgagaacgacggcgccagctgggccggcctgaccccccaggaccagctgctgttctgcgacgactgcgacagaggctaccacatgtactgcctgagcccccccatggccgagccccccgagggcagctggagctgccacctgtgcctgagacacctgaaggagaaggccagcgcctacatcaccctgacctag

SEQ ID NO: 78441 - DNA, 612 bp, synthetic construct
  misc_feature 1..612: note = Description of Artificial Sequence: Synthetic coding sequence
  source 1..612: mol_type = other DNA
atggccaccgccatccagaaccccctgaagagcctgggcgaggacttctacagagaggccatcgagcactgcagaagctacaacgccagactgtgcgccgagagaagcctgagactgcccttcctggacagccagaccggcgtggcccagaacaactgctacatctggatggagaagacccacagaggccccggcctggcccccggccagatctacacctaccccgccagatgctggagaaagaagagaagactgaacatcctggaggaccccagactgagaccctgcgagtacaagatcgactgcgaggcccccctgaagaaggagggcggcctgcccgagggccccgtgctggaggccctgctgtgcgccgagaccggcgagaagaagatcgagctgaaggaggaggagaccatcatggactgccagaagcagcagctgctggagttcccccacgacctggaggtggaggacctggaggacgacatccccagaagaaagaacagagccaagggcaaggcctacggcatcggcggcctgagaaagagacaggacaccgccagcctggaggacagagacaagccctacgtgtgcgacagcgagagcttctag

SEQ ID NO: 78442 - DNA, 1245 bp, synthetic construct; identical to SEQ ID NO: 78437
  misc_feature 1..1245: note = Description of Artificial Sequence: Synthetic coding sequence
  source 1..1245: mol_type = other DNA

SEQ ID NO: 78443 - DNA, 1167 bp, synthetic construct
  misc_feature 1..1167: note = Description of Artificial Sequence: Synthetic coding sequence
  source 1..1167: mol_type = other DNA
atggccaccgccatccagaaccccctgaagagcctgggcgaggacttctacagagaggccatcgagcactgcagaagctacaacgccagactgtgcgccgagagaagcctgagactgcccttcctggacagccagaccggcgtggcccagaacaactgctacatctggatggagaagacccacagaggccccggcctggcccccggccagatctacacctaccccgccagatgctggagaaagaagagaagactgaacatcctggaggaccccagactgagaccctgcgagtacaagatcgactgcgaggcccccctgaagaaggagggcggcctgcccgagggccccgtgctggaggccctgctgtgcgccgagaccggcgagaagaagatcgagctgaaggaggaggagaccatcatggactgccagaagcagcagctgctggagttcccccacgacctggaggtggaggacctggaggacgacatccccagaagaaagaacagagccaagggcaaggcctacggcatcggcggcctgagaaagagacaggacaccgccagcctggaggacagagacaagccctacgtgtgcgacatctgcggcaagagatacaagaacagacccggcctgagctaccactacacccacacccacctggccgaggaggagggcgaggagaacgccgagagacacgccctgcccttccacagaaagaacaaccacaagcagttctacaaggagctggcctgggtgcccgaggcccagagaaagcacaccgccaagaaggcccccgacggcaccgtgatccccaacggctactgcgacttctgcctgggcggcagcaagaagaccggctgccccgaggacctgatcagctgcgccgactgcggcagaagcggccaccccagctgcctgcagttcaccgtgaacatgaccgccgccgtgagaacctacagatggcagtgcatcgagtgcaagagctgcagcctgtgcggcaccagcgagaacgacgaccagctgctgttctgcgacgactgcgacagaggctaccacatgtactgcctgagcccccccatggccgagccccccgagggcagctggagctgccacctgtgcctgagacacctgaaggagaaggccagcgcctacatcaccctgacctag

SEQ ID NO: 78444 - DNA, 1176 bp, synthetic construct
  misc_feature 1..1176: note = Description of Artificial Sequence: Synthetic coding sequence
  source 1..1176: mol_type = other DNA
atggccgccgtggtggagaacgtggtgaagctgctgggcgagcagtactacaaggacgccatggagcagtgccacaactacaacgccagactgtgcgccgagagaagcgtgagactgcccttcctggacagccagaccggcgtggcccagagcaactgctacatctggatggagaagagacacagaggccccggcctggccagcggccagctgtacagctaccccgccagaagatggagaaagaagagaagagcccacccccccgaggaccccagactgagcttccccagcatcaagcccgacaccgaccagaccctgaagaaggagggcctgatcagccaggacggcagcagcctggaggccctgctgagaaccgaccccctggagaagagaggcgcccccgaccccagagtggacgacgacagcctgggcgagttccccgtgaccaacagcagagccagaaagagaatcctggagcccgacgacttcctggacgacctggacgacgaggactacgaggaggacacccccaagagaagaggcaagggcaagagcaagggcaagggcgtgggcagcgccagaaagaagctggacgccagcatcctggaggacagagacaagccctacgcctgcgacatctgcggcaagagatacaagaacagacccggcctgagctaccactacgcccacagccacctggccgaggaggagggcgaggacaaggaggacagccagccccccacccccgtgagccagagaagcgaggagcagaagagcaagaagggccccgacggcctggccctgcccaacaactactgcgacttctgcctgggcgacagcaagatcaacaagaagaccggccagcccgaggagctggtgagctgcagcgactgcggcagaagcggccaccccagctgcctgcagttcacccccgtgatgatggccgccgtgaagacctacagatggcagtgcatcgagtgcaagtgctgcaacatctgcggcaccagcgagaacgacgaccagctgctgttctgcgacgactgcgacagaggctaccacatgtactgcctgacccccagcatgagcgagccccccgagggcagctggagctgccacctgtgcctggacctgctgaaggagaaggccagcatctaccagaaccagaacagcagctag

SEQ ID NO: 78445 - DNA, 1134 bp, synthetic construct
  misc_feature 1..1134: note = Description of Artificial Sequence: Synthetic coding sequence
  source 1..1134: mol_type = other DNA
agcagcatcatccagaacagactgaagaagctgggcgaccagttctacaaggaggccatcgagcactgcagaagctacaacagcagactgtgcgccgagagaagcgtgagactgcccttcctggacagccagaccggcgtggcccagaacaactgctacatctggatggagaagagacacagaggccccggcctggcccccggccagctgtacacctaccccgccagatgctggagaaagaagagaagactgcacccccccgaggaccccaagctgagactgctggagatcaagcccgaggtggagctgcccctgaagaaggacggcttcaccagcgagagcaccaccctggaggccctgctgagaggcgagggcgtggagaagaaggtggacgccagagaggaggagagcatccaggagatccagagagtgctggagaacgacgagaacgtggaggagggcaacgaggaggaggacctggaggaggacatccccaagagaaagaacagaaccagaggcagagccagaggcagcgccggcggcagaagaagacacgacgccgccagccaggaggaccacgacaagccctacgtgtgcgacatctgcggcaagagatacaagaacagacccggcctgagctaccactacgcccacacccacctggccagcgaggagggcgacgaggcccaggaccaggagaccagaagcccccccaaccacagaaacgagaaccacagaccccagaagggccccgacggcaccgtgatccccaacaactactgcgacttctgcctgggcggcagcaacatgaacaagaagagcggcagacccgaggagctggtgagctgcgccgactgcggcagaagcggccaccccacctgcctgcagttcaccctgaacatgaccgaggccgtgaagacctacaagtggcagtgcatcgagtgcaagagctgcatcctgtgcggcaccagcgagaacgacgaccagctgctgttctgcgacgactgcgacagaggctaccacatgtactgcctgaacccccccgtggccgagccccccgagggcagctggagctgccacctgtgctgggagctgctgaaggagaaggccagcgccttcggctgccaggcctag

SEQ ID NO: 78446 - DNA, 1074 bp, synthetic construct; identical to SEQ ID NO: 78438
  misc_feature 1..1074: note = Description of Artificial Sequence: Synthetic coding sequence
  source 1..1074: mol_type = other DNA

SEQ ID NO: 78447 - DNA, 1137 bp, synthetic construct
  misc_feature 1..1137: note = Description of Artificial Sequence: Synthetic coding sequence
  source 1..1137: mol_type = other DNA
atggccaccgtgatccacaaccccctgaaggccctgggcgaccagttctacaaggaggccatcgagcactgcagaagctacaacagcagactgtgcgccgagagaagcgtgagactgcccttcctggacagccagaccggcgtggcccagaacaactgctacatctggatggagaagagacacagaggccccggcctggcccccggccagctgtacacctaccccgccagatgctggagaaagaagagaagactgcacccccccgaggaccccaagctgagactgctggagatcaagcccgaggtggagctgcccctgaagaaggacggcttcaccagcgagagcaccaccctggaggccctgctgagaggcgagggcgtggagaagaaggtggacgccagagaggaggagagcatccaggagatccagagagtgctggagaacgacgagaacgtggaggagggcaacgaggaggaggacctggaggaggacatccccaagagaaagaacagaaccagaggcagagccagaggcagcgccggcggcagaagaagacacgacgccgccagccaggaggaccacgacaagccctacgtgtgcgacatctgcggcaagagatacaagaacagacccggcctgagctaccactacgcccacacccacctggccagcgaggagggcgacgaggcccaggaccaggagaccagaagcccccccaaccacagaaacgagaaccacagaccccagaagggccccgacggcaccgtgatccccaacaactactgcgacttctgcctgggcggcagcaacatgaacaagaagagcggcagacccgaggagctggtgagctgcgccgactgcggcagaagcggccaccccacctgcctgcagttcaccctgaacatgaccgaggccgtgaagacctacaagtggcagtgcatcgagtgcaagagctgcatcctgtgcggcaccagcgagaacgacgaccagctgctgttctgcgacgactgcgacagaggctaccacatgtactgcctgaacccccccgtggccgagccccccgagggcagctggagctgccacctgtgctgggagctgctgaaggagaaggccagcgccttcggctgccaggcctag

SEQ ID NO: 78448 - DNA, 4110 bp, synthetic construct
  misc_feature 1..4110: note = Description of Artificial Sequence: Synthetic coding sequence
  source 1..4110: mol_type = other DNA
atgagcccctgcggcagaaagatgggcgagggcagacagcagagaagagcccccgtgggcaagctgctgctgctgcccggcagaagagacaccccccacggcagaagcggcagcagcggcgccagaacccagagaagcctgctgtggctgctggtgcacgtgtggctgtgggccgccagcggcagcagcgcccagctgttcaacctgaccctgagcgtggacgagggcctgccccccgacaccctggtgggcgacatcagagccggcctgcccgccgcccagcagcaggagggcagcggcttcttcctgagcgaggacagcgacgacagccccctgctggacgacttccacgtgcaccccgacaccggcatcatcagaaccgccagaagactggacagagagagaagagaccactacagcttcgtggccgccaccctgctgggcgccgtggtgcaggtggagatcagagtgaacgacgtgaacgaccacagccccagattccccctggacagcctgcagctggacgtgagcgagctgagcccccccggcaccgccttcagactgcccgtggcccacgaccccgacgccggcctgttcagcacccagggctacaccctggtgcagcccagcgacctgcccaaggaccccgccggccccttcttccagctgagatacagaacccccggccccctgcccagccccctgctgcccggcagcagcagccccctggagcccctggacctggtgctgctgagaagactggacagagaggaggccgccgcccacagactgcagatcgaggcctgggacggcggcagacccagaagaaccggcctgctgagcgtggagctgagagtgctggacgagaacgacaacccccccgtgttcgagcaggacgagtacagagccgccgtgagagaggacgcccagcccggcgccgaggtgtgcagagtgagagccaccgacagagacctgggccccaacggcttcgtgagatacagcgtgagagccagacaggtgcccggcgccggcagcggcggcggcgccctgggcgacgccgcctacttcgccgtggaggagctgagcggcgtggtgagagtgtggagacccctggacagagaggcccaggcctggcaccagctggtggtggaggccagagacggcggcgccgagcccgaggtggccaccgtgagagtgagcatcgccgtgctggacgtgaacgacaacagacccgccatccacgtgctgttcctgaccgagggcggcgtggccagagtgagcgagggcgccagacccggcgactacgtggccagagtgagcgtgagcgacgccgacggcgactgggagaaggaggacgaggccaccggcgagctgggcgtgggcctgggcgacggcagcatcagcctgagcctggagggcggcgagggcgacttcgccctgctgcccggcggcccccccggcgtgttcttcctgtgcgtggagggccccctggacagagagagcagagacctgtacgagctgctgctggtggccaccgacgccggcagcccccccctgagcaccgaggagaccctgctgctgagagtggccgacctgaacgaccagccccccctgttcagccagcagcactacaaggccagcgtgagcgaggccgccgcccccggcaccgtggtgatgtgggtgagcgccagcgacgccgacgaggccggcagcgaccacgcctggctgagatacaccgtggtgcagctgagcgccccctgcaacctgggcagcctgcagagcaagatggtgcacaccgccgagtgcggccccagcttcgccatcgacagcgagagcggcgccatcagcaccatcagaaccctggacagagaggtgcaggaggccgtggagctgaaggtggtggcccaggacctgggcgagccccccctgagcgccacctgcctggtgagcatcaccgtggacgacgtgaacgacaacgagcccatcttctggagacaggtgtacaacgccaccatcgccgagcacgcccccgtgggccactgcttcctgcaggtgaccgccagcgacgccgacagcggcctgtacggcttcatcgagtacagcctgtacgacggcttcctgagctacgaggccccccaggccttcagaatcgacccccacgacggccagatctgcgtgagccaggacatcgacagagagagagaccccgccacctacgacctgctggtggaggccaaggacggcggcggcctgagcgcccaggccttcgtgagagtggacctggaggacgtgaacgacaaccaccccgtgttcaaccccagcacctacgtgaccagcatcagcgacgagacccagcccggcaccgagatcatcaacgtgctggccaccgaccaggacagcggcatctacggcaccgtggcctacgagctgatccccggcaacgtgagcagcctgttcaccatcgacagcaccaccggcatcatctacctgaccctgcccctgagccacctggagagcaccaccctgagcctgatggtgagcgcccaggacggcggcggcctgaccgccgtgatcaacgccgacgtgaccatccacatcttccagaccaccctggcccccgccgagttcgagagacccaagtacaccttcctggtgtacgaggacgtgcccgaggacagccccatcggcaccgtgaaggccagagagcccctgaacagcagcgagcccatcttctacagaatcagcagcggcgacctgggcggcaagttcagcatccaccccagactgggcaccatcagaaccagaaagcccctggaccacgagacccagcccgtggtggtgctgaccgtgcaggcccagctgggcagcgcccccgcctgcagcagcaccgaggtgaacatcaccgtgatggacgtgaacgacaaccaccccgccttcctgagaaccagcgacgagatcagaatcagccagaccaccccccccggcaccgccctgtacctggccagagccgaggacagagacagcggcagaaacggcctgatcagatacagcatcgccagcccccagcccggcgtgttcgccatcgacagagccctgggcgtgctgttcctgaacggcagcctgggcgccggcgagcagagagagctgaccctgaccctgagagccgaggaccagggcgtgcacccccaggccgccctgctggtgctgaccgtggtgatcgagaagagagagcacagccccagctggaccttcgagcacctggtgtaccaggtggaggtgagcgagagcctgagccccatgacccagatgctgcagacccaggcccaccccctgggcccccagagagccgccagccccctgagatacagcctggagcccagcgtggacagcgccatgttcggcatcagaccctacaccggctggatctacctgagaagacagttcgactacgagagcacccagacctacaacttcagagtgttcgcctggatccccgaggacggcttcctgcagaacgtgagcaccaccgtgatcgtgagagtgtgggacgagaacgacaacagccccaccttcctgcacgacgtgctgttcctgaaggtggaggagagccccgtgccccagggcgtgatcggcaagatcaccgccatcgacatggacagcggcaagaacggccagctgctgtacttcctgctgagcgacggcaagttcttcaagatgaaccccaacaccggcgagctgatcaactgggtggccctggacagagagcacagaggccaccacgagatgaccgtgctggtgaccgacagaggcagcccccccagaaacgccaccatggccgtgtacgtgagcgtgaccgacatcaacgacaacagacccttcttcccccagtgcctgcccggcaaggagctgcacgtgaaggtgctggagggccagcccgtgaacatgctggtgaccaccgtgttcgccaaggaccccgacgagggcaacaacgccgaggtgacctacagcgtgagcagcgccagacccatgcccctgaagggcaagaccgccttcggcaagcagagctgcaagaagcagaccaacaagcagaccaacaagatcctgacctag

SEQ ID NO: 78449 - DNA, 8751 bp, synthetic construct
  misc_feature 1..8751: note = Description of Artificial Sequence: Synthetic coding sequence
  source 1..8751: mol_type = other DNA
atgagactggacgagatcaccaagagcgagaacgaggacggcgagaagaagatgttcacccagcagttcgagagcaccgacgcctgcgtgtacgaggtgtacgtgaagatcaacagcatcgtgaagagccagagccagtgcggcctgaagagaggcagccccgagaccgagctgtggggcgccatcgtgttcagaagccaggaggagaacgccaagcccgtgaaggagaccgaggtgaccgccagcgacgccgacagcggcctgtacggcttcatcgagtacagcctgtacgacggcttcctgagctacgaggccccccaggccttcagaatcgacccccacgacggccagatctgcgtgagccaggacatcgacagagagagagaccccgccacctacgacctgctggtggaggccaaggacggcgacgagcagagaatgacccacctggccctggtgaagggcggcctgagcgcccaggccttcgtgagagtggacctggaggacgtgaacgacaaccaccccgtgttcaaccccagcacctacgtgaccagcatcagcgacgagacccagcccggcaccgagatcatcaacgtgctggccaccgaccaggacagcggcatctacggcaccgtggcctacgagctgatccccggcaacgtgagcagcctgttcaccatcgacagcaccaccggcctgtacagccccgaggtggagatcctgagcgccgtgaacttcagcgccgacaaggaggtgatgaacagcctggagatgttcctgcccctgctgagacacttcaagaaggtggagagagacgaggaggccgccgagaagaagttcgaggccagcagaggctggttcatgagattcaagggcagaagacacctgcactacctgaaggtgcaggacgaggccgccagcgccgacggcgaggccgccgccagatacgtggccaacctggccaagatcctgggcgagggcatcatctacctgaccctgcccctgagccacctggagagcaccaccctgagcctgatggtgagcgcccaggacggcggcggcctgaccgccgtgatcaacgccgacgtgaccatccacatcttccagaccaccctggcccccgccgagttcgagagacccaagtacaccttcctggtgtacgaggacgtgcccgaggacagccccatcggcaccgtgaaggccagagagcccctgaacagcagcgagcccatcttctacagaatcagcagcggcgacctgggcggcaagttcagcatccaccccagactgggcaccatcagaaccagaaagcccctggaccacgagacccagcccgtggtggtgctgaccgtgcaggcccagctgggcagcgcccccgcctgcagcagcaccgaggtgaacatcaccgtgatggacgtgaacgacaaccaccccgccttcctgagaaccagcgacgagatcagaatcagccagaccaccccccccggcaccgccctgtacctggccagagccgaggacagagacagcggcagaaacggcctgatcagatacagcatcgccagcccccagcccggcgtgttcgccatcgacagagccctgggcgtgctgttcctgaacggcagcctgggcgccggcgagcagagagagctgaccctgaccctgagagccgaggaccagggcgtgcacccccaggccgccctgctggtgctgaccgtggtgatcgagaagagagagcacagccccagctggaccttcgagcacctggtgtaccaggtggaggtgagcgagagcctgagccccatgacccagatgctgcagacccaggcccaccccctgggcccccagagagccgccagccccctgagatacagcctggagcccagcgtggacagcgccatgttcggcatcagaccctacaccggctggatctacctgagaagacagttcgactacgagagcacccagacctacaacttcagagtgttcgcctggatccccgaggacggcttcctgcagaacgtgagcaccaccgtgatcgtgagagtgtgggacgagaacgacaacagccccaccttcctgcacgacgtgctgttcctgaaggtggaggagagccccgtgccccagggcgtgatcggcaagatcaccgccatcgacatggacagcggcaagaacggccagctgctgtacttcctgctgagcgacggcaagttcttcaagatgaaccccaacaccggccccgccggcaccatctacgtgatcacctgggccgacggcgccgccgccttcagcggcaccgacttcgccttcagcagcgacgagctgcaggccttcgtgctgaagagcctgttctgcgagctgggcgagggcgagctgatcaactgggtggccctggacagagagcacagaggccaccacgagatgaccgtgctggtgaccgacagaggcagcccccccagaaacgccaccatggccgtgtacgtgagcgtgaccgacatcaacgacaacagacccttcttcccccagtgcctgcccggcaaggagctgcacgtgaaggtgctggagggccagcccgtgaacatgctggtgaccaccgtgttcgccaaggaccccgacgagggcaacaacgccgaggtgacctacagcgtgagcagcgaggacagcagcgaccacttcaagatcgacgccaacaacggcgagatcagaaccaccaccatcctgagctacgactacagacccagctacagaatgagcgtgatcgccaccgaccagggcgtgccccccctgcagggccaggccgtggtgaacatccaggtgatccccctgagcaagggcagagccatcatgagccagaacatcagacacctgatcatccccgagaacctgaagcccaccaagatcatgagcctgatcaagagcagcgaccacctgcagcagcactacaacggcaagctgcacttcagcatcgtggccgacgacaaggacggccacttcgagatcgacagcagcaccggcgacctgttcctgagcaaggagctggactacgagaccaccagccactacctgttcagagtgatcaccaccgaccacagcaagaacctgagcctgagcagcaccgtgttcctgagcatcgacgtggaggaccagaacgaccacagccccagcttccaggacgagctgatcgtgatcagcgtggaggagaacgtgcccatcggcaccctggtgtacgtgttcaacgccaaggacgacgacggcagcttcctgaacagcagaatccagtactacatcgagagccacaaccccggcaccaaccccttcctgatccaccccagcttcggcaccctggtgaccgtgagcagactggacagagagagcatccccaccgtgatcctgaccgtgaccgccagcgaccaggccgtgaacgtgaccgacagaagactgagaagcctgaccgcccagatcgtgatcctggacgtgaacgaccacaaccccaccttcatcagcttccccaacgcccacgtgaaggaggacgtgaccgtgggcagcctggtgcaccacatcaccgcccacgaccccgacgagggcagaaacggcaaggtgacctacagcatcctgagcggcaacgagaacatgaccttcatgctggacgagagcagcggcctgctgaccaccacctgccccctggactacgagatgaagacccagcacatcctgaccgtgctggccctggacgacggcacccccgccctgagcagcagccagaccctgaccgtgaccgtgctggacgtgaacgacgaggcccccgtgttcaagcagcacctgtacgaggccagcgtgaaggagaaccagaaccccggcgagttcgtgaccagagtggaggccctggacagagacagcggcgtgaacagcaagctgcagttcgagatcatgcccggcgccagcttcgagctgttcgagatcaacagcgacaccggcgaggtggtgaccaccaccatcctggacagagagatccaggaggtgttcaccctgagagtgctggtgagagacggcggcttccccagcctgagcagcaccaccaccatcctgtgcaccgtggaggacgagaacgaccacgcccccgagttcatcgtgagcagctacgacatcgaggtgctggagaaccaggagcccgaggtggtgtacaccgtgctggccagcgacatggacgccggcaacaacagagccgtggagtaccacatcatcgacggcaacaccgacgagtgcttcaccatcaacgagatgagcggcgagctgagcaccaccagagccctggacagagagcagatcagcaacttcaccctggtgatcctgtgcagcgacctgggcgacccccccagaagcagcgtgatccacctgcaggtgagagtgctggacgccaacgaccacagccccagcttccccaccctgtactaccagagcagcgtgagagaggacgccgaggtgggcaccgtggtgctggtgctgagcgccgtggacaaggacgagggcctgaacggccagaccgagtacttcctgaccgacgaggccagcggcgccttcaccatcgaccccatgagcggcaccctgaagaccagcaacaccctggacagagaggccagaagccagcacaccttcagcgccgtggccagagactgcagcatccagggcagcagaagcaccaccgtgatcatcaaggtgtacgtgaccgacgtgaacgacaacgaccccgtgctggagcagaaccccttcgacgtgttcctgagccccgagagccccaccaaccagaccaccgtgatcgtgagagccgacgacctggacctgggccccaacggcaccgtggtgttcagcttcgccgagacccagagcatgttcagcatcgacaagtacaccggcgagatccagttccagcagaaccccagcagcgagtacttccccatctggctgcagctgaaggtgaccgaccagggcatccccgccagaaccaccaccggcctgctggtgatccacatggagggcgaggacgtgaagatcagcttcagccaccacctgtacaagggcctggtgaccgagaactgcgaggccggcaccagcatcgtgaccgtgaaggccttcgcccccgacagcatccaggacagcatgaagtacagcatcttcagcggcaacgaggacggcgtgctgagcctgtgcagcaagagcggccagctgaccgtgaaggagcccaagttcctggacttcgaggtgagaaacgaggtgcagctgatcgtgctggccgagagcagcggccacagagcctactgcaaggtggccgtgctgatccaggacgagaacgacaacagcccctgcttcgagcagagcatctaccaggccagcgtgagcgagagccagctgtacaacgcccacgtgatccaggtgttcgccaccgacctggacagcggcctgaacggcctgatcgagtacagcatcctgagcggcaaccaggaggaggccttccagatcgacgccctgagcggcgtgatcaccaccaaggccatcctggactacgagctgaccagcagctacagcctgatcgtgcaggccaccgacaagggcatgcccagactgagcaacaccaccgtgatcaaggtgcaggtgaccgacatcaacgacaacgcccccgccttcctgcccagcgaggccgtggagatcaccgaggacagcctgcccggcgtgatcgtgacccacgtgagcgtgcacgacgtggacctgaacagcgccttcatcttcagcttcgccaaggagagcaaccccggcaccaagttcgccatcgaccagaacaccggcgtggtggtgctggtgaagaccctggacttcgaggagatgaccgagtacgagctgctgatccagatcagcgacagcgtgcactacaccgagggcgccctggtggtgagagtgctggacgtgaacgacaacccccccgtgttcagccaggacttctaccaggtgaccgtgcccgagagcatccccgtgggctacagcgtgctgaccctgagcgccaccgacctggagagcaacgagaacatcagctacagaatcctgagcagcagcaaggagttcagcatcgaccccaagaacggcaccatcttcaccatcagccccgtgctgctgctggacaccatcagcaccacccagttcctggtggaggccagcgacggcggcaaccccgacctgagagccctgaccctggtggagatcggcatcgaggacatgaacaactacgcccccgagttcaccgtgaagagctacaacctgagcctgagcgaggacgccctggtgggcagcaccctggtgaccttcagcaacatcgaccacgactggaccagagagaacacctacgtggagtacagcatcatcagcggcaacagccagaacaacttccacgtggagaccaagttcttccacagcgagtacccctacaagcaggtgggctacctggtgctgctgcacagcctggacagagaggccagcgccagccacgagctggtgatcctggccagcgacagcggctgcccccccctgagcagcaccgccgtgatcagcatccaggtgctggacgtgaacgacaacccccccaacttcagcagcctgagctaccacacccacgtgaaggagagcacccccctgggcagccacatcaccgtggtgagcgccaacgacagagacaccggcagccacgccgagatcatctacaacatcatcagcggcaacgagaagggccacttctacctggaggagaacaccggcgtgctgtacctgatcaagcccctggactacgagaagatgaccaagttcaccctgaccgtgcaggccagcgacgccgagaagaagcacttcagcttcgccgtggtgttcgtgagcgtgctggacgacaacgaccacgccccccagttcatgttcagcagcttcagctgcatcgtgcccgagaacctgcccatcagcagcaccatctgcagcatcaacgccctggacttcgacgccggcccctacggcgagctgacctacagcatcgtgagcccctgcttcctgacccacggcatgagctacgaccacgacctgttcctgatcgaccccctgaccggcgacatccacgccaagcagatcctggactacgagaacggcaacaagtactgcctgaccgtgcaggccaaggacaagggcgacgccaccgccagcctggtggtgtgggtggacatcgagggcatcgacgagttcgagcccatcttcacccaggaccagtacttcttcaccctgcccgagaagaacaaggacagacagctgatcggcagagtggaggccagcgacgccgacgccggcatcgacggcgtgatcctgtacagcctgggcaccagcagccccttcttcagcgtgaacaagaccaacggcaacatctacctgatcagagccctgcccctgatcaagagccagctgaacaaggaggacaccctggagatgaagatcatcgcccacagccccaagagcgacagcaagttcgccagctgcaccgtgttcgtgaacgtgagcttcagcagcgagggcacccccctggccgtgttcgccagcagcttcagcatcagcctggtggtgagcttcctggtgttcctgatcctgatctgcatcctgatcgtgatgatcctgagacacaagcagaaggacaccatcaacaactacgaggagaagaagaccagcagcctggacgccgacctgagagtgaccagagacgccagcgtgctgaaggccttccagaagaccgacgactgcagcaacgaggtggtgcccgtggacgccacccccgagtggctgagcctgatcagcatcatggagaaggacatcgtgaacctgtacagacacagcaacagcagcggccactgcagcgtggagggcgagaccgccgaggacaaggagatccagagaatcaacgagcacccctacagaaagtgcagcgacagcgccctgagcgaccacgagagcagagtgcccgacagcggcatccccagagacagcgaccagctgagctgcctgagcggcgagaccgacgtgatggtgaccgccgagaccgccgaggccagccagaccttcggcgagggcgaccagggcgagggctgcagcaccacctgcgcccagaacaacgtgctgccccagaccgtgcagaagagagaggccaaggagagcatcctggccgacgtgagaaaggagagcgtgttcatcagcggcgaccaggaggtgagatgcgccgccctgagcacccagaccaccagcgaccacgacggcaaggacaactaccactggaactacctgctgagctgggagcccaagttccagcccctggccagcgtgttcaacgacatcgccaagctgaaggacgagcacctgcacatgcccggcatccccaaggagaagaagagcttcgtgttccccccccccctgatcaccgccgtggcccagcccggcatcaaggccgtgccccccagaatgcccgccgtgaacctgggccaggtgccccccaagcaccccagaagccccatcccctaccacctgggcagcctgcccgagggcatgacccccaacttcagccccagcctgagcctgctgaccatgcagccccccgccctgagccccctgctgagagagggcgagctgctgggcacccacatcagcggcacctgccacgagctgaaggccgaggacgaggtgcagatctag

SEQ ID NO: 78450 - DNA, 2130 bp, synthetic construct
  misc_feature 1..2130: note = Description of Artificial Sequence: Synthetic coding sequence
  source 1..2130: mol_type = other DNA
atgagcccctgcggcagaaagatgggcgagggcagacagcagagaagagcccccgtgggcaagctgctgctgctgcccggcagaagagacaccccccacggcagaagcggcagcagcggcgccagaacccagagaagcctgctgtggctgctggtgcacgtgtggctgtgggccgccagcggcagcagcgcccagctgttcaacctgaccctgagcgtggacgagggcctgccccccgacaccctggtgggcgacatcagagccggcctgcccgccgcccagcagcaggagggcagcggcttcttcctgagcgaggacagcgacgacagccccctgctggacgacttccacgtgcaccccgacaccggcatcatcagaaccgccagaagactggacagagagagaagagaccactacagcttcgtggccgccaccctgctgggcgccgtggtgcaggtggagatcagagtgaacgacgtgaacgaccacagccccagattccccctggacagcctgcagctggacgtgagcgagctgagcccccccggcaccgccttcagactgcccgtggcccacgaccccgacgccggcctgttcagcacccagggctacaccctggtgcagcccagcgacctgcccaaggaccccgccggccccttcttccagctgagatacagaacccccggccccctgcccagccccctgctgcccggcagcagcagccccctggagcccctggacctggtgctgctgagaagactggacagagaggaggccgccgcccacagactgcagatcgaggcctgggacggcggcagacccagaagaaccggcctgctgagcgtggagctgagagtgctggacgagaacgacaacccccccgtgttcgagcaggacgagtacagagccgccgtgagagaggacgcccagcccggcgccgaggtgtgcagagtgagagccaccgacagagacctgggccccaacggcttcgtgagatacagcgtgagagccagacaggtgcccggcgccggcagcggcggcggcgccctgggcgacgccgcctacttcgccgtggaggagctgagcggcgtggtgagagtgtggagacccctggacagagaggcccaggcctggcaccagctggtggtggaggccagagacggcggcgccgagcccgaggtggccaccgtgagagtgagcatcgccgtgctggacgtgaacgacaacagacccgccatccacgtgctgttcctgaccgagggcggcgtggccagagtgagcgagggcgccagacccggcgactacgtggccagagtgagcgtgagcgacgccgacggcgactgggagaaggaggacgaggccaccggcgagctgggcgtgggcctgggcgacggcagcatcagcctgagcctggagggcggcgagggcgacttcgccctgctgcccggcggcccccccggcgtgttcttcctgtgcgtggagggccccctggacagagagagcagagacctgtacgagctgctgctggtggccaccgacgccggcagcccccccctgagcaccgaggagaccctgctgctgagagtggccgacctgaacgaccagccccccctgttcagccagcagcactacaaggccagcgtgagcgaggccgccgcccccggcaccgtggtgatgtgggtgagcgccagcgacgccgacgaggccggcagcgaccacgcctggctgagatacaccgtggtgcagctgagcgccccctgcaacctgggcagcctgcagagcaagatggtgcacaccgccgagtgcggccccagcttcgccatcgacagcgagagcggcgccatcagcaccatcagaaccctggacagagaggtgcaggaggccgtggagctgaaggtggtggcccaggacctgggcgagccccccctgagcgccacctgcctggtgagcatcaccgtggacgacgtgaacgacaacgagcccatcttctggagacaggtgtacaacgccaccatcgccgagcacgcccccgtgggccactgcttcctgcagctgatcagcgcccaggtggccttcgtgaagatcaagcagaagcagaaggagatccaggagaagcagaacctggcctag

SEQ ID NO: 78451 - DNA, 2109 bp, synthetic construct
  misc_feature 1..2109: note = Description of Artificial Sequence: Synthetic coding sequence
  source 1..2109: mol_type = other DNA
atgggcgagggcagacagcagagaagagcccccgtgggcaagctgctgctgctgcccggcagaagagacaccccccacggcagaagcggcagcagcggcgccagaacccagagaagcctgctgtggctgctggtgcacgtgtggctgtgggccgccagcggcagcagcgcccagctgttcaacctgaccctgagcgtggacgagggcctgccccccgacaccctggtgggcgacatcagagccggcctgcccgccgcccagcagcaggagggcagcggcttcttcctgagcgaggacagcgacgacagccccctgctggacgacttccacgtgcaccccgacaccggcatcatcagaaccgccagaagactggacagagagagaagagaccactacagcttcgtggccgccaccctgctgggcgccgtggtgcaggtggagatcagagtgaacgacgtgaacgaccacagccccagattccccctggacagcctgcagctggacgtgagcgagctgagcccccccggcaccgccttcagactgcccgtggcccacgaccccgacgccggcctgttcagcacccagggctacaccctggtgcagcccagcgacctgcccaaggaccccgccggccccttcttccagctgagatacagaacccccggccccctgcccagccccctgctgcccggcagcagcagccccctggagcccctggacctggtgctgctgagaagactggacagagaggaggccgccgcccacagactgcagatcgaggcctgggacggcggcagacccagaagaaccggcctgctgagcgtggagctgagagtgctggacgagaacgacaacccccccgtgttcgagcaggacgagtacagagccgccgtgagagaggacgcccagcccggcgccgaggtgtgcagagtgagagccaccgacagagacctgggccccaacggcttcgtgagatacagcgtgagagccagacaggtgcccggcgccggcagcggcggcggcgccctgggcgacgccgcctacttcgccgtggaggagctgagcggcgtggtgagagtgtggagacccctggacagagaggcccaggcctggcaccagctggtggtggaggccagagacggcggcgccgagcccgaggtggccaccgtgagagtgagcatcgccgtgctggacgtgaacgacaacagacccgccatccacgtgctgttcctgaccgagggcggcgtggccagagtgagcgagggcgccagacccggcgactacgtggccagagtgagcgtgagcgacgccgacggcgactgggagaaggaggacgaggccaccggcgagctgggcgtgggcctgggcgacggcagcatcagcctgagcctggagggcggcgagggcgacttcgccctgctgcccggcggcccccccggcgtgttcttcctgtgcgtggagggccccctggacagagagagcagagacctgtacgagctgctgctggtggccaccgacgccggcagcccccccctgagcaccgaggagaccctgctgctgagagtggccgacctgaacgaccagccccccctgttcagccagcagcactacaaggccagcgtgagcgaggccgccgcccccggcaccgtggtgatgtgggtgagcgccagcgacgccgacgaggccggcagcgaccacgcctggctgagatacaccgtggtgcagctgagcgccccctgcaacctgggcagcctgcagagcaagatggtgcacaccgccgagtgcggccccagcttcgccatcgacagcgagagcggcgccatcagcaccatcagaaccctggacagagaggtgcaggaggccgtggagctgaaggtggtggcccaggacctgggcgagccccccctgagcgccacctgcctggtgagcatcaccgtggacgacgtgaacgacaacgagcccatcttctggagacaggtgtacaacgccaccatcgccgagcacgcccccgtgggccactgcttcctgcagctgatcagcgcccaggtggccttcgtgaagatcaagcagaagcagaaggagatccaggagaagcagaacctggcctag

SEQ ID NO: 78452 - DNA, 4101 bp, synthetic construct
  misc_feature 1..4101: note = Description of Artificial Sequence: Synthetic coding sequence
  source 1..4101: mol_type = other DNA
atgagcccctgcggcagaaagatgggcgagggcagacagcagagaagagcccccgtgggcaagctgctgctgctgcccggcagaagagacaccccccacggcagaagcggcagcagcggcgccagaacccagagaagcctgctgtggctgctggtgcacgtgtggctgtgggccgccagcggcagcagcgcccagctgttcaacctgaccctgagcgtggacgagggcctgccccccgacaccctggtgggcgacatcagagccggcctgcccgccgcccagcagcaggagggcagcggcttcttcctgagcgaggacagcgacgacagccccctgctggacgacttccacgtgcaccccgacaccggcatcatcagaaccgccagaagactggacagagagagaagagaccactacagcttcgtggccgccaccctgctgggcgccgtggtgcaggtggagatcagagtgaacgacgtgaacgaccacagccccagattccccctggacagcctgcagctggacgtgagcgagctgagcccccccggcaccgccttcagactgcccgtggcccacgaccccgacgccggcctgttcagcacccagggctacaccctggtgcagcccagcgacctgcccaaggaccccgccggccccttcttccagctgagatacagaacccccggccccctgcccagccccctgctgcccggcagcagcagccccctggagcccctggacctggtgctgctgagaagactggacagagaggaggccgccgcccacagactgcagatcgaggcctgggacggcggcagacccagaagaaccggcctgctgagcgtggagctgagagtgctggacgagaacgacaacccccccgtgttcgagcaggacgagtacagagccgccgtgagagaggacgcccagcccggcgccgaggtgtgcagagtgagagccaccgacagagacctgggccccaacggcttcgtgagatacagcgtgagagccagacaggtgcccggcgccggcagcggcggcggcgccctgggcgacgccgcctacttcgccgtggaggagctgagcggcgtggtgagagtgtggagacccctggacagagaggcccaggcctggcaccagctggtggtggaggccagagacggcggcgccgagcccgaggtggccaccgtgagagtgagcatcgccgtgctggacgtgaacgacaacagacccgccatccacgtgctgttcctgaccgagggcggcgtggccagagtgagcgagggcgccagacccggcgactacgtggccagagtgagcgtgagcgacgccgacggcgactgggagaaggaggacgaggccaccggcgagctgggcgtgggcctgggcgacggcagcatcagcctgagcctggagggcggcgagggcgacttcgccctgctgcccggcggcccccccggcgtgttcttcctgtgcgtggagggccccctggacagagagagcagagacctgtacgagctgctgctggtggccaccgacgccggcagcccccccctgagcaccgaggagaccctgctgctgagagtggccgacctgaacgaccagccccccctgttcagccagcagcactacaaggccagcgtgagcgaggccgccgcccccggcaccgtggtgatgtgggtgagcgccagcgacgccgacgaggccggcagcgaccacgcctggctgagatacaccgtggtgcagctgagcgccccctgcaacctgggcagcctgcagagcaagatggtgcacaccgccgagtgcggccccagcttcgccatcgacagcgagagcggcgccatcagcaccatcagaaccctggacagagaggtgcaggaggccgtggagctgaaggtggtggcccaggacctgggcgagccccccctgagcgccacctgcctggtgagcatcaccgtggacgacgtgaacgacaacgagcccatcttctggagacaggtgtacaacgccaccatcgccgagcacgcccccgtgggccactgcttcctgcaggtgaccgccagcgacgccgacagcggcctgtacggcttcatcgagtacagcctgtacgacggcttcctgagctacgaggccccccaggccttcagaatcgacccccacgacggccagatctgcgtgagccaggacatcgacagagagagagaccccgccacctacgacctgctggtggaggccaaggacggcggcggcctgagcgcccaggccttcgtgagagtggacctggaggacgtgaacgacaaccaccccgtgttcaaccccagcacctacgtgaccagcatcagcgacgagacccagcccggcaccgagatcatcaacgtgctggccaccgaccaggacagcggcatctacggcaccgtggcctacgagctgatccccggcaacgtgagcagcctgttcaccatcgacagcaccaccggcatcatctacctgaccctgcccctgagccacctggagagcaccaccctgagcctgatggtgagcgcccaggacggcggcggcctgaccgccgtgatcaacgccgacgtgaccatccacatcttccagaccaccctggcccccgccgagttcgagagacccaagtacaccttcctggtgtacgaggacgtgcccgaggacagccccatcggcaccgtgaaggccagagagcccctgaacagcagcgagcccatcttctacagaatcagcagcggcgacctgggcggcaagttcagcatccaccccagactgggcaccatcagaaccagaaagcccctggaccacgagacccagcccgtggtggtgctgaccgtgcaggcccagctgggcagcgcccccgcctgcagcagcaccgaggtgaacatcaccgtgatggacgtgaacgacaaccaccccgccttcctgagaaccagcgacgagatcagaatcagccagaccaccccccccggcaccgccctgtacctggccagagccgaggacagagacagcggcagaaacggcctgatcagatacagcatcgccagcccccagcccggcgtgttcgccatcgacagagccctgggcgtgctgttcctgaacggcagcctgggcgccggcgagcagagagagctgaccctgaccctgagagccgaggaccagggcgtgcacccccaggccgccctgctggtgctgaccgtggtgatcgagaagagagagcacagccccagctggaccttcgagcacctggtgtaccaggtggaggtgagcgagagcctgagccccatgacccagatgctgcagacccaggcccaccccctgggcccccagagagccgccagccccctgagatacagcctggagcccagcgtggacagcgccatgttcggcatcagaccctacaccggctggatctacctgagaagacagttcgactacgagagcacccagacctacaacttcagagtgttcgcctggatccccgaggacggcttcctgcagaacgtgagcaccaccgtgatcgtgagagtgtgggacgagaacgacaacagccccaccttcctgcacgacgtgctgttcctgaaggtggaggagagccccgtgccccagggcgtgatcggcaagatcaccgccatcgacatggacagcggcaagaacggccagctgctgtacttcctgctgagcgacggcaagttcttcaagatgaaccccaacaccggcgagctgatcaactgggtggccctggacagagagcacagaggccaccacgagatgaccgtgctggtgaccgacagaggcagcccccccagaaacgccaccatggccgtgtacgtgagcgtgaccgacatcaacgacaacagacccttcttcccccagtgcctgcccggcaaggagctgcacgtgaaggtgctggagggccagcccgtgaacatgctggtgaccaccgtgttcgccaaggaccccgacgagggcaacaacgccgaggtgacctacagcgtgagcagcgccagacccatgcccctgaagggcaagaccgccttcggcaagcagagctgcaagaagcagaccaacaagcagaccaagagctag

SEQ ID NO: 78453 - DNA, 462 bp, synthetic construct
  misc_feature 1..462: note = Description of Artificial Sequence: Synthetic coding sequence
  source 1..462: mol_type = other DNA
atgctggagaagctgatgggcgccgacagcctgcagctgttcagaagcagatacaccctgggcaagatctacttcatcggcttccagagaagcatcctgctgagcaagagcgagaacagcctgaacagcatcgccaaggagaccgaggagggcagagagaccgtgaccagaaaggagggctggaagagaagacacgaggacggctacctggagatggcccagagacacctgcagagaagcctgtgcccctgggtgagctacctgccccagccctacgccgagctggaggaggtgagcagccacgtgggcaaggtgttcatggccagaaactacgagttcctggcctacgaggccagcaaggacagaagacagcccctggagagaatgtggacctgcaactacaaccagcagaaggaccagagctgcaaccacaaggagatcaccagcaccaaggccgagtag

SEQ ID NO: 78454 - DNA, 249 bp, synthetic construct
  misc_feature 1..249: note = Description of Artificial Sequence: Synthetic coding sequence
  source 1..249: mol_type = other DNA
atggcccagagacacctgcagagaagcctgtgcccctgggtgagctacctgccccagccctacgccgagctggaggaggtgagcagccacgtgggcaaggtgttcatggccagaaactacgagttcctggcctacgaggccagcaaggacagaagacagcccctggagagaatgtggacctgcaactacaaccagcagaaggaccagagctgcaaccacaaggagatcaccagcaccaaggccgagtag

SEQ ID NO: 78455 - DNA, 378 bp, synthetic construct
  misc_feature 1..378: note = Description of Artificial Sequence: Synthetic coding sequence
  source 1..378: mol_type = other DNA
atgagaaccgccatctggaagtggcacagaggcatctacagagaccactacgtgctgggcagcctgaccttcctgagccccatgcagagagccggcaccagcaaccagtggaacatgggcaaggtgatgaccctggacagcggcgacgaggtgaccttccacaagacctggcccaccgagaccggcagcccctacagactggaggaggtgagcagccacgtgggcaaggtgttcatggccagaaactacgagttcctggcctacgaggccagcaaggacagaagacagcccctggagagaatgtggacctgcaactacaaccagcagaaggaccagagctgcaaccacaaggagatcaccagcaccaaggccgagtag

SEQ ID NO: 78456 - DNA, 1725 bp, synthetic construct
  misc_feature 1..1725: note = Description of Artificial Sequence: Synthetic coding sequence
  source 1..1725: mol_type = other DNA
atggagctgaaggccgaggaggaggaggtgggcggcgtgcagcccgtgagcatccaggccttcgccagcagcagcaccctgcacggcctggcccacatcttcagctacgagagactgagcctgaagagagccctgtgggccctgtgcttcctgggcagcctggccgtgctgctgtgcgtgtgcaccgagagagtgcagtactacttccactaccaccacgtgaccaagctggacgaggtggccgccagccagctgaccttccccgccgtgaccctgtgcaacctgaacgagttcagattcagccaggtgagcaagaacgacctgtaccacgccggcgagctgctggccctgctgaacaacagatacgagatccccgacacccagatggccgacgagaagcagctggagatcctgcaggacaaggccaacttcagaagcttcaagcccaagcccttcaacatgagagagttctacgacagagccggccacgacatcagagacatgctgctgagctgccacttcagaggcgaggtgtgcagcgccgaggacttcaaggtggtgttcaccagatacggcaagtgctacaccttcaacagcggcagagacggcagacccagactgaagaccatgaagggcggcaccggcaacggcctggagatcatgctggacatccagcaggacgagtacctgcccgtgtggggcgagaccgacgagaccagcttcgaggccggcatcaaggtgcagatccacagccaggacgagccccccttcatcgaccagctgggcttcggcgtggcccccggcttccagaccttcgtggcctgccaggagcagagactgatctacctgccccccccctggggcacctgcaaggccgtgaccatggacagcgacctggacttcttcgacagctacagcatcaccgcctgcagaatcgactgcgagaccagatacctggtggagaactgcaactgcagaatggtgcacatgcccggcgacgccccctactgcacccccgagcagtacaaggagtgcgccgaccccgccctggacttcctggtggagaaggaccaggagtactgcgtgtgcgagatgccctgcaacctgaccagatacggcaaggagctgagcatggtgaagatccccagcaaggccagcgccaagtacctggccaagaagttcaacaagagcgagcagtacatcggcgagaacatcctggtgctggacatcttcttcgaggtgctgaactacgagaccatcgagcagaagaaggcctacgagatcgccggcctgctgggcgagctgctgatgacccccgtgcccttcagctgccacggccacggcgtggccccctaccaccccaaggccggctgcagcctgctgagccacgagggcccccccccccagagacccttccccaagccctgctgcctgggcgacatcggcggccagatgggcctgttcatcggcgccagcatcctgaccgtgctggagctgttcgactacgcctacgaggtgatcaagcacaagctgtgcagaagaggcaagtgccagaaggaggccaagagaagcagcgccgacaagggcgtggccctgagcctggacgacgtgaagagacacaacccctgcgagagcctgagaggccaccccgccggcatgacctacgccgccaacatcctgccccaccaccccgccagaggcaccttcgaggacttcacctgctag

SEQ ID NO: 78457 - DNA, 594 bp, synthetic construct
  misc_feature 1..594: note = Description of Artificial Sequence: Synthetic coding sequence
  source 1..594: mol_type = other DNA
atgagagtggtggtgatcggcgccggcgtgatcggcctgagcaccgccctgtgcatccacgagagataccacagcgtgctgcagcccctggacatcaaggtgtacgccgacagattcacccccctgaccaccaccgacgtggccgccggcctgtggcagccctacctgagcgaccccaacaacccccaggaggccgactggagccagcagaccttcgactacctgctgagccacgtgcacagccccaacgccgagaacctgggcctgttcctgatcagcggctacaacctgttccacgaggccatccccgaccccagctggaaggacaccgtgctgggcttcagaaagctgacccccagagagctggacatgttccccgactacggctacggctggttccacaccagcctgatcctggagggcaagaactacctgcagtggctgaccgagagactgaccgagagaggcgtgaagttcttccagagaaaggtggagagcttcgaggaggtggccagagagggcgccgacgtgatcgtgaactgcaccggcgtgtgggccggcgccctgcagagagaccccctgctgcagccctag

SEQ ID NO: 78458 - DNA, 2400 bp, synthetic construct
  misc_feature 1..2400: note = Description of Artificial Sequence: Synthetic coding sequence
  source 1..2400: mol_type = other DNA
atgaagcccagccccgccggcaccgccaaggagctggagccccccgcccccgccagaggcgagcagagaaccgccgagcccgagggcagatggagagagaagggcgaggccgacaccgagagacagagaaccagagagagacaggaggccaccctggccggcctggccgagctggagtacctgagacagagacaggagctgctggtgagaggcgccctgagaggcgccggcggcgccggcgccgccgcccccagagccggcgagctgctgggcgaggccgcccagagaagcagactggaggagaagttcctggaggagaacatcctgctgctgagaaagcagctgaactgcctgagaagaagagacgccggcctgctgaaccagctgcaggagctggacaagcagatcagcgacctgagactggacgtggagaagaccagcgaggagcacctggagaccgacagcagacccagcagcggcttctacgagctgagcgacggcgccagcggcagcctgagcaacagcagcaacagcgtgttcagcgagtgcctgagcagctgccacagcagcacctgcttctgcagccccctggaggccaccctgagcctgagcgacggctgccccaagagcgccgacgtgaaccccaagtaccagtgcgacctggtgagcaagaacggcaacgacgtgtacagataccccagccccctgcacgccgtggccgtgcagagccccatgttcctgctgtgcctgaccggcaaccccctgagagaggaggacagactgggcaaccacgccagcgacatctgcggcggcagcgagctggacgccgtgaagaccgacagcagcctgcccagccccagcagcctgtggagcgccagccaccccagcagcagcaagaagatggacggctacatcctgagcctggtgcagaagaagacccaccccgtgagaaccaacaagcccagaaccagcgtgaacgccgaccccaccaagggcctgctgagaaacggcagcgtgtgcgtgagagcccccggcggcgtgagccagggcaacagcgtgaacctgaagaacagcaagcaggcctgcctgcccagcggcggcatccccagcctgaacaacggcaccttcagcccccccaagcagtggagcaaggagagcaaggccgagcaggccgagagcaagagagtgcccctgcccgagggctgccccagcggcgccgccagcgacctgcagagcaagcacctgcccaagaccgccaagcccgccagccaggagcacgccagatgcagcgccatcggcaccggcgagagccccaaggagagcgcccagctgagcggcgccagccccaaggagagccccagcagaggccccgcccccccccaggagaacaaggtggtgcagcccctgaagaagatgagccagaagaacagcctgcagggcgtgccccccgccaccccccccctgctgagcaccgccttccccgtggaggagagacccgccctggacttcaagagcgagggcagcagccagagcctggaggaggcccacctggtgaaggcccagttcatccccggccagcagcccagcgtgagactgcacagaggccacagaaacatgggcgtggtgaagaacagcagcctgaagcacagaggccccgccctgcagggcctggagaacggcctgcccaccgtgagagagaagaccagagccggcagcaagaagtgcagattccccgacgacctggacaccaacaagaagctgaagaaggccagcagcaagggcagaaagagcggcggcggccccgaggccggcgtgcccggcagacccgccggcggcggccacagagccggcagcagagcccacggccacggcagagaggccgtggtggccaagcccaagcacaagagaaccgactacagaagatggaagagcagcgccgagatcagctacgaggaggccctgagaagagccagaagaggcagaagagagaacgtgggcctgtaccccgcccccgtgcccctgccctacgccagcccctacgcctacgtggccagcgacagcgagtacagcgccgagtgcgagagcctgttccacagcaccgtggtggacaccagcgaggacgagcagagcaactacaccaccaactgcttcggcgacagcgagagcagcgtgagcgagggcgagttcgtgggcgagagcaccaccaccagcgacagcgaggagagcggcggcctgatctggagccagttcgtgcagaccctgcccatccagaccgtgaccgcccccgacctgcacaaccaccccgccaagaccttcgtgaagatcaaggccagccacaacctgaagaagaagatcctgagattcagaagcggcagcctgaagctgatgaccaccgtgtag

SEQ ID NO: 78459 - DNA, 2511 bp, synthetic construct
  misc_feature 1..2511: note = Description of Artificial Sequence: Synthetic coding sequence
  source 1..2511: mol_type = other DNA
atgaagcccagccccgccggcaccgccaaggagctggagccccccgcccccgccagaggcgagcagagaaccgccgagcccgagggcagatggagagagaagggcgaggccgacaccgagagacagagaaccagagagagacaggaggccaccctggccggcctggccgagctggagtacctgagacagagacaggagctgctggtgagaggcgccctgagaggcgccggcggcgccggcgccgccgcccccagagccggcgagctgctgggcgaggccgcccagagaagcagactggaggagaagttcctggaggagaacatcctgctgctgagaaagcagctgaactgcctgagaagaagagacgccggcctgctgaaccagctgcaggagctggacaagcagatcagcgacctgagactggacgtggagaagaccagcgaggagcacctggagaccgacagcagacccagcagcggcttctacgagctgagcgacggcgccagcggcagcctgagcaacagcagcaacagcgtgttcagcgagtgcctgagcagctgccacagcagcacctgcttctgcagccccctggaggccaccctgagcctgagcgacggctgccccaagagcgccgacctgatcggcctgctggagtacaaggagggccactgcgaggaccaggccagcggcgccgtgtgcagaagcctgagcaccccccagttcaacagcctggacgtgatcgccgacgtgaaccccaagtaccagtgcgacctggtgagcaagaacggcaacgacgtgtacagataccccagccccctgcacgccgtggccgtgcagagccccatgttcctgctgtgcctgaccggcaaccccctgagagaggaggacagactgggcaaccacgccagcgacatctgcggcggcagcgagctggacgccgtgaagaccgacagcagcctgcccagccccagcagcctgtggagcgccagccaccccagcagcagcaagaagatggacggctacatcctgagcctggtgcagaagaagacccaccccgtgagaaccaacaagcccagaaccagcgtgaacgccgaccccaccaagggcctgctgagaaacggcagcgtgtgcgtgagagcccccggcggcgtgagccagggcaacagcgtgaacctgaagaacagcaagcaggcctgcctgcccagcggcggcatccccagcctgaacaacggcaccttcagcccccccaagcagtggagcaaggagagcaaggccgagcaggccgagagcaagagagtgcccctgcccgagggctgccccagcggcgccgccagcgacctgcagagcaagcacctgcccaagaccgccaagcccgccagccaggagcacgccagatgcagcgccatcggcaccggcgagagccccaaggagagcgcccagctgagcggcgccagccccaaggagagccccagcagaggccccgcccccccccaggagaacaaggtggtgcagcccctgaagaagatgagccagaagaacagcctgcagggcgtgccccccgccaccccccccctgctgagcaccgccttccccgtggaggagagacccgccctggacttcaagagcgagggcagcagccagagcctggaggaggcccacctggtgaaggcccagttcatccccggccagcagcccagcgtgagactgcacagaggccacagaaacatgggcgtggtgaagaacagcagcctgaagcacagaggccccgccctgcagggcctggagaacggcctgcccaccgtgagagagaagaccagagccggcagcaagaagtgcagattccccgacgacctggacaccaacaagaagctgaagaaggccagcagcaagggcagaaagagcggcggcggccccgaggccggcgtgcccggcagacccgccggcggcggccacagagccggcagcagagcccacggccacggcagagaggccgtggtggccaagcccaagcacaagagaaccgactacagaagatggaagagcagcgccgagatcagctacgaggaggccctgagaagagccagaagaggcagaagagagaacgtgggcctgtaccccgcccccgtgcccctgccctacgccagcccctacgcctacgtggccagcgacagcgagtacagcgccgagtgcgagagcctgttccacagcaccgtggtggacaccagcgaggacgagcagagcaactacaccaccaactgcttcggcgacagcgagagcagcgtgagcgagggcgagttcgtgggcgagagcaccaccaccagcgacagcgaggagagcggcggcctgatctggagccagttcgtgcagaccctgcccatccagaccgtgaccgcccccgacctgcacaaccaccccgccaagaccttcgtgaagatcaaggccagccacaacctgaagaagaagatcctgagattcagaagcggcagcctgaagctgatgaccaccgtgtag

SEQ ID NO: 78460 - DNA, 2325 bp, synthetic construct
  misc_feature 1..2325: note = Description of Artificial Sequence: Synthetic coding sequence
  source 1..2325: mol_type = other DNA
atgtggacccccggcggcccccccggcagcgccggctgggacagaagaagactgggcgccagactgagagccgccttcgccggcctgcaggagctgcagggcctgagagccacccagcaggagagagtgagaggcgccctggccctgcagcccccccccgcccccgccgccccctgcggcccccacggcctgcacggccccgagcagcagctggaggccgccctggccgccctgcaggagcagctgagcagactgagacagcaggacatcggcctgaagacccacctggaccagctggacctgcagatcagcaagctgcagctggacgtgggcaccgccagcggcgaggccctggacagcgacagcagacccagcagcggcttctacgagatgagcgacggcggcagctgcagcctgagcaccagctgcgccagcgtgtgcagcgaccacatcagccccagcctgggcagcctgctgcccgtggcccaggcccacaaggccagacccagcatgggcgactggagacccagaagcgtggacgagaccaccgtgcccgcctggagaccccaggccaccgaggagggcgccagaccccccggcagcgtggaggacgccggccagccctggggcaccttctggcccagacccgtgagcaccggcgacctggacagagccctgcccgccgacaccggcctgcagaaggccagcgccgacgccgagctgctgggcctgctgtgccagggcgtggacatccccctgcacgtgcccgaccccaagtacagacaggacctggtgagccagggcggcagagaggtgtacccctaccccagccccctgcacgccgtggccctgcagagccccctgttcgtgctgaccaaggagaccccccagagaggcggccccagcttccccagagagagccccagaggccccgccggcctgaacaccatccagaccggccccgtgctggaggccggccccgccagagccagagcctacatcgacagactgctgcacctgtggggcagagagacccccgccaagggcagcgagggcgagcagggccccctgagacacgccgccagccccagcccccagagacagggcggctggagcaccgacggcggcggcagactgctggtgttcgcccccggcagagaggacgagggcggccccgcccagagcagaggcgccggcagaggcggcccccagcagcagggctacatgcccctggagggcccccagcagagcggcagcctgcccgaggagggcagcaagcccagcaacagctgcgtgctgagagagaccatggtgcaggccagccccagcagcaaggcccagcagacccccagcgcccaggactacggcagaggcaacatcatcagccccagcagaatgctggacaagagccccagccccgccagcggccacttcgcccaccccagcttcgccgccagcctgaagatgggcccccccaagagcaaggccgagaagatcaagagaagccccatggacaaggtgctgagattcgccagacagcccctgctgctgctggacagacccgagggcgcccacgccgccccccagcccagcctggagtgggaccccgcccactggcccaccggcagaggcggcctgcagagaagacccgccctggcctgggaggcccccggcagaagctgcagcgagagcaccctgtaccccatgcccgtgctggtgcccctggccgtggccccccaggagagccacagaaccagcgcccaggccctgttccccttcgaggccagcctgctgaccagcgtggccagaagaaagcacagaagatggcagagcaccgtggagatcagcgccagagccagactggccagctgccccgagagcaacctgggcccccccagacccgtggccagaagagccggcggccccctggccagaggcagacccagcctggtgagacaggacgcctacaccagaagcgacagcgagcccagcaagcacagcgccgagtgcgaccccagattccccagcgtgatccccgagaccagcgagggcgagagcagcgaccacaccaccaacagattcggcgacagagagagcagcagcagcgacgaggagggcggcgcccagagcagagactgcgacctggccctgggctacgtggccgccggccacgccgagctggcctggacccaggaggcccccgtgagcagcggccccctgctgagccccgtgcccaagctgtgcagaatcaaggccagcaaggccctgaagaagaagatcagaagattccagcccaccgccctgaaggtgatgaccatggtgtag

SEQ ID NO: 78461 - DNA, 843 bp, synthetic construct
  misc_feature 1..843: note = Description of Artificial Sequence: Synthetic coding sequence
  source 1..843: mol_type = other DNA
atgtggacccccggcggcccccccggcagcgccggctgggacagaagaagactgggcgccagactgagagccgccttcgccggcctgcaggagctgcagggcctgagagccacccagcaggagagagtgagaggcgccctggccctgcagcccccccccgcccccgccgccccctgcggcccccacggcctgcacggccccgagcagcagctggaggccgccctggccgccctgcaggagcagctgagcagactgagacagcaggacatcggcctgaagacccacctggaccagctggacctgcagatcagcaagctgcagctggacgtgggcaccgccagcggcgaggccctggacagcgacagcagacccagcagcggcttctacgagatgagcgacggcggcagctgcagcctgagcaccagctgcgccagcgtgtgcagcgaccacatcagccccagcctgggcagcctgctgcccgtggcccaggcccacaaggccagacccagcatgggcgactggagacccagaagcgtggacgagaccaccgtgcccgcctggagaccccaggccaccgaggagggcgccagaccccccggcagcgtggaggacgccggccagccctggggcaccttctggcccagacccgtgagcaccgagctgtgcaacgcccccggcgagctggacatgcacgccccccccgccggctgcaccagcagcagcctgaccggcgtgggcagcggcctgagaggcaagtgcggcctgtgcggctgccagctgcccttctgcagcgtgaacaccagcagcaagaccaagagcagcggcatcagcagacagcagtag

SEQ ID NO: 78462 - DNA, 1890 bp, synthetic construct
  misc_feature 1..1890: note = Description of Artificial Sequence: Synthetic coding sequence
  source 1..1890: mol_type = other DNA
atgatcagagccttcagcttccccgtgagccccgagagaggcagactgagaggctggctggagggcagcctggccggcctgtgcgagctgcactggctgagagagagacaggagtacagagtgcagcaggccctgagactggcccagcccggcatgggcggcgccgaggccgaggacgaggaggacgccgacgaggacgaggacgccgccgccgccagaagagccgccgccgccctggaggagcagctggaggccctgcccggcctggtgtgggacctgggccagcagctgggcgacctgagcctggagagcggcggcctggagcaggagagcggcagaagcagcggcttctacgaggaccccagcagcaccggcggccccgacagcccccccagcaccttctgcggcgacagcggcttcagcggcagcagcagctacggcagactgggccccagcgagcccagaggcatctacgccagcgagagacccaagagcctgggcgacgccagccccagcgcccccgaggtggtgggcgccagagccgccgtgcccagaagcttcagcgccccctaccccaccgccggcggcagcgccggccccgaggcctgcagcagcgccgagagaagagccagagccggccccttcctgacccccagccccctgcacgccgtggccatgagaagccccagaccctgcggcagaccccccaccgacagccccgacgccggcggcgccggcagacccctggacggctacatcagcgccctgctgagaagaagaagaagaagaggcgccggccagcccagaaccagccccggcggcgccgacggcggccccagaagacagaacagcgtgagacagagaccccccgacgccagccccagccccggcagcgccagacccgccagagagcccagcctggagagagtgggcggccaccccaccagccccgccgccctgagcagagcctgggccagcagctgggagagcgaggccgcccccgagcccgccgccccccccgccgcccccagcccccccgacagccccgccgagggcagactggtgaaggcccagtacatccccggcgcccaggccgccaccagaggcctgcccggcagagccgccagaagaaagcccccccccctgaccagaggcagaagcgtggagcagagcccccccagagagagacccagagccgccggcagaagaggcagaatggccgaggccagcggcagaagaggcagccccagagccagaaaggccagcagaagccagagcgagaccagcctgctgggcagagccagcgccgtgcccagcggcccccccaagtaccccaccgccgagagagaggagcccagaccccccagacccagaagaggccccgcccccaccctggccgcccaggccgccggcagctgcagaagatggagaagcaccgccgagatcgacgccgccgacggcagaagagtgagacccagagcccccgccgccagagtgcccggccccggccccagccccagcgccccccagagaagactgctgtacggctgcgccggcagcgacagcgagtgcagcgccggcagactgggccccctgggcagaagaggccccgccggcggcgtgggcggcggctacggcgagagcgagagcagcgccagcgagggcgagagccccgccttcagcagcgccagcagcgacagcgacggcagcggcggcctggtgtggccccagcagctggtggccgccaccgccgccagcggcggcggcgccggcgccggcgcccccgccggccccgccaaggtgttcgtgaagatcaaggccagccacgccctgaagaagaagatcctgagattcagaagcggcagcctgaaggtgatgaccaccgtgtag

SEQ ID NO: 78463 - DNA, 2025 bp, synthetic construct
  misc_feature 1..2025: note = Description of Artificial Sequence: Synthetic coding sequence
  source 1..2025: mol_type = other DNA
atgaacagcggcgccatgagaatccacagcaagggccacttccagggcggcatccaggtgaagaacgagaagaacagacccagcctgaagagcctgaagaccgacaacagacccgagaagagcaagtgcaagcccctgtggggcaaggtgttctacctggacctgcccagcgtgaccatcagcgagaagctgcagaaggacatcaaggacctgggcggcagagtggaggagttcctgagcaaggacatcagctacctgatcagcaacaagaaggaggccaagttcgcccagaccctgggcagaatcagccccgtgcccagccccgagagcgcctacaccgccgagaccaccagcccccaccccagccacgacggcagcagcttcaagagccccgacaccgtgtgcctgagcagaggcaagctgctggtggagaaggccatcaaggaccacgacttcatccccagcaacagcatcctgagcaacgccctgagctggggcgtgaagatcctgcacatcgacgacatcagatactacatcgagcagaagaagaaggagctgtacctgctgaagaagagcagcaccagcgtgagagacggcggcaagagagtgggcagcggcgcccagaagaccagaaccggcagactgaagaagcccttcgtgaaggtggaggacatgagccagctgtacagacccttctacctgcagctgaccaacatgcccttcatcaactacagcatccagaagccctgcagccccttcgacgtggacaagcccagcagcatgcagaagcagacccaggtgaagctgagaatccagaccgacggcgacaagtacggcggcaccagcatccagctgcagctgaaggagaagaagaagaagggctactgcgagtgctgcctgcagaagtacgaggacctggagacccacctgctgagcgagcagcacagaaacttcgcccagagcaaccagtaccaggtggtggacgacatcgtgagcaagctggtgttcgacttcgtggagtacgagaaggacacccccaagaagaagagaatcaagtacagcgtgggcagcctgagccccgtgagcgccagcgtgctgaagaagaccgagcagaaggagaaggtggagctgcagcacatcagccagaaggactgccaggaggacgacaccaccgtgaaggagcagaacttcctgtacaaggagacccaggagaccgagaagaagctgctgttcatcagcgagcccatcccccaccccagcaacgagctgagaggcctgaacgagaagatgagcaacaagtgcagcatgctgagcaccgccgaggacgacatcagacagaacttcacccagctgcccctgcacaagaacaagcaggagtgcatcctggacatcagcgagcacaccctgagcgagaacgacctggaggagctgagagtggaccactacaagtgcaacatccaggccagcgtgcacgtgagcgacttcagcaccgacaacagcggcagccagcccaagcagaagagcgacaccgtgctgttccccgccaaggacctgaaggagaaggacctgcacagcatcttcacccacgacagcggcctgatcaccatcaacagcagccaggagcacctgaccgtgcaggccaaggcccccttccacaccccccccgaggagcccaacgagtgcgacttcaagaacatggacagcctgcccagcggcaagatccacagaaaggtgaagatcatcctgggcagaaacagaaaggagaacctggagcccaacgccgagttcgacaagagaaccgagttcatcacccaggaggagaacagaatctgcagcagccccgtgcagagcctgctggacctgttccagaccagcgaggagaagagcgagttcctgggcttcaccagctacaccgagaagagcggcatctgcaacgtgctggacatctgggaggaggagaacagcgacaacctgctgaccgccttcttcagcagccccagcaccagcaccttcaccggcttctag

SEQ ID NO: 78464 - DNA, 654 bp, synthetic construct
  misc_feature 1..654: note = Description of Artificial Sequence: Synthetic coding sequence
  source 1..654: mol_type = other DNA
atgaacagcggcgccatgagaatccacagcaagggccacttccagggcggcatccaggtgaagaacgagaagaacagacccagcctgaagagcctgaagaccgacaacagacccgagaagagcaagtgcaagcccctgtggggcaaggtgttctacctggacctgcccagcgtgaccatcagcgagaagctgcagaaggacatcaaggacctgggcggcagagtggaggagttcctgagcaaggacatcagctacctgatcagcaacaagaaggaggccaagttcgcccagaccctgggcagaatcagccccgtgcccagccccgagagcgcctacaccgccgagaccaccagcccccaccccagccacgacggcagcagcttcaagagccccgacaccgtgtgcctgagcagaggcaagctgctggtggagaaggccatcaaggaccacgacttcatccccagcaacagcatcctgagcaacgccctgagctggggcgtgaagatcctgcacatcgacgacatcagatactacatcgagcagaagaagaaggagctgtacctgctgaagaagagcagcaccagcgtgagagacggcggcaagagagtgggcagcggcgcccagaagaccagaaaggccctgcagagcatctag

SEQ ID NO: 78465 - DNA, 1848 bp, synthetic construct
  misc_feature 1..1848: note = Description of Artificial Sequence: Synthetic coding sequence
  source 1..1848: mol_type = other DNA
atgagcgagcccggcaagggcgacgactgcctggagctggagagcagcatggccgagagcagactgagagcccccgacctgggcgtgagcagatgcctgggcaagtgccagaagaacagccccggcgccagaaagcaccccttcagcggcaagagcttctacctggacctgcccgccggcaagaacctgcagttcctgaccggcgccatccagcagctgggcggcgtgatcgagggcttcctgagcaaggaggtgagctacatcgtgagcagcagaagagaggtgaaggccgagagcagcggcaagagccacagaggctgccccagccccagccccagcgaggtgagagtggagaccagcgccatggtggaccccaagggcagccaccccagacccagcagaaagcccgtggacagcgtgcccctgagcagaggcaaggagctgctgcagaaggccatcagaaaccagggcagcatcagcggcggcggcagcggcggcagcagcagcctgctgaccaacgccagaagctggggcgtgagaatcctgcacgtggacgagatgatgatgcacgtgcagcagctgagcctggccagcctgtgcgtgaagaagcagcagcccaagaagcccgagggcacctgccccgccgccgagagcagaaccagaaaggtggccagactgaaggcccccttcctgaagatcgaggacgagagcagaaagttcagacccttccaccaccagttcaagagcttccccgagatcagcttcctgggccccaaggacgccagccccttcgaggcccccaccaccctgggcagcatgcaccacaccagagagagcaaggacggcgagcccagccccagaagcgccgcccacaccatgcccagaagaaagaagggctactgcgagtgctgccaggaggccttcgaggagctgcacgtgcacctgcagagcgcccagcacagaagcttcgccctggaggcccacctgtacgccgaggtggacagaatcatcgcccagctgagccacagcttcgccgacatccccttccaggccggcctgcccagatggagcggcagccccgccagcgactgcgaccccctgtgccccgagaccctgcacccccaccagcccagccaccccagagccgccagccccagaatcagaaaggaggacagctgccaggccagcgtgacccagggcagagccgccggccagcagagatggaccgagagcctggacggcgtgatgggcccccccgccagccacacctgcgtgagcgccaccaccctgctgcccgccctgcccaagggcagcagagagcagggctgcctgtgcccctgccccgccagcttcacccagagccacctggtgaccagcctggccctgctgcccggcgagtggagccccgccgaggacatgcccctgcaccccagccaggagaacagcttcgcccccgccgacatccccgtgaagggccccctgctgttccccgaggccagaccctggctgatgagcgccagatgctgggtgagacccttccccttcgtgacctggggctgcctgatcccccacgacaccacccccctgcacgaggaggtgagcccctgcccctgcctgagactgggctacctgtacctgctgctgacccagagcctgtggtgcagagtgagagtgcccagcctgagcaccgccggccccatccccagaaccagccacccctgcaccctggccttccccagctacctgaacgaccacgacctgggccacctgtgccaggccaagccccagggctggaacaccccccagcccttcctgcactgcggcttcctggccgtggacagcggctag

SEQ ID NO: 78466 - DNA, 1296 bp, synthetic construct
  misc_feature 1..1296: note = Description of Artificial Sequence: Synthetic coding sequence
  source 1..1296: mol_type = other DNA
atgagcgagcccggcaagggcgacgactgcctggagctggagagcagcatggccgagagcagactgagagcccccgacctgggcgtgagcagatgcctgggcaagtgccagaagaacagccccggcgccagaaagcaccccttcagcggcaagagcttctacctggacctgcccgccggcaagaacctgcagttcctgaccggcgccatccagcagctgggcggcgtgatcgagggcttcctgagcaaggaggtgagctacatcgtgagcagcagaagagaggtgaaggccgagagcagcggcaagagccacagaggctgccccagccccagccccagcgaggtgagagtggagaccagcgccatggtggaccccaagggcagccaccccagacccagcagaaagcccgtggacagcgtgcccctgagcagaggcaaggagctgctgcagaaggccatcagaaaccagggcagcatcagcggcggcggcagcggcggcagcagcagcctgctgaccaacgccagaagctggggcgtgagaatcctgcacgtggacgagatgatgatgcacgtgcagcagctgagcctggccagcctgtgcgtgaagaagcagcagcccaagaagcccgagggcacctgccccgccgccgagagcagaaccagaaaggtggccagactgaaggcccccttcctgaagatcgaggacgagagcagaaagttcagacccttccaccaccagttcaagagcttccccgagatcagcttcctgggccccaaggacgccagccccttcgaggcccccaccaccctgggcagcatgcaccacaccagagagagcaaggacggcgagcccagccccagaagcgccgcccacaccatgcccagaagaaagaagggctactgcgagtgctgccaggaggccttcgaggagctgcacgtgcacctgcagagcgcccagcacagaagcttcgccctggaggcccacctgtacgccgaggtggacagaatcatcgcccagctgagccacagcttcgccgacatccccttccaggccggcctgcccagatggagcggcagccccgccagcgactgcgaccccctgtgccccgagaccctgcacccccaccagcccagccaccccagagccgccagccccagaatcagaaaggaggacagctgccaggccagcgtgacccagggcagagccgccggccagcagagatggaccgagagcctggacggcgtgatgggcccccccgccagccacacctgccacagaccctgcagactgccctag

SEQ ID NO: 78467 - DNA, 474 bp, synthetic construct
  misc_feature 1..474: note = Description of Artificial Sequence: Synthetic coding sequence
  source 1..474: mol_type = other DNA
atgagcgagcccggcaagggcgacgactgcctggagctggagagcagcatggccgagagcagactgagagcccccgacctgggcgtgagcagatgcctgggcaagtgccagaagaacagccccggcgccagaaagcaccccttcagcggcaagagcttctacctggacctgcccgccggcaagaacctgcagttcctgaccggcgccatccagcagctgggcggcgtgatcgagggcttcctgagcaaggaggtgagctacatcgtgagcagcagaagagaggtgaaggccgagagcagcggcaagagccacagaggctgccccagccccagccccagcgaggtgagagtggagaccagcgccatggtggaccccaagggcagccaccccagacccagcagaaagcccgtggacagcgtgcccctgagcagaggcaaggagctgctgcagaaggccatcagaaaccagaagtag

SEQ ID NO: 78468 - DNA, 570 bp, synthetic construct
  misc_feature 1..570: note = Description of Artificial Sequence: Synthetic coding sequence
  source 1..570: mol_type = other DNA
atggtgggcggcggccagccctgcggccccaacatgagcgaggtgagctgcaagaagagagacgactacctggagtggcccgagtacttcatggccgtggccttcctgagcgcccagagaagcaaggaccccaacagccaggtgggcgcctgcatcgtgaacagcgagaacaagatcgtgggcatcggctacaacggcatgcccaacggctgcagcgacgacgtgctgccctggagaagaaccgccgagaacaagctggacaccaagtacccctacgtgtgccacgccgagctgaacgccatcatgaacaagaacagcaccgacgtgaagggctgcagcatgtacgtggccctgttcccctgcaacgagtgcgccaagctgatcatccaggccggcatcaaggaggtgatcttcatgagcgacaagtaccacgacagcgacgaggccaccgccgccagactgctgttcaacatggccggcgtgaccttcagaaagttcatccccaagtgcagcaagatcgtgatcgacttcgacagcatcaacagcagacccagccagaagctgcagtag

SEQ ID NO: 78469 - DNA, 537 bp, synthetic construct
  misc_feature 1..537: note = Description of Artificial Sequence: Synthetic coding sequence
  source 1..537: mol_type = other DNA
atgagcgaggtgagctgcaagaagagagacgactacctggagtggcccgagtacttcatggccgtggccttcctgagcgcccagagaagcaaggaccccaacagccaggtgggcgcctgcatcgtgaacagcgagaacaagatcgtgggcatcggctacaacggcatgcccaacggctgcagcgacgacgtgctgccctggagaagaaccgccgagaacaagctggacaccaagtacccctacgtgtgccacgccgagctgaacgccatcatgaacaagaacagcaccgacgtgaagggctgcagcatgtacgtggccctgttcccctgcaacgagtgcgccaagctgatcatccaggccggcatcaaggaggtgatcttcatgagcgacaagtaccacgacagcgacgaggccaccgccgccagactgctgttcaacatggccggcgtgaccttcagaaagttcatccccaagtgcagcaagatcgtgatcgacttcgacagcatcaacagcagacccagccagaagctgcagtag

SEQ ID NO: 78470 - DNA, 510 bp, synthetic construct
  misc_feature 1..510: note = Description of Artificial Sequence: Synthetic coding sequence
  source 1..510: mol_type = other DNA
atgagcgaggtgagctgcaagaagagagacgactacctggagtggcccgagtacttcatggccgtggccttcctgagcgcccagagaagcaaggaccccaacagccaggtgggcgcctgcatcgtgaacagcgagaacaagatcgtgggcatcggctacaacggcatgcccaacggctgcagcgacgacgtgctgccctggagaagaaccgccgagaacaagctggacaccaagtacccctacgtgtgccacgccgagctgaacgccatcatgaacaagaacagcaccgacgtgaagggctgcagcatgtacgtggccctgttcccctgcaacgagtgcgccaagctgatcatccaggccggcatcaaggaggtgatcttcatgagcgacaagtaccacgacagcgacgaggccaccgccgccagactgctgttcaacatggccggcgtgaccttcagaaagttcatccccaagtgcagcaagatcgtgatcgacttcgacagcatctag

SEQ ID NO: 78471 - DNA, 222 bp, synthetic construct
  misc_feature 1..222: note = Description of Artificial Sequence: Synthetic coding sequence
  source 1..222: mol_type = other DNA
atgagcgaggtgagctgcaagaagagagacgactacctggagtggcccgagtacttcatggccgtggccttcctgagcgcccagagaagcaaggaccccaacagccaggtgggcgcctgcatcgtgaacagcgagaacaagatcgtgggcatcggctacaacggcatgcccaacggctgcagcgacgacgtgctgccctggagaagaaccgccgagaactag

SEQ ID NO: 78472 - DNA, 180 bp, synthetic construct
  misc_feature 1..180: note = Description of Artificial Sequence: Synthetic coding sequence
  source 1..180: mol_type = other DNA
atgagcgaggtgagctgcaagaagagagacgactacctggagtggcccgagtacttcatggccgtggccttcctgagcgcccagagaagcaaggaccccaacagccaggtgggcgcctgcatcgtgaacagcgagaacaagatcgtgggcatcggctacaacggcatgcccaacggctag

SEQ ID NO: 78473 - DNA, 72 bp, synthetic construct
  misc_feature 1..72: note = Description of Artificial Sequence: Synthetic coding sequence
  source 1..72: mol_type = other DNA
atgagcgaggtgagctgcaagaagagagacgactacctggagtggcccgagtacttcatggccgtggcctag

SEQ ID NO: 78474 - DNA, 363 bp, synthetic construct
  misc_feature 1..363: note = Description of Artificial Sequence: Synthetic coding sequence
  source 1..363: mol_type = other DNA
atgagcgaggtgagctgcaagaagagagacgactacctggagtggcccgagtacttcatggccgtggccttcctgagcgcccagagaagcaaggaccccaacagccaggtgggcgcctgcatcgtgaacagcgagaacaagatcgtgggcatcggctacaacggcatgcccaacggctgcagcgacgacgtgctgccctggagaagaaccgccgagaacaagctggacaccaagtacccctacgtgtgccacgccgagctgaacgccatcatgaacaagaacagcaccgacgtgaagggctgcagcatgtacgtggccctgttcccctgcaacgagtgcgccaagctgatcatccaggcctag

SEQ ID NO: 78475 - DNA, 537 bp, synthetic construct; identical to SEQ ID NO: 78469
  misc_feature 1..537: note = Description of Artificial Sequence: Synthetic coding sequence
  source 1..537: mol_type = other DNA

SEQ ID NO: 78476 - DNA, 360 bp, synthetic construct
  misc_feature 1..360: note = Description of Artificial Sequence: Synthetic coding sequence
  source 1..360: mol_type = other DNA
atgagcgaggtgagctgcaagaagagagacgactacctggagtggcccgagtacttcatggccgtggccttcctgagcgcccagagaagcaaggaccccaacagccaggtgggcgcctgcatcgtgaacagcgagaacaagatcgtgggcatcggctacaacggcatgcccaacggctgcagcgacgacgtgctgccctggagaagaaccgccgagaacaagctggacaccaagtacccctacgtgtgccacgccgagctgaacgccatcatgaacaagaacagcaccgacgtgaagggctgcagcatgtacgtggccctgttcccctgcaacgagtgcgccaagctgatcatccagtag

SEQ ID NO: 78477 - DNA, 297 bp, synthetic construct
  misc_feature 1..297: note = Description of Artificial Sequence: Synthetic coding sequence
  source 1..297: mol_type = other DNA
atgagcgaggtgagctgcaagaagagagacgactacctggagtggcccgagtacttcatggccgtggccttcctgagcgcccagagaagcaaggaccccaacagccaggtgggcgcctgcatcgtgaacagcgagaacaagatcgtgggcatcggctacaacggcatgcccaacggctgcagcgacgacgtgctgccctggagaagaaccgccgagaacaagctggacaccaagtacccctacgtgtgccacgccgagctgaacgccatcatgaacaagaacagcaccgacgtgtag

SEQ ID NO: 78478 - DNA, 780 bp, synthetic construct
  misc_feature 1..780: note = Description of Artificial Sequence: Synthetic coding sequence
  source 1..780: mol_type = other DNA
atgaacaagctgaagagcagccagaaggacaaggtgagacagttcatgatcttcacccagagcagcgagaagaccgccgtgagctgcctgagccagaacgactggaagctggacgtggccaccgacaacttcttccagaaccccgagctgtacatcagagagagcgtgaagggcagcctggacagaaagaagctggagcagctgtacaacagatacaaggacccccaggacgagaacaagatcggcatcgacggcatccagcagttctgcgacgacctggccctggaccccgccagcatcagcgtgctgatcatcgcctggaagttcagagccgccacccagtgcgagttcagcaagcaggagttcatggacggcatgaccgagctgggctgcgacagcatcgagaagctgaaggcccagatccccaagatggagcaggagctgaaggagcccggcagattcaaggacttctaccagttcaccttcaacttcgccaagaaccccggccagaagggcctggacctggagatggccatcgcctactggaacctggtgctgaacggcagattcaagttcctggacctgtggaacaagttcctgctggagcaccacaagagaagcatccccaaggacacctggaacctgctgctggacttcagcaccatgatcgccgacgacatgagcaactacgacgaggagggcgcctggcccgtgctgatcgacgacttcgtggagttcgccagaccccagatcgccggcaccaagagcaccaccgtgtag

SEQ ID NO: 78479 - DNA, 660 bp, synthetic construct
  misc_feature 1..660: note = Description of Artificial Sequence: Synthetic coding sequence
  source 1..660: mol_type = other DNA
atgaacaagctgaagagcagccagaaggacaaggtgagacagttcatgatcttcacccagagcagcgagaagaccgccgtgagctgcctgagccagaacgactggaagctggacgtggccaccgacaacttcttccagaaccccgagctgtacatcagagagagcgtgaagggcagcctggacagaaagaagctggagcagctgtacaacagatacaaggacccccaggacgagaacaagatcggcatcgacggcatgaccgagctgggctgcgacagcatcgagaagctgaaggcccagatccccaagatggagcaggagctgaaggagcccggcagattcaaggacttctaccagttcaccttcaacttcgccaagaaccccggccagaagggcctggacctggagatggccatcgcctactggaacctggtgctgaacggcagattcaagttcctggacctgtggaacaagttcctgctggagcaccacaagagaagcatccccaaggacacctggaacctgctgctggacttcagcaccatgatcgccgacgacatgagcaactacgacgaggagggcgcctggcccgtgctgatcgacgacttcgtggagttcgccagaccccagatcgccggcaccaagagcaccaccgtgtag

SEQ ID NO: 78480 - DNA, 387 bp, synthetic construct
  misc_feature 1..387: note = Description of Artificial Sequence: Synthetic coding sequence
  source 1..387: mol_type = other DNA
atgatcttcacccagagcagcgagaagaccgccgtgagctgcctgagccagaacgactggaagctggacgtggccaccgacaacttcttccagaaccccgagctgtacatcagagagagcgtgaagggcagcctggacagaaagaagctggagcagctgtacaacagatacaaggacccccaggacgagaacaagatcggcatcgacggcatccagcagttctgcgacgacctggccctggaccccgccagcatcagcgtgctgatcatcgcctggaagttcagagccgccacccagtgcgagttcagcaagcaggagttcatggacggcatgaccgagctgggctgcgacagcatcgagaagctgaaggcccagatccccaagtag

SEQ ID NO: 78481 - DNA, 879 bp, synthetic construct
  misc_feature 1..879: note = Description of Artificial Sequence: Synthetic coding sequence
  source 1..879: mol_type = other DNA
atgcacagcgacgccgccgccgtgaacttccagctgaacagccacctgagcaccctggccaacatccacaagatctaccacaccctgaacaagctgaacctgaccgaggacatcggccaggacgaccaccagaccggcagcctgagaagctgcagcagcagcgactgcttcaacaaggtgatgccccccagaaagaagagaagacccgccagcggcgacgacctgagcgccaagaagagcagacacgacagcatgtacagaaagtacgacagcaccagaatcaagaccgaggaggaggccttcagcagcaagagatgcctggagtggttctacgagtacgccggcaccgacgacgtggtgggccccgagggcatggagaagttctgcgaggacatcggcgtggagcccgagaacgtggtgatgctggtgctggcctggaagctggacgcccagaacatgggctacttcaccctgcaggagtggctgaagggcatgaccagcctgcagtgcgacaccaccgagaagctgagaaacaccctggactacctgagaagcttcctgaacgacagcaccaacttcaagctgatctacagatacgccttcgacttcgccagagagaaggaccagagaagcctggacatcaacaccgccaagtgcatgctgggcctgctgctgggcaagatctggcccctgttccccgtgttccaccagttcctggagcagagcaagtacaaggtgatcaacaaggaccagtggtgcaacgtgctggagttcagcagaaccatcaacctggacctgagcaactacgacgaggacggcgcctggcccgtgctgctggacgagttcgtggagtggtacaaggacaagcagatgagctag

SEQ ID NO: 78482 - DNA, 699 bp, synthetic construct
  misc_feature 1..699: note = Description of Artificial Sequence: Synthetic coding sequence
  source 1..699: mol_type = other DNA
atgccccccagaaagaagagaagacccgccagcggcgacgacctgagcgccaagaagagcagacacgacagcatgtacagaaagtacgacagcaccagaatcaagaccgaggaggaggccttcagcagcaagagatgcctggagtggttctacgagtacgccggcaccgacgacgtggtgggccccgagggcatggagaagttctgcgaggacatcggcgtggagcccgagaacgtggtgatgctggtgctggcctggaagctggacgcccagaacatgggctacttcaccctgcaggagtggctgaagggcatgaccagcctgcagtgcgacaccaccgagaagctgagaaacaccctggactacctgagaagcttcctgaacgacagcaccaacttcaagctgatctacagatacgccttcgacttcgccagagagaaggaccagagaagcctggacatcaacaccgccaagtgcatgctgggcctgctgctgggcaagatctggcccctgttccccgtgttccaccagttcctggagcagagcaagtacaaggtgatcaacaaggaccagtggtgcaacgtgctggagttcagcagaaccatcaacctggacctgagcaactacgacgaggacggcgcctggcccgtgctgctggacgagttcgtggagtggtacaaggacaagcagatgagctag

SEQ ID NO: 78483 - DNA, 774 bp, synthetic construct
  misc_feature 1..774: note = Description of Artificial Sequence: Synthetic coding sequence
  source 1..774: mol_type = other DNA
atgcacagcgacgccgccgccgtgaacttccagctgaacagccacctgagcaccctggccaacatccacaagatctaccacaccctgaacaagctgaacctgaccgaggacatcggccaggacgaccaccagaccggcagcctgagaagctgcagcagcagcgactgcttcaacaaggtgatgccccccagaaagaagagaagacccgccagcggcgacgacctgagcgccaagaagagcagacacgacagcatgtacagaaagtacgacagcaccagaatcaagaccgaggaggaggccttcagcagcaagagatgcctggagtggttctacgagtacgccggcaccgacgacgtggtgggccccgagggcatggagaagttctgcgaggacatcggcgtggagcccgagaacgtggtgatgctggtgctggcctggaagctggacgcccagaacatgggctacttcaccctgcaggagtggctgaagggcatgaccagcctgcagtgcgacaccaccgagaagctgagaaacaccctggactacctgagaagcttcctgaacgacagcaccaacttcaagctgatctacagatacgccttcgacttcgccagacagagcaagtacaaggtgatcaacaaggaccagtggtgcaacgtgctggagttcagcagaaccatcaacctggacctgagcaactacgacgaggacggcgcctggcccgtgctgctggacgagttcgtggagtggtacaaggacaagcagatgagctag

SEQ ID NO: 78484 - DNA, 1011 bp, synthetic construct
  misc_feature 1..1011: note = Description of Artificial Sequence: Synthetic coding sequence
  source 1..1011: mol_type = other DNA
atggaggtggaggccgccctgggctgcagcggccagggcagaggctgcggcggcgtggcccccgccggcagaggcagagagagagccagcgagagaggcaccagagtgagaatcagcaagggcctgagcggcgccggcggcagcgtgagaaaggccgacttccagctgaacagccacctgagcaccctggccaacatccacaagatctaccacaccctgaacaagctgaacctgaccgaggacatcggccaggacgaccaccagaccggcagcctgagaagctgcagcagcagcgactgcttcaacaaggtgatgccccccagaaagaagagaagacccgccagcggcgacgacctgagcgccaagaagagcagacacgacagcatgtacagaaagtacgacagcaccagaatcaagaccgaggaggaggccttcagcagcaagagatgcctggagtggttctacgagtacgccggcaccgacgacgtggtgggccccgagggcatggagaagttctgcgaggacatcggcgtggagcccgagaacgtggtgatgctggtgctggcctggaagctggacgcccagaacatgggctacttcaccctgcaggagtggctgaagggcatgaccagcctgcagtgcgacaccaccgagaagctgagaaacaccctggactacctgagaagcttcctgaacgacagcaccaacttcaagctgatctacagatacgccttcgacttcgccagagagaaggaccagagaagcctggacatcaacaccgccaagtgcatgctgggcctgctgctgggcaagatctggcccctgttccccgtgttccaccagttcctggagcagagcaagtacaaggtgatcaacaaggaccagtggtgcaacgtgctggagttcagcagaaccatcaacctggacctgagcaactacgacgaggacggcgcctggcccgtgctgctggacgagttcgtggagtggtacaaggacaagcagatgagctag

SEQ ID NO: 78485 - DNA, 1854 bp, synthetic construct
  misc_feature 1..1854: note = Description of Artificial Sequence: Synthetic coding sequence
  source 1..1854: mol_type = other DNA
atggccgccgtggccgccggcggcctggtgggcaagggcagagacatcagcctggccgccctgcagagacacgacccctacatcaacagaatcgtggacgtggccagccaggtggccctgtacaccttcggccacagagccaacgagtgggagaagaccgacgtggagggcaccctgttcgtgtacaccagaagcgccagccccaagcacggcttcaccatcatgaacagactgagcatggagaacagaaccgagcccatcaccaaggacctggacttccagctgcaggaccccttcctgctgtacagaaacgccagactgagcatctacggcatctggttctacgacaaggaggagtgccagagaatcgccgagctgatgaagaacctgacccagtacgagcagctgaaggcccaccagggcaccggcgccggcatcagccccgtgatcctgaacagcggcgagggcaaggaggtggacatcctgagaatgctgatcaaggccaaggacgagtacaccaagtgcaagacctgcagcgagcccaagaagatcaccagcagcagcgccatctacgacaaccccaacctgatcaagcccatccccgtgaagcccagcgagaaccagcagcagagaatcccccagcccaaccagaccctggaccccgagccccagcacctgagcctgaccgccctgttcggcaagcaggacaaggccacctgccaggagaccgtggagcccccccagaccctgcaccagcagcagcagcagcagcagcagcagcaggagaagctgcccatcagacagggcgtggtgagaagcctgagctacgaggagcccagaagacacagcccccccatcgagaagcagctgtgccccgccatccagaagctgatggtgagaagcgccgacctgcaccccctgagcgagctgcccgagaacagaccctgcgagaacggcagcacccacagcgccggcgagttcttcaccggccccgtgcagcccggcagcccccacaacatcggcaccagcagaggcgtgcagaacgccagcagaacccagaacctgttcgagaagctgcagagcacccccggcgccgccaacaagtgcgaccccagcacccccgcccccgccagcagcgccgccctgaacagaagcagagcccccaccagcgtgacccccgtggcccccggcaagggcctggcccagcccccccaggcctacttcaacggcagcctgcccccccagaccgtgggccaccaggcccacggcagagagcagagcaccctgcccagacagaccctgcccatcagcggcagccagaccggcagcagcggcgtgatcagcccccaggagctgctgaagaagctgcagatcgtgcagcaggagcagcagctgcacgccagcaacagacccgccctggccgccaagttccccgtgctggcccagagcagcggcaccggcaagcccctggagagctggatcaacaagacccccaacaccgagcagcagacccccctgttccaggtgatcagcccccagagaatccccgccaccgccgcccccagcctgctgatgagccccatggtgttcgcccagcccaccagcgtgccccccaaggagagagagagcggcctgctgcccgtgggcggccaggagccccccgccgccgccaccagcctgctgctgcccatccagagccccgagcccagcgtgatcaccagcagccccctgaccaagctgcagctgcaggaggccctgctgtacctgatccagaacgacgacaacttcctgaacatcatctacgaggcctacctgttcagcatgacccaggccgccatgaagaagaccatgtag

SEQ ID NO: 78486 - DNA, 1548 bp, synthetic construct
  misc_feature 1..1548: note = Description of Artificial Sequence: Synthetic coding sequence
  source 1..1548: mol_type = other DNA
atgcagatcaaggtgagcatctacggcatctggttctacgacaaggaggagtgccagagaatcgccgagctgatgaagaacctgacccagtacgagcagctgaaggcccaccagggcaccggcgccggcatcagccccgtgatcctgaacagcggcgagggcaaggaggtggacatcctgagaatgctgatcaaggccaaggacgagtacaccaagtgcaagacctgcagcgagcccaagaagatcaccagcagcagcgccatctacgacaaccccaacctgatcaagcccatccccgtgaagcccagcgagaaccagcagcagagaatcccccagcccaaccagaccctggaccccgagccccagcacctgagcctgaccgccctgttcggcaagcaggacaaggccacctgccaggagaccgtggagcccccccagaccctgcaccagcagcagcagcagcagcagcagcagcaggagaagctgcccatcagacagggcgtggtgagaagcctgagctacgaggagcccagaagacacagcccccccatcgagaagcagctgtgccccgccatccagaagctgatggtgagaagcgccgacctgcaccccctgagcgagctgcccgagaacagaccctgcgagaacggcagcacccacagcgccggcgagttcttcaccggccccgtgcagcccggcagcccccacaacatcggcaccagcagaggcgtgcagaacgccagcagaacccagaacctgttcgagaagctgcagagcacccccggcgccgccaacaagtgcgaccccagcacccccgcccccgccagcagcgccgccctgaacagaagcagagcccccaccagcgtgacccccgtggcccccggcaagggcctggcccagcccccccaggcctacttcaacggcagcctgcccccccagaccgtgggccaccaggcccacggcagagagcagagcaccctgcccagacagaccctgcccatcagcggcagccagaccggcagcagcggcgtgatcagcccccaggagctgctgaagaagctgcagatcgtgcagcaggagcagcagctgcacgccagcaacagacccgccctggccgccaagttccccgtgctggcccagagcagcggcaccggcaagcccctggagagctggatcaacaagacccccaacaccgagcagcagacccccctgttccaggtgatcagcccccagagaatccccgccaccgccgcccccagcctgctgatgagccccatggtgttcgcccagcccaccagcgtgccccccaaggagagagagagcggcctgctgcccgtgggcggccaggagccccccgccgccgccaccagcctgctgctgcccatccagagccccgagcccagcgtgatcaccagcagccccctgaccaagctgcagctgcaggaggccctgctgtacctgatccagaacgacgacaacttcctgaacatcatctacgaggcctacctgttcagcatgacccaggccgccatgaagaagaccatgtag

SEQ ID NO: 78487 - DNA, 1263 bp, synthetic construct
  misc_feature 1..1263: note = Description of Artificial Sequence: Synthetic coding sequence
  source 1..1263: mol_type = other DNA
atggagaccaagagagtggagatccccggcagcgtgctggacgacttctgcagcagattcatcctgcacatccccagcgaggagagagacaacgccatcagagtgtgcttccagatcgagctggcccactggttctacctggacttctacatgcagaacacccccggcctgccccagtgcggcatcagagacttcgccaaggccgtgttcagccactgccccttcctgctgccccagggcgaggacgtggagaaggtgctggacgagtggaaggagtacaagatgggcgtgcccacctacggcgccatcatcctggacgagaccctggagaacgtgctgctggtgcagggctacctggccaagagcggctggggcttccccaagggcaaggtgaacaaggaggaggccccccacgactgcgccgccagagaggtgttcgaggagaccggcttcgacatcaaggactacatctgcaaggacgactacatcgagctgagaatcaacgaccagctggccagactgtacatcatccccggcatccccaaggacaccaagttcaaccccaagaccagaagagagatcagaaacatcgagtggttcagcatcgagaagctgccctgccacagaaacgacatgacccccaagagcaagctgggcctggcccccaacaagttcttcatggccatccccttcatcagacccctgagagactggctgagcagaagattcggcgacagcagcgacagcgacaacggcttcagcagcaccggcagcacccccgccaagcccaccgtggagaagctgagcagaaccaagttcagacacagccagcagctgttccccgacggcagccccggcgaccagtgggtgaagcacagacagcccctgcagcagaagccctacaacaaccacagcgagatgagcgacctgctgaagggcaagaaccagagcatgagaggcaacggcagaaagcagtaccaggacagccccaaccagaagaagagaaccaacggcctgcagcccgccaagcagcagaacagcctgatgaagtgcgagaagaagctgcaccccagaaagctgcaggacaacttcgagaccgacgccgtgtacgacctgcccagcagcagcgaggaccagctgctggagcacgccgagggccagcccgtggcctgcaacggccactgcaagttccccttcagcagcagagccttcctgagcttcaagttcgaccacaacgccatcatgaagatcctggacctgtag

SEQ ID NO: 78488 - DNA, 1158 bp, synthetic construct
  misc_feature 1..1158: note = Description of Artificial Sequence: Synthetic coding sequence
  source 1..1158: mol_type = other DNA
atggagaccaagagagtggagatccccggcagcgtgctggacgacttctgcagcagattcatcctgcacatccccagcgaggagagagacaacgccatcagagtgtgcttccagatcgagctggcccactggttctacctggacttctacatgcagaacacccccggcctgccccagtgcggcatcagagacttcgccaaggccgtgttcagccactgccccttcctgctgccccagggcgaggacgtggagaaggtgctggacgagtggaaggagtacaagatgggcgtgcccacctacggcgccatcatcctggacgagaccctggagaacgtgctgctggtgcagggctacctggccaagagcggctggggcttccccaagggcaaggtgaacaaggaggaggccccccacgactgcgccgccagagaggtgttcgaggagaccggcttcgacatcaaggactacatctgcaaggacgactacatcgagctgagaatcaacgaccagctggccagactgtacatcatccccggcatccccaaggacaccaagttcaaccccaagaccagaagagagatcagaaacatcgagtggttcagcatcgagaagctgccctgccacagaaacgacatgacccccaagagcaagctgggcctggcccccaacaagttcttcatggccatccccttcatcagacccctgagagactggctgagcagaagattcggcgacagcagcgacagcgacaacggcttcagcagcaccggcagcacccccgccaagcccaccgtggagaagctgagcagaaccaagttcagacacagccagcagctgttccccgacggcagccccggcgaccagtgggtgaagcacagacagcccctgcagcagaagccctacaacaaccacagcgagatgagcgacctgctgaagggcaagaagtgcgagaagaagctgcaccccagaaagctgcaggacaacttcgagaccgacgccgtgtacgacctgcccagcagcagcgaggaccagctgctggagcacgccgagggccagcccgtggcctgcaacggccactgcaagttccccttcagcagcagagccttcctgagcttcaagttcgaccacaacgccatcatgaagatcctggacctgtag

SEQ ID NO: 78489 - DNA, 630 bp, synthetic construct
  misc_feature 1..630: note = Description of Artificial Sequence: Synthetic coding sequence
  source 1..630: mol_type = other DNA
atgacccccaagagcaagctgggcctggcccccaacaagttcttcatggccatccccttcatcagacccctgagagactggctgagcagaagattcggcgacagcagcgacagcgacaacggcttcagcagcaccggcagcacccccgccaagcccaccgtggagaagctgagcagaaccaagttcagacacagccagcagctgttccccgacggcagccccggcgaccagtgggtgaagcacagacagcccctgcagcagaagccctacaacaaccacagcgagatgagcgacctgctgaagggcaagaaccagagcatgagaggcaacggcagaaagcagtaccaggacagccccaaccagaagaagagaaccaacggcctgcagcccgccaagcagcagaacagcctgatgaagtgcgagaagaagctgcaccccagaaagctgcaggacaacttcgagaccgacgccgtgtacgacctgcccagcagcagcgaggaccagctgctggagcacgccgagggccagcccgtggcctgcaacggccactgcaagttccccttcagcagcagagccttcctgagcttcaagttcgaccacaacgccatcatgaagatcctggacctgtag

SEQ ID NO: 78490 - DNA, 1341 bp, synthetic construct
  misc_feature 1..1341: note = Description of Artificial Sequence: Synthetic coding sequence
  source 1..1341: mol_type = other DNA
atgaccgagctgggcatggtggtgctgggcatcgacaccacccacctgtggatgctgcccctgacccccggcagctggaacagcatgagaagcagacacaagtggaactggccccagggcagctggggcctgggcggcccccccagaagcaccgccttcctggagtgctgcaccagcttcctgcccaacgacctgggcttcaccgacagctacagccagaaggccttctgcggcatctacagcaaggacggccagatcttcatgagcgcctgccaggaccagaccatcagactgtacgactgcagatacggcagattcagaaagttcaagagcatcaaggccagagacgtgggctggagcgtgctggacgtggccttcacccccgacggcaaccacttcctgtacagcagctggagcgactacatccacatctgcaacatctacggcgagggcgacacccacaccgccctggacctgagacccgacgagagaagattcgccgtgttcagcatcgccgtgagcagcgacggcagagaggtgctgggcggcgccaacgacggctgcctgtacgtgttcgacagagagcagaacagaagaaccctgcagatcgagagccacgaggacgacgtgaacgccgtggccttcgccgacatcagcagccagatcctgttcagcggcggcgacgacgccatctgcaaggtgtgggacagaagaaccatgagagaggacgaccccaagcccgtgggcgccctggccggccaccaggacggcatcaccttcatcgacagcaagggcgacgccagatacctgatcagcaacagcaaggaccagaccatcaagctgtgggacatcagaagattcagcagcagagagggcatggaggccagcagacaggccgccacccagcagaactgggactacagatggcagcaggtgcccaagaaggcctggagaaagctgaagctgcccggcgacagcagcctgatgacctacagaggccacggcgtgctgcacaccctgatcagatgcagattcagccccatccacagcaccggccagcagttcatctacagcggctgcagcaccggcaaggtggtggtgtacgacctgctgagcggccacatcgtgaagaagctgaccaaccacaaggcctgcgtgagagacgtgagctggcaccccttcgaggagaagatcgtgagcagcagctgggacggcaacctgagactgtggcagtacagacaggccgagtacttccaggacgacatgcccgagagcgaggagtgcgccagcgcccccgcccccgtgccccagagcagcacccccttcagcagcccccagtag

SEQ ID NO: 78491 - DNA, 1563 bp, synthetic construct
  misc_feature 1..1563: note = Description of Artificial Sequence: Synthetic coding sequence
  source 1..1563: mol_type = other DNA
atgggcagcagaaacagcagcagcgccggcagcggcagcggcgaccccagcgagggcctgcccagaagaggcgccggcctgagaagaagcgaggaggaggaggaggaggacgaggacgtggacctggcccaggccctgctggacagcgaggaggagaacgacagagcctgggacggcagactgggcgacagatacaacccccccgtggacgccacccccgacaccagagagctggagttcaacgagatcaagacccaggtggagctggccaccggccagctgggcctgagaagagccgcccagaagcacagcttccccagaatgctgcaccagagagagagaggcctgtgccacagaggcagcttcagcctgggcgagcagagcagagtgatcagccacttcctgcccaacgacctgggcttcaccgacagctacagccagaaggccttctgcggcatctacagcaaggacggccagatcttcatgagcgcctgccaggaccagaccatcagactgtacgactgcagatacggcagattcagaaagttcaagagcatcaaggccagagacgtgggctggagcgtgctggacgtggccttcacccccgacggcaaccacttcctgtacagcagctggagcgactacatccacatctgcaacatctacggcgagggcgacacccacaccgccctggacctgagacccgacgagagaagattcgccgtgttcagcatcgccgtgagcagcgacggcagagaggtgctgggcggcgccaacgacggctgcctgtacgtgttcgacagagagcagaacagaagaaccctgcagatcgagagccacgaggacgacgtgaacgccgtggccttcgccgacatcagcagccagatcctgttcagcggcggcgacgacgccatctgcaaggtgtgggacagaagaaccatgagagaggacgaccccaagcccgtgggcgccctggccggccaccaggacggcatcaccttcatcgacagcaagggcgacgccagatacctgatcagcaacagcaaggaccagaccatcaagctgtgggacatcagaagattcagcagcagagagggcatggaggccagcagacaggccgccacccagcagaactgggactacagatggcagcaggtgcccaagaaggcctggagaaagctgaagctgcccggcgacagcagcctgatgacctacagaggccacggcgtgctgcacaccctgatcagatgcagattcagccccatccacagcaccggccagcagttcatctacagcggctgcagcaccggcaaggtggtggtgtacgacctgctgagcggccacatcgtgaagaagctgaccaaccacaaggcctgcgtgagagacgtgagctggcaccccttcgaggagaagatcgtgagcagcagctgggacggcaacctgagactgtggcagtacagacaggccgagtacttccaggacgacatgcccgagagcgaggagtgcgccagcgcccccgcccccgtgccccagagcagcacccccttcagcagcccccagtag

SEQ ID NO: 78492 - DNA, 1641 bp, synthetic construct
  misc_feature 1..1641: note = Description of Artificial Sequence: Synthetic coding sequence
  source 1..1641: mol_type = other DNA
atgggcagcagaaacagcagcagcgccggcagcggcagcggcgaccccagcgagggcctgcccagaagaggcgccggcctgagaagaagcgaggaggaggaggaggaggacgaggacgtggacctggcccaggtgctggcctacctgctgagaagaggccaggtgagactggtgcagggcggcggcgccgccaacctgcagttcatccaggccctgctggacagcgaggaggagaacgacagagcctgggacggcagactgggcgacagatacaacccccccgtggacgccacccccgacaccagagagctggagttcaacgagatcaagacccaggtggagctggccaccggccagctgggcctgagaagagccgcccagaagcacagcttccccagaatgctgcaccagagagagagaggcctgtgccacagaggcagcttcagcctgggcgagcagagcagagtgatcagccacttcctgcccaacgacctgggcttcaccgacagctacagccagaaggccttctgcggcatctacagcaaggacggccagatcttcatgagcgcctgccaggaccagaccatcagactgtacgactgcagatacggcagattcagaaagttcaagagcatcaaggccagagacgtgggctggagcgtgctggacgtggccttcacccccgacggcaaccacttcctgtacagcagctggagcgactacatccacatctgcaacatctacggcgagggcgacacccacaccgccctggacctgagacccgacgagagaagattcgccgtgttcagcatcgccgtgagcagcgacggcagagaggtgctgggcggcgccaacgacggctgcctgtacgtgttcgacagagagcagaacagaagaaccctgcagatcgagagccacgaggacgacgtgaacgccgtggccttcgccgacatcagcagccagatcctgttcagcggcggcgacgacgccatctgcaaggtgtgggacagaagaaccatgagagaggacgaccccaagcccgtgggcgccctggccggccaccaggacggcatcaccttcatcgacagcaagggcgacgccagatacctgatcagcaacagcaaggaccagaccatcaagctgtgggacatcagaagattcagcagcagagagggcatggaggccagcagacaggccgccacccagcagaactgggactacagatggcagcaggtgcccaagaaggcctggagaaagctgaagctgcccggcgacagcagcctgatgacctacagaggccacggcgtgctgcacaccctgatcagatgcagattcagccccatccacagcaccggccagcagttcatctacagcggctgcagcaccggcaaggtggtggtgtacgacctgctgagcggccacatcgtgaagaagctgaccaaccacaaggcctgcgtgagagacgtgagctggcaccccttcgaggagaagatcgtgagcagcagctgggacggcaacctgagactgtggcagtacagacaggccgagtacttccaggacgacatgcccgagagcgaggagtgcgccagcgcccccgcccccgtgccccagagcagcacccccttcagcagcccccagtag

SEQ ID NO: 78493 - DNA, 369 bp, synthetic construct
  misc_feature 1..369: note = Description of Artificial Sequence: Synthetic coding sequence
  source 1..369: mol_type = other DNA
atgggcagcagaaacagcagcagcgccggcagcggcagcggcgaccccagcgagggcctgcccagaagaggcgccggcctgagaagaagcgaggaggaggaggaggaggacgaggacgtggacctggcccaggtgctggcctacctgctgagaagaggccaggtgagactggtgcagggcggcggcgccgccaacctgcagttcatccaggccctgctggacagcgaggaggagaacgacagagcctgggacggcagactgggcgacagatacaacccccccgtggacgccacccccgacaccagagagctggagttcaacgagatcaagacccaggtggagctggccaccggccagctgggcctgtag

SEQ ID NO: 78494 - DNA, 222 bp, synthetic construct
  misc_feature 1..222: note = Description of Artificial Sequence: Synthetic coding sequence
  source 1..222: mol_type = other DNA
atgggcagcagaaacagcagcagcgccggcagcggcagcggcgaccccagcgagggcctgcccagaagaggcgccggcctgagaagaagcgaggaggaggaggaggaggacgaggacgtggacctggcccaggtgctggcctacctgctgagaagaggccaggtgagactggtgcagggcggcggcgccgccaacctgcagttcatccaggccctgctgtag

SEQ ID NO: 78495 - DNA, 282 bp, synthetic construct
  misc_feature 1..282: note = Description of Artificial Sequence: Synthetic coding sequence
  source 1..282: mol_type = other DNA
atgggcagcagaaacagcagcagcgccggcagcggcagcggcgaccccagcgagggcctgcccagaagaggcgccggcctgagaagaagcgaggaggaggaggaggaggacgaggacgtggacctggcccaggtgctggcctacctgctgagaagaggccaggtgagactggtgcagggcggcggcgccgccaacctgcagttcatccaggccctgctggacagcgaggaggagaacgacagagcctgggacggcagactgggcgacagatacaacccctag

SEQ ID NO: 78496 - DNA, 327 bp, synthetic construct
  misc_feature 1..327: note = Description of Artificial Sequence: Synthetic coding sequence
  source 1..327: mol_type = other DNA
atgggcagcagaaacagcagcagcgccggcagcggcagcggcgaccccagcgagggcctgcccagaagaggcgccggcctgagaagaagcgaggaggaggaggaggaggacgaggacgtggacctggcccaggtgctggcctacctgctgagaagaggccaggtgagactggtgcagggcggcggcgccgccaacctgcagttcatccaggccctgctggacagcgaggaggagaacgacagagcctgggacggcagactgggcgacagatacaacccccccgtggacgccacccccgacaccagagagctggagttcaacgagtag

SEQ ID NO: 78497 - DNA, 1641 bp, synthetic construct; identical to SEQ ID NO: 78492
  misc_feature 1..1641: note = Description of Artificial Sequence: Synthetic coding sequence
  source 1..1641: mol_type = other DNA

SEQ ID NO: 78498 - DNA, 273 bp, synthetic construct
  misc_feature 1..273: note = Description of Artificial Sequence: Synthetic coding sequence
  source 1..273: mol_type = other DNA
atgggcagcagaaacagcagcagcgccggcagcggcagcggcgaccccagcgagggcctgcccagaagaggcgccggcctgagaagaagcgaggaggaggaggaggaggacgaggacgtggacctggcccaggccctgctggacagcgaggaggagaacgacagagcctgggacggcagactgggcgacagatacaacccccccgtggacgccacccccgacaccagagagctggagttcaacgagatcaagacccaggtggagctggcctag

SEQ ID NO: 78499 - DNA, 93 bp, synthetic construct
  misc_feature 1..93: note = Description of Artificial Sequence: Synthetic coding sequence
  source 1..93: mol_type = other DNA
atgggcagcagaaacagcagcagcgccggcagcggcagcggcgaccccagcgagggcctgcccagaagaggcgccggcctgagaagaagctag

SEQ ID NO: 78500 - DNA, 429 bp, synthetic construct
  misc_feature 1..429: note = Description of Artificial Sequence: Synthetic coding sequence
  source 1..429: mol_type = other DNA
atgggcagcagaaacagcagcagcgccggcagcggcagcggcgaccccagcgagggcctgcccagaagaggcgccggcctgagaagaagcgaggaggaggaggaggaggacgaggacgtggacctggcccaggtgctggcctacctgctgagaagaggccaggtgagactggtgcagggcggcggcgccgccaacctgcagttcatccaggccctgctggacagcgaggaggagaacgacagagcctgggacggcagactgggcgacagatacaacccccccgtggacgccacccccgacaccagagagctggagttcaacgagatcaagacccaggtggagctggccaccggccagctgggcctgagaagagccgcccagaagcacagcttccccagaatgctgcaccagagagagagaggcctgtag

SEQ ID NO: 78501 - DNA, 204 bp, synthetic construct
  misc_feature 1..204: note = Description of Artificial Sequence: Synthetic coding sequence
  source 1..204: mol_type = other DNA
atgggcagcagaaacagcagcagcgccggcagcggcagcggcgaccccagcgagggcctgcccagaagaggcgccggcctgagaagaagcgaggaggaggaggaggaggacgaggacgtggacctggcccagagacccagcgaggtgggcgccggcagaagatgcagcaagttcaccatccacagcggccccctgggcctgtag

SEQ ID NO: 78502 - DNA, 321 bp, synthetic construct
  misc_feature 1..321: note = Description of Artificial Sequence: Synthetic coding sequence
  source 1..321: mol_type = other DNA
atgggcagcagaaacagcagcagcgccggcagcggcagcggcgaccccagcgagggcctgcccagaagaggcgccggcctgagaagaagcgaggaggaggaggaggaggacgaggacgtggacctggcccaggtgctggcctacctgctgagaagacccagctggacccagagaaagagaatgaccgagctgggcatggtggtgctgggcatcgacaccacccacctgtggatgctgcccctgacccccggcagctggaacagcatgagaagcagacacaagtggaactggccccagggcagctggggcctgggcggctag

SEQ ID NO: 78503 - DNA, 387 bp, synthetic construct
  misc_feature 1..387: note = Description of Artificial Sequence: Synthetic coding sequence
  source 1..387: mol_type = other DNA
atgggcagcagaaacagcagcagcgccggcagcggcagcggcgaccccagcgagggcctgcccagaagaggcgccggcctgagaagaagcgaggaggaggaggaggaggacgaggacgtggacctggcccaggccctgctggacagcgaggaggagaacgacagagcctgggacggcagactgggcgacagatacaacccccccgtggacgccacccccgacaccagagagctggagttcaacgagatcaagacccaggtggagctggccaccggccagctgggcctgagaagagccgcccagaagcacagcttccccagaatgctgcaccagagagagagaggcctgtgccacagaggcagcttcagcctgggcgagcagagctag

SEQ ID NO: 78504 - DNA, 465 bp, synthetic construct
  misc_feature 1..465: note = Description of Artificial Sequence: Synthetic coding sequence
  source 1..465: mol_type = other DNA
atgggcagcagaaacagcagcagcgccggcagcggcagcggcgaccccagcgagggcctgcccagaagaggcgccggcctgagaagaagcgaggaggaggaggaggaggacgaggacgtggacctggcccaggtgctggcctacctgctgagaagaggccaggtgagactggtgcagggcggcggcgccgccaacctgcagttcatccaggccctgctggacagcgaggaggagaacgacagagcctgggacggcagactgggcgacagatacaacccccccgtggacgccacccccgacaccagagagctggagttcaacgagatcaagacccaggtggagctggccaccggccagctgggcctgagaagagccgcccagaagcacagcttccccagaatgctgcaccagagagagagaggcctgtgccacagaggcagcttcagcctgggcgagcagagctag

SEQ ID NO: 78505 - DNA, 2829 bp, synthetic construct
  misc_feature 1..2829: note = Description of Artificial Sequence: Synthetic coding sequence
  source 1..2829: mol_type = other DNA
atgaagagaagagccggcctgggcggcagcatgagaagcgtggtgggcttcctgagccagagaggcctgcacggcgaccccctgctgacccaggacttccagagaagaagactgagaggctgcagaaacctgtacaagaaggacctgctgggccacttcggctgcgtgaacgccatcgagttcagcaacaacggcggccagtggctggtgagcggcggcgacgacagaagagtgctgctgtggcacatggagcaggccatccacagcagagtgaagcccatccagctgaagggcgagcaccacagcaacatcttctgcctggccttcaacagcggcaacaccaaggtgttcagcggcggcaacgacgagcaggtgatcctgcacgacgtggagagcagcgagaccctggacgtgttcgcccacgaggacgccgtgtacggcctgagcgtgagccccgtgaacgacaacatcttcgccagcagcagcgacgacggcagagtgctgatctgggacatcagagagagcccccacggcgagcccttctgcctggccaactaccccagcgccttccacagcgtgatgttcaaccccgtggagcccagactgctggccaccgccaacagcaaggagggcgtgggcctgtgggacatcagaaagccccagagcagcctgctgagatacggcggcaacctgagcctgcagagcgccatgagcgtgagattcaacagcaacggcacccagctgctggccctgagaagaagactgccccccgtgctgtacgacatccacagcagactgcccgtgttccagttcgacaaccagggctacttcaacagctgcaccatgaagagctgctgcttcgccggcgacagagaccagtacatcctgagcggcagcgacgacttcaacctgtacatgtggagaatccccgccgaccccgaggccggcggcatcggcagagtggtgaacggcgccttcatggtgctgaagggccacagaagcatcgtgaaccaggtgagattcaacccccacacctacatgatctgcagcagcggcgtggagaagatcatcaagatctggagcccctacaagcagcccggctgcaccggcgacctggacggcagaatcgaggacgacagcagatgcctgtacacccacgaggagtacatcagcctggtgctgaacagcggcagcggcctgagccacgactacgccaaccagagcgtgcaggaggaccccagaatgatggccttcttcgacagcctggtgagaagagagatcgagggctggagcagcgacagcgacagcgacctgagcgagagcaccatcctgcagctgcacgccggcgtgagcgagagaagcggctacaccgacagcgagagcagcgccagcctgcccagaagccccccccccaccgtggacgagagcgccgacaacgccttccacctgggccccctgagagtgaccaccaccaacaccgtggccagcaccccccccacccccacctgcgaggacgccgccagcagacagcagagactgagcgccctgagaagataccaggacaagagactgctggccctgagcaacgagagcgacagcgaggagaacgtgtgcgaggtggagctggacaccgacctgttccccagacccagaagccccagccccgaggacgagagcagcagcagcagcagcagcagcagcagcgaggacgaggaggagctgaacgagagaagagccagcacctggcagagaaacgccatgagaagaagacagaagaccaccagagaggacaagcccagcgcccccatcaagcccaccaacacctacatcggcgaggacaactacgactacccccagatcaaggtggacgacctgagcagcagccccaccagcagccccgagagaagcaccagcaccctggagatccagcccagcagagccagccccaccagcgacatcgagagcgtggagagaaagatctacaaggcctacaagtggctgagatacagctacatcagctacagcaacaacaaggacggcgagaccagcctggtgaccggcgaggccgacgagggcagagccggcaccagccacaaggacaaccccgcccccagcagcagcaaggaggcctgcctgaacatcgccatggcccagagaaaccaggacctgccccccgagggctgcagcaaggacaccttcaaggaggagacccccagaacccccagcaacggccccggccacgagcacagcagccacgcctgggccgaggtgcccgagggcaccagccaggacaccggcaacagcggcagcgtggagcaccccttcgagaccaagaagctgaacggcaaggccctgagcagcagagccgaggagccccccagcccccccgtgcccaaggccagcggcagcaccctgaacagcggcagcggcaactgccccagaacccagagcgacgacagcgaggagagaagcctggagaccatctgcgccaaccacaacaacggcagactgcaccccagacccccccacccccacaacaacggccagaacctgggcgagctggaggtggtggcctacagcagccccggccacagcgacaccgacagagacaacagcagcctgaccggcaccctgctgcacaaggactgctgcggcagcgagatggcctgcgagacccccaacgccggcaccagagaggaccccaccgacacccccgccaccgacagcagcagagccgtgcacggccacagcggcctgaagagacagagaatcgagctggaggacaccgacagcgagaacagcagcagcgagaagaagctgaagacctag

SEQ ID NO: 78506 - DNA, 2583 bp, synthetic construct
  misc_feature 1..2583: note = Description of Artificial Sequence: Synthetic coding sequence
  source 1..2583: mol_type = other DNA
atggagcaggccatccacagcagagtgaagcccatccagctgaagggcgagcaccacagcaacatcttctgcctggccttcaacagcggcaacaccaaggtgttcagcggcggcaacgacgagcaggtgatcctgcacgacgtggagagcagcgagaccctggacgtgttcgcccacgaggacgccgtgtacggcctgagcgtgagccccgtgaacgacaacatcttcgccagcagcagcgacgacggcagagtgctgatctgggacatcagagagagcccccacggcgagcccttctgcctggccaactaccccagcgccttccacagcgtgatgttcaaccccgtggagcccagactgctggccaccgccaacagcaaggagggcgtgggcctgtgggacatcagaaagccccagagcagcctgctgagatacggcggcaacctgagcctgcagagcgccatgagcgtgagattcaacagcaacggcacccagctgctggccctgagaagaagactgccccccgtgctgtacgacatccacagcagactgcccgtgttccagttcgacaaccagggctacttcaacagctgcaccatgaagagctgctgcttcgccggcgacagagaccagtacatcctgagcggcagcgacgacttcaacctgtacatgtggagaatccccgccgaccccgaggccggcggcatcggcagagtggtgaacggcgccttcatggtgctgaagggccacagaagcatcgtgaaccaggtgagattcaacccccacacctacatgatctgcagcagcggcgtggagaagatcatcaagatctggagcccctacaagcagcccggctgcaccggcgacctggacggcagaatcgaggacgacagcagatgcctgtacacccacgaggagtacatcagcctggtgctgaacagcggcagcggcctgagccacgactacgccaaccagagcgtgcaggaggaccccagaatgatggccttcttcgacagcctggtgagaagagagatcgagggctggagcagcgacagcgacagcgacctgagcgagagcaccatcctgcagctgcacgccggcgtgagcgagagaagcggctacaccgacagcgagagcagcgccagcctgcccagaagccccccccccaccgtggacgagagcgccgacaacgccttccacctgggccccctgagagtgaccaccaccaacaccgtggccagcaccccccccacccccacctgcgaggacgccgccagcagacagcagagactgagcgccctgagaagataccaggacaagagactgctggccctgagcaacgagagcgacagcgaggagaacgtgtgcgaggtggagctggacaccgacctgttccccagacccagaagccccagccccgaggacgagagcagcagcagcagcagcagcagcagcagcgaggacgaggaggagctgaacgagagaagagccagcacctggcagagaaacgccatgagaagaagacagaagaccaccagagaggacaagcccagcgcccccatcaagcccaccaacacctacatcggcgaggacaactacgactacccccagatcaaggtggacgacctgagcagcagccccaccagcagccccgagagaagcaccagcaccctggagatccagcccagcagagccagccccaccagcgacatcgagagcgtggagagaaagatctacaaggcctacaagtggctgagatacagctacatcagctacagcaacaacaaggacggcgagaccagcctggtgaccggcgaggccgacgagggcagagccggcaccagccacaaggacaaccccgcccccagcagcagcaaggaggcctgcctgaacatcgccatggcccagagaaaccaggacctgccccccgagggctgcagcaaggacaccttcaaggaggagacccccagaacccccagcaacggccccggccacgagcacagcagccacgcctgggccgaggtgcccgagggcaccagccaggacaccggcaacagcggcagcgtggagcaccccttcgagaccaagaagctgaacggcaaggccctgagcagcagagccgaggagccccccagcccccccgtgcccaaggccagcggcagcaccctgaacagcggcagcggcaactgccccagaacccagagcgacgacagcgaggagagaagcctggagaccatctgcgccaaccacaacaacggcagactgcaccccagacccccccacccccacaacaacggccagaacctgggcgagctggaggtggtggcctacagcagccccggccacagcgacaccgacagagacaacagcagcctgaccggcaccctgctgcacaaggactgctgcggcagcgagatggcctgcgagacccccaacgccggcaccagagaggaccccaccgacacccccgccaccgacagcagcagagccgtgcacggccacagcggcctgaagagacagagaatcgagctggaggacaccgacagcgagaacagcagcagcgagaagaagctgaagacctag

SEQ ID NO: 78507 - DNA, 633 bp, synthetic construct
  misc_feature 1..633: note = Description of Artificial Sequence: Synthetic coding sequence
  source 1..633: mol_type = other DNA
atggagcaggccatccacagcagagtgaagcccatccagctgaagggcgagcaccacagcaacatcttctgcctggccttcaacagcggcaacaccaaggtgttcagcggcggcaacgacgagcaggtgatcctgcacgacgtggagagcgagaccctggacgtgttcgcccacgaggacgccgtgtacggcctgagcgtgagccccgtgaacgacaacatcttcgccagcagcagcgacgacggcagagtgctgatctgggacatcagagagagcccccacggcgagcccttctgcctggccaactaccccagcgccttccacagcgtgatgttcaaccccgtggagcccagactgctggccaccgccaacagcaaggagggcgtgggcctgtgggacatcagaaagccccagagcagcctgctgagatacggcggcaacctgagcctgcagagcgccatgagcgtgagattcaacagcaacggcacccagctgctggccctgagaagaagactgccccccgtgctgtacgacatccacagcagactgcccgtgttccagttcgacaaccagggctacttcaacagctgcaccatgaagagctgctgcttcgccggcgacagagaccagtag

SEQ ID NO: 78508 - DNA, 2583 bp, synthetic construct; identical to SEQ ID NO: 78506
  misc_feature 1..2583: note = Description of Artificial Sequence: Synthetic coding sequence
  source 1..2583: mol_type = other DNA

SEQ ID NO: 78509 - DNA, 357 bp, synthetic construct
  misc_feature 1..357: note = Description of Artificial Sequence: Synthetic coding sequence
  source 1..357: mol_type = other DNA
atgcccttcctggagctggacaccaacctgcccgccaacagagtgcccgccggcctggagaagagactgtgcgccgccgccgccagcatcctgggcaagcccgccgacagagtgaacgtgaccgtgagacccggcctggccatggccctgagcggcagcaccgagccctgcgcccagctgagcatcagcagcatcggcgtggtgggcaccgccgaggacaacagaagccacagcgcccacttcttcgagttcctgaccaaggagctggccctgggccaggacagaatcctgatcagattcttccccctggagagctggcagatcggcaagatcggcaccgtgatgaccttcctgtag

SEQ ID NO: 78510 - DNA, 357 bp, synthetic construct; identical to SEQ ID NO: 78509
  misc_feature 1..357: note = Description of Artificial Sequence: Synthetic coding sequence
  source 1..357: mol_type = other DNA

SEQ ID NO: 78511 - DNA, 399 bp, synthetic construct
  misc_feature 1..399: note = Description of Artificial Sequence: Synthetic coding sequence
  source 1..399: mol_type = other DNA
atgcagctgttcctgctggccgtgagcgtgcccctgcccgccatgcccttcctggagctggacaccaacctgcccgccaacagagtgcccgccggcctggagaagagactgtgcgccgccgccgccagcatcctgggcaagcccgccgacagagtgaacgtgaccgtgagacccggcctggccatggccctgagcggcagcaccgagccctgcgcccagctgagcatcagcagcatcggcgtggtgggcaccgccgaggacaacagaagccacagcgcccacttcttcgagttcctgaccaaggagctggccctgggccaggacagaatcctgatcagattcttccccctggagagctggcagatcggcaagatcggcaccgtgatgaccttcctgtag

SEQ ID NO: 78512 - DNA, 348 bp, synthetic construct
  misc_feature 1..348: note = Description of Artificial Sequence: Synthetic coding sequence
  source 1..348: mol_type = other DNA
atgcccatgttcatcgtgaacaccaacgtgcccagagccagcgtgcccgacggcttcctgagcgagctgacccagcagctggcccaggccaccggcaagcccccccagtacatcgccgtgcacgtggtgcccgaccagctgatggccttcggcggcagcagcgagccctgcgccctgtgcagcctgcacagcatcggcaagatcggcggcgcccagaacagaagctacagcaagctgctgtgcggcctgctggccgagagactgagaatcagccccgacagagtgtacatcaactactacgacatgaacgccgccaacgtgggctggaacaacagcaccttcgcctag

SEQ ID NO: 78513 - DNA, 1224 bp, synthetic construct
  misc_feature 1..1224: note = Description of Artificial Sequence: Synthetic coding sequence
  source 1..1224: mol_type = other DNA
atgaacaacagcggcgccgacgagatcggcaagctgttcgtgggcggcctggactggagcaccacccaggagaccctgagaagctacttcagccagtacggcgaggtggtggactgcgtgatcatgaaggacaagaccaccaaccagagcagaggcttcggcttcgtgaagttcaaggaccccaactgcgtgggcaccgtgctggccagcagaccccacaccctggacggcagaaacatcgaccccaagccctgcacccccagaggcatgcagcccgagagaaccagacccaaggagggctggcagaagggccccagaagcgacaacagcaagagcaacaagatcttcgtgggcggcatcccccacaactgcggcgagaccgagctgagagagtacttcaagaagttcggcgtggtgaccgaggtggtgatgatctacgacgccgagaagcagagacccagaggcttcggcttcatcaccttcgaggacgagcagagcgtggaccaggccgtgaacatgcacttccacgacatcatgggcaagaaggtggaggtgaagagagccgagcccagagacagcaagagccaggcccccggccagcccggcgccagccagtggggcagcagagtggtgcccaacgccgccaacggctgggccggccagcccccccccacctggcagcagggctacggcccccagggcatgtgggtgcccgccggccaggccatcggcggctacggccccccccccgccggcagaggcgccccccccccccccccccccttcaccagctacatcgtgagcaccccccccggcggcttcccccccccccagggcttcccccagggctacggcgcccccccccagttcagcttcggctacggcccccccccccccccccccgaccagttcgccccccccggcgtgccccccccccccgccacccccggcgccgcccccctggccttcccccccccccccagccaggccgcccccgacatgagcaagccccccaccgcccagcccgacttcccctacggccagtacgccggctacggccaggacctgagcggcttcggccagggcttcagcgaccccagccagcagccccccagctacggcggccccagcgtgcccggcagcggcggcccccccgccggcggcagcggcttcggcagaggccagaaccacaacgtgcagggcttccacccctacagaagatag

SEQ ID NO: 78514 - DNA, 2223 bp, synthetic construct
  misc_feature 1..2223: note = Description of Artificial Sequence: Synthetic coding sequence
  source 1..2223: mol_type = other DNA
atggccgccttcagcgagatgggcgtgatgcccgagatcgcccaggccgtggaggagatggactggctgctgcccaccgacatccaggccgagagcatccccctgatcctgggcggcggcgacgtgctgatggccgccgagaccggcagcggcaagaccggcgccttcagcatccccgtgatccagatcgtgtacgagaccctgaaggaccagcaggagggcaagaagggcaagaccaccatcaagaccggcgccagcgtgctgaacaagtggcagatgaacccctacgacagaggcagcgccttcgccatcggcagcgacggcctgtgctgccagagcagagaggtgaaggagtggcacggctgcagagccaccaagggcctgatgaagggcaagcactactacgaggtgagctgccacgaccagggcctgtgcagagtgggctggagcaccatgcaggccagcctggacctgggcaccgacaagttcggcttcggcttcggcggcaccggcaagaagagccacaacaagcagttcgacaactacggcgaggagttcaccatgcacgacaccatcggctgctacctggacatcgacaagggccacgtgaagttcagcaagaacggcaaggacctgggcctggccttcgagatccccccccacatgaagaaccaggccctgttccccgcctgcgtgctgaagaacgccgagctgaagttcaacttcggcgaggaggagttcaagttcccccccaaggacggcttcgtggccctgagcaaggcccccgacggctacatcgtgaagagccagcacagcggcaacgcccaggtgacccagaccaagttcctgcccaacgcccccaaggccctgatcgtggagcccagcagagagctggccgagcagaccctgaacaacatcaagcagttcaagaagtacatcgacaaccccaagctgagagagctgctgatcatcggcggcgtggccgccagagaccagctgagcgtgctggagaacggcgtggacatcgtggtgggcacccccggcagactggacgacctggtgagcaccggcaagctgaacctgagccaggtgagattcctggtgctggacgaggccgacggcctgctgagccagggctacagcgacttcatcaacagaatgcacaaccagatcccccaggtgaccagcgacggcaagagactgcaggtgatcgtgtgcagcgccaccctgcacagcttcgacgtgaagaagctgagcgagaagatcatgcacttccccacctgggtggacctgaagggcgaggacagcgtgcccgacaccgtgcaccacgtggtggtgcccgtgaaccccaagaccgacagactgtgggagagactgggcaagagccacatcagaaccgacgacgtgcacgccaaggacaacaccagacccggcgccaacagccccgagatgtggagcgaggccatcaagatcctgaagggcgagtacgccgtgagagccatcaaggagcacaagatggaccaggccatcatcttctgcagaaccaagatcgactgcgacaacctggagcagtacttcatccagcagggcggcggccccgacaagaagggccaccagttcagctgcgtgtgcctgcacggcgacagaaagccccacgagagaaagcagaacctggagagattcaagaagggcgacgtgagattcctgatctgcaccgacgtggccgccagaggcatcgacatccacggcgtgccctacgtgatcaacgtgaccctgcccgacgagaagcagaactacgtgcacagaatcggcagagtgggcagagccgagagaatgggcctggccatcagcctggtggccaccgagaaggagaaggtgtggtaccacgtgtgcagcagcagaggcaagggctgctacaacaccagactgaaggaggacggcggctgcaccatctggtacaacgagatgcagctgctgagcgagatcgaggagcacctgaactgcaccatcagccaggtggagcccgacatcaaggtgcccgtggacgagttcgacggcaaggtgacctacggccagaagagagccgccggcggcggcagctacaagggccacgtggacatcctggcccccaccgtgcaggagctggccgccctggagaaggaggcccagaccagcttcctgcacctgggctacctgcccaaccagctgttcagaaccttctag

SEQ ID NO: 78515 - DNA, 51 bp, synthetic construct
  misc_feature 1..51: note = Description of Artificial Sequence: Synthetic coding sequence
  source 1..51: mol_type = other DNA
atggccgccttcagcgagatgggcgtgatgcccgagatcgcccaggcctag

SEQ ID NO: 78516 - DNA, 1869 bp, synthetic construct
  misc_feature 1..1869: note = Description of Artificial Sequence: Synthetic coding sequence
  source 1..1869: mol_type = other DNA
atggccgccttcagcgagatgggcgtgatgcccgagatcgcccaggccgtggaggagatggactggctgctgcccaccgacatccaggccgagagcatccccctgatcctgggcggcggcgacgtgctgatggccgccgagaccggcagcggcaagaccggcgccttcagcatccccgtgatccagatcgtgtacgagaccctgaaggaccagcaggagggcaagaagggcaagaccaccatcaagaccggcgccagcgtgctgaacaagtggcagatgaacccctacgacagagaggtgaaggagtggcacggctgcagagccaccaagggcctgatgaagggcaagcactactacgaggtgagctgccacgaccagggcctgtgcagagtgggctggagcaccatgcaggccagcctggacctgggcaccgacaagttcggcttcggcttcggcggcaccggcaagaagagccacaacaagcagttcgacaactacggcgaggagttcaccatgcacgacaccatcggctgctacctggacatcgacaagggccacgtgaagttcagcaagaacggcaaggacctgggcctggccttcgagatccccccccacatgaagaaccaggccctgttccccgcctgcgtgctgaagaacgccgagctgaagttcaacttcggcgaggaggagttcaagttcccccccaaggacggcttcgtggccctgagcaaggcccccgacggctacatcgtgaagagccagcacagcggcaacgcccaggtgacccagaccaagttcctgcccaacgcccccaaggccctgatcgtggagcccagcagagagctggccgagcagaccctgaacaacatcaagcagttcaagaagtacatcgacaaccccaagctgagagagctgctgatcatcggcggcgtggccgccagagaccagctgagcgtgctggagaacggcgtggacatcgtggtgggcacccccggcagactggacgacctggtgagcaccggcaagctgaacctgagccaggtgagattcctggtgctggacgaggccgacggcctgctgagccagggctacagcgacttcatcaacagaatgcacaaccagatcccccaggtgaccagcgacggcaagagactgcaggtgatcgtgtgcagcgccaccctgcacagcttcgacgtgaagaagctgagcgagaagatcatgcacttccccacctgggtggacctgaagggcgaggacagcgtgcccgacaccgtgcaccacgtggtggtgcccgtgaaccccaagaccgacagactgtgggagagactgggcaagagccacatcagaaccgacgacgtgcacgccaaggacaacaccagacccggcgccaacagccccgagatgtggagcgaggccatcaagatcctgaagggcgagtacgccgtgagagccatcaaggagcacaagatggaccaggccatcatcttctgcagaaccaagatcgactgcgacaacctggagcagtacttcatccagcagggcggcggccccgacaagaagggccaccagttcagctgcgtgtgcctgcacggcgacagaaagccccacgagagaaagcagaacctggagagattcaagaagggcgacgtgagattcctgatctgcaccgacgtggccgccagaggcatcgacatccacggcgtgccctacgtgatcaacgtgaccctgcccgacgagaagcagaactacgtgcacagaatcggcagagtgggcagagccgagagaatgggcctggccatcagcctggtggccaccgagaaggagaaggtgtggtaccacatggtgcagagagacgccgtgaccatctag

SEQ ID NO: 78517 - DNA, 2628 bp, synthetic construct
  misc_feature 1..2628: note = Description of Artificial Sequence: Synthetic coding sequence
  source 1..2628: mol_type = other DNA
atgggcaagaccgccaacagccccggcagcggcgccagacccgaccccgtgagaagcttcaacagatggaagaagaagcacagccacagacagaacaagaagaagcagctgagaaagcagctgaagaagcccgagtggcaggtggagagagagagcatcagcagactgatgcagaactacgagaagatcaacgtgaacgagatcaccagattcagcgacttccccctgagcaagaagaccctgaagggcctgcaggaggcccagtacagactggtgaccgagatccagaagcagaccatcggcctggccctgcagggcaaggacgtgctgggcgccgccaagaccggcagcggcaagaccctggccttcctggtgcccgtgctggaggccctgtacagactgcagtggaccagcaccgacggcctgggcgtgctgatcatcagccccaccagagagctggcctaccagaccttcgaggtgctgagaaaggtgggcaagaaccacgacttcagcgccggcctgatcatcggcggcaaggacctgaagcacgaggccgagagaatcaacaacatcaacatcctggtgtgcacccccggcagactgctgcagcacatggacgagaccgtgagcttccacgccaccgacctgcagatgctggtgctggacgaggccgacagaatcctggacatgggcttcgccgacaccatgaacgccgtgatcgagaacctgcccaagaagagacagaccctgctgttcagcgccacccagaccaagagcgtgaaggacctggccagactgagcctgaagaaccccgagtacgtgtgggtgcacgagaaggccaagtacagcacccccgccaccctggagcagaactacatcgtgtgcgagctgcagcagaagatcagcgtgctgtacagcttcctgagaagccacctgaagaagaagagcatcgtgttcttcagcagctgcaaggaggtgcagtacctgtacagagtgttctgcagactgagacccggcgtgagcatcctggccctgcacggcagacagcagcagatgagaagaatggaggtgtacaacgagttcgtgagaaagagagccgccgtgctgttcgccaccgacatcgccgccagaggcctggacttccccgccgtgaactgggtgctgcagttcgactgccccgaggacgccaacacctacatccacagagccggcagaaccgccagatacaaggaggacggcgaggccctgctgatcctgctgcccagcgagaaggccatggtgcagcagctgctgcagaagaaggtgcccgtgaaggagatcaagatcaaccccgagaagctgatcgacgtgcagaagaagctggagagcatcctggcccaggaccaggacctgaaggagagagcccagagatgcttcgtgagctacgtgagaagcgtgtacctgatgaaggacaaggaggtgttcgacgtgagcaagctgcccatccccgagtacgccctgagcctgggcctggccgtggcccccagagtgagattcctgcagaagatgcagaagcagcccaccaaggagctggtgagaagccaggccgacaaggtgatcgagcccagagcccccagcctgaccaacgacgaggtggaggagttcagagcctacttcaacgagaagatgagcatcctgcagaagggcggcaagagactggagggcaccgagcacagacaggacaacgacaccggcaacgaggagcaggaggaggaggaggacgacgaggaggagatggaggagaagctggccaaggccaagggcagccaggcccccagcctgcccaacaccagcgaggcccagaagatcaaggaggtgcccacccagttcctggacagagacgaggaggaggaggacgccgacttcctgaaggtgaagagacacaacgtgttcggcctggacctgaaggacgagaagaccctgcagaagaaggagcccagcaagagcagcatcaagaagaagatgaccaaggtggccgaggccaagaaggtgatgaagagaaacttcaaggtgaacaagaagatcaccttcaccgacgagggcgagctggtgcagcagtggccccagatgcagaagagcgccatcaaggacgccgaggaggacgacgacaccggcggcatcaacctgcacaaggccaaggagagactgcaggaggaggacaagttcgacaaggaggagtacagaaagaagatcaaggccaagcacagagagaagagactgaaggagagagaggccagaagagaggccaacaagagacaggccaaggccaaggacgaggaggaggccttcctggactggagcgacgacgacgacgacgacgacgacggcttcgaccccagcaccctgcccgaccccgacaagtacagaagcagcgaggacagcgacagcgaggacatggagaacaagatcagcgacaccaagaagaagcagggcatgaagaagagaagcaacagcgaggtggaggacgtgggccccaccagccacaacagaaagaaggccagatgggacaccctggagcccctggacaccggcctgagcctggccgaggacgaggagctggtgctgcacctgctgagaagccagagctag

SEQ ID NO: 78518 - DNA, 2346 bp, synthetic construct
  misc_feature 1..2346: note = Description of Artificial Sequence: Synthetic coding sequence
  source 1..2346: mol_type = other DNA
atgggcaagaccgccaacagccccggcagcggcgccagacccgaccccgtgagaagcttcaacagatggaagaagaagcacagccacagacagaacaagaagaagcagctgagaaagcagctgaagaagcccgagtggcaggtggagagagagagcatcagcagactgatgcagaactacgagaagatcaacgtgaacgagatcaccagattcagcgacttccccctgagcaagaagaccctgaagggcctgcaggaggcccagtacagactggtgaccgagatccagaagcagaccatcggcctggccctgcagggcaaggacgtgctgggcgccgccaagaccggcagcggcaagaccctggccttcctggtgcccgtgaacgaggccgacagaatcctggacatgggcttcgccgacaccatgaacgccgtgatcgagaacctgcccaagaagagacagaccctgctgttcagcgccacccagaccaagagcgtgaaggacctggccagactgagcctgaagaaccccgagtacgtgtgggtgcacgagaaggccaagtacagcacccccgccaccctggagcagaactacatcgtgtgcgagctgcagcagaagatcagcgtgctgtacagcttcctgagaagccacctgaagaagaagagcatcgtgttcttcagcagctgcaaggaggtgcagtacctgtacagagtgttctgcagactgagacccggcgtgagcatcctggccctgcacggcagacagcagcagatgagaagaatggaggtgtacaacgagttcgtgagaaagagagccgccgtgctgttcgccaccgacatcgccgccagaggcctggacttccccgccgtgaactgggtgctgcagttcgactgccccgaggacgccaacacctacatccacagagccggcagaaccgccagatacaaggaggacggcgaggccctgctgatcctgctgcccagcgagaaggccatggtgcagcagctgctgcagaagaaggtgcccgtgaaggagatcaagatcaaccccgagaagctgatcgacgtgcagaagaagctggagagcatcctggcccaggaccaggacctgaaggagagagcccagagatgcttcgtgagctacgtgagaagcgtgtacctgatgaaggacaaggaggtgttcgacgtgagcaagctgcccatccccgagtacgccctgagcctgggcctggccgtggcccccagagtgagattcctgcagaagatgcagaagcagcccaccaaggagctggtgagaagccaggccgacaaggtgatcgagcccagagcccccagcctgaccaacgacgaggtggaggagttcagagcctacttcaacgagaagatgagcatcctgcagaagggcggcaagagactggagggcaccgagcacagacaggacaacgacaccggcaacgaggagcaggaggaggaggaggacgacgaggaggagatggaggagaagctggccaaggccaagggcagccaggcccccagcctgcccaacaccagcgaggcccagaagatcaaggaggtgcccacccagttcctggacagagacgaggaggaggaggacgccgacttcctgaaggtgaagagacacaacgtgttcggcctggacctgaaggacgagaagaccctgcagaagaaggagcccagcaagagcagcatcaagaagaagatgaccaaggtggccgaggccaagaaggtgatgaagagaaacttcaaggtgaacaagaagatcaccttcaccgacgagggcgagctggtgcagcagtggccccagatgcagaagagcgccatcaaggacgccgaggaggacgacgacaccggcggcatcaacctgcacaaggccaaggagagactgcaggaggaggacaagttcgacaaggaggagtacagaaagaagatcaaggccaagcacagagagaagagactgaaggagagagaggccagaagagaggccaacaagagacaggccaaggccaaggacgaggaggaggccttcctggactggagcgacgacgacgacgacgacgacgacggcttcgaccccagcaccctgcccgaccccgacaagtacagaagcagcgaggacagcgacagcgaggacatggagaacaagatcagcgacaccaagaagaagcagggcatgaagaagagaagcaacagcgaggtggaggacgtgggccccaccagccacaacagaaagaaggccagatgggacaccctggagcccctggacaccggcctgagcctggccgaggacgaggagctggtgctgcacctgctgagaagccagagctag

SEQ ID NO: 78519 - DNA, 1959 bp, synthetic construct
  misc_feature 1..1959: note = Description of Artificial Sequence: Synthetic coding sequence
  source 1..1959: mol_type = other DNA
atgagaggcggcggcttcggcgacagagacagagacagagacagaggcggcttcggcgccagaggcggcggcggcctgccccccaagaagttcggcaaccccggcgagagactgagaaagaagaagtgggacctgagcgagctgcccaagttcgagaagaacttctacgtggagcaccccgaggtggccagactgaccccctacgaggtggacgagctgagaagaaagaaggagatcaccgtgagaggcggcgacgtgtgccccaagcccgtgttcgccttccaccacgccaacttcccccagtacgtgatggacgtgctgatggaccagcacttcaccgagcccacccccatccagtgccagggcttccccctggccctgagcggcagagacatggtgggcatcgcccagaccggcagcggcaagaccctggcctacctgctgcccgccatcgtgcacatcaaccaccagccctacctggagagaggcgacggccccatctgcctggtgctggcccccaccagagagctggcccagcaggtgcagcaggtggccgacgactacggcaagtgcagcagactgaagagcacctgcatctacggcggcgcccccaagggcccccagatcagagacctggagagaggcgtggagatctgcatcgccacccccggcagactgatcgacttcctggagagcggcaagaccaacctgagaagatgcacctacctggtgctggacgaggccgacagaatgctggacatgggcttcgagccccagatcagaaagatcgtggaccagatcagacccgacagacagaccctgatgtggagcgccacctggcccaaggaggtgagacagctggccgaggacttcctgagagactacacccagatcaacgtgggcaacctggagctgagcgccaaccacaacatcctgcagatcgtggacgtgtgcatggagagcgagaaggaccacaagctgatccagctgatggaggagatcatggccgagaaggagaacaagaccatcatcttcgtggagaccaagagaagatgcgacgacctgaccagaagaatgagaagagacggctggcccgccatgtgcatccacggcgacaagagccagcccgagagagactgggtgctgaacgagttcagaagcggcaaggcccccatcctgatcgccaccgacgtggccagcagaggcctgggcttcgacgtggaggacgtgaagttcgtgatcaactacgactaccccaacagcagcgaggactacgtgcacagaatcggcagaaccgccagaagcaccaacaagggcaccgcctacaccttcttcacccccggcaacctgaagcaggccagagagctgatcaaggtgctggaggaggccaaccaggccatcaaccccaagctgatgcagctggtggaccacagaggcggcggcggcggcggcggcggcagaagcagatacagaaccaccagcagcgccaacaaccccaacctgatgtaccaggacgagtgcgacagaagactgagaggcgtgaaggacggcggcagaagagacagcgccagctacagagacagaagcgagaccgacagagccggctacgccaacggcagcggctacggcagccccaacagcgccttcggcgcccaggccggccagtacacctacggccagggcacctacggcgccgccgcctacggcaccagcagctacaccgcccaggagtacggcgccggcacctacggcgccagcagcaccaccagcaccggcagaagcagccagagcagcagccagcagttcagcggcatcggcagaagcggccagcagccccagcccctgatgagccagcagttcgcccagccccccggcgccaccaacatgatcggctacatgggccagaccgcctaccagtaccccccccccccccccccccccccccccagcagaaagtag

SEQ ID NO: 78520 - DNA, 2196 bp, synthetic construct
  misc_feature 1..2196: note = Description of Artificial Sequence: Synthetic coding sequence
  source 1..2196: mol_type = other DNA
ctgcccaccggcttcgtggcccccatcctgtgcgtgctgctgcccagccccaccagagaggccgccaccgtggccagcgccaccggcgacagcgccagcgagagagagagcgccgcccccgccgccgcccccaccgccgaggcccccccccccagcgtggtgaccagacccgagccccaggccctgcccagccccgccatcagagcccccctgcccgacctgtaccccttcggcaccatgagaggcggcggcttcggcgacagagacagagacagagacagaggcggcttcggcgccagaggcggcggcggcctgccccccaagaagttcggcaaccccggcgagagactgagaaagaagaagtgggacctgagcgagctgcccaagttcgagaagaacttctacgtggagcaccccgaggtggccagactgaccccctacgaggtggacgagctgagaagaaagaaggagatcaccgtgagaggcggcgacgtgtgccccaagcccgtgttcgccttccaccacgccaacttcccccagtacgtgatggacgtgctgatggaccagcacttcaccgagcccacccccatccagtgccagggcttccccctggccctgagcggcagagacatggtgggcatcgcccagaccggcagcggcaagaccctggcctacctgctgcccgccatcgtgcacatcaaccaccagccctacctggagagaggcgacggccccatctgcctggtgctggcccccaccagagagctggcccagcaggtgcagcaggtggccgacgactacggcaagtgcagcagactgaagagcacctgcatctacggcggcgcccccaagggcccccagatcagagacctggagagaggcgtggagatctgcatcgccacccccggcagactgatcgacttcctggagagcggcaagaccaacctgagaagatgcacctacctggtgctggacgaggccgacagaatgctggacatgggcttcgagccccagatcagaaagatcgtggaccagatcagacccgacagacagaccctgatgtggagcgccacctggcccaaggaggtgagacagctggccgaggacttcctgagagactacacccagatcaacgtgggcaacctggagctgagcgccaaccacaacatcctgcagatcgtggacgtgtgcatggagagcgagaaggaccacaagctgatccagctgatggaggagatcatggccgagaaggagaacaagaccatcatcttcgtggagaccaagagaagatgcgacgacctgaccagaagaatgagaagagacggctggcccgccatgtgcatccacggcgacaagagccagcccgagagagactgggtgctgaacgagttcagaagcggcaaggcccccatcctgatcgccaccgacgtggccagcagaggcctggacgtggaggacgtgaagttcgtgatcaactacgactaccccaacagcagcgaggactacgtgcacagaatcggcagaaccgccagaagcaccaacaagggcaccgcctacaccttcttcacccccggcaacctgaagcaggccagagagctgatcaaggtgctggaggaggccaaccaggccatcaaccccaagctgatgcagctggtggaccacagaggcggcggcggcggcggcggcaagggcggcagaagcagatacagaaccaccagcagcgccaacaaccccaacctgatgtaccaggacgagtgcgacagaagactgagaggcgtgaaggacggcggcagaagagacagcgccagctacagagacagaagcgagaccgacagagccggctacgccaacggcagcggctacggcagccccaacagcgccttcggcgcccaggccggccagtacacctacggccagggcacctacggcgccgccgcctacggcaccagcagctacaccgcccaggagtacggcgccggcacctacggcgccagcagcaccaccagcaccggcagaagcagccagagcagcagccagcagttcagcggcatcggcagaagcggccagcagccccagcccctgatgagccagcagttcgcccagccccccggcgccaccaacatgatcggctacatgggccagaccgcctaccagtaccccccccccccccccccccccccccccagcagaaagtag

SEQ ID NO: 78521 - DNA, 2190 bp, synthetic construct
  misc_feature 1..2190: note = Description of Artificial Sequence: Synthetic coding sequence
  source 1..2190: mol_type = other DNA
ctgcccaccggcttcgtggcccccatcctgtgcgtgctgctgcccagccccaccagagaggccgccaccgtggccagcgccaccggcgacagcgccagcgagagagagagcgccgcccccgccgccgcccccaccgccgaggcccccccccccagcgtggtgaccagacccgagccccaggccctgcccagccccgccatcagagcccccctgcccgacctgtaccccttcggcaccatgagaggcggcggcttcggcgacagagacagagacagagacagaggcggcttcggcgccagaggcggcggcggcctgccccccaagaagttcggcaaccccggcgagagactgagaaagaagaagtgggacctgagcgagctgcccaagttcgagaagaacttctacgtggagcaccccgaggtggccagactgaccccctacgaggtggacgagctgagaagaaagaaggagatcaccgtgagaggcggcgacgtgtgccccaagcccgtgttcgccttccaccacgccaacttcccccagtacgtgatggacgtgctgatggaccagcacttcaccgagcccacccccatccagtgccagggcttccccctggccctgagcggcagagacatggtgggcatcgcccagaccggcagcggcaagaccctggcctacctgctgcccgccatcgtgcacatcaaccaccagccctacctggagagaggcgacggccccatctgcctggtgctggcccccaccagagagctggcccagcaggtgcagcaggtggccgacgactacggcaagtgcagcagactgaagagcacctgcatctacggcggcgcccccaagggcccccagatcagagacctggagagaggcgtggagatctgcatcgccacccccggcagactgatcgacttcctggagagcggcaagaccaacctgagaagatgcacctacctggtgctggacgaggccgacagaatgctggacatgggcttcgagccccagatcagaaagatcgtggaccagatcagacccgacagacagaccctgatgtggagcgccacctggcccaaggaggtgagacagctggccgaggacttcctgagagactacacccagatcaacgtgggcaacctggagctgagcgccaaccacaacatcctgcagatcgtggacgtgtgcatggagagcgagaaggaccacaagctgatccagctgatggaggagatcatggccgagaaggagaacaagaccatcatcttcgtggagaccaagagaagatgcgacgacctgaccagaagaatgagaagagacggctggcccgccatgtgcatccacggcgacaagagccagcccgagagagactgggtgctgaacgagttcagaagcggcaaggcccccatcctgatcgccaccgacgtggccagcagaggcctggacgtggaggacgtgaagttcgtgatcaactacgactaccccaacagcagcgaggactacgtgcacagaatcggcagaaccgccagaagcaccaacaagggcaccgcctacaccttcttcacccccggcaacctgaagcaggccagagagctgatcaaggtgctggaggaggccaaccaggccatcaaccccaagctgatgcagctggtggaccacagaggcggcggcggcggcggcggcggcagaagcagatacagaaccaccagcagcgccaacaaccccaacctgatgtaccaggacgagtgcgacagaagactgagaggcgtgaaggacggcggcagaagagacagcgccagctacagagacagaagcgagaccgacagagccggctacgccaacggcagcggctacggcagccccaacagcgccttcggcgcccaggccggccagtacacctacggccagggcacctacggcgccgccgcctacggcaccagcagctacaccgcccaggagtacggcgccggcacctacggcgccagcagcaccaccagcaccggcagaagcagccagagcagcagccagcagttcagcggcatcggcagaagcggccagcagccccagcccctgatgagccagcagttcgcccagccccccggcgccaccaacatgatcggctacatgggccagaccgcctaccagtaccccccccccccccccccccccccccccagcagaaagtag

SEQ ID NO: 78522 - DNA, 2214 bp, synthetic construct
  misc_feature 1..2214: note = Description of Artificial Sequence: Synthetic coding sequence
  source 1..2214: mol_type = other DNA
cccaacctgcccaccggcttcgtggcccccatcctgtgcgtgctgctgcccagccccaccagagaggccgccaccgtggccagcgccaccggcgacagcgccagcgagagagagagcgccgcccccgccgccgcccccaccgccgaggcccccccccccagcgtggtgaccagacccgagccccaggccctgcccagccccgccatcagagcccccctgcccgacctgtaccccttcggcaccatgagaggcggcggcttcggcgacagagacagagacagagacagaggcggcttcggcgccagaggcggcggcggcctgccccccaagaagttcggcaaccccggcgagagactgagaaagaagaagtgggacctgagcgagctgcccaagttcgagaagaacttctacgtggagcaccccgaggtggccagactgaccccctacgaggtggacgagctgagaagaaagaaggagatcaccgtgagaggcggcgacgtgtgccccaagcccgtgttcgccttccaccacgccaacttcccccagtacgtgatggacgtgctgatggaccagcacttcaccgagcccacccccatccagtgccagggcttccccctggccctgagcggcagagacatggtgggcatcgcccagaccggcagcggcaagaccctggcctacctgctgcccgccatcgtgcacatcaaccaccagccctacctggagagaggcgacggccccatctgcctggtgctggcccccaccagagagctggcccagcaggtgcagcaggtggccgacgactacggcaagtgcagcagactgaagagcacctgcatctacggcggcgcccccaagggcccccagatcagagacctggagagaggcgtggagatctgcatcgccacccccggcagactgatcgacttcctggagagcggcaagaccaacctgagaagatgcacctacctggtgctggacgaggccgacagaatgctggacatgggcttcgagccccagatcagaaagatcgtggaccagatcagacccgacagacagaccctgatgtggagcgccacctggcccaaggaggtgagacagctggccgaggacttcctgagagactacacccagatcaacgtgggcaacctggagctgagcgccaaccacaacatcctgcagatcgtggacgtgtgcatggagagcgagaaggaccacaagctgatccagctgatggaggagatcatggccgagaaggagaacaagaccatcatcttcgtggagaccaagagaagatgcgacgacctgaccagaagaatgagaagagacggctggcccgccatgtgcatccacggcgacaagagccagcccgagagagactgggtgctgaacgagttcagaagcggcaaggcccccatcctgatcgccaccgacgtggccagcagaggcctggacgtggaggacgtgaagttcgtgatcaactacgactaccccaacagcagcgaggactacgtgcacagaatcggcagaaccgccagaagcaccaacaagggcaccgcctacaccttcttcacccccggcaacctgaagcaggccagagagctgatcaaggtgctggaggaggccaaccaggccatcaaccccaagctgatgcagctggtggaccacagaggcggcggcggcggcggcggcaagggcggcagaagcagatacagaaccaccagcagcgccaacaaccccaacctgatgtaccaggacgagtgcgacagaagactgagaggcgtgaaggacggcggcagaagagacagcgccagctacagagacagaagcgagaccgacagagccggctacgccaacggcagcggctacggcagccccaacagcgccttcggcgcccaggccggccagtacacctacggccagggcacctacggcgccgccgcctacggcaccagcagctacaccgcccaggagtacggcgccggcacctacggcgccagcagcaccaccagcaccggcagaagcagccagagcagcagccagcagttcagcggcatcggcagaagcggccagcagccccagcccctgatgagccagcagttcgcccagccccccggcgccaccaacaccctgctgctgctgcccctgctgctgctgcacgtgaacgagaccacccaggtggtggtgacccccgccgacctgatcaccttctag

SEQ ID NO: 78523 - DNA, 546 bp, synthetic construct
  misc_feature 1..546: note = Description of Artificial Sequence: Synthetic coding sequence
  source 1..546: mol_type = other DNA
atgcagctggtggaccacagaggcggcggcggcggcggcggcggcagaagcagatacagaaccaccagcagcgccaacaaccccaacctgatgtaccaggacgagtgcgacagaagactgagaggcgtgaaggacggcggcagaagagacagcgccagctacagagacagaagcgagaccgacagagccggctacgccaacggcagcggctacggcagccccaacagcgccttcggcgcccaggccggccagtacacctacggccagggcacctacggcgccgccgcctacggcaccagcagctacaccgcccaggagtacggcgccggcacctacggcgccagcagcaccaccagcaccggcagaagcagccagagcagcagccagcagttcagcggcatcggcagaagcggccagcagccccagcccctgatgagccagcagttcgcccagccccccggcgccaccaacatgatcggctacatgggccagaccgcctaccagtaccccccccccccccccccccccccccccagcagaaagtag

SEQ ID NO: 78524 - DNA, 2013 bp, synthetic construct
  misc_feature 1..2013: note = Description of Artificial Sequence: Synthetic coding sequence
  source 1..2013: mol_type = other DNA
atgagccacctgcccatgaagctgctgagaaagaagatcgagaagagaaacctgaagctgagacagagaaacctgaagttccagggcgccagcaacctgaccctgagcgagacccagaacggcgacgtgagcgaggagaccatgggcagcagaaaggtgaagaagagcaagcagaagcccatgaacgtgggcctgagcgagacccagaacggcggcatgagccaggaggccgtgggcaacatcaaggtgaccaagagcccccagaagagcaccgtgctgaccaacggcgaggccgccatgcagagcagcaacagcgagagcaagaagaagaagaagaagaagagaaagatggtgaacgacgccgagcccgacaccaagaaggccaagaccgagaacaagggcaagagcgaggaggagagcgccgagaccaccaaggagaccgagaacaacgtggagaagcccgacaacgacgaggacgagagcgaggtgcccagcctgcccctgggcctgaccggcgccttcgaggacaccagcttcgccagcctgtgcaacctggtgaacgagaacaccctgaaggccatcaaggagatgggcttcaccaacatgaccgagatccagcacaagagcatcagacccctgctggagggcagagacctgctggccgccgccaagaccggcagcggcaagaccctggccttcctgatccccgccgtggagctgatcgtgaagctgagattcatgcccagaaacggcaccggcgtgctgatcctgagccccaccagagagctggccatgcagaccttcggcgtgctgaaggagctgatgacccaccacgtgcacacctacggcctgatcatgggcggcagcaacagaagcgccgaggcccagaagctgggcaacggcatcaacatcatcgtggccacccccggcagactgctggaccacatgcagaacacccccggcttcatgtacaagaacctgcagtgcctggtgatcgacgaggccgacagaatcctggacgtgggcttcgaggaggagctgaagcagatcatcaagctgctgcccaccagaagacagaccatgctgttcagcgccacccagaccagaaaggtggaggacctggccagaatcagcctgaagaaggagcccctgtacgtgggcgtggacgacgacaaggccaacgccaccgtggacggcctggagcagggctacgtggtgtgccccagcgagaagagattcctgctgctgttcaccttcctgaagaagaacagaaagaagaagctgatggtgttcttcagcagctgcatgagcgtgaagtaccactacgagctgctgaactacatcgacctgcccgtgctggccatccacggcaagcagaagcagaacaagagaaccaccaccttcttccagttctgcaacgccgacagcggcaccctgctgtgcaccgacgtggccgccagaggcctggacatccccgaggtggactggatcgtgcagtacgacccccccgacgaccccaaggagtacatccacagagtgggcagaaccgccagaggcctgaacggcagaggccacgccctgctgatcctgagacccgaggagctgggcttcctgagatacctgaagcagagcaaggtgcccctgagcgagttcgacttcagctggagcaagatcagcgacatccagagccagctggagaagctgatcgagaagaactacttcctgcacaagagcgcccaggaggcctacaagagctacatcagagcctacgacagccacagcctgaagcagatcttcaacgtgaacaacctgaacctgccccaggtggccctgagcttcggcttcaaggtgccccccttcgtggacctgaacgtgaacagcaacgagggcaagcagaagaagagaggcggcggcggcggcttcggctaccagaagaccaagaaggtggagaagagcaagatcttcaagcacatcagcaagaagagcagcgacagcagacagttcagccactag

SEQ ID NO: 78525 - DNA, 1230 bp, synthetic construct
  misc_feature 1..1230: note = Description of Artificial Sequence: Synthetic coding sequence
  source 1..1230: mol_type = other DNA
atggagcaggagcagaccttcggcgtgctgaaggagctgatgacccaccacgtgcacacctacggcctgatcatgggcggcagcaacagaagcgccgaggcccagaagctgggcaacggcatcaacatcatcgtggccacccccggcagactgctggaccacatgcagaacacccccggcttcatgtacaagaacctgcagtgcctggtgatcgacgaggccgacagaatcctggacgtgggcttcgaggaggagctgaagcagatcatcaagctgctgcccaccagaagacagaccatgctgttcagcgccacccagaccagaaaggtggaggacctggccagaatcagcctgaagaaggagcccctgtacgtgggcgtggacgacgacaaggccaacgccaccgtggacggcctggagcagggctacgtggtgtgccccagcgagaagagattcctgctgctgttcaccttcctgaagaagaacagaaagaagaagctgatggtgttcttcagcagctgcatgagcgtgaagtaccactacgagctgctgaactacatcgacctgcccgtgctggccatccacggcaagcagaagcagaacaagagaaccaccaccttcttccagttctgcaacgccgacagcggcaccctgctgtgcaccgacgtggccgccagaggcctggacatccccgaggtggactggatcgtgcagtacgacccccccgacgaccccaaggagtacatccacagagtgggcagaaccgccagaggcctgaacggcagaggccacgccctgctgatcctgagacccgaggagctgggcttcctgagatacctgaagcagagcaaggtgcccctgagcgagttcgacttcagctggagcaagatcagcgacatccagagccagctggagaagctgatcgagaagaactacttcctgcacaagagcgcccaggaggcctacaagagctacatcagagcctacgacagccacagcctgaagcagatcttcaacgtgaacaacctgaacctgccccaggtggccctgagcttcggcttcaaggtgccccccttcgtggacctgaacgtgaacagcaacgagggcaagcagaagaagagaggcggcggcggcggcttcggctaccagaagaccaagaaggtggagaagagcaagatcttcaagcacatcagcaagaagagcagcgacagcagacagttcagccactag

SEQ ID NO: 78526 - DNA, 2475 bp, synthetic construct
  misc_feature 1..2475: note = Description of Artificial Sequence: Synthetic coding sequence
  source 1..2475: mol_type = other DNA
atggccgccgccttcgaggccagcggcgccctggccgccgtggccaccgccatgcccgccgagcacgtggccgtgcaggtgcccgcccccgagcccacccccggccccgtgagaatcctgagaaccgcccaggacctgagcagccccagaaccagaaccggcgacgtgctgctggccgagcccgccgacttcgagagcctgctgctgagcagacccgtgctggagggcctgagagccgccggcttcgagagacccagccccgtgcagctgaaggccatccccctgggcagatgcggcctggacctgatcgtgcaggccaagagcggcaccggcaagacctgcgtgttcagcaccatcgccctggacagcctggtgctggagaacctgagcacccagatcctgatcctggcccccaccagagagatcgccgtgcagatccacagcgtgatcaccgccatcggcatcaagatggagggcctggagtgccacgtgttcatcggcggcacccccctgagccaggacaagaccagactgaagaagtgccacatcgccgtgggcagccccggcagaatcaagcagctgatcgagctggactacctgaaccccggcagcatcagactgttcatcctggacgaggccgacaagctgctggaggagggcagcttccaggagcagatcaactggatctacagcagcctgcccgccagcaagcagatgctggccgtgagcgccacctaccccgagttcctggccaacgccctgaccaagtacatgagagaccccaccttcgtgagactgaacagcagcgaccccagcctgatcggcctgaagcagtactacaaggtggtgaacagctaccccctggcccacaaggtgttcgaggagaagacccagcacctgcaggagctgttcagcagaatccccttcaaccaggccctggtgttcagcaacctgcacagcagagcccagcacctggccgacatcctgagcagcaagggcttccccgccgagtgcatcagcggcaacatgaaccagaaccagagactggacgccatggccaagctgaagcacttccactgcagagtgctgatcagcaccgacctgaccagcagaggcatcgacgccgagaaggtgaacctggtggtgaacctggacgtgcccctggactgggagacctacatgcacagaatcggcagagccggcagattcggcaccctgggcctgaccgtgacctactgctgcagaggcgaggaggagaacatgatgatgagaatcgcccagaagtgcaacatcaacctgctgcccctgcccgaccccatccccagcggcctgatggaggagtgcgtggactgggacgtggaggtgaaggccgccgtgcacacctacggcatcgccagcgtgcccaaccagcccctgaagaagcagatccagaagatcgagagaaccctgcagatccagaaggcccacggcgaccacatggccagcagcagaaacaacagcgtgagcggcctgagcgtgaagagcaagaacaacaccaagcagaagctgcccgtgaagagccacagcgagtgcggcatcatcgagaaggccaccagccccaaggagctgggctgcgacagacagagcgaggagcagatgaagaacagcgtgcagacccccgtggagaacagcaccaacagccagcaccaggtgaaggaggccctgcccgtgagcctgccccagatcccctgcctgagcagcttcaagatccaccagccctacaccctgaccttcgccgagctggtggaggactacgagcactacatcaaggagggcctggagaagcccgtggagatcatcagacactacaccggccccggcgaccagaccgtgaacccccagaacggcttcgtgagaaacaaggtgatcgagcagagagtgcccgtgctggccagcagcagccagagcggcgacagcgagagcgacagcgacagctacagcagcagaaccagcagccagagcaagggcaacaagagctacctggagggcagcagcgacaaccagctgaaggacagcgagagcacccccgtggacgacagaatcagcctggagcagccccccaacggcagcgacacccccaaccccgagaagtaccaggagagccccggcatccagatgaagaccagactgaaggagggcgccagccagagagccaagcagagcagaagaaacctgcccagaagaagcagcttcagactgcagaccgaggcccaggaggacgactggtacgactgccacagagagatcagactgagcttcagcgacacctaccaggactacgaggagtactggagagcctactacagagcctggcaggagtactacgccgccgccagccacagctactactggaacgcccagagacaccccagctggatggccgcctaccacatgaacaccatctacctgcaggagatgatgcacagcaaccagtag

SEQ ID NO: 78527 - DNA, 417 bp, synthetic construct
  misc_feature 1..417: note = Description of Artificial Sequence: Synthetic coding sequence
  source 1..417: mol_type = other DNA
atggccgccgccttcgaggccagcggcgccctggccgccgtggccaccgccatgcccgccgagcacgtggccgtgcaggtgcccgcccccgagcccacccccggccccgtgagaatcctgagaaccgcccaggacctgagcagccccagaaccagaaccggcgacgtgctgctggccgagcccgccgacttcgagagcctgctgctgagcagacccgtgctggagggcctgagagccgccggcttcgagagacccagccccgtgcagctgaaggccatccccctgggcagatgcggcctggacctgatcgtgcaggccaagagcggcaccggcaagacctgcgtgttcagcaccatcgccctggacagcctggtgctggagaacctgagcacccaggccgagctgagcaacagctag

SEQ ID NO: 78528 - DNA, 2352 bp, synthetic construct
  misc_feature 1..2352: note = Description of Artificial Sequence: Synthetic coding sequence
  source 1..2352: mol_type = other DNA
atgcccggcaagctgagaagcgacgccggcctggagagcgacaccgccatgaagaagggcgagaccctgagaaagcagaccgaggagaaggagaagaaggagaagcccaagagcgacaagaccgaggagatcgccgaggaggaggagaccgtgttccccaaggccaagcaggtgaagaagaaggccgagcccagcgaggtggacatgaacagccccaagagcaagaaggccaagaagaaggaggagcccagccagaacgacatcagccccaagaccaagagcctgagaaagaagaaggagcccatcgagaagaaggtggtgagcagcaagaccaagaaggtgaccaagaacgaggagcccagcgaggaggagatcgacgcccccaagcccaagaagatgaagaaggagaaggagatgaacggcgagaccagagagaagagccccaagctgaagaacggcttcccccaccccgagcccgactgcaaccccagcgaggccgccagcgaggagagcaacagcgagatcgagcaggagatccccgtggagcagaaggagggcgccttcagcaacttccccatcagcgaggagaccatcaagctgctgaagggcagaggcgtgaccttcctgttccccatccaggccaagaccttccaccacgtgtacagcggcaaggacctgatcgcccaggccagaaccggcaccggcaagaccttcagcttcgccatccccctgatcgagaagctgcacggcgagctgcaggacagaaagagaggcagagccccccaggtgctggtgctggcccccaccagagagctggccaaccaggtgagcaaggacttcagcgacatcaccaagaagctgagcgtggcctgcttctacggcggcaccccctacggcggccagttcgagagaatgagaaacggcatcgacatcctggtgggcacccccggcagaatcaaggaccacatccagaacggcaagctggacctgaccaagctgaagcacgtggtgctggacgaggtggaccagatgctggacatgggcttcgccgaccaggtggaggagatcctgagcgtggcctacaagaaggacagcgaggacaacccccagaccctgctgttcagcgccacctgcccccactgggtgttcaacgtggccaagaagtacatgaagagcacctacgagcaggtggacctgatcggcaagaagacccagaagaccgccatcaccgtggagcacctggccatcaagtgccactggacccagagagccgccgtgatcggcgacgtgatcagagtgtacagcggccaccagggcagaaccatcatcttctgcgagaccaagaaggaggcccaggagctgagccagaacagcgccatcaagcaggacgcccagagcctgcacggcgacatcccccagaagcagagagagatcaccctgaagggcttcagaaacggcagcttcggcgtgctggtggccaccaacgtggccgccagaggcctggacatccccgaggtggacctggtgatccagagcagcccccccaaggacgtggagagctacatccacagaagcggcagaaccggcagagccggcagaaccggcgtgtgcatctgcttctaccagcacaaggaggagtaccagctggtgcaggtggagcagaaggccggcatcaagttcaagagaatcggcgtgcccagcgccaccgagatcatcaaggccagcagcaaggacgccatcagactgctggacagcgtgccccccaccgccatcagccacttcaagcagagcgccgagaagctgatcgaggagaagggcgccgtggaggccctggccgccgccctggcccacatcagcggcgccaccagcgtggaccagagaagcctgatcaacagcaacgtgggcttcgtgaccatgatcctgcagtgcagcatcgagatgcccaacatcagctacgcctggaaggagctgaaggagcagctgggcgaggagatcgacagcaaggtgaagggcatggtgttcctgaagggcaagctgggcgtgtgcttcgacgtgcccaccgccagcgtgaccgagatccaggagaagtggcacgacagcagaagatggcagctgagcgtggccaccgagcagcccgagctggagggccccagagagggctacggcggcttcagaggccagagagagggcagcagaggcttcagaggccagagagacggcaacagaagattcagaggccagagagagggcagcagaggccccagaggccagagaagcggcggcggcaacaagagcaacagaagccagaacaagggccagaagagaagcttcagcaaggccttcggccagtag

SEQ ID NO: 78529 - DNA, 249 bp, synthetic construct
  misc_feature 1..249: note = Description of Artificial Sequence: Synthetic coding sequence
  source 1..249: mol_type = other DNA
atgcccggcaagctgagaagcgacgccggcctggagagcgacaccgccatgaagaagggcgagaccctgagaaagcagaccgaggagaaggagaagaaggagaagcccaagagcgacaagaccgaggagatcgccgaggaggaggagaccgtgttccccaaggccaagcaggtgaagaagaaggccgagcccagcgaggtggacatgaacagccccaagagcaagaagaagaagaagaagaagaagtag

SEQ ID NO: 78530 - DNA, 2463 bp, synthetic construct
  misc_feature 1..2463: note = Description of Artificial Sequence: Synthetic coding sequence
  source 1..2463: mol_type = other DNA
atggccggcgagctggccgacaagaaggacagagacgccagccccagcaaggaggagagaaagagaagcagaacccccgacagagagagagacagagacagagacagaaagagcagccccagcaaggacagaaagagacacagaagcagagacagaagaagaggcggcagcagaagcagaagcagaagcagaagcaagagcgccgagagagagagaagacacaaggagagagagagagacaaggagagagacagaaacaagaaggacagagacagagacaaggacggccacagaagagacaaggacagaaagagaagcagcctgagccccggcagaggcaaggacttcaagagcagaaaggacagagacagcaagaaggacgaggaggacgagcacggcgacaagaagcccaaggcccagcccctgagcctggaggagctgctggccaagaagaaggccgaggaggaggccgaggccaagcccaagttcctgagcaaggccgagagagaggccgaggccctgaagagaagacagcaggaggtggaggagagacagagaatgctggaggaggagagaaagaagagaaagcagttccaggacctgggcagaaagatgctggaggacccccaggagagagagagaagagagagaagagagagaatggagagagagaccaacggcaacgaggacgaggagggcagacagaagatcagagaggagaaggacaagagcaaggagctgcacgccatcaaggagagatacctgggcggcatcaagaagagaagaagaaccagacacctgaacgacagaaagttcgtgttcgagtgggacgccagcgaggacaccagcatcgactacaaccccctgtacaaggagagacaccaggtgcagctgctgggcagaggcttcatcgccggcatcgacctgaagcagcagaagagagagcagagcagattctacggcgacctgatggagaagagaagaaccctggaggagaaggagcaggaggaggccagactgagaaagctgagaaagaaggaggccaagcagagatgggacgacagacactggagccagaagaagctggacgagatgaccgacagagactggagaatcttcagagaggactacagcatcaccaccaagggcggcaagatccccaaccccatcagaagctggaaggacagcagcctgcccccccacatcctggaggtgatcgacaagtgcggctacaaggagcccacccccatccagagacaggccatccccatcggcctgcagaacagagacatcatcggcgtggccgagaccggcagcggcaagaccgccgccttcctgatccccctgctggtgtggatcaccaccctgcccaagatcgacagaatcgaggagagcgaccagggcccctacgccatcatcctggcccccaccagagagctggcccagcagatcgaggaggagaccatcaagttcggcaagcccctgggcatcagaaccgtggccgtgatcggcggcatcagcagagaggaccagggcttcagactgagaatgggctgcgagatcgtgatcgccacccccggcagactgatcgacgtgctggagaacagatacctggtgctgagcagatgcacctacgtggtgctggacgaggccgacagaatgatcgacatgggcttcgagcccgacgtgcagaagatcctggagcacatgcccgtgagcaaccagaagcccgacaccgacgaggccgaggaccccgagaagatgctggccaacttcgagagcggcaagcacaagtacagacagaccgtgatgttcaccgccaccatgccccccgccgtggagagactggccagaagctacctgagaagacccgccgtggtgtacatcggcagcgccggcaagccccacgagagagtggagcagaaggtgttcctgatgagcgagagcgagaagagaaagaagctgctggccatcctggagcagggcttcgacccccccatcatcatcttcgtgaaccagaagaagggctgcgacgtgctggccaagagcctggagaagatgggctacaacgcctgcaccctgcacggcggcaagggccaggagcagagagagttcgccctgagcaacctgaaggccggcgccaaggacatcctggtggccaccgacgtggccggcagaggcatcgacatccaggacgtgagcatggtggtgaactacgacatggccaagaacatcgaggactacatccacagaatcggcagaaccggcagagccggcaagagcggcgtggccatcaccttcctgaccaaggaggacagcgccgtgttctacgagctgaagcaggccatcctggagagccccgtgagcagctgcccccccgagctggccaaccaccccgacgcccagcacaagcccggcaccatcctgaccaagaagagaagagaggagaccatcttcgcctag

SEQ ID NO: 78531 - DNA, 417 bp, synthetic construct
  misc_feature 1..417: note = Description of Artificial Sequence: Synthetic coding sequence
  source 1..417: mol_type = other DNA
atggccggcgagctggccgacaagaaggacagagacgccagccccagcaaggaggagagaaagagaagcagaacccccgacagagagagagacagagacagagacagaaagagcagccccagcaaggacagaaagagacacagaagcagagacagaagaagaggcggcagcagaagcagaagcagaagcagaagcaagagcgccgagagagagagaagacacaaggagagagagagagacaaggagagagacagaaacaagaaggacagagacagagacaaggacggccacagaagagacaaggacagaaagagaagcagcctgagccccggcagaggcaaggacttcaagagcagaaaggacagagacagcaagaaggacgaggaggacgagcacggcgacaagaagcccaagtag

SEQ ID NO: 78532 - DNA, 549 bp, synthetic construct
  misc_feature 1..549: note = Description of Artificial Sequence: Synthetic coding sequence
  source 1..549: mol_type = other DNA
atggccggcgagctggccgacaagaaggacagagacgccagccccagcaaggaggagagaaagagaagcagaacccccgacagagagagagacagagacagagacagaaagagcagccccagcaaggacagaaagagacacagaagcagagacagaagaagaggcggcagcagaagcagaagcagaagcagaagcaagagcgccgagagagagagaagacacaaggagagagagagagacaaggagagagacagaaacaagaaggacagagacagagacaaggacggccacagaagagacaaggacagaaagagaagcagcctgagccccggcagaggcaaggacttcaagagcagaaaggacagagacagcaagaaggacgaggaggacgagcacggcgacaagaagcccaaggcccagcccctgagcctggaggagctgctggccaagaagaaggccgaggaggaggccgaggccaagcccaagttcctgagcaaggccgagagagaggccgaggccctgaagagaagacagcaggaggtggagtag

SEQ ID NO: 78533 - DNA, 2580 bp, synthetic construct
  misc_feature 1..2580: note = Description of Artificial Sequence: Synthetic coding sequence
  source 1..2580: mol_type = other DNA
atgaagctgaaggacaccaagagcagacccaagcagagcagctgcggcaagttccagaccaagggcatcaaggtggtgggcaagtggaaggaggtgaagatcgaccccaacatgttcgccgacggccagatggacgacctggtgtgcttcgaggagctgaccgactaccagctggtgagccccgccaagaaccccagcagcctgttcagcaaggaggcccccaagagaaaggcccaggccgtgagcgaggaggaggaggaggaggagggcaagagcagcagccccaagaagaagatcaagctgaagaagagcaagaacgtggccaccgagggcaccagcacccagaaggagttcgaggtgaaggaccccgagctggaggcccagggcgacgacatggtgtgcgacgaccccgaggccggcgagatgaccagcgagaacctggtgcagaccgcccccaagaagaagaagaacaagggcaagaagggcctggagcccagccagagcaccgccgccaaggtgcccaagaaggccaagacctggatccccgaggtgcacgaccagaaggccgacgtgagcgcctggaaggacctgttcgtgcccagacccgtgctgagagccctgagcttcctgggcttcagcgcccccacccccatccaggccctgaccctggcccccgccatcagagacaagctggacatcctgggcgccgccgagaccggcagcggcaagaccctggccttcgccatccccatgatccacgccgtgctgcagtggcagaagagaaacgccgcccccccccccagcaacaccgaggccccccccggcgagaccagaaccgaggccggcgccgagaccagaagccccggcaaggccgaggccgagagcgacgccctgcccgacgacaccgtgatcgagagcgaggccctgcccagcgacatcgccgccgaggccagagccaagaccggcggcaccgtgagcgaccaggccctgctgttcggcgacgacgacgccggcgagggccccagcagcctgatcagagagaagcccgtgcccaagcagaacgagaacgaggaggagaacctggacaaggagcagaccggcaacctgaagcaggagctggacgacaagagcgccacctgcaaggcctaccccaagagacccctgctgggcctggtgctgacccccaccagagagctggccgtgcaggtgaagcagcacatcgacgccgtggccagattcaccggcatcaagaccgccatcctggtgggcggcatgagcacccagaagcagcagagaatgctgaacagaagacccgagatcgtggtggccacccccggcagactgtgggagctgatcaaggagaagcactaccacctgagaaacctgagacagctgagatgcctggtggtggacgaggccgacagaatggtggagaagggccacttcgccgagctgagccagctgctggagatgctgaacgacagccagtacaaccccaagagacagaccctggtgttcagcgccaccctgaccctggtgcaccaggcccccgccagaatcctgcacaagaagcacaccaagaagatggacaagaccgccaagctggacctgctgatgcagaagatcggcatgagaggcaagcccaaggtgatcgacctgaccagaaacgaggccaccgtggagaccctgaccgagaccaagatccactgcgagaccgacgagaaggacttctacctgtactacttcctgatgcagtaccccggcagaagcctggtgttcgccaacagcatcagctgcatcaagagactgagcggcctgctgaaggtgctggacatcatgcccctgaccctgcacgcctgcatgcaccagaagcagagactgagaaacctggagcagttcgccagactggaggactgcgtgctgctggccaccgacgtggccgccagaggcctggacatccccaaggtgcagcacgtgatccactaccaggtgcccagaaccagcgagatctacgtgcacagaagcggcagaaccgccagagccaccaacgagggcctgagcctgatgctgatcggccccgaggacgtgatcaacttcaagaagatctacaagaccctgaagaaggacgaggacatccccctgttccccgtgcagaccaagtacatggacgtggtgaaggagagaatcagactggccagacagatcgagaagagcgagtacagaaacttccaggcctgcctgcacaacagctggatcgagcaggccgccgccgccctggagatcgagctggaggaggacatgtacaagggcggcaaggccgaccagcaggaggagagaagaagacagaagcagatgaaggtgctgaagaaggagctgagacacctgctgagccagcccctgttcaccgagagccagaagaccaagtaccccacccagagcggcaagccccccctgctggtgagcgcccccagcaagagcgagagcgccctgagctgcctgagcaagcagaagaagaagaagaccaagaagcccaaggagccccagcccgagcagccccagcccagcaccagcgccaactag

SEQ ID NO: 78534 - DNA, 2415 bp, synthetic construct
  misc_feature 1..2415: note = Description of Artificial Sequence: Synthetic coding sequence
  source 1..2415: mol_type = other DNA
atgaagctgaaggacaccaagagcagacccaagcagagcagctgcggcaagttccagaccaagggcatcaaggtggtgggcaagtggaaggaggtgaagatcgaccccaacatgttcgccgacggccagatggacgacctggtgtgcttcgaggagctgaccgactaccagctggtgagccccgccaagaaccccagcagcctgttcagcaaggaggcccccaagagaaaggcccaggccgtgagcgaggaggaggaggaggaggagggcaagagcagcagccccaagaagaagatcaagctgaagaagagcaagaacgtggccaccgagggcaccagcacccagaaggagttcgaggtgaaggaccccgagctggaggcccagggcgacgacatggtgtgcgacgaccccgaggccggcgagatgaccagcgagaacctggtgcagaccgcccccaagaagaagaagaacaagggcaagaagggcctggagcccagccagagcaccgccgccatcagagacaagctggacatcctgggcgccgccgagaccggcagcggcaagaccctggccttcgccatccccatgatccacgccgtgctgcagtggcagaagagaaacgccgcccccccccccagcaacaccgaggccccccccggcgagaccagaaccgaggccggcgccgagaccagaagccccggcaaggccgaggccgagagcgacgccctgcccgacgacaccgtgatcgagagcgaggccctgcccagcgacatcgccgccgaggccagagccaagaccggcggcaccgtgagcgaccaggccctgctgttcggcgacgacgacgccggcgagggccccagcagcctgatcagagagaagcccgtgcccaagcagaacgagaacgaggaggagaacctggacaaggagcagaccggcaacctgaagcaggagctggacgacaagagcgccacctgcaaggcctaccccaagagacccctgctgggcctggtgctgacccccaccagagagctggccgtgcaggtgaagcagcacatcgacgccgtggccagattcaccggcatcaagaccgccatcctggtgggcggcatgagcacccagaagcagcagagaatgctgaacagaagacccgagatcgtggtggccacccccggcagactgtgggagctgatcaaggagaagcactaccacctgagaaacctgagacagctgagatgcctggtggtggacgaggccgacagaatggtggagaagggccacttcgccgagctgagccagctgctggagatgctgaacgacagccagtacaaccccaagagacagaccctggtgttcagcgccaccctgaccctggtgcaccaggcccccgccagaatcctgcacaagaagcacaccaagaagatggacaagaccgccaagctggacctgctgatgcagaagatcggcatgagaggcaagcccaaggtgatcgacctgaccagaaacgaggccaccgtggagaccctgaccgagaccaagatccactgcgagaccgacgagaaggacttctacctgtactacttcctgatgcagtaccccggcagaagcctggtgttcgccaacagcatcagctgcatcaagagactgagcggcctgctgaaggtgctggacatcatgcccctgaccctgcacgcctgcatgcaccagaagcagagactgagaaacctggagcagttcgccagactggaggactgcgtgctgctggccaccgacgtggccgccagaggcctggacatccccaaggtgcagcacgtgatccactaccaggtgcccagaaccagcgagatctacgtgcacagaagcggcagaaccgccagagccaccaacgagggcctgagcctgatgctgatcggccccgaggacgtgatcaacttcaagaagatctacaagaccctgaagaaggacgaggacatccccctgttccccgtgcagaccaagtacatggacgtggtgaaggagagaatcagactggccagacagatcgagaagagcgagtacagaaacttccaggcctgcctgcacaacagctggatcgagcaggccgccgccgccctggagatcgagctggaggaggacatgtacaagggcggcaaggccgaccagcaggaggagagaagaagacagaagcagatgaaggtgctgaagaaggagctgagacacctgctgagccagcccctgttcaccgagagccagaagaccaagtaccccacccagagcggcaagccccccctgctggtgagcgcccccagcaagagcgagagcgccctgagctgcctgagcaagcagaagaagaagaagaccaagaagcccaaggagccccagcccgagcagccccagcccagcaccagcgccaactag

SEQ ID NO: 78535 - DNA, 2292 bp, synthetic construct
  misc_feature 1..2292: note = Description of Artificial Sequence: Synthetic coding sequence
  source 1..2292: mol_type = other DNA
atggacgacctggtgtgcttcgaggagctgaccgactaccagctggtgagccccgccaagaaccccagcagcctgttcagcaaggaggcccccaagagaaaggcccaggccgtgagcgaggaggaggaggaggaggagggcaagagcagcagccccaagaagaagatcaagctgaagaagagcaagaacgtggccaccgagggcaccagcacccagaaggagttcgaggtgaaggaccccgagctggaggcccagggcgacgacatggtgtgcgacgaccccgaggccggcgagatgaccagcgagaacctggtgcagaccgcccccaagaagaagaagaacaagggcaagaagggcctggagcccagccagagcaccgccgccaaggtgcccaagaaggccaagacctggatccccgaggtgcacgaccagaaggccgacgtgagcgcctggaaggacctgttcgtgcccagacccgtgctgagagccctgagcttcctgggcttcagcgcccccacccccatccaggccctgaccctggcccccgccatcagagacaagctggacatcctgggcgccgccgagaccggcagcggcaagaccctggccttcgccatccccatgatccacgccgtgctgcagtggcagaagagaaacgccgcccccccccccagcaacaccgaggccccccccggcgagaccagaaccgaggccggcgccgagaccagaagccccggcaaggccgaggccgagagcgacgccctgcccgacgacaccgtgatcgagagcgaggccctgcccagcgacatcgccgccgaggccagagccaagaccggcggcaccgtgagcgaccaggccctgctgttcggcgacgacgacgccggcgagggccccagcagcctgatcagagagaagcccgtgcccaagcagaacgagaacgaggaggagaacctggacaaggagcagaccggcaacctgaagcaggagctggacgacaagagcgccacctgcaaggcctaccccaagagacccctgctgggcctggtgctgacccccaccagagagctggccgtgcaggtgaagcagcacatcgacgccgtggccagattcaccggcatcaagaccgccatcctggtgggcggcatgagcacccagaagcagcagagaatgctgaacagaagacccgagatcgtggtggccacccccggcagactgtgggagctgatcaaggagaagcactaccacctgagaaacctgagacagctgagatgcctggtggtggacgaggccgacagaatggtggagaagggccacttcgccgagctgagccagctgctggagatgctgaacgacagccagtacaaccccaagagacagaccctggtgttcagcgccaccctgaccctggtgcaccaggcccccgccagaatcctgcacaagaagcacaccaagaagatggacaagaccgccaagctggacctgctgatgcagaagatcggcatgagaggcaagcccaaggtgatcgacctgaccagaaacgaggccaccgtggagaccctgaccgagaccaagatccactgcgagaccgacgagaaggacttctacctgtactacttcctgatgcagtaccccggcagaagcctggtgttcgccaacagcatcagctgcatcaagagactgagcggcctgctgaaggtgctggacatcatgcccctgaccctgcacgcctgcatgcaccagaagcagagactgagaaacctggagcagttcgccagactggaggactgcgtgctgctggccaccgacgtggccgccagaggcctggacatccccaaggtgcagcacgtgatccactaccaggtgcccagaaccagcgagatctacgtgcacagaagcggcagaaccgccagagccaccaacgagggcctgagcctgatgctgatcggccccgaggacgtgatcaacttcaagaagatctacaagaccctgaagaaggacgaggacatccccctgttccccgtgcagaccaagtacatggacgtggtgaaggagagaatcagactggccagacagatcgagaagagcgagtacagaaacttccaggcctgcctgcacaacagctggatcgagcaggccgccgccgccctggagatcgagctggaggaggacatgtacaagggcggcaaggccgaccagcaggaggagagaagaagacagaagcagatgaaggtgctgaagaaggagctgagacacctgctgagccagccccagcccagcaccagcgccaactag

SEQ ID NO: 78536 - DNA, 1458 bp, synthetic construct
  misc_feature 1..1458: note = Description of Artificial Sequence: Synthetic coding sequence
  source 1..1458: mol_type = other DNA
atgaccaaggccccctgcaaggcctaccccaagagacccctgctgggcctggtgctgacccccaccagagagctggccgtgcaggtgaagcagcacatcgacgccgtggccagattcaccggcatcaagaccgccatcctggtgggcggcatgagcacccagaagcagcagagaatgctgaacagaagacccgagatcgtggtggccacccccggcagactgtgggagctgatcaaggagaagcactaccacctgagaaacctgagacagctgagatgcctggtggtggacgaggccgacagaatggtggagaagggccacttcgccgagctgagccagctgctggagatgctgaacgacagccagtacaaccccaagagacagaccctggtgttcagcgccaccctgaccctggtgcaccaggcccccgccagaatcctgcacaagaagcacaccaagaagatggacaagaccgccaagctggacctgctgatgcagaagatcggcatgagaggcaagcccaaggtgatcgacctgaccagaaacgaggccaccgtggagaccctgaccgagaccaagatccactgcgagaccgacgagaaggacttctacctgtactacttcctgatgcagtaccccggcagaagcctggtgttcgccaacagcatcagctgcatcaagagactgagcggcctgctgaaggtgctggacatcatgcccctgaccctgcacgcctgcatgcaccagaagcagagactgagaaacctggagcagttcgccagactggaggactgcgtgctgctggccaccgacgtggccgccagaggcctggacatccccaaggtgcagcacgtgatccactaccaggtgcccagaaccagcgagatctacgtgcacagaagcggcagaaccgccagagccaccaacgagggcctgagcctgatgctgatcggccccgaggacgtgatcaacttcaagaagatctacaagaccctgaagaaggacgaggacatccccctgttccccgtgcagaccaagtacatggacgtggtgaaggagagaatcagactggccagacagatcgagaagagcgagtacagaaacttccaggcctgcctgcacaacagctggatcgagcaggccgccgccgccctggagatcgagctggaggaggacatgtacaagggcggcaaggccgaccagcaggaggagagaagaagacagaagcagatgaaggtgctgaagaaggagctgagacacctgctgagccagcccctgttcaccgagagccagaagaccaagtaccccacccagagcggcaagccccccctgctggtgagcgcccccagcaagagcgagagcgccctgagctgcctgagcaagcagaagaagaagaagaccaagaagcccaaggagccccagcccgagcagccccagcccagcaccagcgccaactag

SEQ ID NO: 78537 - DNA, 1623 bp, synthetic construct
  misc_feature 1..1623: note = Description of Artificial Sequence: Synthetic coding sequence
  source 1..1623: mol_type = other DNA
atggccctgaccagacccgtgagactgttcagcctggtgaccagactgctgctggcccccagaagaggcctgaccgtgagaagccccgacgagcccctgcccgtggtgagaatccccgtggccctgcagagacagctggagcagagacagagcagaagaagaaacctgcccagacccgtgctggtgagacccggccccctgctggtgagcgccagaagacccgagctgaaccagcccgccagactgaccctgggcagatgggagagagcccccctggccagccagggctggaagagcagaagagccagaagagaccacttcagcatcgagagagcccagcaggaggcccccgccgtgagaaagctgagcagcaagggcagcttcgccgacctgggcctggagcccagagtgctgcacgccctgcaggaggccgcccccgaggtggtgcagcccaccaccgtgcagagcagcaccatccccagcctgctgagaggcagacacgtggtgtgcgccgccgagaccggcagcggcaagaccctgagctacctgctgcccctgctgcagagactgctgggccagcccagcctggacagcctgcccatccccgcccccagaggcctggtgctggtgcccagcagagagctggcccagcaggtgagagccgtggcccagcccctgggcagaagcctgggcctgctggtgagagacctggagggcggccacggcatgagaagaatcagactgcagctgagcagacagcccagcgccgacgtgctggtggccacccccggcgccctgtggaaggccctgaagagcagactgatcagcctggagcagctgagcttcctggtgctggacgaggccgacaccctgctggacgagagcttcctggagctggtggactacatcctggagaagagccacatcgccgagggccccgccgacctggaggaccccttcaaccccaaggcccagctggtgctggtgggcgccaccttccccgagggcgtgggccagctgctgaacaaggtggccagccccgacgccgtgaccaccatcaccagcagcaagctgcactgcatcatgccccacgtgaagcagaccttcctgagactgaagggcgccgacaaggtggccgagctggtgcacatcctgaagcacagagacagagccgagagaaccggccccagcggcaccgtgctggtgttctgcaacagcagcagcaccgtgaactggctgggctacatcctggacgaccacaagatccagcacctgagactgcagggccagatgcccgccctgatgagagtgggcatcttccagagcttccagaagagcagcagagacatcctgctgtgcaccgacatcgccagcagaggcctggacagcaccggcgtggagctggtggtgaactacgacttcccccccaccctgcaggactacatccacagagccggcagagtgggcagagtgggcagcgaggtgcccggcaccgtgatcagcttcgtgacccacccctgggacgtgagcctggtgcagaagatcgagctggccgccagaagaagaagaagcctgcccggcctggccagcagcgtgaaggagcccctgccccaggccacctag

SEQ ID NO: 78538 - DNA, 1989 bp, synthetic construct
  misc_feature 1..1989: note = Description of Artificial Sequence: Synthetic coding sequence
  source 1..1989: mol_type = other DNA
atgagccacgtggccgtggagaacgccctgggcctggaccagcagttcgccggcctggacctgaacagcagcgacaaccagagcggcggcagcaccgccagcaagggcagatacatccccccccacctgagaaacagagaggccaccaagggcttctacgacaaggacagcagcggctggagcagcagcaaggacaaggacgcctacagcagcttcggcagcagaagcgacagcagaggcaagagcagcttcttcagcgacagaggcagcggcagcagaggcagattcgacgacagaggcagaagcgactacgacggcatcggcagcagaggcgacagaagcggcttcggcaagttcgagagaggcggcaacagcagatggtgcgacaagagcgacgaggacgactggagcaagcccctgccccccagcgagagactggagcaggagctgttcagcggcggcaacaccggcatcaacttcgagaagtacgacgacatccccgtggaggccaccggcaacaactgccccccccacatcgagagcttcagcgacgtggagatgggcgagatcatcatgggcaacatcgagctgaccagatacaccagacccacccccgtgcagaagcacgccatccccatcatcaaggagaagagagacctgatggcctgcgcccagaccggcagcggcaagaccgccgccttcctgctgcccatcctgagccagatctacagcgacggccccggcgaggccctgagagccatgaaggagaacggcagatacggcagaagaaagcagtaccccatcagcctggtgctggcccccaccagagagctggccgtgcagatctacgaggaggccagaaagttcagctacagaagcagagtgagaccctgcgtggtgtacggcggcgccgacatcggccagcagatcagagacctggagagaggctgccacctgctggtggccacccccggcagactggtggacatgatggagagaggcaagatcggcctggacttctgcaagtacctggtgctggacgaggccgacagaatgctggacatgggcttcgagccccagatcagaagaatcgtggagcaggacaccatgccccccaagggcgtgagacacaccatgatgttcagcgccaccttccccaaggagatccagatgctggccagagacttcctggacgagtacatcttcctggccgtgggcagagtgggcagcaccagcgagaacatcacccagaaggtggtgtgggtggaggagagcgacaagagaagcttcctgctggacctgctgaacgccaccggcaaggacagcctgaccctggtgttcgtggagaccaagaagggcgccgacagcctggaggacttcctgtaccacgagggctacgcctgcaccagcatccacggcgacagaagccagagagacagagaggaggccctgcaccagttcagaagcggcaagagccccatcctggtggccaccgccgtggccgccagaggcctggacatcagcaacgtgaagcacgtgatcaacttcgacctgcccagcgacatcgaggagtacgtgcacagaatcggcagaaccggcagagtgggcaacctgggcctggccaccagcttcttcaacgagagaaacatcaacatcaccaaggacctgctggacctgctggtggaggccaagcaggaggtgcccagctggctggagaacatggcctacgagcaccactacaagggcagcagcagaggcagaagcaagagcagcagattcagcggcggcttcggcgccagagactacagacagagcagcggcgccagcagcagcagcttcagcagcagcagagccagcagcagcagaagcggcggcggcggccacggcagcagcagaggcttcggcggcggcggctacggcggcttctacaacagcgacggctacggcggcaactacaacagccagggcgtggactggtggggcaactag

SEQ ID NO: 78539 - DNA, 420 bp, synthetic construct
  misc_feature 1..420: note = Description of Artificial Sequence: Synthetic coding sequence
  source 1..420: mol_type = other DNA
atgagccacgtggccgtggagaacgccctgggcctggaccagcagttcgccggcctggacctgaacagcagcgacaaccagagcggcggcagcaccgccagcaagggcagatacatccccccccacctgagaaacagagaggccaccaagggcttctacgacaaggacagcagcggctggagcagcagcaaggacaaggacgcctacagcagcttcggcagcagaagcgacagcagaggcaagagcagcttcttcagcgacagaggcagcggcagcagaggcagattcgacgacagaggcagaagcgactacgacggcatcggcagcagaggcgacagaagcggctacggcggcttctacaacagcgacggctacggcggcaactacaacagccagggcgtggactggtggggcaactag

SEQ ID NO: 78540 - DNA, 1941 bp, synthetic construct
  misc_feature 1..1941: note = Description of Artificial Sequence: Synthetic coding sequence
  source 1..1941: mol_type = other DNA
atgagccacgtggccgtggagaacgccctgggcctggaccagcagttcgccggcctggacctgaacagcagcgacaaccagagcggcggcagcaccgccagcagcttctacgacaaggacagcagcggctggagcagcagcaaggacaaggacgcctacagcagcttcggcagcagaagcgacagcagaggcaagagcagcttcttcagcgacagaggcagcggcagcagaggcagattcgacgacagaggcagaagcgactacgacggcatcggcagcagaggcgacagaagcggcttcggcaagttcgagagaggcggcaacagcagatggtgcgacaagagcgacgaggacgactggagcaagcccctgccccccagcgagagactggagcaggagctgttcagcggcggcaacaccggcatcaacttcgagaagtacgacgacatccccgtggaggccaccggcaacaactgccccccccacatcgagagcttcagcgacgtggagatgggcgagatcatcatgggcaacatcgagctgaccagatacaccagacccacccccgtgcagaagcacgccatccccatcatcaaggagaagagagacctgatggcctgcgcccagaccggcagcggcaagaccgccgccttcctgctgcccatcctgagccagatctacagcgacggccccggcgaggccctgagagccatgaaggagaacggcagatacggcagaagaaagcagtaccccatcagcctggtgctggcccccaccagagagctggccgtgcagatctacgaggaggccagaaagttcagctacagaagcagagtgagaccctgcgtggtgtacggcggcgccgacatcggccagcagatcagagacctggagagaggctgccacctgctggtggccacccccggcagactggtggacatgatggagagaggcaagatcggcctggacttctgcaagtacctggtgctggacgaggccgacagaatgctggacatgggcttcgagccccagatcagaagaatcgtggagcaggacaccatgccccccaagggcgtgagacacaccatgatgttcagcgccaccttccccaaggagatccagatgctggccagagacttcctggacgagtacatcttcctggccgtgggcagagtgggcagcaccagcgagaacatcacccagaaggtggtgtgggtggaggagagcgacaagagaagcttcctgctggacctgctgaacgccaccggcaaggacagcctgaccctggtgttcgtggagaccaagaagggcgccgacagcctggaggacttcctgtaccacgagggctacgcctgcaccagcatccacggcgacagaagccagagagacagagaggaggccctgcaccagttcagaagcggcaagagccccatcctggtggccaccgccgtggccgccagaggcctggacatcagcaacgtgaagcacgtgatcaacttcgacctgcccagcgacatcgaggagtacgtgcacagaatcggcagaaccggcagagtgggcaacctgggcctggccaccagcttcttcaacgagagaaacatcaacatcaccaaggacctgctggacctgctggtggaggccaagcaggaggtgcccagctggctggagaacatggcctacgagcaccactacaagggcagcagcagaggcagaagcaagagcagcagattcagcggcggcttcggcgccagagactacagacagagcagcggcgccagcagcagcagcttcagcagcagcagagccagcagcagcagaagcggcggcggcggccacggcagcagcagaggcttcggcggcggcggctacggcggcttctacaacagcgacggctacggcggcaactacaacagccagggcgtggactggtggggcaactag

SEQ ID NO: 78541 - DNA, 927 bp, synthetic construct
  misc_feature 1..927: note = Description of Artificial Sequence: Synthetic coding sequence
  source 1..927: mol_type = other DNA
atgagagagagcagactgatcagcgacctgggcggcttcgccggcgtgagaagcgccgccggcagagactggagacccttctggctgggcggcctgagacccagcagactggcccagcccggcttccccagcggcggccccggcggcaccagatgcctgagagcctgcgagcagggcttcgccggcctggacctgaacagcagcgacaaccagagcggcggcagcaccgccagcaagggcagatacatccccccccacctgagaaacagagaggccaccaagggcttctacgacaaggacagcagcggctggagcagcagcaaggacaaggacgcctacagcagcttcggcagcagaagcgacagcagaggcaagagcagcttcttcagcgacagaggcagcggcagcagaggcagattcgacgacagaggcagaagcgactacgacggcatcggcagcagaggcgacagaagcggcttcggcaagttcgagagaggcggcaacagcagatggtgcgacaagagcgacgaggacgactggagcaagcccctgccccccagcgagagactggagcaggagctgttcagcggcggcaacaccggcatcaacttcgagaagtacgacgacatccccgtggaggccaccggcaacaactgccccccccacatcgagagcttcagcgacgtggagatgggcgagatcatcatgggcaacatcgagctgaccagatacaccagacccacccccgtgcagaagcacgccatccccatcatcaaggagaagagagacctgatggcctgcgcccagaccggcaagtggaaggtgtgggccccccagaccatccccaacctgctgggcatcagcaccaacgagagagtgggcagcaccgacctgagaggcagccagaagatcttcatccccatctag

SEQ ID NO: 78542 - DNA, 1983 bp, synthetic construct
  misc_feature 1..1983: note = Description of Artificial Sequence: Synthetic coding sequence
  source 1..1983: mol_type = other DNA
atgagccacgtggtggtgaagaacgaccccgagctggaccagcagctggccaacctggacctgaacagcgagaagcagagcggcggcgccagcaccgccagcaagggcagatacatccccccccacctgagaaacagagaggccagcaagggcttccacgacaaggacagcagcggctggagctgcagcaaggacaaggacgcctacagcagcttcggcagcagagacagcagaggcaagcccggctacttcagcgagagaggcagcggcagcagaggcagattcgacgacagaggcagaagcgactacgacggcatcggcaacagagagagacccggcttcggcagattcgagagaagcggccacagcagatggtgcgacaagagcgtggaggacgactggagcaagcccctgccccccagcgagagactggagcaggagctgttcagcggcggcaacaccggcatcaacttcgagaagtacgacgacatccccgtggaggccaccggcagcaactgccccccccacatcgagaacttcagcgacatcgacatgggcgagatcatcatgggcaacatcgagctgaccagatacaccagacccacccccgtgcagaagcacgccatccccatcatcaagggcaagagagacctgatggcctgcgcccagaccggcagcggcaagaccgccgccttcctgctgcccatcctgagccagatctacaccgacggccccggcgaggccctgaaggccgtgaaggagaacggcagatacggcagaagaaagcagtaccccatcagcctggtgctggcccccaccagagagctggccgtgcagatctacgaggaggccagaaagttcagctacagaagcagagtgagaccctgcgtggtgtacggcggcgccgacatcggccagcagatcagagacctggagagaggctgccacctgctggtggccacccccggcagactggtggacatgatggagagaggcaagatcggcctggacttctgcaagtacctggtgctggacgaggccgacagaatgctggacatgggcttcgagccccagatcagaagaatcgtggagcaggacaccatgccccccaagggcgtgagacacaccatgatgttcagcgccaccttccccaaggagatccagatgctggccagagacttcctggacgagtacatcttcctggccgtgggcagagtgggcagcaccagcgagaacatcacccagaaggtggtgtgggtggaggacctggacaagagaagcttcctgctggacatcctgggcgccaccggcagcgacagcctgaccctggtgttcgtggagaccaagaagggcgccgacagcctggaggacttcctgtaccacgagggctacgcctgcaccagcatccacggcgacagaagccagagagacagagaggaggccctgcaccagttcagaagcggcaagagccccatcctggtggccaccgccgtggccgccagaggcctggacatcagcaacgtgagacacgtgatcaacttcgacctgcccagcgacatcgaggagtacgtgcacagaatcggcagaaccggcagagtgggcaacctgggcctggccaccagcttcttcaacgagaagaacatgaacatcaccaaggacctgctggacctgctggtggaggccaagcaggaggtgcccagctggctggagaacatggcctacgagcaccactacaagggcggcagcagaggcagaagcaagagcaacagattcagcggcggcttcggcgccagagactacagacagagcagcggcagcagcagcagcggcttcggcgccagcagaggcagcagcagcagaagcggcggcggcggctacggcaacagcagaggcttcggcggcggcggctacggcggcttctacaacagcgacggctacggcggcaactacaacagccagggcgtggactggtggggcaactag

SEQ ID NO: 78543 - DNA, 1983 bp, synthetic construct; identical to SEQ ID NO: 78542
  misc_feature 1..1983: note = Description of Artificial Sequence: Synthetic coding sequence
  source 1..1983: mol_type = other DNA

SEQ ID NO: 78544 - DNA, 753 bp, synthetic construct
  misc_feature 1..753: note = Description of Artificial Sequence: Synthetic coding sequence
  source 1..753: mol_type = other DNA
atggagatcggcagacccagaaaggacacctggaagctggccaacctggacctgaacagcgagaagcagagcggcggcgccagcaccgccagcaagggcagatacatccccccccacctgagaaacagagaggccagcaagggcttccacgacaaggacagcagcggctggagctgcagcaaggacaaggacgcctacagcagcttcggcagcagagacagcagaggcaagcccggctacttcagcgagagaggcagcggcagcagaggcagattcgacgacagaggcagaagcgactacgacggcatcggcaacagagagagacccggcttcggcagattcgagagaagcggccacagcagatggtgcgacaagagcgtggaggacgactggagcaagcccctgccccccagcgagagactggagcaggagctgttcagcggcggcaacaccggcatcaacttcgagaagtacgacgacatccccgtggaggccaccggcagcaactgccccccccacatcgagaacttcagcgacatcgacatgggcgagatcatcatgggcaacatcgagctgaccagatacaccagacccacccccgtgcagaagcacgccatccccatcatcaagggcaagagagacctgatggcctgcgcccagaccggcagcggcaagaccgccgccttcctgctgcccatcctgagccagatctacaccgacggccccggcgaggccctgaaggccgtgaagtag

SEQ ID NO: 78545 - DNA, 675 bp, synthetic construct
  misc_feature 1..675: note = Description of Artificial Sequence: Synthetic coding sequence
  source 1..675: mol_type = other DNA
atgagccacgtggtggtgaagaacgaccccgagctggaccagcagctggccaacctggacctgaacagcgagaagcagagcggcggcgccagcaccgccagcaagggcagatacatccccccccacctgagaaacagagaggccagcaagggcttccacgacaaggacagcagcggctggagctgcagcaaggacaaggacgcctacagcagcttcggcagcagagacagcagaggcaagcccggctacttcagcgagagaggcagcggcagcagaggcagattcgacgacagaggcagaagcgactacgacggcatcggcaacagagagagacccggcttcggcagattcgagagaagcggccacagcagatggtgcgacaagagcgtggaggacgactggagcaagcccctgccccccagcgagagactggagcaggagctgttcagcggcggcaacaccggcatcaacttcgagaagtacgacgacatccccgtggaggccaccggcagcaactgccccccccacatcgagaacttcagcgacatcgacatgggcgagatcatcatgggcaacatcgagctgaccagatacaccagacccacccccgtgcagaagcacgccatccccatcatcaagggcaagagagacctgatggcctgcgcccagacctag

SEQ ID NO: 78546 - DNA, 1974 bp, synthetic construct
  misc_feature 1..1974: note = Description of Artificial Sequence: Synthetic coding sequence
  source 1..1974: mol_type = other DNA
atggagatcggcagacccagaaaggacacctggaagctggccaacctggacctgaacagcgagaagcagagcggcggcgccagcaccgccagcaagggcagatacatccccccccacctgagaaacagagaggccagcaagggcttccacgacaaggacagcagcggctggagctgcagcaaggacaaggacgcctacagcagcttcggcagcagagacagcagaggcaagcccggctacttcagcgagagaggcagcggcagcagaggcagattcgacgacagaggcagaagcgactacgacggcatcggcaacagagagagacccggcttcggcagattcgagagaagcggccacagcagatggtgcgacaagagcgtggaggacgactggagcaagcccctgccccccagcgagagactggagcaggagctgttcagcggcggcaacaccggcatcaacttcgagaagtacgacgacatccccgtggaggccaccggcagcaactgccccccccacatcgagaacttcagcgacatcgacatgggcgagatcatcatgggcaacatcgagctgaccagatacaccagacccacccccgtgcagaagcacgccatccccatcatcaagggcaagagagacctgatggcctgcgcccagaccggcagcggcaagaccgccgccttcctgctgcccatcctgagccagatctacaccgacggccccggcgaggccctgaaggccgtgaaggagaacggcagatacggcagaagaaagcagtaccccatcagcctggtgctggcccccaccagagagctggccgtgcagatctacgaggaggccagaaagttcagctacagaagcagagtgagaccctgcgtggtgtacggcggcgccgacatcggccagcagatcagagacctggagagaggctgccacctgctggtggccacccccggcagactggtggacatgatggagagaggcaagatcggcctggacttctgcaagtacctggtgctggacgaggccgacagaatgctggacatgggcttcgagccccagatcagaagaatcgtggagcaggacaccatgccccccaagggcgtgagacacaccatgatgttcagcgccaccttccccaaggagatccagatgctggccagagacttcctggacgagtacatcttcctggccgtgggcagagtgggcagcaccagcgagaacatcacccagaaggtggtgtgggtggaggacctggacaagagaagcttcctgctggacatcctgggcgccaccggcagcgacagcctgaccctggtgttcgtggagaccaagaagggcgccgacagcctggaggacttcctgtaccacgagggctacgcctgcaccagcatccacggcgacagaagccagagagacagagaggaggccctgcaccagttcagaagcggcaagagccccatcctggtggccaccgccgtggccgccagaggcctggacatcagcaacgtgagacacgtgatcaacttcgacctgcccagcgacatcgaggagtacgtgcacagaatcggcagaaccggcagagtgggcaacctgggcctggccaccagcttcttcaacgagaagaacatgaacatcaccaaggacctgctggacctgctggtggaggccaagcaggaggtgcccagctggctggagaacatggcctacgagcaccactacaagggcggcagcagaggcagaagcaagagcaacagattcagcggcggcttcggcgccagagactacagacagagcagcggcagcagcagcagcggcttcggcgccagcagaggcagcagcagcagaagcggcggcggcggctacggcaacagcagaggcttcggcggcggcggctacggcggcttctacaacagcgacggctacggcggcaactacaacagccagggcgtggactggtggggcaactag

SEQ ID NO: 78547 - DNA, 1278 bp, synthetic construct
  misc_feature 1..1278: note = Description of Artificial Sequence: Synthetic coding sequence
  source 1..1278: mol_type = other DNA
atggccgagaacgacgtggacaacgagctgctggactacgaggacgacgaggtggagaccgccgccggcggcgacggcgccgaggcccccgccaagaaggacgtgaagggcagctacgtgagcatccacagcagcggcttcagagacttcctgctgaagcccgagctgctgagagccatcgtggactgcggcttcgagcaccccagcgaggtgcagcacgagtgcatcccccaggccatcctgggcatggacgtgctgtgccaggccaagagcggcatgggcaagaccgccgtgttcgtgctggccaccctgcagcagctggagcccgtgaccggccaggtgagcgtgctggtgatgtgccacaccagagagctggccttccagatcagcaaggagtacgagagattcagcaagtacatgcccaacgtgaaggtggccgtgttcttcggcggcctgagcatcaagaaggacgaggaggtgctgaagaagaactgcccccacatcgtggtgggcacccccggcagaatcctggccctggccagaaacaagagcctgaacctgaagcacatcaagcacttcatcctggacgagtgcgacaagatgctggagcagctggacatgagaagagacgtgcaggagatcttcagaatgaccccccacgagaagcaggtgatgatgttcagcgccaccctgagcaaggagatcagacccgtgtgcagaaagttcatgcaggaccccatggagatcttcgtggacgacgagaccaagctgaccctgcacggcctgcagcagtactacgtgaagctgaaggacaacgagaagaacagaaagctgttcgacctgctggacgtgctggagttcaaccaggtggtgatcttcgtgaagagcgtgcagagatgcatcgccctggcccagctgctggtggagcagaacttccccgccatcgccatccacagaggcatgccccaggaggagagactgagcagataccagcagttcaaggacttccagagaagaatcctggtggccaccaacctgttcggcagaggcatggacatcgagagagtgaacatcgccttcaactacgacatgcccgaggacagcgacacctacctgcacagatgctaccccctgagccccagcagatggcccgagcaggccggcctggcccccagagcctggctgagccacctgtgccccatgagaatgatgcccagaagcagcatgatgtgcagaatcgccctgagaagcatcctggtgagctgcctgatgagatag

SEQ ID NO: 78548 - DNA, 1287 bp, synthetic construct
  misc_feature 1..1287: note = Description of Artificial Sequence: Synthetic coding sequence
  source 1..1287: mol_type = other DNA
atggccgagaacgacgtggacaacgagctgctggactacgaggacgacgaggtggagaccgccgccggcggcgacggcgccgaggcccccgccaagaaggacgtgaagggcagctacgtgagcatccacagcagcggcttcagagacttcctgctgaagcccgagctgctgagagccatcgtggactgcggcttcgagcaccccagcgaggtgcagcacgagtgcatcccccaggccatcctgggcatggacgtgctgtgccaggccaagagcggcatgggcaagaccgccgtgttcgtgctggccaccctgcagcagctggagcccgtgaccggccaggtgagcgtgctggtgatgtgccacaccagagagctggccttccagatcagcaaggagtacgagagattcagcaagtacatgcccaacgtgaaggtggccgtgttcttcggcggcctgagcatcaagaaggacgaggaggtgctgaagaagaactgcccccacatcgtggtgggcacccccggcagaatcctggccctggccagaaacaagagcctgaacctgaagcacatcaagcacttcatcctggacgagtgcgacaagatgctggagcagctggacatgagaagagacgtgcaggagatcttcagaatgaccccccacgagaagcaggtgatgatgttcagcgccaccctgagcaaggagatcagacccgtgtgcagaaagttcatgcaggaccccatggagatcttcgtggacgacgagaccaagctgaccctgcacggcctgcagcagtactacgtgaagctgaaggacaacgagaagaacagaaagctgttcgacctgctggacgtgctggagttcaaccaggtggtgatcttcgtgaagagcgtgcagagatgcatcgccctggcccagctgctggtggagcagaacttccccgccatcgccatccacagaggcatgccccaggaggagagactgagcagataccagcagttcaaggacttccagagaagaatcctggtggccaccaacctgttcggcagaggcatggacatcgagagagtgaacatcgccttcaactacgacatgcccgaggacagcgacacctacctgcacagagtggccagagccggcagattcggcaccaagggcctggccatcaccttcgtgagcgacgagaacgacgccaagatcctgaacgacgtgcaggacagattcgaggtgaacatcagcgagctgcccgacgagatcgacatcagcagctacatcgagcagaccagatag

SEQ ID NO: 78549 - DNA, 1287 bp, synthetic construct; identical to SEQ ID NO: 78548
  misc_feature 1..1287: note = Description of Artificial Sequence: Synthetic coding sequence
  source 1..1287: mol_type = other DNA

SEQ ID NO: 78550 - DNA, 1278 bp, synthetic construct; identical to SEQ ID NO: 78547
  misc_feature 1..1278: note = Description of Artificial Sequence: Synthetic coding sequence
  source 1..1278: mol_type = other DNA

SEQ ID NO: 78551 - DNA, 1287 bp, synthetic construct; identical to SEQ ID NO: 78548
  misc_feature 1..1287: note = Description of Artificial Sequence: Synthetic coding sequence
  source 1..1287: mol_type = other DNA

SEQ ID NO: 78552 - DNA, 1287 bp, synthetic construct; identical to SEQ ID NO: 78548
  misc_feature 1..1287: note = Description of Artificial Sequence: Synthetic coding sequence
  source 1..1287: mol_type = other DNA

SEQ ID NO: 78553 - DNA, 564 bp, synthetic construct
  misc_feature 1..564: note = Description of Artificial Sequence: Synthetic coding sequence
  source 1..564: mol_type = other DNA
atgggcagcagccacatcggcggcctgagcatcaacgagagaagatgcagcgccagcctgggcctggtgatggccgagaacgacgtggacaacgagctgctggactacgaggacgacgaggtggagaccgccgccggcggcgacggcgccgaggcccccgccaagaaggacgtgaagggcagctacgtgagcatccacagcagcggcttcagagacttcctgctgaagcccgagctgctgagagccatcgtggactgcggcttcgagcaccccagcgaggtgcagcacgagtgcatcccccaggccatcctgggcatggacgtgctgtgccaggccaagagcggcatgggcaagaccgccgtgttcgtgctggccaccctgcagcagctggagcccgtgaccggccaggtgagcgtgctggtgatgtgccacaccagagagctggccttccagatcagcaaggagtacgagagattcagcaagtacatgcccaacgtgaaggtggccgtgttcttcggcggcctgagcatcaagaaggacgaggaggtgctgaagaagaactag

SEQ ID NO: 78554 - DNA, 1287 bp, synthetic construct; identical to SEQ ID NO: 78548
  misc_feature 1..1287: note = Description of Artificial Sequence: Synthetic coding sequence
  source 1..1287: mol_type = other DNA

SEQ ID NO: 78555 - DNA, 378 bp, synthetic construct
  misc_feature 1..378: note = Description of Artificial Sequence: Synthetic coding sequence
  source 1..378: mol_type = other DNA
atggccgagaacgacgtggacaacgagctgctggactacgaggacgacgaggtggagaccgccgccggcggcgacggcgccgaggcccccgccaagaaggacgtgaagggcagctacgtgagcatccacagcagcggcttcagagacttcctgctgaagcccgagctgctgagagccatcgtggactgcggcttcgagcaccccagcgaggtgcagcacgagtgcatcccccaggccatcctgggcatggacgtgctgtgccaggccaagagcggcatgggcaagaccgccgtgttcgtgctggccaccctgcagcagctggagcccgtgaccggccaggtgagcgtgctggtgatgtgccacaccagagagctgtag

SEQ ID NO: 78556 - DNA, 1287 bp, synthetic construct; identical to SEQ ID NO: 78548
  misc_feature 1..1287: note = Description of Artificial Sequence: Synthetic coding sequence
  source 1..1287: mol_type = other DNA

SEQ ID NO: 78557 - DNA, 564 bp, synthetic construct
  misc_feature 1..564: note = Description of Artificial Sequence: Synthetic coding sequence
  source 1..564: mol_type = other DNA
tgaagcgaggagagagacatcggcaagcccatggagatcttcgtggacgacgagaccaagctgaccctgcacggcctgcagcagtactacgtgaagctgaaggacaacgagaagaacagaaagctgttcgacctgctggacgtgctggagttcaaccaggtggtgatcttcgtgaagagcgtgcagagatgcatcgccctggcccagctgctggtggagcagaacttccccgccatcgccatccacagaggcatgccccaggaggagagactgagcagataccagcagttcaaggacttccagagaagaatcctggtggccaccaacctgttcggcagaggcatggacatcgagagagtgaacatcgccttcaactacgacatgcccgaggacagcgacacctacctgcacagagtggccagagccggcagattcggcaccaagggcctggccatcaccttcgtgagcgacgagaacgacgccaagatcctgaacgacgtgcaggacagattcgaggtgaacatcagcgagctgcccgacgagatcgacatcagcagctactag

SEQ ID NO: 78558 - DNA, 378 bp, synthetic construct; identical to SEQ ID NO: 78555
  misc_feature 1..378: note = Description of Artificial Sequence: Synthetic coding sequence
  source 1..378: mol_type = other DNA

SEQ ID NO: 78559 - DNA, 1287 bp, synthetic construct; identical to SEQ ID NO: 78548
  misc_feature 1..1287: note = Description of Artificial Sequence: Synthetic coding sequence
  source 1..1287: mol_type = other DNA

SEQ ID NO: 78560 - DNA, 870 bp, synthetic construct
  misc_feature 1..870: note = Description of Artificial Sequence: Synthetic coding sequence
  source 1..870: mol_type = other DNA
atggccgagaacgacgtggacaacgagctgctggactacgaggacgacgaggtggagaccgccgccggcggcgacggcgccgaggcccccgccaagaaggacgtgaagggcagctacgtgagcatccacagcagcggcttcagagacttcctgctgaagcccgagctgctgagagccatcgtggactgcggcttcgagcaccccagcgaggtgcagcacgagtgcatcccccaggccatcctgggcatggacgtgctgtgccaggccaagagcggcatgggcaagaccgccgtgttcgtgctggccaccctgcagcagctggagcccgtgaccggccaggtgagcgtgctggtgatgtgccacaccagagagctggccttccagatcagcaaggagtacgagagattcagcaagtacatgcccaacgtgaaggtggccgtgttcttcggcggcctgagcatcaagaaggacgaggaggtgctgaagaagaactgcccccacatcgtggtgggcacccccggcagaatcctggccctggccagaaacaagagcctgaacctgaagcacatcaagcacttcatcctggacgagtgcgacaagatgctggagcagctggacatgagaagagacgtgcaggagatcttcagaatgaccccccacgagaagcaggtgatgatgttcagcgccaccctgagcaaggagatcagacccgtgtgcagaaagttcatgcaggaccccatggagatcttcgtggacgacgagaccaagctgaccctgcacggcctgcagcagtactacgtgaagctgaaggacaacgagaagaacagaaagctgttcgacctgctggacgtgctggagttcaaccagtag

SEQ ID NO: 78561 - DNA, 1287 bp, synthetic construct; identical to SEQ ID NO: 78548
  misc_feature 1..1287: note = Description of Artificial Sequence: Synthetic coding sequence
  source 1..1287: mol_type = other DNA

SEQ ID NO: 78562 - DNA, 291 bp, synthetic construct
  misc_feature 1..291: note = Description of Artificial Sequence: Synthetic coding sequence
  source 1..291: mol_type = other DNA
atggccgagaacgacgtggacaacgagctgctggactacgaggacgacgaggtggagaccgccgccggcggcgacggcgccgaggcccccgccaagaaggacgtgaagggcagctacgtgagcatccacagcagcggcttcagagacttcctgctgaagcccgagctgctgagagccatcgtggactgcggcttcgagcaccccagcgaggtgcagcacgagtgcatcccccaggccatcctgggcatggacgtgctgtgccaggccaagagcggcatgggcaagacctag

SEQ ID NO: 78563 - DNA, 378 bp, synthetic construct; identical to SEQ ID NO: 78555
  misc_feature 1..378: note = Description of Artificial Sequence: Synthetic coding sequence
  source 1..378: mol_type = other DNA

SEQ ID NO: 78564 - DNA, 696 bp, synthetic construct
  misc_feature 1..696: note = Description of Artificial Sequence: Synthetic coding sequence
  source 1..696: mol_type = other DNA
atggccgagaacgacgtggacaacgagctgctggactacgaggacgacgaggtggagaccgccgccggcggcgacggcgccgaggcccccgccaagaaggacgtgaagggcagctacgtgagcatccacagcagcggcttcagagacttcctgctgaagcccgagctgctgagagccatcgtggactgcggcttcgagcaccccagcgaggtgcagcacgagtgcatcccccaggccatcctgggcatggacgtgctgtgccaggccaagagcggcatgggcaagaccgccgtgttcgtgctggccaccctgcagcagctggagcccgtgaccggccaggtgagcgtgctggtgatgtgccacaccagagagctggccttccagatcagcaaggagtacgagagattcagcaagtacatgcccaacgtgaaggtggccgtgttcttcggcggcctgagcatcaagaaggacgaggaggtgctgaagaagaactgcccccacatcgtggtgggcacccccggcagaatcctggccctggccagaaacaagagcctgaacctgaagcacatcaagcacttcatcctggacgagtgcgacaagatgctggagcagctggacatgagaagagacgtgcaggagatcttcagaatgaccccccacgagaagcaggtgatgatgttcagcgccaccctgtag

SEQ ID NO: 78565 - DNA, 399 bp, synthetic construct
  misc_feature 1..399: note = Description of Artificial Sequence: Synthetic coding sequence
  source 1..399: mol_type = other DNA
atggccgagaacgacgtggacaacgagctgctggactacgaggacgacgaggtggagaccgccgccggcggcgacggcgccgaggcccccgccaagaaggacgtgaagggcagctacgtgagcatccacagcagcggcttcagagacttcctgctgaagcccgagctgctgagagccatcgtggactgcggcttcgagcaccccagcgaggtgcagcacgagtgcatcccccaggccatcctgggcatggacgtgctgtgccaggccaagagcggcatgggcaagaccgccgtgttcgtgctggccaccctgcagcagctggagcccgtgaccggccaggtgtgcttctgcgacagccacttccccagaggcgacaacgaggagctgcacctgccctag

SEQ ID NO: 78566 - DNA, 1053 bp, synthetic construct
  misc_feature 1..1053: note = Description of Artificial Sequence: Synthetic coding sequence
  source 1..1053: mol_type = other DNA
atgtggaccatgagcagctggaccatgaagatgatgagatggagacagcagctgggcgagatgggcctgagacccctgcccagaagaatgagcagagcccccatgagccccagcaccgccctggccttcgtgaccagctgcagcagccagagctgcagcggccccctgagcaccgtggccctgagcatcagacagaaggtggccgtgttcttcggcggcctgagcatcaagaaggacgaggaggtgctgaagaagaactgcccccacatcgtggtgggcacccccggcagaatcctggccctggccagaaacaagagcctgaacctgaagcacatcaagcacttcatcctggacgagtgcgacaagatgctggagcagctggacatgagaagagacgtgcaggagatcttcagaatgaccccccacgagaagcaggtgatgatgttcagcgccaccctgagcaaggagatcagacccgtgtgcagaaagttcatgcaggaccccatggagatcttcgtggacgacgagaccaagctgaccctgcacggcctgcagcagtactacgtgaagctgaaggacaacgagaagaacagaaagctgttcgacctgctggacgtgctggagttcaaccaggtggtgatcttcgtgaagagcgtgcagagatgcatcgccctggcccagctgctggtggagcagaacttccccgccatcgccatccacagaggcatgccccaggaggagagactgagcagataccagcagttcaaggacttccagagaagaatcctggtggccaccaacctgttcggcagaggcatggacatcgagagagtgaacatcgccttcaactacgacatgcccgaggacagcgacacctacctgcacagagtggccagagccggcagattcggcaccaagggcctggccatcaccttcgtgagcgacgagaacgacgccaagatcctgaacgacgtgcaggacagattcgaggtgaacatcagcgagctgcccgacgagatcgacatcagcagctacatcgagcagaccagatag

SEQ ID NO: 78567 - DNA, 738 bp, synthetic construct
  misc_feature 1..738: note = Description of Artificial Sequence: Synthetic coding sequence
  source 1..738: mol_type = other DNA
atgtggaccatgagcagctggaccatgaagatgatgagatggagacagcagctgggcgagatgggcctgagacccctgcccagaagaatgagcagagcccccatgagccccagcaccgccctggccttcgtgaccagctgcagcagccagagctgcagcggccccctgagcaccgtggccctgagcatcagacagaaggtggccgtgttcttcggcggcctgagcatcaagaaggacgaggaggtgctgaagaagaactgcccccacatcgtggtgggcacccccggcagaatcctggccctggccagaaacaagagcctgaacctgaagcacatcaagcacttcatcctggacgagtgcgacaagatgctggagcagctggacatgagaagagacgtgcaggagatcttcagaatgaccccccacgagaagcaggtgatgatgttcagcgccaccctgagcaaggagatcagacccgtgtgcagaaagttcatgcaggaccccatggagatcttcgtggacgacgagaccaagctgaccctgcacggcctgcagcagtactacgtgaagctgaaggacaacgagaagaacagaaagctgttcgacctgctggacgtgctggagttcaaccaggtggtgatcttcgtgaagagcgtgcagagatgcatcgccctggcccagctgctggtggagcagaacttccccgccatcgccatccacagaggcatgccccagtag

SEQ ID NO: 78568 - DNA, 411 bp, synthetic construct
  misc_feature 1..411: note = Description of Artificial Sequence: Synthetic coding sequence
  source 1..411: mol_type = other DNA
atgggcggcggcagaagaccctacgacgtgttcttcagcaaggtgatggccgagaacgacgtggacaacgagctgctggactacgaggacgacgaggtggagaccgccgccggcggcgacggcgccgaggcccccgccaagaaggacgtgaagggcagctacgtgagcatccacagcagcggcttcagagacttcctgctgaagcccgagctgctgagagccatcgtggactgcggcttcgagcaccccagcgaggtgcagcacgagtgcatcccccaggccatcctgggcatggacgtgctgtgccaggccaagagcggcatgggcaagaccgccgtgttcgtgctggccaccctgcagcagctggagcccgtgaccggccaggtgagcgtgctggtgatgtgccactag

SEQ ID NO: 78569 - DNA, 1287 bp, synthetic construct; identical to SEQ ID NO: 78548
  misc_feature 1..1287: note = Description of Artificial Sequence: Synthetic coding sequence
  source 1..1287: mol_type = other DNA

SEQ ID NO: 78570 - DNA, 594 bp, synthetic construct
  misc_feature 1..594: note = Description of Artificial Sequence: Synthetic coding sequence
  source 1..594: mol_type = other DNA
atggccgagaacgacgtggacaacgagctgctggactacgaggacgacgaggtggagaccgccgccggcggcgacggcgccgaggcccccgccaagaaggacgtgaagggcagctacgtgagcatccacagcagcggcttcagagacttcctgctgaagcccgagctgctgagagccatcgtggactgcggcttcgagcaccccagcgaggtgcagcacgagtgcatcccccaggccatcctgggcatggacgtgctgtgccaggccaagagcggcatgggcaagaccgccgtgttcgtgctggccaccctgcagcagctggagcccgtgaccggccaggtgtgcttctgcgacagccacttccccagaggcgacaacgaggagctgcacctgccctacgtgagcgtgtacttcctgcccaaggtgagcgtgctggtgatgtgccacaccagagagctggccttccagatcagcaaggagtacgagagattcagcaagtacatgcccaacgtgaaggtggccgtgttcttcggcggcctgagcatcaagaaggacgaggaggtgctgaagaagaactgcccccacatcgtgtag

SEQ ID NO: 78571 - DNA, 570 bp, synthetic construct
  misc_feature 1..570: note = Description of Artificial Sequence: Synthetic coding sequence
  source 1..570: mol_type = other DNA
tgagccaccctgcagcagctggagcccgtgaccggccaggtgagcgtgctggtgatgtgccacaccagagagctggccttccagatcagcaaggagtacgagagattcagcaagtacatgcccaacgtgaaggtggccgtgttcttcggcggcctgagcatcaagaaggacgaggaggtgctgaagaagaactgcccccacatcgtggtgggcacccccggcagaatcctggccctggccagaaacaagagcctgaacctgaagcacatcaagcacttcatcctggacgagtgcgacaagatgctggagcagctggacatgagaagagacgtgcaggagatcttcagaatgaccccccacgagaagcaggtgatgatgttcagcgccaccctgagcaaggagatcagacccgtgtgcagaaagttcatgcaggaccccatggagatcttcgtggacgacgagaccaagctgaccctgcacggcctgcagcagtactacgtgaagctgaaggacaacgagaagaacagaaagctgttcgacctgctggacgtgctggagttcaaccagtag

SEQ ID NO: 78572 - DNA, 1287 bp, synthetic construct; identical to SEQ ID NO: 78548
  misc_feature 1..1287: note = Description of Artificial Sequence: Synthetic coding sequence
  source 1..1287: mol_type = other DNA

SEQ ID NO: 78573 - DNA, 711 bp, synthetic construct
  misc_feature 1..711: note = Description of Artificial Sequence: Synthetic coding sequence
  source 1..711: mol_type = other DNA
atggccgagaacgacgtggacaacgagctgctggactacgaggacgacgaggtggagaccgccgccggcggcgacggcgccgaggcccccgccaagaaggacgtgaagggcagctacgtgagcatccacagcagcggcttcagagacttcctgctgaagcccgagctgctgagagccatcgtggactgcggcttcgagcaccccagcgaggtgcagcacgagtgcatcccccaggccatcctgggcatggacgtgctgtgccaggccaagagcggcatgggcaagaccgccgtgttcgtgctggccaccctgcagcagctggagcccgtgaccggccaggtgagcgtgctggtgatgtgccacaccagagagctggccttccagatcagcaaggagtacgagagattcagcaagtacatgcccaacgtgaaggtggccgtgttcttcggcggcctgagcatcaagaaggacgaggaggtgctgaagaagaactgcccccacatcgtggtgggcacccccggcagaatcctggccctggccagaaacaagagcctgaacctgaagcacatcaagcacttcatcctggacgagtgcgacaagatgctggagcagctggacatgagaagagacgtgcaggagatcttcagaatgaccccccacgagaagcaggtgatgatgttcagcgccaccctgagcaaggagatcagatag

SEQ ID NO: 78574 - DNA, 564 bp, synthetic construct
  misc_feature 1..564: note = Description of Artificial Sequence: Synthetic coding sequence
  source 1..564: mol_type = other DNA
atgggcagcagccacatcggcggcctgagcatcaacgagagaagaagaagcgccagcctgggcctggtgatggccgagaacgacgtggacaacgagctgctggactacgaggacgacgaggtggagaccgccgccggcggcgacggcgccgaggcccccgccaagaaggacgtgaagggcagctacgtgagcatccacagcagcggcttcagagacttcctgctgaagcccgagctgctgagagccatcgtggactgcggcttcgagcaccccagcgaggtgcagcacgagtgcatcccccaggccatcctgggcatggacgtgctgtgccaggccaagagcggcatgggcaagaccgccgtgttcgtgctggccaccctgcagcagctggagcccgtgaccggccaggtgagcgtgctggtgatgtgccacaccagagagctggccttccagatcagcaaggagtacgagagattcagcaagtacatgcccaacgtgaaggtggccgtgttcttcggcggcctgagcatcaagaaggacgaggaggtgctgaagaagaactag

SEQ ID NO: 78575 - DNA, 399 bp, synthetic construct; identical to SEQ ID NO: 78565
  misc_feature 1..399: note = Description of Artificial Sequence: Synthetic coding sequence
  source 1..399: mol_type = other DNA

SEQ ID NO: 78576 - DNA, 1332 bp, synthetic construct
  misc_feature 1..1332: note = Description of Artificial Sequence: Synthetic coding sequence
  source 1..1332: mol_type = other DNA
atggccgagaacgacgtggacaacgagctgctggactacgaggacgacgaggtggagaccgccgccggcggcgacggcgccgaggcccccgccaagaaggacgtgaagggcagctacgtgagcatccacagcagcggcttcagagacttcctgctgaagcccgagctgctgagagccatcgtggactgcggcttcgagcaccccagcgaggtgcagcacgagtgcatcccccaggccatcctgggcatggacgtgctgtgccaggccaagagcggcatgggcaagaccgccgtgttcgtgctggccaccctgcagcagctggagcccgtgaccggccaggtgtacctgggcagagtgctgggcagaggcttctggtgcgtgttcgtgagcgtgctggtgatgtgccacaccagagagctggccttccagatcagcaaggagtacgagagattcagcaagtacatgcccaacgtgaaggtggccgtgttcttcggcggcctgagcatcaagaaggacgaggaggtgctgaagaagaactgcccccacatcgtggtgggcacccccggcagaatcctggccctggccagaaacaagagcctgaacctgaagcacatcaagcacttcatcctggacgagtgcgacaagatgctggagcagctggacatgagaagagacgtgcaggagatcttcagaatgaccccccacgagaagcaggtgatgatgttcagcgccaccctgagcaaggagatcagacccgtgtgcagaaagttcatgcaggaccccatggagatcttcgtggacgacgagaccaagctgaccctgcacggcctgcagcagtactacgtgaagctgaaggacaacgagaagaacagaaagctgttcgacctgctggacgtgctggagttcaaccaggtggtgatcttcgtgaagagcgtgcagagatgcatcgccctggcccagctgctggtggagcagaacttccccgccatcgccatccacagaggcatgccccaggaggagagactgagcagataccagcagttcaaggacttccagagaagaatcctggtggccaccaacctgttcggcagaggcatggacatcgagagagtgaacatcgccttcaactacgacatgcccgaggacagcgacacctacctgcacagagtggccagagccggcagattcggcaccaagggcctggccatcaccttcgtgagcgacgagaacgacgccaagatcctgaacgacgtgcaggacagattcgaggtgaacatcagcgagctgcccgacgagatcgacatcagcagctacatcgagcagaccagatag

SEQ ID NO: 78577 - DNA, 870 bp, synthetic construct; identical to SEQ ID NO: 78560
  misc_feature 1..870: note = Description of Artificial Sequence: Synthetic coding sequence
  source 1..870: mol_type = other DNA

SEQ ID NO: 78578 - DNA, 564 bp, synthetic construct; identical to SEQ ID NO: 78557
  misc_feature 1..564: note = Description of Artificial Sequence: Synthetic coding sequence
  source 1..564: mol_type = other DNA

SEQ ID NO: 78579 - DNA, 411 bp, synthetic construct; identical to SEQ ID NO: 78568
  misc_feature 1..411: note = Description of Artificial Sequence: Synthetic coding sequence
  source 1..411: mol_type = other DNA

SEQ ID NO: 78580 - DNA, 411 bp, synthetic construct; identical to SEQ ID NO: 78568
  misc_feature 1..411: note = Description of Artificial Sequence: Synthetic coding sequence
  source 1..411: mol_type = other DNA

SEQ ID NO: 78581 - DNA, 399 bp, synthetic construct; identical to SEQ ID NO: 78565
  misc_feature 1..399: note = Description of Artificial Sequence: Synthetic coding sequence
  source 1..399: mol_type = other DNA

SEQ ID NO: 78582 - DNA, 711 bp, synthetic construct; identical to SEQ ID NO: 78573
  misc_feature 1..711: note = Description of Artificial Sequence: Synthetic coding sequence
  source 1..711: mol_type = other DNA

SEQ ID NO: 78583 - DNA, 378 bp, synthetic construct; identical to SEQ ID NO: 78555
  misc_feature 1..378: note = Description of Artificial Sequence: Synthetic coding sequence
  source 1..378: mol_type = other DNA

SEQ ID NO: 78584 - DNA, 987 bp, synthetic construct
  misc_feature 1..987: note = Description of Artificial Sequence: Synthetic coding sequence
  source 1..987: mol_type = other DNA
tgagccaccctgcagcagctggagcccgtgaccggccaggtgagcgtgctggtgatgtgccacaccagagagctggccttccagatcagcaaggagtacgagagattcagcaagtacatgcccaacgtgaaggtggccgtgttcttcggcggcctgagcatcaagaaggacgaggaggtgctgaagaagaactgcccccacatcgtggtgggcacccccggcagaatcctggccctggccagaaacaagagcctgaacctgaagcacatcaagcacttcatcctggacgagtgcgacaagatgctggagcagctggacatgagaagagacgtgcaggagatcttcagaatgaccccccacgagaagcaggtgatgatgttcagcgccaccctgagcaaggagatcagacccgtgtgcagaaagttcatgcaggaccccatggagatcttcgtggacgacgagaccaagctgaccctgcacggcctgcagcagtactacgtgaagctgaaggacaacgagaagaacagaaagctgttcgacctgctggacgtgctggagttcaaccaggtggtgatcttcgtgaagagcgtgcagagatgcatcgccctggcccagctgctggtggagcagaacttccccgccatcgccatccacagaggcatgccccaggaggagagactgagcagataccagcagttcaaggacttccagagaagaatcctggtggccaccaacctgttcggcagaggcatggacatcgagagagtgaacatcgccttcaactacgacatgcccgaggacagcgacacctacctgcacagagtggccagagccggcagattcggcaccaagggcctggccatcaccttcgtgagcgacgagaacgacgccaagatcctgaacgacgtgcaggacagattcgaggtgaacatcagcgagctgcccgacgagatcgacatcagcagctacatcgagcagaccagatag

SEQ ID NO: 78585 - DNA, 711 bp, synthetic construct; identical to SEQ ID NO: 78573
  misc_feature 1..711: note = Description of Artificial Sequence: Synthetic coding sequence
  source 1..711: mol_type = other DNA

SEQ ID NO: 78586 - DNA, 564 bp, synthetic construct; identical to SEQ ID NO: 78557
  misc_feature 1..564: note = Description of Artificial Sequence: Synthetic coding sequence
  source 1..564: mol_type = other DNA

SEQ ID NO: 78587 - DNA, 378 bp, synthetic construct; identical to SEQ ID NO: 78555
  misc_feature 1..378: note = Description of Artificial Sequence: Synthetic coding sequence
  source 1..378: mol_type = other DNA

SEQ ID NO: 78588 - DNA, 291 bp, synthetic construct; identical to SEQ ID NO: 78562
  misc_feature 1..291: note = Description of Artificial Sequence: Synthetic coding sequence
  source 1..291: mol_type = other DNA

SEQ ID NO: 78589 - DNA, 378 bp, synthetic construct; identical to SEQ ID NO: 78555
  misc_feature 1..378: note = Description of Artificial Sequence: Synthetic coding sequence
  source 1..378: mol_type = other DNA

SEQ ID NO: 78590 - DNA, 987 bp, synthetic construct; identical to SEQ ID NO: 78584
  misc_feature 1..987: note = Description of Artificial Sequence: Synthetic coding sequence
  source 1..987: mol_type = other DNA

SEQ ID NO: 78591 - DNA, 870 bp, synthetic construct; identical to SEQ ID NO: 78560
  misc_feature 1..870: note = Description of Artificial Sequence: Synthetic coding sequence
  source 1..870: mol_type = other DNA

SEQ ID NO: 78592 - DNA, 738 bp, synthetic construct; identical to SEQ ID NO: 78567
  misc_feature 1..738: note = Description of Artificial Sequence: Synthetic coding sequence
  source 1..738: mol_type = other DNA

SEQ ID NO: 78593 - DNA, 738 bp, synthetic construct; identical to SEQ ID NO: 78567
  misc_feature 1..738: note = Description of Artificial Sequence: Synthetic coding sequence
  source 1..738: mol_type = other DNA

SEQ ID NO: 78594 - DNA, 396 bp, synthetic construct
  misc_feature 1..396: note = Description of Artificial Sequence: Synthetic coding sequence
  source 1..396: mol_type = other DNA
tgagccaccctgcagcagctggagcccgtgaccggccaggtgagcgtgctggtgatgtgccacaccagagagctggccttccagatcagcaaggagtacgagagattcagcaagtacatgcccaacgtgaaggtggccgtgttcttcggcggcctgagcatcaagaaggacgaggaggtgctgaagaagaactgcccccacatcgtggtgggcacccccggcagaatcctggccctggccagaaacaagagcctgaacctgaagcacatcaagcacttcatcctggacgagtgcgacaagatgctggagcagctggacatgagaagagacgtgcaggagatcttcagaatgaccccccacgagaagcaggtgatgatgttcagcgccaccctgtag

SEQ ID NO: 78595 - DNA, 411 bp, synthetic construct
  misc_feature 1..411: note = Description of Artificial Sequence: Synthetic coding sequence
  source 1..411: mol_type = other DNA
tgagccaccctgcagcagctggagcccgtgaccggccaggtgagcgtgctggtgatgtgccacaccagagagctggccttccagatcagcaaggagtacgagagattcagcaagtacatgcccaacgtgaaggtggccgtgttcttcggcggcctgagcatcaagaaggacgaggaggtgctgaagaagaactgcccccacatcgtggtgggcacccccggcagaatcctggccctggccagaaacaagagcctgaacctgaagcacatcaagcacttcatcctggacgagtgcgacaagatgctggagcagctggacatgagaagagacgtgcaggagatcttcagaatgaccccccacgagaagcaggtgatgatgttcagcgccaccctgagcaaggagatcagatag

SEQ ID NO: 78596 - DNA, 717 bp, synthetic construct
  misc_feature 1..717: note = Description of Artificial Sequence: Synthetic coding sequence
  source 1..717: mol_type = other DNA
atggccgagaacgacgtggacaacgagctgctggactacgaggacgacgaggtggagaccgccgccggcggcgacggcgccgaggcccccgccaagaaggacgtgaagggcagctacgtgagcatccacagcagcggcttcagagacttcctgctgaagcccgagctgctgagagccatcgtggactgcggcttcgagcaccccagcgaggtgcagcacgagtgcatcccccaggccatcctgggcatggacgtgctgtgccaggccaagagcggcatgggcaagaccgccgtgttcgtgctggccaccctgcagcagctggagcccgtgaccggccaggtgagcgtgctggtgatgtgccacaccagagagctggccttccagatcagcaaggagtacgagagattcagcaagtacatgcccaacgtgaaggtggccgtgttcttcggcggcctgagcatcaagaaggacgaggaggtgctgaagaagaactgcccccacatcgtggtgggcacccccggcagaatcctggccctggccagaaacaagagcctgaacctgaagcacatcaagcacttcatcctggacgagtgcgacaagatgctggagcagctggacatgagaagagacgtgcaggagatcttcagaatgaccccccacgagaagcaggtgatgatgttcagcgccaccctgagcaaggagatcagacccgtgtag

SEQ ID NO: 78597 - DNA, 564 bp, synthetic construct; identical to SEQ ID NO: 78557
  misc_feature 1..564: note = Description of Artificial Sequence: Synthetic coding sequence
  source 1..564: mol_type = other DNA

SEQ ID NO: 78598 - DNA, 594 bp, synthetic construct; identical to SEQ ID NO: 78570
  misc_feature 1..594: note = Description of Artificial Sequence: Synthetic coding sequence
  source 1..594: mol_type = other DNA

SEQ ID NO: 78599 - DNA, 594 bp, synthetic construct; identical to SEQ ID NO: 78570
  misc_feature 1..594: note = Description of Artificial Sequence: Synthetic coding sequence
  source 1..594: mol_type = other DNA

SEQ ID NO: 78600 - DNA, 411 bp, synthetic construct; identical to SEQ ID NO: 78568
  misc_feature 1..411: note = Description of Artificial Sequence: Synthetic coding sequence
  source 1..411: mol_type = other DNA

SEQ ID NO: 78601 - DNA, 1278 bp, synthetic construct; identical to SEQ ID NO: 78547
  misc_feature 1..1278: note = Description of Artificial Sequence: Synthetic coding sequence
  source 1..1278: mol_type = other DNA

SEQ ID NO: 78602 - DNA, 1287 bp, synthetic construct; identical to SEQ ID NO: 78548
  misc_feature 1..1287: note = Description of Artificial Sequence: Synthetic coding sequence
  source 1..1287: mol_type = other DNA

SEQ ID NO: 78603 - DNA, 1287 bp, synthetic construct; identical to SEQ ID NO: 78548
  misc_feature 1..1287: note = Description of Artificial Sequence: Synthetic coding sequence
  source 1..1287: mol_type = other DNA

SEQ ID NO: 78604 - DNA, 738 bp, synthetic construct; identical to SEQ ID NO: 78567
  misc_feature 1..738: note = Description of Artificial Sequence: Synthetic coding sequence
  source 1..738: mol_type = other DNA

SEQ ID NO: 78605 - DNA, 696 bp, synthetic construct; identical to SEQ ID NO: 78564
  misc_feature 1..696: note = Description of Artificial Sequence: Synthetic coding sequence
  source 1..696: mol_type = other DNA

SEQ ID NO: 78606 - DNA, 594 bp, synthetic construct; identical to SEQ ID NO: 78570
  misc_feature 1..594: note = Description of Artificial Sequence: Synthetic coding sequence
  source 1..594: mol_type = other DNA

SEQ ID NO: 78607 - DNA, 594 bp, synthetic construct; identical to SEQ ID NO: 78570
  misc_feature 1..594: note = Description of Artificial Sequence: Synthetic coding sequence
  source 1..594: mol_type = other DNA

SEQ ID NO: 78608 - DNA, 540 bp, synthetic construct
  misc_feature 1..540: note = Description of Artificial Sequence: Synthetic coding sequence
  source 1..540: mol_type = other DNA
gtggccgtgttcttcggcggcctgagcatcaagaaggacgaggaggtgctgaagaagaactgcccccacatcgtggtgggcacccccggcagaatcctggccctggccagaaacaagagcctgaacctgaagcacatcaagcacttcatcctggacgagtgcgacaagatgctggagcagctggacatgagaagagacgtgcaggagatcttcagaatgaccccccacgagaagcaggtgatgatgttcagcgccaccctgagcaaggagatcagacccgtgtgcagaaagttcatgcaggaccccatggagatcttcgtggacgacgagaccaagctgaccctgcacggcctgcagcagtactacgtgaagctgaaggacaacgagaagaacagaaagctgttcgacctgctggacgtgctggagttcaaccaggtggtgatcttcgtgaagagcgtgcagagatgcatcgccctggcccagctgctggtggagcagaacttccccgccatcgccatccacagaggcatgccccagtag

SEQ ID NO: 78609 - DNA, 594 bp, synthetic construct; identical to SEQ ID NO: 78570
  misc_feature 1..594: note = Description of Artificial Sequence: Synthetic coding sequence
  source 1..594: mol_type = other DNA

SEQ ID NO: 78610 - DNA, 564 bp, synthetic construct; identical to SEQ ID NO: 78557
  misc_feature 1..564: note = Description of Artificial Sequence: Synthetic coding sequence
  source 1..564: mol_type = other DNA

SEQ ID NO: 78611 - DNA, 195 bp, synthetic construct
  misc_feature 1..195: note = Description of Artificial Sequence: Synthetic coding sequence
  source 1..195: mol_type = other DNA
tgagccaccctgcagcagctggagcccgtgaccggccaggtgagcgtgctggtgatgtgccacaccagagagctggccttccagatcagcaaggagtacgagagattcagcaagtacatgcccaacgtgaaggtggccgtgttcttcggcggcctgagcatcaagaaggacgaggaggtgctgaagaagaactag

SEQ ID NO: 78612 - DNA, 78 bp, synthetic construct
  misc_feature 1..78: note = Description of Artificial Sequence: Synthetic coding sequence
  source 1..78: mol_type = other DNA
tgagccaccctgcagcagctggagcccgtgaccggccaggtgagcgtgctggtgatgtgccacaccagagagctgtag

SEQ ID NO: 78613 - DNA, 66 bp, synthetic construct
  misc_feature 1..66: note = Description of Artificial Sequence: Synthetic coding sequence
  source 1..66: mol_type = other DNA
tgagccaccctgcagcagctggagcccgtgaccggccaggtgagcgtgctggtgatgtgccactag

SEQ ID NO: 78614 - DNA, 870 bp, synthetic construct; identical to SEQ ID NO: 78560
  misc_feature 1..870: note = Description of Artificial Sequence: Synthetic coding sequence
  source 1..870: mol_type = other DNA

SEQ ID NO: 78615 - DNA, 711 bp, synthetic construct; identical to SEQ ID NO: 78573
  misc_feature 1..711: note = Description of Artificial Sequence: Synthetic coding sequence
  source 1..711: mol_type = other DNA

SEQ ID NO: 78616 - DNA, 711 bp, synthetic construct; identical to SEQ ID NO: 78573
  misc_feature 1..711: note = Description of Artificial Sequence: Synthetic coding sequence
  source 1..711: mol_type = other DNA

SEQ ID NO: 78617 - DNA, 978 bp, synthetic construct
  misc_feature 1..978: note = Description of Artificial Sequence: Synthetic coding sequence
  source 1..978: mol_type = other DNA
tgagccaccctgcagcagctggagcccgtgaccggccaggtgagcgtgctggtgatgtgccacaccagagagctggccttccagatcagcaaggagtacgagagattcagcaagtacatgcccaacgtgaaggtggccgtgttcttcggcggcctgagcatcaagaaggacgaggaggtgctgaagaagaactgcccccacatcgtggtgggcacccccggcagaatcctggccctggccagaaacaagagcctgaacctgaagcacatcaagcacttcatcctggacgagtgcgacaagatgctggagcagctggacatgagaagagacgtgcaggagatcttcagaatgaccccccacgagaagcaggtgatgatgttcagcgccaccctgagcaaggagatcagacccgtgtgcagaaagttcatgcaggaccccatggagatcttcgtggacgacgagaccaagctgaccctgcacggcctgcagcagtactacgtgaagctgaaggacaacgagaagaacagaaagctgttcgacctgctggacgtgctggagttcaaccaggtggtgatcttcgtgaagagcgtgcagagatgcatcgccctggcccagctgctggtggagcagaacttccccgccatcgccatccacagaggcatgccccaggaggagagactgagcagataccagcagttcaaggacttccagagaagaatcctggtggccaccaacctgttcggcagaggcatggacatcgagagagtgaacatcgccttcaactacgacatgcccgaggacagcgacacctacctgcacagatgctaccccctgagccccagcagatggcccgagcaggccggcctggcccccagagcctggctgagccacctgtgccccatgagaatgatgcccagaagcagcatgatgtgcagaatcgccctgagaagcatcctggtgagctgcctgatgagatag

SEQ ID NO: 78618 - DNA, 717 bp, synthetic construct; identical to SEQ ID NO: 78596
  misc_feature 1..717: note = Description of Artificial Sequence: Synthetic coding sequence
  source 1..717: mol_type = other DNA

SEQ ID NO: 78619 - DNA, 717 bp, synthetic construct; identical to SEQ ID NO: 78596
  misc_feature 1..717: note = Description of Artificial Sequence: Synthetic coding sequence
  source 1..717: mol_type = other DNA

SEQ ID NO: 78620 - DNA, 870 bp, synthetic construct; identical to SEQ ID NO: 78560
  misc_feature 1..870: note = Description of Artificial Sequence: Synthetic coding sequence
  source 1..870: mol_type = other DNA

SEQ ID NO: 78621 - DNA, 1278 bp, synthetic construct; identical to SEQ ID NO: 78547
  misc_feature 1..1278: note = Description of Artificial Sequence: Synthetic coding sequence
  source 1..1278: mol_type = other DNA

SEQ ID NO: 78622 - DNA, 411 bp, synthetic construct; identical to SEQ ID NO: 78568
  misc_feature 1..411: note = Description of Artificial Sequence: Synthetic coding sequence
  source 1..411: mol_type = other DNA

SEQ ID NO: 78623 - DNA, 564 bp, synthetic construct; identical to SEQ ID NO: 78553
  misc_feature 1..564: note = Description of Artificial Sequence: Synthetic coding sequence
  source 1..564: mol_type = other DNA

SEQ ID NO: 78624 - DNA, 399 bp, synthetic construct; identical to SEQ ID NO: 78565
  misc_feature 1..399: note = Description of Artificial Sequence: Synthetic coding sequence
  source 1..399: mol_type = other DNA

SEQ ID NO: 78625 - DNA, 870 bp, synthetic construct; identical to SEQ ID NO: 78560
  misc_feature 1..870: note = Description of Artificial Sequence: Synthetic coding sequence
  source 1..870: mol_type = other DNA

SEQ ID NO: 78626 - DNA, 1287 bp, synthetic construct; identical to SEQ ID NO: 78548
  misc_feature 1..1287: note = Description of Artificial Sequence: Synthetic coding sequence
  source 1..1287: mol_type = other DNA

SEQ ID NO: 78627 - DNA, 564 bp, synthetic construct; identical to SEQ ID NO: 78553
  misc_feature 1..564: note = Description of Artificial Sequence: Synthetic coding sequence
  source 1..564: mol_type = other DNA

SEQ ID NO: 78628 - DNA, 291 bp, synthetic construct; identical to SEQ ID NO: 78562
  misc_feature 1..291: note = Description of Artificial Sequence: Synthetic coding sequence
  source 1..291: mol_type = other DNA

SEQ ID NO: 78629 - DNA, 564 bp, synthetic construct; identical to SEQ ID NO: 78553
  misc_feature 1..564: note = Description of Artificial Sequence: Synthetic coding sequence
  source 1..564: mol_type = other DNA

SEQ ID NO: 78630 - DNA, 594 bp, synthetic construct; identical to SEQ ID NO: 78570
  misc_feature 1..594: note = Description of Artificial Sequence: Synthetic coding sequence
  source 1..594: mol_type = other DNA

SEQ ID NO: 78631 - DNA, 291 bp, synthetic construct; identical to SEQ ID NO: 78562
  misc_feature 1..291: note = Description of Artificial Sequence: Synthetic coding sequence
  source 1..291: mol_type = other DNA

SEQ ID NO: 78632 - DNA, 696 bp, synthetic construct; identical to SEQ ID NO: 78564
  misc_feature 1..696: note = Description of Artificial Sequence: Synthetic coding sequence
  source 1..696: mol_type = other DNA

SEQ ID NO: 78633 - DNA, 696 bp, synthetic construct; identical to SEQ ID NO: 78564
  misc_feature 1..696: note = Description of Artificial Sequence: Synthetic coding sequence
  source 1..696: mol_type = other DNA

SEQ ID NO: 78634 - DNA, 717 bp, synthetic construct; identical to SEQ ID NO: 78596
  misc_feature 1..717: note = Description of Artificial Sequence: Synthetic coding sequence
  source 1..717: mol_type = other DNA

SEQ ID NO: 78635 - DNA, 1287 bp, synthetic construct; identical to SEQ ID NO: 78548
  misc_feature 1..1287: note = Description of Artificial Sequence: Synthetic coding sequence
  source 1..1287: mol_type = other DNA

SEQ ID NO: 78636 - DNA, 564 bp, synthetic construct; identical to SEQ ID NO: 78557
  misc_feature 1..564: note = Description of Artificial Sequence: Synthetic coding sequence
  source 1..564: mol_type = other DNA

SEQ ID NO: 78637 - DNA, 564 bp, synthetic construct; identical to SEQ ID NO: 78553
  misc_feature 1..564: note = Description of Artificial Sequence: Synthetic coding sequence
  source 1..564: mol_type = other DNA

SEQ ID NO: 78638 - DNA, 717 bp, synthetic construct; identical to SEQ ID NO: 78596
  misc_feature 1..717: note = Description of Artificial Sequence: Synthetic coding sequence
  source 1..717: mol_type = other DNA

SEQ ID NO: 78639 - DNA, 738 bp, synthetic construct; identical to SEQ ID NO: 78567
  misc_feature 1..738: note = Description of Artificial Sequence: Synthetic coding sequence
  source 1..738: mol_type = other DNA

SEQ ID NO: 78640 - DNA, 1278 bp, synthetic construct; identical to SEQ ID NO: 78547
  misc_feature 1..1278: note = Description of Artificial Sequence: Synthetic coding sequence
  source 1..1278: mol_type = other DNA

SEQ ID NO: 78641 - DNA, 711 bp, synthetic construct; identical to SEQ ID NO: 78573
  misc_feature 1..711: note = Description of Artificial Sequence: Synthetic coding sequence
  source 1..711: mol_type = other DNA

SEQ ID NO: 78642 - DNA, 738 bp, synthetic construct; identical to SEQ ID NO: 78567
  misc_feature 1..738: note = Description of Artificial Sequence: Synthetic coding sequence
  source 1..738: mol_type = other DNA

SEQ ID NO: 78643 - DNA, 1287 bp, synthetic construct; identical to SEQ ID NO: 78548
  misc_feature 1..1287: note = Description of Artificial Sequence: Synthetic coding sequence
  source 1..1287: mol_type = other DNA

SEQ ID NO: 78644 - DNA, 411 bp, synthetic construct; identical to SEQ ID NO: 78568
  misc_feature 1..411: note = Description of Artificial Sequence: Synthetic coding sequence
  source 1..411: mol_type = other DNA

SEQ ID NO: 78645 - DNA, 987 bp, synthetic construct; identical to SEQ ID NO: 78584
  misc_feature 1..987: note = Description of Artificial Sequence: Synthetic coding sequence
  source 1..987: mol_type = other DNA

SEQ ID NO: 78646 - DNA, 399 bp, synthetic construct; identical to SEQ ID NO: 78565
  misc_feature 1..399: note = Description of Artificial Sequence: Synthetic coding sequence
  source 1..399: mol_type = other DNA

SEQ ID NO: 78647 - DNA, 420 bp, synthetic construct
  misc_feature 1..420: note = Description of Artificial Sequence: Synthetic coding sequence
  source 1..420: mol_type = other DNA
atggccgagaacgacgtggacaacgagctgctggactacgaggacgacgaggtggagaccgccgccggcggcgacggcgccgaggcccccgccaagaaggacgtgaagggcagctacgtgagcatccacagcagcggcttcagagacttcctgctgaagcccgagctgctgagagccatcgtggactgcggcttcgagcaccccagcgaggtgcagcacgagtgcatcccccaggccatcctgggcatggacgtgctgtgccaggccaagagcggcatgggcaagaccgccgtgttcgtgctggccaccctgcagcagctggagcccgtgaccggccagagccacgagcacatgaccagcgtgaccctggacaacctgaccgccgtgggcgacgtgctgagccaggcctggggcagctag

SEQ ID NO: 78648 - DNA, 717 bp, synthetic construct; identical to SEQ ID NO: 78596
  misc_feature 1..717: note = Description of Artificial Sequence: Synthetic coding sequence
  source 1..717: mol_type = other DNA

SEQ ID NO: 78649 - DNA, 564 bp, synthetic construct; identical to SEQ ID NO: 78574
  misc_feature 1..564: note = Description of Artificial Sequence: Synthetic coding sequence
  source 1..564: mol_type = other DNA

SEQ ID NO: 78650 - DNA, 711 bp, synthetic construct; identical to SEQ ID NO: 78573
  misc_feature 1..711: note = Description of Artificial Sequence: Synthetic coding sequence
  source 1..711: mol_type = other DNA

SEQ ID NO: 78651 - DNA, 1278 bp, synthetic construct; identical to SEQ ID NO: 78547
  misc_feature 1..1278: note = Description of Artificial Sequence: Synthetic coding sequence
  source 1..1278: mol_type = other DNA

SEQ ID NO: 78652 - DNA, 696 bp, synthetic construct; identical to SEQ ID NO: 78564
  misc_feature 1..696: note = Description of Artificial Sequence: Synthetic coding sequence
  source 1..696: mol_type = other DNA

SEQ ID NO: 78653 - DNA, 99 bp, synthetic construct
  misc_feature 1..99: note = Description of Artificial Sequence: Synthetic coding sequence
  source 1..99: mol_type = other DNA
tgagccaccctgcagcagctggagcccgtgaccggccaggtgtgcttctgcgacagccacttccccagaggcgacaacgaggagctgcacctgccctag

SEQ ID NO: 78654 - DNA, 399 bp, synthetic construct; identical to SEQ ID NO: 78565
  misc_feature 1..399: note = Description of Artificial Sequence: Synthetic coding sequence
  source 1..399: mol_type = other DNA

SEQ ID NO: 78655 - DNA, 399 bp, synthetic construct; identical to SEQ ID NO: 78565
  misc_feature 1..399: note = Description of Artificial Sequence: Synthetic coding sequence
  source 1..399: mol_type = other DNA

SEQ ID NO: 78656 - DNA, 738 bp, synthetic construct; identical to SEQ ID NO: 78567
  misc_feature 1..738: note = Description of Artificial Sequence: Synthetic coding sequence
  source 1..738: mol_type = other DNA

SEQ ID NO: 78657 - DNA, 696 bp, synthetic construct; identical to SEQ ID NO: 78564
  misc_feature 1..696: note = Description of Artificial Sequence: Synthetic coding sequence
  source 1..696: mol_type = other DNA

SEQ ID NO: 78658 - DNA, 732 bp, synthetic construct
  misc_feature 1..732: note = Description of Artificial Sequence: Synthetic coding sequence
  source 1..732: mol_type = other DNA
atgtggaccatgagcagctggaccatgaagatgatgagatggagacagcagctgggcgagatgggcctgagacccctgcccagaagaatgagcagagcccccatgagccccagcaccgccctggccttcgtgaccagctgcagcagccagagctgcagcggccccctgagcaccgtggccctgagcatcagacagaaggtgagcgtgctggtgatgtgccacaccagagagctggccttccagatcagcaaggagtacgagagattcagcaagtacatgcccaacgtgaaggtggccgtgttcttcggcggcctgagcatcaagaaggacgaggaggtgctgaagaagaactgcccccacatcgtggtgggcacccccggcagaatcctggccctggccagaaacaagagcctgaacctgaagcacatcaagcacttcatcctggacgagtgcgacaagatgctggagcagctggacatgagaagagacgtgcaggagatcttcagaatgaccccccacgagaagcaggtgatgatgttcagcgccaccctgagcaaggagatcagacccgtgtgcagaaagttcatgcaggacgtgaacaccctgctgcccagcctgccccccctgcccgccagatgcctgctgcccttcctggccctgttcctgagactgccctgccacagcagcgccaagaaggccgcctgcgcccagctgggcgtgatgaccccctag

SEQ ID NO: 78659 - DNA, 1287 bp, synthetic construct; identical to SEQ ID NO: 78548
  misc_feature 1..1287: note = Description of Artificial Sequence: Synthetic coding sequence
  source 1..1287: mol_type = other DNA

SEQ ID NO: 78660 - DNA, 1278 bp, synthetic construct; identical to SEQ ID NO: 78547
  misc_feature 1..1278: note = Description of Artificial Sequence: Synthetic coding sequence
  source 1..1278: mol_type = other DNA

SEQ ID NO: 78661 - DNA, 291 bp, synthetic construct; identical to SEQ ID NO: 78562
  misc_feature 1..291: note = Description of Artificial Sequence: Synthetic coding sequence
  source 1..291: mol_type = other DNA

SEQ ID NO: 78662 - DNA, 411 bp, synthetic construct; identical to SEQ ID NO: 78568
  misc_feature 1..411: note = Description of Artificial Sequence: Synthetic coding sequence
  source 1..411: mol_type = other DNA

SEQ ID NO: 78663 - DNA, 564 bp, synthetic construct; identical to SEQ ID NO: 78557
  misc_feature 1..564: note = Description of Artificial Sequence: Synthetic coding sequence
  source 1..564: mol_type = other DNA

SEQ ID NO: 78664 - DNA, 717 bp, synthetic construct; identical to SEQ ID NO: 78596
  misc_feature 1..717: note = Description of Artificial Sequence: Synthetic coding sequence
  source 1..717: mol_type = other DNA

SEQ ID NO: 78665 - DNA, 417 bp, synthetic construct
  misc_feature 1..417: note = Description of Artificial Sequence: Synthetic coding sequence
  source 1..417: mol_type = other DNA
tgagccaccctgcagcagctggagcccgtgaccggccaggtgagcgtgctggtgatgtgccacaccagagagctggccttccagatcagcaaggagtacgagagattcagcaagtacatgcccaacgtgaaggtggccgtgttcttcggcggcctgagcatcaagaaggacgaggaggtgctgaagaagaactgcccccacatcgtggtgggcacccccggcagaatcctggccctggccagaaacaagagcctgaacctgaagcacatcaagcacttcatcctggacgagtgcgacaagatgctggagcagctggacatgagaagagacgtgcaggagatcttcagaatgaccccccacgagaagcaggtgatgatgttcagcgccaccctgagcaaggagatcagacccgtgtag

SEQ ID NO: 78666 - DNA, 870 bp, synthetic construct; identical to SEQ ID NO: 78560
  misc_feature 1..870: note = Description of Artificial Sequence: Synthetic coding sequence
  source 1..870: mol_type = other DNA

SEQ ID NO: 78667 - DNA, 1287 bp, synthetic construct; identical to SEQ ID NO: 78548
  misc_feature 1..1287: note = Description of Artificial Sequence: Synthetic coding sequence
  source 1..1287: mol_type = other DNA

SEQ ID NO: 78668 - DNA, 696 bp, synthetic construct; identical to SEQ ID NO: 78564
  misc_feature 1..696: note = Description of Artificial Sequence: Synthetic coding sequence
  source 1..696: mol_type = other DNA

SEQ ID NO: 78669 - DNA, 1287 bp, synthetic construct; identical to SEQ ID NO: 78548
  misc_feature 1..1287: note = Description of Artificial Sequence: Synthetic coding sequence
  source 1..1287: mol_type = other DNA

SEQ ID NO: 78670 - DNA, 378 bp, synthetic construct; identical to SEQ ID NO: 78555
  misc_feature 1..378: note = Description of Artificial Sequence: Synthetic coding sequence
  source 1..378: mol_type = other DNA

SEQ ID NO: 78671 - DNA, 294 bp, synthetic construct
  misc_feature 1..294: note = Description of Artificial Sequence: Synthetic coding sequence
  source 1..294: mol_type = other DNA
tgagccaccctgcagcagctggagcccgtgaccggccaggtgtgcttctgcgacagccacttccccagaggcgacaacgaggagctgcacctgccctacgtgagcgtgtacttcctgcccaaggtgagcgtgctggtgatgtgccacaccagagagctggccttccagatcagcaaggagtacgagagattcagcaagtacatgcccaacgtgaaggtggccgtgttcttcggcggcctgagcatcaagaaggacgaggaggtgctgaagaagaactgcccccacatcgtgtag

SEQ ID NO: 78672 - DNA, 291 bp, synthetic construct; identical to SEQ ID NO: 78562
  misc_feature 1..291: note = Description of Artificial Sequence: Synthetic coding sequence
  source 1..291: mol_type = other DNA

SEQ ID NO: 78673 - DNA, 291 bp, synthetic construct; identical to SEQ ID NO: 78562
  misc_feature 1..291: note = Description of Artificial Sequence: Synthetic coding sequence
  source 1..291: mol_type = other DNA

SEQ ID NO: 78674 - DNA, 1287 bp, synthetic construct; identical to SEQ ID NO: 78548
  misc_feature 1..1287: note = Description of Artificial Sequence: Synthetic coding sequence
  source 1..1287: mol_type = other DNA

SEQ ID NO: 78675 - DNA, 732 bp, synthetic construct; identical to SEQ ID NO: 78658
  misc_feature 1..732: note = Description of Artificial Sequence: Synthetic coding sequence
  source 1..732: mol_type = other DNA

SEQ ID NO: 78676 - DNA, 972 bp, synthetic construct
  misc_feature 1..972: note = Description of Artificial Sequence: Synthetic coding sequence
  source 1..972: mol_type = other DNA
atggccgagaacgacgtggacaacgagctgctggactacgaggacgacgaggtggagaccgccgccggcggcgacggcgccgaggcccccgccaagaaggacgtgaagggcagctacgtgagcatccacagcagcggcttcagagacttcctgctgaagcccgagctgctgagagccatcgtggactgcggcttcgagcaccccagcgaggtgcagcacgagtgcatcccccaggccatcctgggcatggacgtgctgtgccaggccaagagcggcatgggcaagaccgccgtgttcgtgctggccaccctgcagcagctggagcccgtgaccggccaggtgagcgtgctggtgatgtgccacaccagagagctggccttccagatcagcaaggagtacgagagattcagcaagtacatgcccaacgtgaaggtggccgtgttcttcggcggcctgagcatcaagaaggacgaggaggtgctgaagaagaactgcccccacatcgtggtgggcacccccggcagaatcctggccctggccagaaacaagagcctgaacctgaagcacatcaagcacttcatcctggacgagtgcgacaagatgctggagcagctggacatgagaagagacgtgcaggagatcttcagaatgaccccccacgagaagcaggtgatgatgttcagcgccaccctgagcaaggagatcagacccgtgtgcagaaagttcatgcaggaccccatggagatcttcgtggacgacgagaccaagctgaccctgcacggcctgcagcagtactacgtgaagctgaaggacaacgagaagaacagaaagctgttcgacctgctggacgtgctggagttcaaccaggagatcacctgcaagagcgtgcagagattcagcaccaccaacagctgcggctaccagcccatctggcccagacacggccacagagccggcgagcactgcttctag

SEQ ID NO: 78677 - DNA, 972 bp, synthetic construct; identical to SEQ ID NO: 78676
  misc_feature 1..972: note = Description of Artificial Sequence: Synthetic coding sequence
  source 1..972: mol_type = other DNA

SEQ ID NO: 78678 - DNA, 1332 bp, synthetic construct; identical to SEQ ID NO: 78576
  misc_feature 1..1332: note = Description of Artificial Sequence: Synthetic coding sequence
  source 1..1332: mol_type = other DNA

SEQ ID NO: 78679 - DNA, 732 bp, synthetic construct; identical to SEQ ID NO: 78658
  misc_feature 1..732: note = Description of Artificial Sequence: Synthetic coding sequence
  source 1..732: mol_type = other DNA

SEQ ID NO: 78680 - DNA, 1332 bp, synthetic construct; identical to SEQ ID NO: 78576
  misc_feature 1..1332: note = Description of Artificial Sequence: Synthetic coding sequence
  source 1..1332: mol_type = other DNA

SEQ ID NO: 78681 - DNA, 420 bp, synthetic construct; identical to SEQ ID NO: 78647
  misc_feature 1..420: note = Description of Artificial Sequence: Synthetic coding sequence
  source 1..420: mol_type = other DNA

SEQ ID NO: 78682 - DNA, 732 bp, synthetic construct; identical to SEQ ID NO: 78658
  misc_feature 1..732: note = Description of Artificial Sequence: Synthetic coding sequence
  source 1..732: mol_type = other DNA

SEQ ID NO: 78683 - DNA, 732 bp, synthetic construct; identical to SEQ ID NO: 78658
  misc_feature 1..732: note = Description of Artificial Sequence: Synthetic coding sequence
  source 1..732: mol_type = other DNA

SEQ ID NO: 78684 - DNA, 420 bp, synthetic construct; identical to SEQ ID NO: 78647
  misc_feature 1..420: note = Description of Artificial Sequence: Synthetic coding sequence
  source 1..420: mol_type = other DNA

SEQ ID NO: 78685 - DNA, 972 bp, synthetic construct; identical to SEQ ID NO: 78676
  misc_feature 1..972: note = Description of Artificial Sequence: Synthetic coding sequence
  source 1..972: mol_type = other DNA

SEQ ID NO: 78686 - DNA, 1332 bp, synthetic construct; identical to SEQ ID NO: 78576
  misc_feature 1..1332: note = Description of Artificial Sequence: Synthetic coding sequence
  source 1..1332: mol_type = other DNA

SEQ ID NO: 78687 - DNA, 732 bp, synthetic construct; identical to SEQ ID NO: 78658
  misc_feature 1..732: note = Description of Artificial Sequence: Synthetic coding sequence
  source 1..732: mol_type = other DNA

SEQ ID NO: 78688 - DNA, 1053 bp, synthetic construct; identical to SEQ ID NO: 78566
  misc_feature 1..1053: note = Description of Artificial Sequence: Synthetic coding sequence
  source 1..1053: mol_type = other DNA

SEQ ID NO: 78689 - DNA, 1332 bp, synthetic construct; identical to SEQ ID NO: 78576
  misc_feature 1..1332: note = Description of Artificial Sequence: Synthetic coding sequence
  source 1..1332: mol_type = other DNA

SEQ ID NO: 78690 - DNA, 1053 bp, synthetic construct; identical to SEQ ID NO: 78566
  misc_feature 1..1053: note = Description of Artificial Sequence: Synthetic coding sequence
  source 1..1053: mol_type = other DNA

SEQ ID NO: 78691 - DNA, 732 bp, synthetic construct; identical to SEQ ID NO: 78658
  misc_feature 1..732: note = Description of Artificial Sequence: Synthetic coding sequence
  source 1..732: mol_type = other DNA

SEQ ID NO: 78692 - DNA, 420 bp, synthetic construct; identical to SEQ ID NO: 78647
  misc_feature 1..420: note = Description of Artificial Sequence: Synthetic coding sequence
  source 1..420: mol_type = other DNA

SEQ ID NO: 78693 - DNA, 1053 bp, synthetic construct; identical to SEQ ID NO: 78566
  misc_feature 1..1053: note = Description of Artificial Sequence: Synthetic coding sequence
  source 1..1053: mol_type = other DNA

SEQ ID NO: 78694 - DNA, 972 bp, synthetic construct; identical to SEQ ID NO: 78676
  misc_feature 1..972: note = Description of Artificial Sequence: Synthetic coding sequence
  source 1..972: mol_type = other DNA

SEQ ID NO: 78695 - DNA, 1053 bp, synthetic construct; identical to SEQ ID NO: 78566
  misc_feature 1..1053: note = Description of Artificial Sequence: Synthetic coding sequence
  source 1..1053: mol_type = other DNA

SEQ ID NO: 78696 - DNA, 420 bp, synthetic construct; identical to SEQ ID NO: 78647
  misc_feature 1..420: note = Description of Artificial Sequence: Synthetic coding sequence
  source 1..420: mol_type = other DNA

SEQ ID NO: 78697 - DNA, 1332 bp, synthetic construct; identical to SEQ ID NO: 78576
  misc_feature 1..1332: note = Description of Artificial Sequence: Synthetic coding sequence
  source 1..1332: mol_type = other DNA

SEQ ID NO: 78698 - DNA, 972 bp, synthetic construct; identical to SEQ ID NO: 78676
  misc_feature 1..972: note = Description of Artificial Sequence: Synthetic coding sequence
  source 1..972: mol_type = other DNA

SEQ ID NO: 78699 - DNA, 972 bp, synthetic construct; identical to SEQ ID NO: 78676
  misc_feature 1..972: note = Description of Artificial Sequence: Synthetic coding sequence
  source 1..972: mol_type = other DNA

SEQ ID NO: 78700 - DNA, 1053 bp, synthetic construct; identical to SEQ ID NO: 78566
  misc_feature 1..1053: note = Description of Artificial Sequence: Synthetic coding sequence
  source 1..1053: mol_type = other DNA

SEQ ID NO: 78701 - DNA, 420 bp, synthetic construct; identical to SEQ ID NO: 78647
  misc_feature 1..420: note = Description of Artificial Sequence: Synthetic coding sequence
  source 1..420: mol_type = other DNA

SEQ ID NO: 78702 - DNA, 1053 bp, synthetic construct; identical to SEQ ID NO: 78566
  misc_feature 1..1053: note = Description of Artificial Sequence: Synthetic coding sequence
  source 1..1053: mol_type = other DNA

SEQ ID NO: 78703 - DNA, 420 bp, synthetic construct; identical to SEQ ID NO: 78647
  misc_feature 1..420: note = Description of Artificial Sequence: Synthetic coding sequence
  source 1..420: mol_type = other DNA

SEQ ID NO: 78704 - DNA, 1332 bp, synthetic construct; identical to SEQ ID NO: 78576
  misc_feature 1..1332: note = Description of Artificial Sequence: Synthetic coding sequence
  source 1..1332: mol_type = other DNA

SEQ ID NO: 78705 - DNA, 552 bp, synthetic construct
  misc_feature 1..552: note = Description of Artificial Sequence: Synthetic coding sequence
  source 1..552: mol_type = other DNA
atggagatcttcgtggacgacgagaccaagctgaccctgcacggcctgcagcagtactacgtgaagctgaaggacaacgagaagaacagaaagctgttcgacctgctggacgtgctggagttcaaccaggtggtgatcttcgtgaagagcgtgcagagatgcatcgccctggcccagctgctggtggagcagaacttccccgccatcgccatccacagaggcatgccccaggaggagagatggctgagcagataccagcagttcaaggacttccagagaagaatcctggtggccaccaacctgttcggcagaggcatggacatcgagagagtgaacatcgccttcaactacgacatgcccgaggacagcgacacctacctgcacagagtggccagagccggcagattcggcaccaagggcctggccatcaccttcgtgagcgacgagaacgacgccaagatcctgaacgacgtgcaggacagattcgaggtgaacatcagcgagctgcccgacgagatcgacatcagcagctacatcgagcagaccagatag

SEQ ID NO: 78706 - DNA, 2073 bp, synthetic construct
  misc_feature 1..2073: note = Description of Artificial Sequence: Synthetic coding sequence
  source 1..2073: mol_type = other DNA
atgggcgacgaggactgggaggccgagatcaacccccacatgagcagctacgtgcccatcttcgagaaggacagatacagcggcgagaacggcgacaacttcaacagaacccccgccagcagcagcgagatggacgacggccccagcagaagagaccacttcatgaagagcggcttcgccagcggcagaaacttcggcaacagagacgccggcgagtgcaacaagagagacaacaccagcaccatgggcggcttcggcgtgggcaagagcttcggcaacagaggcttcagcaacagcagattcgaggacggcgacagcagcggcttctggagagagagcagcaacgactgcgaggacaaccccaccagaaacagaggcttcagcaagagaggcgacaacgacctggaccccgacgagtgcatgcagagaaccggcggcctgttcggcagcagaagacccgtgctgagcggcaccggcaacggcgacaccagccagagcagaagcggcagcggcagcgagagaggcggctacaagggcctgaacgaggaggtgatcaccggcagcggcaagaacagctggaagagcgaggccgagggcggcgagagcagcgacacccagggccccaaggtgacctacatccccccccccccccccgaggacgaggacagcatcttcgcccactaccagaccggcatcaacttcgacaagtacgacaccatcctggtggaggtgagcggccacgacgccccccccgccatcctgaccttcgaggaggccaacctgtgccagaccctgaacaacaacatcgccaaggccggctacaccaagctgacccccgtgcagaagtacagcatccccatcatcctggccggcagagacctgatggcctgcgcccagaccggcagcggcaagaccgccgccttcctgctgcccatcctggcccacatgatgcacgacggcatcaccgccagcagattcaaggagctgcaggagcccgagtgcatcatcgtggcccccaccagagagctggtgaaccagatctacctggaggccagaaagttcagcttcggcacctgcgtgagagccgtggtgatctacggcggcacccagctgggccacagcatcagacagatcgtgcagggctgcaacatcctgtgcgccacccccggcagactgatggacatcatcggcaaggagaagatcggcctgaagcagatcaagtacctggtgctggacgaggccgacagaatgctggacatgggcttcggccccgagatgaagaagctgatcagctgccccggcatgcccagcaaggagcagagacagaccctgatgttcagcgccaccttccccgaggagatccagagactggccgccgagttcctgaagagcaactacctgttcgtggccgtgggccaggtgggcggcgcctgcagagacgtgcagcagaccgtgctgcaggtgggccagttcagcaagagagagaagctggtggagatcctgagaaacatcggcgacgagagaaccatggtgttcgtggagaccaagaagaaggccgacttcatcgccaccttcctgtgccaggagaagatcagcaccaccagcatccacggcgacagagagcagagagagagagagcaggccctgggcgacttcagattcggcaagtgccccgtgctggtggccaccagcgtggccgccagaggcctggacatcgagaacgtgcagcacgtgatcaacttcgacctgcccagcaccatcgacgagtacgtgcacagaatcggcagaaccggcagatgcggcaacaccggcagagccatcagcttcttcgacctggagagcgacaaccacctggcccagcccctggtgaaggtgctgaccgacgcccagcaggacgtgcccgcctggctggaggagatcgccttcagcacctacatccccggcttcagcggcagcaccagaggcaacgtgttcgccagcgtggacaccagaaagggcaagagcaccctgaacaccgccggcttcagcagcagccaggcccccaaccccgtggacgacgagagctgggactag

SEQ ID NO: 78707 - DNA, 2073 bp, synthetic construct; identical to SEQ ID NO: 78706
  misc_feature 1..2073: note = Description of Artificial Sequence: Synthetic coding sequence
  source 1..2073: mol_type = other DNA

SEQ ID NO: 78708 - DNA, 2175 bp, synthetic construct
  misc_feature 1..2175: note = Description of Artificial Sequence: Synthetic coding sequence
  source 1..2175: mol_type = other DNA
atgggcgacgaggactgggaggccgagatcaacccccacatgagcagctacgtgcccatcttcgagaaggacagatacagcggcgagaacggcgacaacttcaacagaacccccgccagcagcagcgagatggacgacggccccagcagaagagaccacttcatgaagagcggcttcgccagcggcagaaacttcggcaacagagacgccggcgagtgcaacaagagagacaacaccagcaccatgggcggcttcggcgtgggcaagagcttcggcaacagaggcttcagcaacagcagattcgaggacggcgacagcagcggcttctggagagagagcagcaacgactgcgaggacaaccccaccagaaacagaggcttcagcaagagaggcggctacagagacggcaacaacagcgaggccagcggcccctacagaagaggcggcagaggcagcttcagaggctgcagaggcggcttcggcctgggcagccccaacaacgacctggaccccgacgagtgcatgcagagaaccggcggcctgttcggcagcagaagacccgtgctgagcggcaccggcaacggcgacaccagccagagcagaagcggcagcggcagcgagagaggcggctacaagggcctgaacgaggaggtgatcaccggcagcggcaagaacagctggaagagcgaggccgagggcggcgagagcagcgacacccagggccccaaggtgacctacatccccccccccccccccgaggacgaggacagcatcttcgcccactaccagaccggcatcaacttcgacaagtacgacaccatcctggtggaggtgagcggccacgacgccccccccgccatcctgaccttcgaggaggccaacctgtgccagaccctgaacaacaacatcgccaaggccggctacaccaagctgacccccgtgcagaagtacagcatccccatcatcctggccggcagagacctgatggcctgcgcccagaccggcagcggcaagaccgccgccttcctgctgcccatcctggcccacatgatgcacgacggcatcaccgccagcagattcaaggagctgcaggagcccgagtgcatcatcgtggcccccaccagagagctggtgaaccagatctacctggaggccagaaagttcagcttcggcacctgcgtgagagccgtggtgatctacggcggcacccagctgggccacagcatcagacagatcgtgcagggctgcaacatcctgtgcgccacccccggcagactgatggacatcatcggcaaggagaagatcggcctgaagcagatcaagtacctggtgctggacgaggccgacagaatgctggacatgggcttcggccccgagatgaagaagctgatcagctgccccggcatgcccagcaaggagcagagacagaccctgatgttcagcgccaccttccccgaggagatccagagactggccgccgagttcctgaagagcaactacctgttcgtggccgtgggccaggtgggcggcgcctgcagagacgtgcagcagaccgtgctgcaggtgggccagttcagcaagagagagaagctggtggagatcctgagaaacatcggcgacgagagaaccatggtgttcgtggagaccaagaagaaggccgacttcatcgccaccttcctgtgccaggagaagatcagcaccaccagcatccacggcgacagagagcagagagagagagagcaggccctgggcgacttcagattcggcaagtgccccgtgctggtggccaccagcgtggccgccagaggcctggacatcgagaacgtgcagcacgtgatcaacttcgacctgcccagcaccatcgacgagtacgtgcacagaatcggcagaaccggcagatgcggcaacaccggcagagccatcagcttcttcgacctggagagcgacaaccacctggcccagcccctggtgaaggtgctgaccgacgcccagcaggacgtgcccgcctggctggaggagatcgccttcagcacctacatccccggcttcagcggcagcaccagaggcaacgtgttcgccagcgtggacaccagaaagggcaagagcaccctgaacaccgccggcttcagcagcagccaggcccccaaccccgtggacgacgagagctgggactag

SEQ ID NO: 78709 - DNA, 318 bp, synthetic construct
  misc_feature 1..318: note = Description of Artificial Sequence: Synthetic coding sequence
  source 1..318: mol_type = other DNA
atgggcgacgaggactgggaggccgagatcaacccccacatgagcagctacgtgcccatcttcgagaaggacagatacagcggcgagaacggcgacaacttcaacagaacccccgccagcagcagcgagatggacgacggccccagcagaagagaccacttcatgaagagcggcttcgccagcggcagaaacttcggcaacagagacgccggcgagtgcaacaagagagacaacaccagcaccatgggcggcttcggcgtgggcaagagcttcggcaacagaggcttcagcaacagcagattcgaggacggcgactag

SEQ ID NO: 78710 - DNA, 2115 bp, synthetic construct
  misc_feature 1..2115: note = Description of Artificial Sequence: Synthetic coding sequence
  source 1..2115: mol_type = other DNA
atgggcgacgaggactgggaggccgagatcaacccccacatgagcagctacgtgcccatcttcgagaaggacagatacagcggcgagaacggcgacaacttcaacagaacccccgccagcagcagcgagatggacgacggccccagcagaagagaccacttcatgaagagcggcttcgccagcggcagaaacttcggcaacagagacgccggcgagtgcaacaagagagacaacaccagcaccatgggcggcttcggcgtgggcaagagcttcggcaacagaggcttcagcaacagcagattcgaggacggcgacagcagcggcttctggagaggctacagagacggcaacaacagcgaggccagcggcccctacagaagaggcggcagaggcagcttcagaggctgcagaggcggcttcggcctgggcagccccaacaacgacctggaccccgacgagtgcatgcagagaaccggcggcctgttcggcagcagaagacccgtgctgagcggcaccggcaacggcgacaccagccagagcagaagcggcagcggcagcgagagaggcggctacaagggcctgaacgaggaggtgatcaccggcagcggcaagaacagctggaagagcgaggccgagggcggcgagagcagcgacacccagggccccaaggtgacctacatccccccccccccccccgaggacgaggacagcatcttcgcccactaccagaccggcatcaacttcgacaagtacgacaccatcctggtggaggtgagcggccacgacgccccccccgccatcctgaccttcgaggaggccaacctgtgccagaccctgaacaacaacatcgccaaggccggctacaccaagctgacccccgtgcagaagtacagcatccccatcatcctggccggcagagacctgatggcctgcgcccagaccggcagcggcaagaccgccgccttcctgctgcccatcctggcccacatgatgcacgacggcatcaccgccagcagattcaaggagctgcaggagcccgagtgcatcatcgtggcccccaccagagagctggtgaaccagatctacctggaggccagaaagttcagcttcggcacctgcgtgagagccgtggtgatctacggcggcacccagctgggccacagcatcagacagatcgtgcagggctgcaacatcctgtgcgccacccccggcagactgatggacatcatcggcaaggagaagatcggcctgaagcagatcaagtacctggtgctggacgaggccgacagaatgctggacatgggcttcggccccgagatgaagaagctgatcagctgccccggcatgcccagcaaggagcagagacagaccctgatgttcagcgccaccttccccgaggagatccagagactggccgccgagttcctgaagagcaactacctgttcgtggccgtgggccaggtgggcggcgcctgcagagacgtgcagcagaccgtgctgcaggtgggccagttcagcaagagagagaagctggtggagatcctgagaaacatcggcgacgagagaaccatggtgttcgtggagaccaagaagaaggccgacttcatcgccaccttcctgtgccaggagaagatcagcaccaccagcatccacggcgacagagagcagagagagagagagcaggccctgggcgacttcagattcggcaagtgccccgtgctggtggccaccagcgtggccgccagaggcctggacatcgagaacgtgcagcacgtgatcaacttcgacctgcccagcaccatcgacgagtacgtgcacagaatcggcagaaccggcagatgcggcaacaccggcagagccatcagcttcttcgacctggagagcgacaaccacctggcccagcccctggtgaaggtgctgaccgacgcccagcaggacgtgcccgcctggctggaggagatcgccttcagcacctacatccccggcttcagcggcagcaccagaggcaacgtgttcgccagcgtggacaccagaaagggcaagagcaccctgaacaccgccggcttcagcagcagccaggcccccaaccccgtggacgacgagagctgggactag

SEQ ID NO: 78711 - DNA, 480 bp, synthetic construct
  misc_feature 1..480: note = Description of Artificial Sequence: Synthetic coding sequence
  source 1..480: mol_type = other DNA
atgggcgacgaggactgggaggccgagatcaacccccacatgagcagctacgtgcccatcttcgagaaggacagatacagcggcgagaacggcgacaacttcaacagaacccccgccagcagcagcgagatggacgacggccccagcagaagagaccacttcatgaagagcggcttcgccagcggcagaaacttcggcaacagagacgccggcgagtgcaacaagagagacaacaccagcaccatgggcggcttcggcgtgggcaagagcttcggcaacagaggcttcagcaacagcagattcgaggacggcgacagcagcggcttctggagagagagcagcaacgactgcgaggacaaccccaccagaaacagaggcttcagcaagagaggcggctacagagacggcaacaacagcgaggccagcggcccctacagaagaggcggcagaggcagcttcagaggctgcagaggcggctag

SEQ ID NO: 78712 - DNA, 1728 bp, synthetic construct
  misc_feature 1..1728: note = Description of Artificial Sequence: Synthetic coding sequence
  source 1..1728: mol_type = other DNA
atgggcagcagaaacctgttcctgaccaacagccccgagagcagcaacgactgcgaggacaaccccaccagaaacagaggcttcagcaagagaggcgacaacgacctggaccccgacgagtgcatgcagagaaccggcggcctgttcggcagcagaagacccgtgctgagcggcaccggcaacggcgacaccagccagagcagaagcggcagcggcagcgagagagacagctggaagagcgaggccgagggcggcgagagcagcgacacccagggccccaaggtgacctacatccccccccccccccccgaggacgaggacagcatcttcgcccactaccagaccggcatcaacttcgacaagtacgacaccatcctggtggaggtgagcggccacgacgccccccccgccatcctgaccttcgaggaggccaacctgtgccagaccctgaacaacaacatcgccaaggccggctacaccaagctgacccccgtgcagaagtacagcatccccatcatcctggccggcagagacctgatggcctgcgcccagaccggcagcggcaagaccgccgccttcctgctgcccatcctggcccacatgatgcacgacggcatcaccgccagcagattcaaggagctgcaggagcccgagtgcatcatcgtggcccccaccagagagctggtgaaccagatctacctggaggccagaaagttcagcttcggcacctgcgtgagagccgtggtgatctacggcggcacccagctgggccacagcatcagacagatcgtgcagggctgcaacatcctgtgcgccacccccggcagactgatggacatcatcggcaaggagaagatcggcctgaagcagatcaagtacctggtgctggacgaggccgacagaatgctggacatgggcttcggccccgagatgaagaagctgatcagctgccccggcatgcccagcaaggagcagagacagaccctgatgttcagcgccaccttccccgaggagatccagagactggccgccgagttcctgaagagcaactacctgttcgtggccgtgggccaggtgggcggcgcctgcagagacgtgcagcagaccgtgctgcaggtgggccagttcagcaagagagagaagctggtggagatcctgagaaacatcggcgacgagagaaccatggtgttcgtggagaccaagaagaaggccgacttcatcgccaccttcctgtgccaggagaagatcagcaccaccagcatccacggcgacagagagcagagagagagagagcaggccctgggcgacttcagattcggcaagtgccccgtgctggtggccaccagcgtggccgccagaggcctggacatcgagaacgtgcagcacgtgatcaacttcgacctgcccagcaccatcgacgagtacgtgcacagaatcggcagaaccggcagatgcggcaacaccggcagagccatcagcttcttcgacctggagagcgacaaccacctggcccagcccctggtgaaggtgctgaccgacgcccagcaggacgtgcccgcctggctggaggagatcgccttcagcacctacatccccggcttcagcggcagcaccagaggcaacgtgttcgccagcgtggacaccagaaagggcaagagcaccctgaacaccgccggcttcagcagcagccaggcccccaaccccgtggacgacgagagctgggactag

SEQ ID NO: 78713 - DNA, 1869 bp, synthetic construct
  misc_feature 1..1869: note = Description of Artificial Sequence: Synthetic coding sequence
  source 1..1869: mol_type = other DNA
atggaggagagcgagcccgagagaaagagagccagaaccgacgaggtgcccgccggcggcagcagaagcgaggccgaggacgaggacgacgaggactacgtgccctacgtgcccctgagacagagaagacagctgctgctgcagaagctgctgcagagaagaagaaagggcgccgccgaggaggagcagcaggacagcggcagcgagcccagaggcgacgaggacgacatccccctgggcccccagagcaacgtgagcctgctggaccagcaccagcacctgaaggagaaggccgaggccagaaaggagagcgccaaggagaagcagctgaaggaggaggagaagatcctggagagcgtggccgagggcagagccctgatgagcgtgaaggagatggccaagggcatcacctacgacgaccccatcaagaccagctggaccccccccagatacgtgctgagcatgagcgaggagagacacgagagagtgagaaagaagtaccacatcctggtggagggcgacggcatccccccccccatcaagagcttcaaggagatgaagttccccgccgccatcctgagaggcctgaagaagaagggcatccaccaccccacccccatccagatccagggcatccccaccatcctgagcggcagagacatgatcggcatcgccttcaccggcagcggcaagaccctggtgttcaccctgcccgtgatcatgttctgcctggagcaggagaagagactgcccttcagcaagagagagggcccctacggcctgatcatctgccccagcagagagctggccagacagacccacggcatcctggagtactactgcagactgctgcaggaggacagcagccccctgctgagatgcgccctgtgcatcggcggcatgagcgtgaaggagcagatggagaccatcagacacggcgtgcacatgatggtggccacccccggcagactgatggacctgctgcagaagaagatggtgagcctggacatctgcagatacctggccctggacgaggccgacagaatgatcgacatgggcttcgagggcgacatcagaaccatcttcagctacttcaagggccagagacagaccctgctgttcagcgccaccatgcccaagaagatccagaacttcgccaagagcgccctggtgaagcccgtgaccatcaacgtgggcagagccggcgccgccagcctggacgtgatccaggaggtggagtacgtgaaggaggaggccaagatggtgtacctgctggagtgcctgcagaagacccccccccccgtgctgatcttcgccgagaagaaggccgacgtggacgccatccacgagtacctgctgctgaagggcgtggaggccgtggccatccacggcggcaaggaccaggaggagagaaccaaggccatcgaggccttcagagagggcaagaaggacgtgctggtggccaccgacgtggccagcaagggcctggacttccccgccatccagcacgtgatcaactacgacatgcccgaggagatcgagaactacgtgcacagaatcggcagaaccggcagaagcggcaacaccggcatcgccaccaccttcatcaacaaggcctgcgacgagagcgtgctgatggacctgaaggccctgctgctggaggccaagcagaaggtgccccccgtgctgcaggtgctgcactgcggcgacgagagcatgctggacatcggcggcgagagaggctgcgccttctgcggcggcctgggccacagaatcaccgactgccccaagctggaggccatgcagaccaagcaggtgagcaacatcggcagaaaggactacctggcccacagcagcatggacttctag

SEQ ID NO: 78714 - DNA, 1881 bp, synthetic construct
  misc_feature 1..1881: note = Description of Artificial Sequence: Synthetic coding sequence
  source 1..1881: mol_type = other DNA
atgcaccagatcagaaagagcgagtacacccagcccacccccatccagtgccagggcgtgcccgtggccctgagcggcagagacatgatcggcatcgccaagaccggcagcggcaagaccgccgccttcatctggcccatgctgatccacatcatggaccagaaggagctggagcccggcgacggccccatcgccgtgatcgtgtgccccaccagagagctgtgccagcagatccacgccgagtgcaagagattcggcaaggcctacaacctgagaagcgtggccgtgtacggcggcggcagcatgtgggagcaggccaaggccctgcaggagggcgccgagatcgtggtgtgcacccccggcagactgatcgaccacgtgaagaagaaggccaccaacctgcagagagtgagctacctggtgttcgacgaggccgacagaatgttcgacatgggcttcgagtaccaggtgagaagcatcgccagccacgtgagacccgacagacagaccctgctgttcagcgccaccttcagaaagaagatcgagaagctggccagagacatcctgatcgaccccatcagagtggtgcagggcgacatcggcgaggccaacgaggacgtgacccagatcgtggagatcctgcacagcggccccagcaagtggaactggctgaccagaagactggtggagttcaccagcagcggcagcgtgctgctgttcgtgaccaagaaggccaacgccgaggagctggccaacaacctgaagcaggagggccacaacctgggcctgctgcacggcgacatggaccagagcgagagaaacaaggtgatcagcgacttcaagaagaaggacatccccgtgctggtggccaccgacgtggccgccagaggcctggacatccccagcatcaagaccgtgatcaactacgacgtggccagagacatcgacaccctgctgacccccaaggacagcaacttcgccggcgacctggtgagaaacctggagggcgccaaccagcacgtgagcaaggagctgctggacctggccatgcagaacgcctggttcagaaagagcagattcaagggcggcaagggcaagaagctgaacatcggcggcggcggcctgggctacagagagagacccggcctgggcagcgagaacatggacagaggcaacaacaacgtgatgagcaactacgaggcctacaagcccagcaccggcgccatgggcgacagactgaccgccatgaaggccgccttccagagccagtacaagagccacttcgtggccgccagcctgagcaaccagaaggccggcagcagcgccgccggcgccagcggctggaccagcgccggcagcctgaacagcgtgcccaccaacagcgcccagcagggccacaacagccccgacagccccgtgaccagcgccgccaagggcatccccggcttcggcaacaccggcaacatcagcggcgcccccgtgacctaccccagcgccggcgcccagggcgtgaacaacaccgccagcggcaacaacagcagagagggcaccggcggcagcaacggcaagagagagagatacaccgagaacagaggcagcagcagacacagccacggcgagaccggcaacagacacagcgacagccccagacacggcgacggcggcagacacggcgacggctacagacaccccgagagcagcagcagacacaccgacggccacagacacggcgagaacagacacggcggcagcgccggcagacacggcgagaacagaggcgccaacgacggcagaaacggcgagagcagaaaggaggccttcaacagagagagcaagatggagcccccccccaagagaaagaagagcagatgggacagctag

SEQ ID NO: 78715 - DNA, 2817 bp, synthetic construct
  misc_feature 1..2817: note = Description of Artificial Sequence: Synthetic coding sequence
  source 1..2817: mol_type = other DNA
atgaactggaacaagggcggccccggcaccaagagaggcttcggcttcggcggcttcgccatcagcgccggcaagaaggaggagcccaagctgccccagcagagccacagcgccttcggcgccaccagcagcagcagcggcttcggcaagagcgcccccccccagctgcccagcttctacaagatcggcagcaagagagccaacttcgacgaggagaacgcctacttcgaggacgaggaggaggacagcagcaacgtggacctgccctacatccccgccgagaacagccccaccagacagcagttccacagcaagcccgtggacagcgacagcgacgacgaccccctggaggccttcatggccgaggtggaggaccaggccgccagagacatgaagagactggaggagaaggacaaggagagaaagaacgtgaagggcatcagagacgacatcgaggaggaggacgaccaggaggcctacttcagatacatggccgagaaccccaccgccggcgtggtgcaggaggaggaggaggacaacctggagtacgacagcgacggcaaccccatcgcccccaccaagaagatcatcgaccccctgccccccatcgaccacagcgagatcgactacccccccttcgagaagaacttctacaacgagcacgaggagatcaccaacctgaccccccagcagctgatcgacctgagacacaagctgaacctgagagtgagcggcgccgccccccccagacccggcagcagcttcgcccacttcggcttcgacgagcagctgatgcaccagatcagaaagagcgagtacacccagcccacccccatccagtgccagggcgtgcccgtggccctgagcggcagagacatgatcggcatcgccaagaccggcagcggcaagaccgccgccttcatctggcccatgctgatccacatcatggaccagaaggagctggagcccggcgacggccccatcgccgtgatcgtgtgccccaccagagagctgtgccagcagatccacgccgagtgcaagagattcggcaaggcctacaacctgagaagcgtggccgtgtacggcggcggcagcatgtgggagcaggccaaggccctgcaggagggcgccgagatcgtggtgtgcacccccggcagactgatcgaccacgtgaagaagaaggccaccaacctgcagagagtgagctacctggtgttcgacgaggccgacagaatgttcgacatgggcttcgagtaccaggtgagaagcatcgccagccacgtgagacccgacagacagaccctgctgttcagcgccaccttcagaaagaagatcgagaagctggccagagacatcctgatcgaccccatcagagtggtgcagggcgacatcggcgaggccaacgaggacgtgacccagatcgtggagatcctgcacagcggccccagcaagtggaactggctgaccagaagactggtggagttcaccagcagcggcagcgtgctgctgttcgtgaccaagaaggccaacgccgaggagctggccaacaacctgaagcaggagggccacaacctgggcctgctgcacggcgacatggaccagagcgagagaaacaaggtgatcagcgacttcaagaagaaggacatccccgtgctggtggccaccgacgtggccgccagaggcctggacatccccagcatcaagaccgtgatcaactacgacgtggccagagacatcgacacccacacccacagaatcggcagaaccggcagagccggcgagaagggcgtggcctacaccctgctgacccccaaggacagcaacttcgccggcgacctggtgagaaacctggagggcgccaaccagcacgtgagcaaggagctgctggacctggccatgcagaacgcctggttcagaaagagcagattcaagggcggcaagggcaagaagctgaacatcggcggcggcggcctgggctacagagagagacccggcctgggcagcgagaacatggacagaggcaacaacaacgtgatgagcaactacgaggcctacaagcccagcaccggcgccatgggcgacagactgaccgccatgaaggccgccttccagagccagtacaagagccacttcgtggccgccagcctgagcaaccagaaggccggcagcagcgccgccggcgccagcggctggaccagcgccggcagcctgaacagcgtgcccaccaacagcgcccagcagggccacaacagccccgacagccccgtgaccagcgccgccaagggcatccccggcttcggcaacaccggcaacatcagcggcgcccccgtgacctaccccagcgccggcgcccagggcgtgaacaacaccgccagcggcaacaacagcagagagggcaccggcggcagcaacggcaagagagagagatacaccgagaacagaggcagcagcagacacagccacggcgagaccggcaacagacacagcgacagccccagacacggcgacggcggcagacacggcgacggctacagacaccccgagagcagcagcagacacaccgacggccacagacacggcgagaacagacacggcggcagcgccggcagacacggcgagaacagaggcgccaacgacggcagaaacggcgagagcagaaaggaggccttcaacagagagagcaagatggagcccaagatggagcccaaggtggacagcagcaagatggacaaggtggacagcaagaccgacaagaccgccgacggcttcgccgtgcccgagccccccaagagaaagaagagcagatgggacagctag

SEQ ID NO: 78716 - DNA, 2817 bp, synthetic construct; identical to SEQ ID NO: 78715
  misc_feature 1..2817: note = Description of Artificial Sequence: Synthetic coding sequence
  source 1..2817: mol_type = other DNA

SEQ ID NO: 78717 - DNA, 2817 bp, synthetic construct; identical to SEQ ID NO: 78715
  misc_feature 1..2817: note = Description of Artificial Sequence: Synthetic coding sequence
  source 1..2817: mol_type = other DNA

SEQ ID NO: 78718 - DNA, 2817 bp, synthetic construct; identical to SEQ ID NO: 78715
  misc_feature 1..2817: note = Description of Artificial Sequence: Synthetic coding sequence
  source 1..2817: mol_type = other DNA

SEQ ID NO: 78719 - DNA, 1947 bp, synthetic construct
  misc_feature 1..1947: note = Description of Artificial Sequence: Synthetic coding sequence
  source 1..1947: mol_type = other DNA
atgagccaccacggcggcgcccccaaggccagcacctgggtggtggccagcagaagaagcagcaccgtgagcagagcccccgagagaagacccgccgaggagctgaacagaaccggccccgagggctacagcgtgggcagaggcggcagatggagaggcaccagcagaccccccgaggccgtggccgccggccacgaggagctgcccctgtgcttcgccctgaagagccacttcgtgggcgccgtgatcggcagaggcggcagcaagatcaagaacatccagagcaccaccaacaccaccatccagatcatccaggagcagcccgagagcctggtgaagatcttcggcagcaaggccatgcagaccaaggccaaggccgtgatcgacaacttcgtgaagaagctggaggagaactacaacagcgagtgcggcatcgacaccgccttccagcccagcgtgggcaaggacggcagcaccgacaacaacgtggtggccggcgacagacccctgatcgactgggaccagatcagagaggagggcctgaagtggcagaagaccaagtgggccgacctgccccccatcaagaagaacttctacaaggagagcaccgccaccagcgccatgagcaaggtggaggccgacagctggagaaaggagaacttcaacatcacctgggacgacctgaaggacggcgagaagagacccatccccaaccccacctgcaccttcgacgacgccttccagtgctaccccgaggtgatggagaacatcaagaaggccggcttccagaagcccacccccatccagagccaggcctggcccatcgtgctgcagggcatcgacctgatcggcgtggcccagaccggcaccggcaagaccctgtgctacctgatgcccggcttcatccacctggtgctgcagcccagcctgaagggccagagaaacagacccggcatgctggtgctgacccccaccagagagctggccctgcaggtggagggcgagtgctgcaagtacagctacaagggcctgagaagcgtgtgcgtgtacggcggcggcaacagagacgagcagatcgaggagctgaagaagggcgtggacatcatcatcgccacccccggcagactgaacgacctgcagatgagcaacttcgtgaacctgaagaacatcacctacctggtgctggacgaggccgacaagatgctggacatgggcttcgagccccagatcatgaagatcctgctggacgtgagacccgacagacagaccgtgatgaccagcgccacctggccccacagcgtgcacagactggcccagagctacctgaaggagcccatgatcgtgtacgtgggcaccctggacctggtggccgtgagcagcgtgaagcagaacatcatcgtgaccaccgaggaggagaagtggagccacatgcagaccttcctgcagagcatgagcagcaccgacaaggtgatcgtgttcgtgagcagaaaggccgtggccgaccacctgagcagcgacctgatcctgggcaacatcagcgtggagagcctgcacggcgacagagagcagagagacagagagaaggccctggagaacttcaagaccggcaaggtgagaatcctgatcgccaccgacctggccagcagaggcctggacgtgcacgacgtgacccacgtgtacaacttcgacttccccagaaacatcgaggagtacgtgcacagaatcggcagaaccggcagagccggcagaaccggcgtgagcatcaccaccctgaccagaaacgactggagagtggccagcgagctgatcaacatcctggagagagccaaccagagcatccccgaggagctggtgagcatggccgagagattcaaggcccaccagcagaagagagagatggagagaaagatggagagaccccagggcagacccaagaagttccactag

SEQ ID NO: 78720 - DNA, 588 bp, synthetic construct
  misc_feature 1..588: note = Description of Artificial Sequence: Synthetic coding sequence
  source 1..588: mol_type = other DNA
atgagccaccacggcggcgcccccaaggccagcacctgggtggtggccagcagaagaagcagcaccgtgagcagagcccccgagagaagacccgccgaggagctgaacagaaccggccccgagggctacagcgtgggcagaggcggcagatggagaggcaccagcagaccccccgaggccgtggccgccggccacgaggagctgcccctgtgcttcgccctgaagagccacttcgtgggcgccgtgatcggcagaggcggcagcaagatcaagaacatccagagcaccaccaacaccaccatccagatcatccaggagcagcccgagagcctggtgaagatcttcggcagcaaggccatgcagaccaaggccaaggccgtgatcgacaacttcgtgaagaagctggaggagaactacaacagcgagtgcggcatcgacaccgccttccagcccagcgtgggcaaggacggcagcaccgacaacaacgtggtggccggcgacagacccctgatcgactgggaccagatcagagaggagggcctgaagtggcagaagaccaagtgggccggcaagaagatcctgatctag

SEQ ID NO: 78721 - DNA, 675 bp, synthetic construct
  misc_feature 1..675: note = Description of Artificial Sequence: Synthetic coding sequence
  source 1..675: mol_type = other DNA
atggagagcggcgcctacggcgccgccaaggccggcggcagcttcgacctgagaagattcctgacccagccccaggtggtggccagagccgtgtgcctggtgttcgccctgatcgtgttcagctgcatctacggcgagggctacagcaacgcccacgagagcaagcagatgtactgcgtgttcaacagaaacgaggacgcctgcagatacggcagcgccatcggcgtgctggccttcctggccagcgccttcttcctggtggtggacgcctacttcccccagatcagcaacgccaccgacagaaagtacctggtgatcggcgacctgctgttcagcgccctgtggaccttcctgtggttcgtgggcttctgcttcctgaccaaccagtgggccgtgaccaaccccaaggacgtgctggtgggcgccgacagcgtgagagccgccatcaccttcagcttcttcagcatcttcagctggggcgtgctggccagcctggcctaccagagatacaaggccggcgtggacgacttcatccagaactacgtggaccccacccccgaccccaacaccgcctacgccagctaccccggcgccagcgtggacaactaccagcagccccccttcacccagaacgccgagaccaccgagggctaccagcccccccccgtgtactag

SEQ ID NO: 78722 - DNA, 1635 bp, synthetic construct
  misc_feature 1..1635: note = Description of Artificial Sequence: Synthetic coding sequence
  source 1..1635: mol_type = other DNA
atgagcggctacagcagcgacagagacagaggcagagacagaggcttcggcgcccccagattcggcggcagcagagccggccccctgagcggcaagaagttcggcaaccccggcgagaagctggtgaagaagaagtggaacctggacgagctgcccaagttcgagaagaacttctaccaggagcaccccgacctggccagaagaaccgcccaggaggtggagacctacagatacctgctgcccgccatcgtgcacatcaaccaccagcccttcctggagagaggcgacggccccatctgcctggtgctggcccccaccagagagctggcccagcaggtgcagcaggtggccgccgagtactgcagagcctgcagactgaagagcacctgcatctacggcggcgcccccaagggcccccagatcagagacctggagagaggcgtggagatctgcatcgccacccccggcagactgatcgacttcctggagtgcggcaagaccaacctgagaagaaccacctacctggtgctggacgaggccgacagaatgctggacatgggcttcgagccccagatcagaaagatcgtggaccagatcagacccgacagacagaccctgatgtggagcgccacctggcccaaggaggtgagacagctggccgaggacttcctgaaggactacatccacatcaacatcggcgccctggagctgagcgccaaccacaacatcctgcagatcgtggacgtgtgccacgacgtggagaaggacgagaagctgatcagactgatggaggagatcatgagcgagaaggagaacaagaccatcgtgttcgtggagaccaagagaagatgcgacgagctgaccagaaagatgagaagagacggctggcccgccatgggcatccacggcgacaagagccagcaggagagagactgggtgctgaacgagttcaagcacggcaaggcccccatcctgatcgccaccgacgtggccagcagaggcctggacgtggaggacgtgaagttcgtgatcaactacgactaccccaacagcagcgaggactacatccacagaatcggcagaaccgccagaagcaccaagaccggcaccgcctacaccttcttcacccccaacaacatcaagcaggtgagcgacctgatcagcgtgctgagagaggccaaccaggccatcaaccccaagctgctgcagctggtggaggacagaggcagcggcagaagcagaggcagaggcggcatgaaggacgacagaagagacagatacagcgccggcaagagaggcggcttcaacaccttcagagacagagagaactacgacagaggctacagcagcctgctgaagagagacttcggcgccaagacccagaacggcgtgtacagcgccgccaactacaccaacggcagcttcggcagcaacttcgtgagcgccggcatccagaccagcttcagaaccggcaaccccaccggcacctaccagaacggctacgacagcacccagcagtacggcagcaacgtgcccaacatgcacaacggcatgaaccagcaggcctacgcctaccccgccaccgccgccgcccccatgatcggctaccccatgcccaccggctacagccagtag

SEQ ID NO: 78723 - DNA, 1845 bp, synthetic construct
  misc_feature 1..1845: note = Description of Artificial Sequence: Synthetic coding sequence
  source 1..1845: mol_type = other DNA
atgagcggctacagcagcgacagagacagaggcagagacagaggcttcggcgcccccagattcggcggcagcagagccggccccctgagcggcaagaagttcggcaaccccggcgagaagctggtgaagaagaagtggaacctggacgagctgcccaagttcgagaagaacttctaccaggagcaccccgacctggccagaagaaccgcccaggaggtggagacctacagaagaagcaaggagatcaccgtgagaggccacaactgccccaagcccgtgctgaacttctacgaggccaacttccccgccaacgtgatggacgtgatcgccagacagaacttcaccgagcccaccgccatccaggcccagggctggcccgtggccctgagcggcctggacatggtgggcgtggcccagaccggcagcggcaagaccctgagctacctgctgcccgccatcgtgcacatcaaccaccagcccttcctggagagaggcgacggccccatctgcctggtgctggcccccaccagagagctggcccagcaggtgcagcaggtggccgccgagtactgcagagcctgcagactgaagagcacctgcatctacggcggcgcccccaagggcccccagatcagagacctggagagaggcgtggagatctgcatcgccacccccggcagactgatcgacttcctggagtgcggcaagaccaacctgagaagaaccacctacctggtgctggacgaggccgacagaatgctggacatgggcttcgagccccagatcagaaagatcgtggaccagatcagacccgacagacagaccctgatgtggagcgccacctggcccaaggaggtgagacagctggccgaggacttcctgaaggactacatccacatcaacatcggcgccctggagctgagcgccaaccacaacatcctgcagatcgtggacgtgtgccacgacgtggagaaggacgagaagctgatcagactgatggaggagatcatgagcgagaaggagaacaagaccatcgtgttcgtggagaccaagagaagatgcgacgagctgaccagaaagatgagaagagacggctggcccgccatgggcatccacggcgacaagagccagcaggagagagactgggtgctgaacgagttcaagcacggcaaggcccccatcctgatcgccaccgacgtggccagcagaggcctggacgtggaggacgtgaagttcgtgatcaactacgactaccccaacagcagcgaggactacatccacagaatcggcagaaccgccagaagcaccaagaccggcaccgcctacaccttcttcacccccaacaacatcaagcaggtgagcgacctgatcagcgtgctgagagaggccaaccaggccatcaaccccaagctgctgcagctggtggaggacagaggcagcggcagaagcagaggcagaggcggcatgaaggacgacagaagagacagatacagcgccggcaagagaggcggcttcaacaccttcagagacagagagaactacgacagaggctacagcagcctgctgaagagagacttcggcgccaagacccagaacggcgtgtacagcgccgccaactacaccaacggcagcttcggcagcaacttcgtgagcgccggcatccagaccagcttcagaaccggcaaccccaccggcacctaccagaacggctacgacagcacccagcagtacggcagcaacgtgcccaacatgcacaacggcatgaaccagcaggcctacgcctaccccgccaccgccgccgcccccatgatcggctaccccatgcccaccggctacagccagtag

SEQ ID NO: 78724 - DNA, 1800 bp, synthetic construct
  misc_feature 1..1800: note = Description of Artificial Sequence: Synthetic coding sequence
  source 1..1800: mol_type = other DNA
atggacgtgcacgacctgttcagaagactgggcgccggcgccaagttcgacaccagaagattcagcgccgacgccgccagattccagatcggcaagagaaagtacgacttcgacagcagcgaggtgctgcagggcctggacttcttcggcaacaagaagagcgtgcccggcgtgtgcggcgccagccagacccaccagaagccccagaacggcgagaagaaggaggagagcctgaccgagagaaagagagagcagagcaagaagaagagaaagaccatgaccagcgagatcgccagccaggaggagggcgccaccatccagtggatgagcagcgtggaggccaagatcgaggacaagaaggtgcagagagagagcaagctgaccagcggcaagctggagaacctgagaaaggagaagatcaacttcctgagaaacaagcacaagatccacgtgcagggcaccgacctgcccgaccccatcgccaccttccagcagctggaccaggagtacaagatcaacagcagactgctgcagaacatcctggacgccggcttccagatgcccacccccatccagatgcaggccatccccgtgatgctgcacggcagagagctgctggccagcgcccccaccggcagcggcaagaccctggccttcagcatccccatcctgatgcagctgaagcagcccgccaacaagggcttcagagccctgatcatcagccccaccagagagctggccagccagatccacagagagctgatcaagatcagcgagggcaccggcttcagaatccacatgatccacaaggccgccgtggccgccaagaagttcggccccaagagcagcaagaagttcgacatcctggtgaccacccccaacagactgatctacctgctgaagcaggacccccccggcatcgacctggccagcgtggagtggctggtggtggacgagagcgacaagctgttcgaggacggcaagaccggcttcagagaccagctggccagcatcttcctggcctgcaccagccacaaggtgagaagagccatgttcagcgccaccttcgcctacgacgtggagcagtggtgcaagctgaacctggacaacgtgatcagcgtgagcatcggcgccagaaacagcgccgtggagaccgtggagcaggagctgctgttcgtgggcagcgagaccggcaagctgctggccatgagagagctggtgaagaagggcttcaacccccccgtgctggtgttcgtgcagagcatcgagagagccaaggagctgttccacgagctgatctacgagggcatcaacgtggacgtgatccacgccgagagaacccagcagcagagagacaacaccgtgcacagcttcagagccggcaagatctgggtgctgatctgcaccgccctgctggccagaggcatcgacttcaagggcgtgaacctggtgatcaactacgacttccccaccagcagcgtggagtacatccacagaatcggcagaaccggcagagccggcaacaagggcaaggccatcaccttcttcaccgaggacgacaagcccctgctgagaagcgtggccaacgtgatccagcaggccggctgccccgtgcccgagtacatcaagggcttccagaagctgctgagcaagcagaagaagaagatgatcaagaagcccctggagagagagagcatcagcaccacccccaagtgcttcctggagaaggccaaggacaagcagaagaaggtgaccggccagaacagcaagaagaaggtggccctggaggacaagagctag

SEQ ID NO: 78725 - DNA, 1476 bp, synthetic construct
  misc_feature 1..1476: note = Description of Artificial Sequence: Synthetic coding sequence
  source 1..1476: mol_type = other DNA
atgagcagcgtggaggccaagatcgaggacaagaaggtgcagagagagagcaagctgaccagcggcaagctggagaacctgagaaaggagaagatcaacttcctgagaaacaagcacaagatccacgtgcagggcaccgacctgcccgaccccatcgccaccttccagcagctggaccaggagtacaagatcaacagcagactgctgcagaacatcctggacgccggcttccagatgcccacccccatccagatgcaggccatccccgtgatgctgcacggcagagagctgctggccagcgcccccaccggcagcggcaagaccctggccttcagcatccccatcctgatgcagctgaagcagcccgccaacaagggcttcagagccctgatcatcagccccaccagagagctggccagccagatccacagagagctgatcaagatcagcgagggcaccggcttcagaatccacatgatccacaaggccgccgtggccgccaagaagttcggccccaagagcagcaagaagttcgacatcctggtgaccacccccaacagactgatctacctgctgaagcaggacccccccggcatcgacctggccagcgtggagtggctggtggtggacgagagcgacaagctgttcgaggacggcaagaccggcttcagagaccagctggccagcatcttcctggcctgcaccagccacaaggtgagaagagccatgttcagcgccaccttcgcctacgacgtggagcagtggtgcaagctgaacctggacaacgtgatcagcgtgagcatcggcgccagaaacagcgccgtggagaccgtggagcaggagctgctgttcgtgggcagcgagaccggcaagctgctggccatgagagagctggtgaagaagggcttcaacccccccgtgctggtgttcgtgcagagcatcgagagagccaaggagctgttccacgagctgatctacgagggcatcaacgtggacgtgatccacgccgagagaacccagcagcagagagacaacaccgtgcacagcttcagagccggcaagatctgggtgctgatctgcaccgccctgctggccagaggcatcgacttcaagggcgtgaacctggtgatcaactacgacttccccaccagcagcgtggagtacatccacagaatcggcagaaccggcagagccggcaacaagggcaaggccatcaccttcttcaccgaggacgacaagcccctgctgagaagcgtggccaacgtgatccagcaggccggctgccccgtgcccgagtacatcaagggcttccagaagctgctgagcaagcagaagaagaagatgatcaagaagcccctggagagagagagcatcagcaccacccccaagtgcttcctggagaaggccaaggacaagcagaagaaggtgaccggccagaacagcaagaagaaggtggccctggaggacaagagctag

SEQ ID NO: 78726 - DNA, 2646 bp, synthetic construct
  misc_feature 1..2646: note = Description of Artificial Sequence: Synthetic coding sequence
  source 1..2646: mol_type = other DNA
atggccgccgacaagggccccgccgccggccccagaagcagagccgccatggcccagtggagaaagaagaagggcctgagaaagagaagaggcgccgccagccaggccagaggcagcgacagcgaggacggcgagttcgagatccaggccgaggacgacgccagagccagaaagctgggccccggcagacccctgcccaccttccccaccagcgagtgcaccagcgacgtggagcccgacaccagagagatggtgagagcccagaacaagaagaagaagaagagcggcggcttccagagcatgggcctgagctaccccgtgttcaagggcatcatgaagaagggctacaaggtgcccacccccatccagagaaagaccatccccgtgatcctggacggcaaggacgtggtggccatggccagaaccggcagcggcaagaccgcctgcttcctgctgcccatgttcgagagactgaagacccacagcgcccagaccggcgccagagccctgatcctgagccccaccagagagctggccctgcagaccctgaagttcaccaaggagctgggcaagttcaccggcctgaagaccgccctgatcctgggcggcgacagaatggaggaccagttcgccgccctgcacgagaaccccgacatcatcatcgccacccccggcagactggtgcacgtggccgtggagatgagcctgaagctgcagagcgtggagtacgtggtgttcgacgaggccgacagactgttcgagatgggcttcgccgagcagctgcaggagatcatcgccagactgcccggcggccaccagaccgtgctgttcagcgccaccctgcccaagctgctggtggagttcgccagagccggcctgaccgagcccgtgctgatcagactggacgtggacaccaagctgaacgagcagctgaagaccagcttcttcctggtgagagaggacaccaaggccgccgtgctgctgcacctgctgcacaacgtggtgagaccccaggaccagaccgtggtgttcgtggccaccaagcaccacgccgagtacctgaccgagctgctgaccacccagagagtgagctgcgcccacatctacagcgccctggaccccaccgccagaaagatcaacctggccaagttcaccctgggcaagtgcagcaccctgatcgtgaccgacctggccgccagaggcctggacatccccctgctggacaacgtgatcaactacagcttccccgccaagggcaagctgttcctgcacagagtgggcagagtggccagagccggcagaagcggcaccgcctacagcctggtggcccccgacgagatcccctacctgctggacctgcacctgttcctgggcagaagcctgaccctggccagacccctgaaggagcccagcggcgtggccggcgtggacggcatgctgggcagagtgccccagagcgtggtggacgaggaggacagcggcctgcagagcaccctggaggccagcctggagctgagaggcctggccagagtggccgacaacgcccagcagcagtacgtgagaagcagacccgcccccagccccgagagcatcaagagagccaaggagatggacctggtgggcctgggcctgcaccccctgttcagcagcagattcgaggaggaggagctgcagagactgagactggtggacagcatcaagaactacagaagcagagccaccatcttcgagatcaacgccagcagcagagacctgtgcagccaggtgatgagagccaagagacagaaggacagaaaggccatcgccagattccagcagggccagcagggcagacaggagcagcaggagggccccgtgggccccgcccccagcagacccgccctgcaggagaagcagcccgagaaggaggaggaggaggaggccggcgagagcgtggaggacatcttcagcgaggtggtgggcagaaagagacagagaagcggccccaacagaggcgccaagagaagaagagaggaggccagacagagagaccaggagttctacatcccctacagacccaaggacttcgacagcgagagaggcctgagcatcagcggcgagggcggcgccttcgagcagcaggccgccggcgccgtgctggacctgatgggcgacgaggcccagaacctgaccagaggcagacagcagctgaagtgggacagaaagaagaagagattcgtgggccagagcggccaggaggacaagaagaagatcaagaccgagagcggcagatacatcagcagcagctacaagagagacctgtaccagaagtggaagcagaagcagaagatcgacgacagagacagcgacgaggagggcgccagcgacagaagaggccccgagagaagaggcggcaagagagacagaggccagggcgccagcagaccccacgcccccggcacccccgccggcagagtgagacccgagctgaagaccaagcagcagatcctgaagcagagaagaagagcccagaagctgcacttcctgcagagaggcggcctgaagcagctgagcgccagaaacagaagaagagtgcaggagctgcagcagggcgccttcggcagaggcgccagaagcaagaagggcaagatgagaaagagaatgtag

SEQ ID NO: 78727 - DNA, 2649 bp, synthetic construct
  misc_feature 1..2649: note = Description of Artificial Sequence: Synthetic coding sequence
  source 1..2649: mol_type = other DNA
atggccgccgacaagggccccgccgccggccccagaagcagagccgccatggcccagtggagaaagaagaagggcctgagaaagagaagaggcgccgccagccaggccagaggcagcgacagcgaggacggcgagttcgagatccaggccgaggacgacgccagagccagaaagctgggccccggcagacccctgcccaccttccccaccagcgagtgcaccagcgacgtggagcccgacaccagagagatggtgagagcccagaacaagaagaagaagaagagcggcggcttccagagcatgggcctgagctaccccgtgttcaagggcatcatgaagaagggctacaaggtgcccacccccatccagagaaagaccatccccgtgatcctggacggcaaggacgtggtggccatggccagaaccggcagcggcaagaccgcctgcttcctgctgcccatgttcgagagactgaagacccacagcgcccagaccggcgccagagccctgatcctgagccccaccagagagctggccctgcagaccctgaagttcaccaaggagctgggcaagttcaccggcctgaagaccgccctgatcctgggcggcgacagaatggaggaccagttcgccgccctgcacgagaaccccgacatcatcatcgccacccccggcagactggtgcacgtggccgtggagatgagcctgaagctgcagagcgtggagtacgtggtgttcgacgaggccgacagactgttcgagatgggcttcgccgagcagctgcaggagatcatcgccagactgcccggcggccaccagaccgtgctgttcagcgccaccctgcccaagctgctggtggagttcgccagagccggcctgaccgagcccgtgctgatcagactggacgtggacaccaagctgaacgagcagctgaagaccagcttcttcctggtgagagaggacaccaaggccgccgtgctgctgcacctgctgcacaacgtggtgagaccccaggaccagaccgtggtgttcgtggccaccaagcaccacgccgagtacctgaccgagctgctgaccacccagagagtgagctgcgcccacatctacagcgccctggaccccaccgccagaaagatcaacctggccaagttcaccctgggcaagtgcagcaccctgatcgtgaccgacctggccgccagaggcctggacatccccctgctggacaacgtgatcaactacagcttccccgccaagggcaagctgttcctgcacagagtgggcagagtggccagagccggcagaagcggcaccgcctacagcctggtggcccccgacgagatcccctacctgctggacctgcacctgttcctgggcagaagcctgaccctggccagacccctgaaggagcccagcggcgtggccggcgtggacggcatgctgggcagagtgccccagagcgtggtggacgaggaggacagcggcctgcagagcaccctggaggccagcctggagctgagaggcctggccagagtggccgacaacgcccagcagcagtacgtgagaagcagacccgcccccagccccgagagcatcaagagagccaaggagatggacctggtgggcctgggcctgcaccccctgttcagcagcagattcgaggaggaggagctgcagagactgagactggtggacagcatcaagaactacagaagcagagccaccatcttcgagatcaacgccagcagcagagacctgtgcagccaggtgatgagagccaagagacagaaggacagaaaggccatcgccagattccagcagggccagcagggcagacaggagcagcaggagggccccgtgggccccgcccccagcagacccgccctgcaggagaagcagcccgagaaggaggaggaggaggaggccggcgagagcgtggaggacatcttcagcgaggtggtgggcagaaagagacagagaagcggccccaacagaggcgccaagagaagaagagaggaggccagacagagagaccaggagttctacatcccctacagacccaaggacttcgacagcgagagaggcctgagcatcagcggcgagggcggcgccttcgagcagcaggccgccggcgccgtgctggacctgatgggcgacgaggcccagaacctgaccagaggcagacagcagctgaagtgggacagaaagaagaagagattcgtgggccagagcggccaggaggacaagaagaagatcaagaccgagagcggcagatacatcagcagcagctacaagagagacctgtaccagaagtggaagcagaagcagaagatcgacgacagagacagcgacgaggagggcgccagcgacagaagaggccccgagagaagaggcggcaagagagacagaggccaggccggcgccagcagaccccacgcccccggcacccccgccggcagagtgagacccgagctgaagaccaagcagcagatcctgaagcagagaagaagagcccagaagctgcacttcctgcagagaggcggcctgaagcagctgagcgccagaaacagaagaagagtgcaggagctgcagcagggcgccttcggcagaggcgccagaagcaagaagggcaagatgagaaagagaatgtag

SEQ ID NO: 78728 - DNA, 1452 bp, synthetic construct
  misc_feature 1..1452: note = Description of Artificial Sequence: Synthetic coding sequence
  source 1..1452: mol_type = other DNA
atgagcaccgccagaaccgagaaccccgtgatcatgggcctgagcagccagaacggccagctgagaggccccgtgaagcccaccggcggccccggcggcggcggcacccagacccagcagcagatgaaccagctgaagaacaccaacaccatcaacaacggcacccagcagcaggcccagagcatgaccaccaccatcaagcccggcgacgactggaagaagaccctgaagctgccccccaaggacctgagaatcaagaccagcgacgtgaccagcaccaagggcaacgagttcgaggactactgcctgaagagagagctgctgatgggcatcttcgagatgggctgggagaagcccagccccatccaggaggagagcatccccatcgccctgagcggcagagacatcctggccagagccaagaacggcaccggcaagagcggcgcctacctgatccccctgctggagagactggacctgaagaaggacaacatccaggccatggtgatcgtgcccaccagagagctggccctgcaggtgagccagatctgcatccaggtgagcaagcacatgggcggcgccaaggtgatggccaccaccggcggcaccaacctgagagacgacatcatgagactggacgacaccgtgcacgtggtgatcgccacccccggcagaatcctggacctgatcaagaagggcgtggccaaggtggaccacgtgcagatgatcgtgctggacgaggccgacaagctgctgagccaggacttcgtgcagatcatggaggacatcatcctgaccctgcccaagaacagacagatcctgctgtacagcgccaccttccccctgagcgtgcagaagttcatgaacagccacctgcagaagccctacgagatcaacctgatggaggagctgaccctgaagggcgtgacccagtactacgcctacgtgaccgagagacagaaggtgcactgcctgaacaccctgttcagcagactgcagatcaaccagagcatcatcttctgcaacagcagccagagagtggagctgctggccaagaagatcagccagctgggctacagctgcttctacatccacgccaagatgagacaggagcacagaaacagagtgttccacgacttcagaaacggcctgtgcagaaacctggtgtgcaccgacctgttcaccagaggcatcgacatccaggccgtgaacgtggtgatcaacttcgacttccccaagctggccgagacctacctgcacagaatcggcagaagcggcagattcggccacctgggcctggccatcaacctgatcacctacgacgacagattcaacctgaagagcatcgaggagcagctgggcaccgagatcaagcccatccccagcaacatcgacaagagcctgtacgtggccgagtaccacagcgagcccgtggaggacgagaagccctag

SEQ ID NO: 78729 - DNA, 1452 bp, synthetic construct; identical to SEQ ID NO: 78728
  misc_feature 1..1452: note = Description of Artificial Sequence: Synthetic coding sequence
  source 1..1452: mol_type = other DNA

SEQ ID NO: 78730 - DNA, 1452 bp, synthetic construct; identical to SEQ ID NO: 78728
  misc_feature 1..1452: note = Description of Artificial Sequence: Synthetic coding sequence
  source 1..1452: mol_type = other DNA

SEQ ID NO: 78731 - DNA, 564 bp, synthetic construct
  misc_feature 1..564: note = Description of Artificial Sequence: Synthetic coding sequence
  source 1..564: mol_type = other DNA
atgagcaccgccagaaccgagaaccccgtgatcatgggcctgagcagccagaacggccagctgagaggccccgtgaagcccaccggcggccccggcggcggcggcacccagacccagcagcagatgaaccagctgaagaacaccaacaccatcaacaacggcacccagcagcaggcccagagcatgaccaccaccatcaagcccggcgacgactggaagaagaccctgaagctgccccccaaggacctgagaatcaagaccagcgacgtgaccagcaccaagggcaacgagttcgaggactactgcctgaagagagagctgctgatgggcatcttcgagatgggctgggagaagcccagccccatccaggaggagagcatccccatcgccctgagcggcagagacatcctggccagagccaagaacggcaccggcaagagcggcgcctacctgatccccctgctggagagactggacctgaagaaggacaacatccaggccatggtgatcgtgcccaccagagagctggccctgcaggtgagccagatctgcaccgtgtgctag

SEQ ID NO: 78732 - DNA, 5139 bp, synthetic construct
  misc_feature 1..5139: note = Description of Artificial Sequence: Synthetic coding sequence
  source 1..5139: mol_type = other DNA
atggagagaaacgtgctgaccaccttcagccaggagatgagccagctgatcctgaacgagatgcccaaggccgagtacagcagcctgttcaacgacttcgtggagagcgagttcttcctgatcgacggcgacagcctgctgatcacctgcatctgcgagatcagcttcaagcccggccagaacctgcacttcttctacctggtggagagatacctggtggacctgatcagcaagggcggccagttcaccatcgtgttcttcaaggacgccgagtacgcctacttcaacttccccgagctgctgagcctgagaaccgccctgatcctgcacctgcagaagaacaccaccatcgacgtgagaaccaccttcagcagatgcctgagcaaggagtggggcagcttcctggaggagagctacccctacttcctgatcgtggccgacgagggcctgaacgacctgcagacccagctgttcaacttcctgatcatccacagctgggccagaaaggtgaacgtggtgctgagcagcggccaggagagcgacgtgctgtgcctgtacgcctacctgctgcccagcatgtacagacaccagatcttcagctggaagaacaagcagaacatcaaggacgcctacaccaccctgctgaaccagctggagagattcaagctgagcgccctggcccccctgttcggcagcctgaagtggaacaacatcaccgaggaggcccacaagaccgtgagcctgctgacccaggtgtggcccgagggcagcgacatcagaagagtgttctgcgtgaccagctgcagcctgagcctgagaatgtaccacagattcctgggcaacagagagcccagcagcggccaggagaccgagatccagcaggtgaacagcaactgcctgaccctgcaggagatggaggacctgtgcaagctgcactgcctgaccgtggtgttcctgctgcacctgcccctgagccagagagcctgcgccagagtgatcaccagccactgggccgaggacatgaagcccctgctgcagatgaagaagtggtgcgagtacttcatcctgagaaacatccacaccttcgagttctggaacctgaacctgatccacctgagcgacctgaacgacgagctgctgctgaagaacatcgccttctactacgagaacgagaacgtgaagggcctgcacctgaacctgggcgacaccatcatgaaggactacgagtacctgtggaacaccgtgagcaagctggtgagagacttcgaggtgggccagcccttccccctgagaaccaccaaggtgtgcttcctggagaagaagcccagccccatcaaggacagcagcaacgagatggtgcccaacctgggcttcatccccaccagcagcttcgtggtggacaagttcgccggcgacatcctgaaggacctgcccttcctgaagagcgacgaccccatcgtgaccagcctggtgaagcagaaggagttcgacgagctggtgcactggcacagccacaagcccctgagcgacgactacgacagaagcagatgccagttcgacgagaagagcagagaccccagagtgctgagaagcgtgcagaagtaccacgtgttccagagattctacggcaacagcctggagaccgtgagcagcaagatcatcgtgacccagaccatcaagagcaagaaggacttcagcggccccaagagcaagaaggcccacgagaccaaggccgagatcatcgccagagagaacaagaagagactgttcgccagagaggagcagaaggaggagcagaagtggaacgccctgagcttcagcatcgaggagcagctgaaggagaacctgcacagcggcatcaagagcctggaggacttcctgaagagctgcaagagcagctgcgtgaagctgcaggtggagatggtgggcctgaccgcctgcctgaaggcctggaaggagcactgcagaagcgaggagggcaagaccaccaaggacctgagcatcgccgtgcaggtgatgaagagaatccacagcctgatggagaagtacagcgagctgctgcaggaggacgacagacagctgatcgccagatgcctgaagtacctgggcttcgacgagctggccagcagcctgcaccccgcccaggacgccgagaacgacgtgaaggtgaagaagagaaacaagtacagcgtgggcatcggccccgccagattccagctgcagtacatgggccactacctgatcagagacgagagaaaggaccccgaccccagagtgcaggacttcatccccgacacctggcagagagagctgctggacgtggtggacaagaacgagagcgccgtgatcgtggcccccaccagcagcggcaagacctacgccagctactactgcatggagaaggtgctgaaggagagcgacgacggcgtggtggtgtacgtggcccccaccaaggccctggtgaaccaggtggccgccaccgtgcagaacagattcaccaagaacctgcccagcggcgaggtgctgtgcggcgtgttcaccagagagtacagacacgacgccctgaactgccaggtgctgatcaccgtgcccgcctgcttcgagatcctgctgctggccccccacagacagaactgggtgaagaagatcagatacgtgatcttcgacgaggtgcactgcctgggcggcgagatcggcgccgagatctgggagcacctgctggtgatgatcagatgccccttcctggccctgagcgccaccatcagcaaccccgagcacctgaccgagtggctgcagagcgtgaagtggtactggaagcaggaggacaagatcatcgagaacaacaccgccagcaagagacacgtgggcagacaggccggcttccccaaggactacctgcaggtgaagcagagctacaaggtgagactggtgctgtacggcgagagatacaacgacctggagaagcacgtgtgcagcatcaagcacggcgacatccacttcgaccacttccacccctgcgccgccctgaccaccgaccacatcgagagatacggcttcccccccgacctgaccctgagccccagagagagcatccagctgtacgacgccatgttccagatctggaagagctggcccagagcccaggagctgtgccccgagaacttcatccacttcaacaacaagctggtgatcaagaagatggacgccagaaagtacgaggagagcctgaaggccgagctgaccagctggatcaagaacggcaacgtggagcaggccagaatggtgctgcagaacctgagccccgaggccgacctgagccccgagaacatgatcaccatgttccccctgctggtggagaagctgagaaagatggagaagctgcccgccctgttcttcctgttcaagctgggcgccgtggagaacgccgccgagagcgtgagcaccttcctgaagaagaagcaggagaccaagagaccccccaaggccgacaaggaggcccacgtgatggccaacaagctgagaaaggtgaagaagagcatcgagaagcagaagatcatcgacgagaagagccagaagaagaccagaaacgtggaccagagcctgatccacgaggccgagcacgacaacctggtgaagtgcctggagaagaacctggagatcccccaggactgcacctacgccgaccagaaggccgtggacaccgagaccctgcagaaggtgttcggcagagtgaagttcgagagaaagggcgaggagctgaaggccctggccgagagaggcatcggctaccaccacagcgccatgagcttcaaggagaagcagctggtggagatcctgttcagaaagggctacctgagagtggtgaccgccaccggcaccctggccctgggcgtgaacatgccctgcaagagcgtggtgttcgcccagaacagcgtgtacctggacgccctgaactacagacagatgagcggcagagccggcagaagaggccaggacctgatgggcgacgtgtacttcttcgacatccccttccccaagatcggcaagctgatcaagagcaacgtgcccgagctgagaggccacttccccctgagcatcaccctggtgctgagactgatgctgctggccagcaagggcgacgaccccgaggacgccaaggccaaggtgctgagcgtgctgaagcacagcctgctgagcttcaagcagcccagagtgatggacatgctgaagctgtacttcctgttcagcctgcagttcctggtgaaggagggctacctggaccaggagggcaaccccatgggcttcgccggcctggtgagccacctgcactaccacgagcccagcaacctggtgttcgtgagcttcctggtgaacggcctgttccacgacctgtgccagcccaccagaaagggcagcaagcacttcagccaggacgtgatggagaagctggtgctggtgctggcccacctgttcggcagaagatacttcccccccaagttccaggacgcccacttcgagttctaccagagcaaggtgttcctggacgacctgcccgaggacttcagcgacgccctggacgagtacaacatgaagatcatggaggacttcaccaccttcctgagaatcgtgagcaagctggccgacatgaaccaggagtaccagctgcccctgagcaagatcaagttcaccggcaaggagtgcgaggacagccagctggtgagccacctgatgagctgcaaggagggcagagtggccatcagccccttcgtgtgcctgagcggcaacttcgacgacgacctgctgagactggagacccccaaccacgtgaccctgggcaccatcggcgtgaacagaagccaggcccccgtgctgctgagccagaagttcgacaacagaggcagaaagatgagcctgaacgcctacgccctggacttctacaagcacggcagcctgatcggcctggtgcaggacaacagaatgaacgagggcgacgcctactacctgctgaaggacttcgccctgaccatcaagagcatcagcgtgagcctgagagagctgtgcgagaacgaggacgacaacgtggtgctggccttcgagcagctgagcaccaccttctgggagaagctgaacaaggtgtag

SEQ ID NO: 78733 - DNA, 363 bp, synthetic construct
  misc_feature 1..363: note = Description of Artificial Sequence: Synthetic coding sequence
  source 1..363: mol_type = other DNA
atggagagaaacgtgctgaccaccttcagccaggagatgagccagctgatcctgaacgagatgcccaaggccgagtacagcagcctgttcaacgacttcgtggagagcgagttcttcctgatcgacggcgacagcctgctgatcacctgcatctgcgagatcagcttcaagcccggccagaacctgcacttcttctacctggtggagagatacctggtggacctgatcagcaagggcggccagttcaccatcgtgttcttcaaggacgccgagtacgcctacttcaacttccccgagctgctgagcctgagaaccgccctgatcctgcacctgcagaagaacaccaccatcgacgtgagatag

SEQ ID NO: 78734 - DNA, 885 bp, synthetic construct
  misc_feature 1..885: note = Description of Artificial Sequence: Synthetic coding sequence
  source 1..885: mol_type = other DNA
atgatcagatgccccttcctggccctgagcgccaccatcagcaaccccgagcacctgaccgagtggctgcagagcgtgaagtggtactggaagcaggaggacaagatcatcgagaacaacaccgccagcaagagacacgtgggcagacaggccggcttccccaaggactacctgcaggtgaagcagagctacaaggtgagactggtgctgtacggcgagagatacaacgacctggagaagcacgtgtgcagcatcaagcacggcgacatccacttcgaccacttccacccctgcgccgccctgaccaccgaccacatcgagagatacggcttcccccccgacctgaccctgagccccagagagagcatccagctgtacgacgccatgttccagatctggaagagctggcccagagcccaggagctgtgccccgagaacttcatccacttcaacaacaagctggtgatcaagaagatggacgccagaaagtacgaggagagcctgaaggccgagctgaccagctggatcaagaacggcaacgtggagcaggccagaatggtgctgcagaacctgagccccgaggccgacctgagccccgagaacatgatcaccatgttccccctgctggtggagaagctgagaaagatggagaagctgcccgccctgttcttcctgttcaagctgggcgccgtggagaacgccgccgagagcgtgagcaccttcctgaagaagaagcaggagaccaagagaccccccaaggccgacaaggaggcccacgtgatggccaacaagctgagaaaggtgaagaagagcatcgagaagcagaagatcatcgacgagaagagccagaagaaccagaagtgcggcagcaagcccaacacctag

SEQ ID NO: 78735 - DNA, 1062 bp, synthetic construct
  misc_feature 1..1062: note = Description of Artificial Sequence: Synthetic coding sequence
  source 1..1062: mol_type = other DNA
atgcagagcaagagagactgcgagctgtggtgcgagagagtgaaccccgagaacaaggccgccctggaggcctgggtgagagagaccggcatcagactggtgcaggtgaacggccagagaaagtacggcggccccccccccggctgggtgggcagccccccccccgccggcagcgaggtgttcatcggcagactgccccaggacgtgtacgagcaccagctgatccccctgttccagagagtgggcagactgtacgagttcagactgatgatgaccttcagcggcctgaacagaggcttcgcctacgccagatacagcagcagaagaggcgcccaggccgccatcgccaccctgcacaaccaccccctgagacccagctgccccctgctggtgtgcagaagcaccgagaagtgcgagctgagcgtggacggcctgccccccaacctgaccagaagcgccctgctgctggccctgcagcccctgggccccggcctgcaggaggccagactgctgcccagccccggccccgcccccggccagatcgccctgctgaagttcagcagccacagagccgccgccatggccaagaaggccctggtggagggccagagccacctgtgcggcgagcaggtggccgtggagtggctgaagcccgacctgaagcagagactgagacagcagctggtgggccccttcctgagaagcccccagcccgagggcagccagctggccctggccagagacaagctgggcttccagggcgccagagccaccctgcagctgctgtgccagagaatgaagctgggcagccccgtgttcctgaccaagtgcctgggcatcggccccgccggctggcacagattctggtaccaggtggtgatccccggccaccccgtgcccttcagcggcctgatctgggtggtgctgaccctggacggcagagacggccacgaggtggccaaggacgccgtgagcgtgagactgctgcaggccctgagcgagagcggcgccaacctgctgtggagcgccggcgccgaggccggcaccatggtgaagcagtag

SEQ ID NO: 78736 - DNA, 1491 bp, synthetic construct
  misc_feature 1..1491: note = Description of Artificial Sequence: Synthetic coding sequence
  source 1..1491: mol_type = other DNA
atgttcgccaaggccaccagaaacttcctgagagaggtggacgccgacggcgacctgatcgccgtgagcaacctgaacgacagcgacaagctgcagctgctgagcctggtgaccaagaagaagagattctggtgctggcagagacccaagtaccagttcctgagcctgaccctgggcgacgtgctgatcgaggaccagttccccagccccgtggtggtggagagcgacttcgtgaagtacgagggcaagttcgccaaccacgtgagcggcaccctggagaccgccctgggcaaggtgaagctgaacctgggcggcagcagcagagtggagagccagagcagcttcggcaccctgagaaagcaggaggtggacctgcagcagctgatcagagacagcgccgagagaaccatcaacctgagaaaccccgtgctgcagcaggtgctggagggcagaaacgaggtgctgtgcgtgctgacccagaagatcaccaccatgcagaagtgcgtgatcagcgagcacatgcaggtggaggagaagtgcggcggcatcgtgggcatccagaccaagaccgtgcaggtgagcgccaccgaggacggcaacgtgaccaaggacagcaacgtggtgctggagatccccgccgccaccaccatcgcctacggcgtgatcgagctgtacgtgaagctggacggccagttcgagttctgcctgctgagaggcaagcagggcggcttcgagaacaagaagagaatcgacagcgtgtacctggaccccctggtgttcagagagttcgccttcatcgacatgcccgacgccgcccacggcatcagcagccaggacggccccctgagcgtgctgaagcaggccaccctgctgctggagagaaacttccaccccttcgccgagctgcccgagccccagcagaccgccctgagcgacatcttccaggccgtgctgttcgacgacgagctgctgatggtgctggagcccgtgtgcgacgacctggtgagcggcctgagccccaccgtggccgtgctgggcgagctgaagcccagacagcagcaggacctggtggccttcctgcagctggtgggctgcagcctgcagggcggctgccccggccccgaggacgccggcagcaagcagctgttcatgaccgcctacttcctggtgagcgccctggccgagatgcccgacagcgccgccgccctgctgggcacctgctgcaagctgcagatcatccccaccctgtgccacctgctgagagccctgagcgacgacggcgtgagcgacctggaggaccccaccctgacccccctgaaggacaccgagagattcggcatcgtgcagagactgttcgccagcgccgacatcagcctggagagactgaagagcagcgtgaaggccgtgatcctgaaggacagcaaggtgttccccctgctgctgtgcatcaccctgaacggcctgtgcgccctgggcagagagcacagctag

SEQ ID NO: 78737 - DNA, 1491 bp, synthetic construct; identical to SEQ ID NO: 78736
  misc_feature 1..1491: note = Description of Artificial Sequence: Synthetic coding sequence
  source 1..1491: mol_type = other DNA

SEQ ID NO: 78738 - DNA, 999 bp, synthetic construct
  misc_feature 1..999: note = Description of Artificial Sequence: Synthetic coding sequence
  source 1..999: mol_type = other DNA
atgcagaagtgcgtgatcagcgagcacatgcaggtggaggagaagtgcggcggcatcgtgggcatccagaccaagaccgtgcaggtgagcgccaccgaggacggcaacgtgaccaaggacagcaacgtggtgctggagatccccgccgccaccaccatcgcctacggcgtgatcgagctgtacgtgaagctggacggccagttcgagttctgcctgctgagaggcaagcagggcggcttcgagaacaagaagagaatcgacagcgtgtacctggaccccctggtgttcagagagttcgccttcatcgacatgcccgacgccgcccacggcatcagcagccaggacggccccctgagcgtgctgaagcaggccaccctgctgctggagagaaacttccaccccttcgccgagctgcccgagccccagcagaccgccctgagcgacatcttccaggccgtgctgttcgacgacgagctgctgatggtgctggagcccgtgtgcgacgacctggtgagcggcctgagccccaccgtggccgtgctgggcgagctgaagcccagacagcagcaggacctggtggccttcctgcagctggtgggctgcagcctgcagggcggctgccccggccccgaggacgccggcagcaagcagctgttcatgaccgcctacttcctggtgagcgccctggccgagatgcccgacagcgccgccgccctgctgggcacctgctgcaagctgcagatcatccccaccctgtgccacctgctgagagccctgagcgacgacggcgtgagcgacctggaggaccccaccctgacccccctgaaggacaccgagagattcggcatcgtgcagagactgttcgccagcgccgacatcagcctggagagactgaagagcagcgtgaaggccgtgatcctgaaggacagcaaggtgttccccctgctgctgtgcatcaccctgaacggcctgtgcgccctgggcagagagcacagctag

SEQ ID NO: 78739 - DNA, 999 bp, synthetic construct; identical to SEQ ID NO: 78738
  misc_feature 1..999: note = Description of Artificial Sequence: Synthetic coding sequence
  source 1..999: mol_type = other DNA

SEQ ID NO: 78740 - DNA, 1575 bp, synthetic construct
  misc_feature 1..1575: note = Description of Artificial Sequence: Synthetic coding sequence
  source 1..1575: mol_type = other DNA
atggccaacagcgccggcttcctgggcgacctgaccaccgagggcatcaacaagcccggcttctacaagggccccgccggcagccaggtgaccctgagcagcctgggcaaccagaccagagtgctgctggaggagcaggccagacacctgctgaacgagcaggagcacgccaccatggcctactacctggacgagtacagaggcggcagcgtgagcgtggaggccctggtgatggccctgttcaagctgctgaacacccacgccaagttcagcctgctgagcgaggtgagaggcaccatcagcccccaggacctggagagattcgaccacctggtgctgagaagagagatcgagagcatgaaggccagacagccccccggccccggcgccggcgacacctacagcatggtgagctacagcgacaccggcagcagcaccggcagccacggcaccagcaccaccgtgagcagcgccagaaacaccctggacctggaggagaccggcgaggccgtgcagggcaacatcaacgccctgcccgacgtgagcgtggacgacgtgagaagcaccagccagggcctgagcagcttcaagcccctgcccagacccccccccctggcccagggcaacgacctgcccctgggccagcccagaaagctgggcagagaggacctgcagccccccagcagcatgcccagctgcagcggcaccgtgttcagcgccccccagaacagaagcccccccgccggcaccgcccccacccccggcaccagcagcgcccaggacctgcccagcagccccatctacgccagcgtgagccccgccaaccccagcagcaagagacccctggacgcccacctggccctggtgaaccagcaccccatcggccccttccccagagtgcagagccccccccacctgaagagccccagcgccgaggccaccgtggccggcggctgcctgctgccccccagccccagcggccaccccgaccagaccggcaccaaccagcacttcgtgatggtggaggtgcacagacccgacagcgagcccgacgtgaacgaggtgagagccctgccccagaccagaaccgccagcaccctgagccacctgagcgacagcggccagaccctgagcgaggacagcggcgtggacgccggcgaggccgaggccagcgcccccggcagaggcagacagagcgtgagcaccaagagcagaagcagcaaggagctgcccagaaacgagagacccaccgacggcgccaacaagccccccggcctgctggagcccaccagcaccctggtgagagtgaagaagagcgccgccaccctgggcatcgccatcgagggcggcgccaacaccagacagcccctgcccagaatcgtgaccatccagagaggcggcagcgcccacaactgcggccagctgaaggtgggccacgtgatcctggaggtgaacggcctgaccctgagaggcaaggagcacagagaggccgccagaatcatcgccgaggccttcaagaccaaggacagagactacatcgacttcctggtgaccgagttcaacgtgatgctgtag

SEQ ID NO: 78741 - DNA, 2724 bp, synthetic construct
  misc_feature 1..2724: note = Description of Artificial Sequence: Synthetic coding sequence
  source 1..2724: mol_type = other DNA
atgaacgcccccctggacggcctgagcgtgagcagcagcagcaccggcagcctgggcagcgccgccggcgccggcggcggcggcggcgccggcctgagactgctgagcgccaacgtgagacagctgcaccaggccctgaccgccctgctgagcgaggccgagagagagcagttcacccactgcctgaacgcctaccacgccagaagaaacgtgttcgacctggtgagaaccctgagagtgctgctggacagccccgtgaagagaagactgctgcccatgctgagactggtgatccccagaagcgaccagctgctgttcgaccagtacaccgccgagggcctgtacctgcccgccaccaccccctacagacagcccgcctggggcggccccgacagcgccggccccggcgaggtgagactggtgagcctgagaagagccaaggcccacgagggcctgggcttcagcatcagaggcggcagcgagcacggcgtgggcatctacgtgagcctggtggagcccggcagcctggccgagaaggagggcctgagagtgggcgaccagatcctgagagtgaacgacaagagcctggccagagtgacccacgccgaggccgtgaaggccctgaagggcagcaagaagctggtgctgagcgtgtacagcgccggcagaatccccggcggctacgtgaccaaccacatctacacctgggtggacccccagggcagaagcatcagcccccccagcggcctgccccagccccacggcggcgccctgagacagcaggagggcgacagaagaagcaccctgcacctgctgcagggcggcgacgagaagaaggtgaacctggtgctgggcgacggcagaagcctgggcctgaccatcagaggcggcgccgagtacggcctgggcatctacatcaccggcgtggaccccggcagcgaggccgagggcagcggcctgaaggtgggcgaccagatcctggaggtgaacggcagaagcttcctgaacatcctgcacgacgaggccgtgagactgctgaagagcagcagacacctgatcctgaccgtgaaggacgtgggcagactgcccagagccagaaccaccgtggacgagaccaagtggatcgccagcagcagaatcagagagaccatggccaacagcgccggcttcctgggcgacctgaccaccgagggcatcaacaagcccggcttctacaagggccccgccggcagccaggtgaccctgagcagcctgggcaaccagaccagagtgctgctggaggagcaggccagacacctgctgaacgagcaggagcacgccaccatggcctactacctggacgagtacagaggcggcagcgtgagcgtggaggccctggtgatggccctgttcaagctgctgaacacccacgccaagttcagcctgctgagcgaggtgagaggcaccatcagcccccaggacctggagagattcgaccacctggtgctgagaagagagatcgagagcatgaaggccagacagccccccggccccggcgccggcgacacctacagcatggtgagctacagcgacaccggcagcagcaccggcagccacggcaccagcaccaccgtgagcagcgccagaaacaccctggacctggaggagaccggcgaggccgtgcagggcaacatcaacgccctgcccgacgtgagcgtggacgacgtgagaagcaccagccagggcctgagcagcttcaagcccctgcccagacccccccccctggcccagggcaacgacctgcccctgggccagcccagaaagctgggcagagaggacctgcagccccccagcagcatgcccagctgcagcggcaccgtgttcagcgccccccagaacagaagcccccccgccggcaccgcccccacccccggcaccagcagcgcccaggacctgcccagcagccccatctacgccagcgtgagccccgccaaccccagcagcaagagacccctggacgcccacctggccctggtgaaccagcaccccatcggccccttccccagagtgcagagccccccccacctgaagagccccagcgccgaggccaccgtggccggcggctgcctgctgccccccagccccagcggccaccccgaccagaccggcaccaaccagcacttcgtgatggtggaggtgcacagacccgacagcgagcccgacgtgaacgaggtgagagccctgccccagaccagaaccgccagcaccctgagccacctgagcgacagcggccagaccctgagcgaggacagcggcgtggacgccggcgaggccgaggccagcgcccccggcagaggcagacagagcgtgagcaccaagagcagaagcagcaaggagctgcccagaaacgagagacccaccgacggcgccaacaagccccccggcctgctggagcccaccagcaccctggtgagagtgaagaagagcgccgccaccctgggcatcgccatcgagggcggcgccaacaccagacagcccctgcccagaatcgtgaccatccagagaggcggcagcgcccacaactgcggccagctgaaggtgggccacgtgatcctggaggtgaacggcctgaccctgagaggcaaggagcacagagaggccgccagaatcatcgccgaggccttcaagaccaaggacagagactacatcgacttcctggtgaccgagttcaacgtgatgctgtag

SEQ ID NO: 78742 - DNA, 1038 bp, synthetic construct
  misc_feature 1..1038: note = Description of Artificial Sequence: Synthetic coding sequence
  source 1..1038: mol_type = other DNA
atgaacgcccccctggacggcctgagcgtgagcagcagcagcaccggcagcctgggcagcgccgccggcgccggcggcggcggcggcgccggcctgagactgctgagcgccaacgtgagacagctgcaccaggccctgaccgccctgctgagcgaggccgagagagagcagttcacccactgcctgaacgcctaccacgccagaagaaacgtgttcgacctggtgagaaccctgagagtgctgctggacagccccgtgaagagaagactgctgcccatgctgagactggtgatccccagaagcgaccagctgctgttcgaccagtacaccgccgagggcctgtacctgcccgccaccaccccctacagacagcccgcctggggcggccccgacagcgccggccccggcgaggtgagactggtgagcctgagaagagccaaggcccacgagggcctgggcttcagcatcagaggcggcagcgagcacggcgtgggcatctacgtgagcctggtggagcccggcagcctggccgagaaggagggcctgagagtgggcgaccagatcctgagagtgaacgacaagagcctggccagagtgacccacgccgaggccgtgaaggccctgaagggcagcaagaagctggtgctgagcgtgtacagcgccggcagaatccccggcggctacgtgaccaaccacatctacacctgggtggacccccagggcagaagcatcagcccccccagcggcctgccccagccccacggcggcgccctgagacagcaggagggcgacagaagaagcaccctgcacctgctgcagggcggcgacgagaagaaggtgagcggcgtgggcaagggcggccagcccctgagacacagaatcctgccccccaaccccgagcagcagagctgcctggaggccgccagaagaggctggttctgccccggcagcgtgttcccccaggtgtgcaccgagggctggtgcttcttcttcgccttcctgttcgacctgtgcagcgtgtgctacaacaccggctag

SEQ ID NO: 78743 - DNA, 1671 bp, synthetic construct
  misc_feature 1..1671: note = Description of Artificial Sequence: Synthetic coding sequence
  source 1..1671: mol_type = other DNA
atgcacggcagcctggaggccctgctgttcctgccccaggtgaccctgagcctggcccacgcccacctgatctgcagcaacgcccagctggagatgtgcgtgttcccccacagattcctgggcgacctgaccaccgagggcatcaacaagcccggcttctacaagggccccgccggcagccaggtgaccctgagcagcctgggcaaccagaccagagtgctgctggaggagcaggccagacacctgctgaacgagcaggagcacgccaccatggcctactacctggacgagtacagaggcggcagcgtgagcgtggaggccctggtgatggccctgttcaagctgctgaacacccacgccaagttcagcctgctgagcgaggtgagaggcaccatcagcccccaggacctggagagattcgaccacctggtgctgagaagagagatcgagagcatgaaggccagacagccccccggccccggcgccggcgacacctacagcatggtgagctacagcgacaccggcagcagcaccggcagccacggcaccagcaccaccgtgagcagcgccagaaacaccctggacctggaggagaccggcgaggccgtgcagggcaacatcaacgccctgcccgacgtgagcgtggacgacgtgagaagcaccagccagggcctgagcagcttcaagcccctgcccagacccccccccctggcccagggcaacgacctgcccctgggccagcccagaaagctgggcagagaggacctgcagccccccagcagcatgcccagctgcagcggcaccgtgttcagcgccccccagaacagaagcccccccgccggcaccgcccccacccccggcaccagcagcgcccaggacctgcccagcagccccatctacgccagcgtgagccccgccaaccccagcagcaagagacccctggacgcccacctggccctggtgaaccagcaccccatcggccccttccccagagtgcagagccccccccacctgaagagccccagcgccgaggccaccgtggccggcggctgcctgctgccccccagccccagcggccaccccgaccagaccggcaccaaccagcacttcgtgatggtggaggtgcacagacccgacagcgagcccgacgtgaacgaggtgagagccctgccccagaccagaaccgccagcaccctgagccacctgagcgacagcggccagaccctgagcgaggacagcggcgtggacgccggcgaggccgaggccagcgcccccggcagaggcagacagagcgtgagcaccaagagcagaagcagcaaggagctgcccagaaacgagagacccaccgacggcgccaacaagccccccggcctgctggagcccaccagcaccctggtgagagtgaagaagagcgccgccaccctgggcatcgccatcgagggcggcgccaacaccagacagcccctgcccagaatcgtgaccatccagagaggcggcagcgcccacaactgcggccagctgaaggtgggccacgtgatcctggaggtgaacggcctgaccctgagaggcaaggagcacagagaggccgccagaatcatcgccgaggccttcaagaccaaggacagagactacatcgacttcctggtgaccgagttcaacgtgatgctgtag

SEQ ID NO: 78744 - DNA, 1059 bp, synthetic construct
  misc_feature 1..1059: note = Description of Artificial Sequence: Synthetic coding sequence
  source 1..1059: mol_type = other DNA
atgttcgccgccgccaccaagagcttcgtgaagcaggtgggcgacggcggcagactggtgcccgtgcccagcctgagcgaggccgacaagtaccagcccctgagcctggtggtgaagaagaagagatgcttcctgttccccagatacaagttcaccagcacccccttcaccctgaaggacatcctgctgggcgacagagagatcagcgccggcatcagcagctaccagctgctgaactacgaggacgagagcgacgtgagcctgtacggcagaagaggcaaccacatcgtgaacgacgtgggcatcaacgtggccggcagcgacagcatcgccgtgaaggccagcttcggcatcgtgaccaagcacgaggtggaggtgagcaccctgctgaaggagatcaccaccagaaagatcaacttcgaccacagcctgatcagacagagcagaagcagcagaaaggccgtgctgtgcgtggtgatggagagcatcagaaccaccagacagtgcagcctgagcgtgcacgccggcatcagaggcgaggccatgagattccacttcatggacgagcagaaccccaagggcagagacaaggccatcgtgttccccgcccacaccaccatcgccttcagcgtgttcgagctgttcatctacctggacggcgccttcgacctgtgcgtgaccagcgtgagcaagggcggcttcgagagagaggagaccgccaccttcgccctgctgtacagactgagaaacatcctgttcgagagaaacagaagagtgatggacgtgatcagcagaagccagctgtacctggacgacctgttcagcgactactacgacaagcccctgagcatgaccgacatcagcctgaaggagggcacccacatcagagtgaacctgctgaaccacaacatccccaagggcccctgcatcctgtgcggcatgggcaacttcaagagagagaccgtgtacggctgcttccagtgcagcgtggacggccagaagtacgtgagactgcacgccgtgccctgcttcgacatctggcacaagagaatgaagtag

SEQ ID NO: 78745 - DNA, 1059 bp, synthetic construct; identical to SEQ ID NO: 78744
  misc_feature 1..1059: note = Description of Artificial Sequence: Synthetic coding sequence
  source 1..1059: mol_type = other DNA

SEQ ID NO: 78746 - DNA, 2388 bp, synthetic construct
  misc_feature 1..2388: note = Description of Artificial Sequence: Synthetic coding sequence
  source 1..2388: mol_type = other DNA
atgagcaagagacacagactggacctgggcgaggactaccccagcggcaagaagagagccggcaccgacggcaaggacagagacagagacagagacagagaggacagaagcaaggacagagacagagagagagacagaggcgacagagagagagagagagagaaggagaaggagaaggagctgagagccagcaccaacgccatgctgatcagcgccggcctgccccccctgaaggccagccacagcgcccacagcacccacagcgcccacagcacccacagcacccacagcgcccacagcacccacgccggccacgccggccacaccagcctgccccagtgcatcaaccccttcaccaacctgccccacacccccagatactacgacatcctgaagaagagactgcagctgcccgtgtgggagtacaaggacagattcaccgacatcctggtgagacaccagagcttcgtgctggtgggcgagaccggcagcggcaagaccacccagatcccccagtggtgcgtggagtacatgagaagcctgcccggccccaagagaggcgtggcctgcacccagcccagaagagtggccgccatgagcgtggcccagagagtggccgacgagatggacgtgatgctgggccaggaggtgggctacagcatcagattcgaggactgcagcagcgccaagaccatcctgaagtacatgaccgacggcatgctgctgagagaggccatgaacgaccccctgctggagagatacggcgtgatcatcctggacgaggcccacgagagaaccctggccaccgacatcctgatgggcgtgctgaaggaggtggtgagacagagaagcgacctgaaggtgatcgtgatgagcgccaccctggacgccggcaagttccagatctacttcgacaactgccccctgctgaccatccccggcagaacccaccccgtggagatcttctacacccccgagcccgagagagactacctggaggccgccatcagaaccgtgatccagatccacatgtgcgaggaggaggagggcgacctgctgctgttcctgaccggccaggaggagatcgacgaggcctgcaagagaatcaagagagaggtggacgacctgggccccgaggtgggcgacatcaagatcatccccctgtacagcaccctgcccccccagcagcagcagagaatcttcgagccccccccccccaagaagcagaacggcgccatcggcagaaaggtggtggtgagcaccaacatcgccgagaccagcctgaccatcgacggcgtggtgttcgtgatcgaccccggcttcgccaagcagaaggtgtacaaccccagaatcagagtggagagcctgctggtgaccgccatcagcaaggccagcgcccagcagagagccggcagagccggcagaaccagacccggcaagtgcttcagactgtacaccgagaaggcctacaagaccgagatgcaggacaacacctaccccgagatcctgagaagcaacctgggcagcgtggtgctgcagctgaagaagctgggcatcgacgacctggtgcacttcgacttcatggacccccccgcccccgagaccctgatgagagccctggagctgctgaactacctggccgccctgaacgacgacggcgacctgaccgagctgggcagcatgatggccgagttccccctggacccccagctggccaagatggtgatcgccagctgcgactacaactgcagcaacgaggtgctgagcatcaccgccatgctgagcgtgccccagtgcttcgtgagacccaccgaggccaagaaggccgccgacgaggccaagatgagattcgcccacatcgacggcgaccacctgaccctgctgaacgtgtaccacgccttcaagcagaaccacgagagcgtgcagtggtgctacgacaacttcatcaactacagaagcctgatgagcgccgacaacgtgagacagcagctgagcagaatcatggacagattcaacctgcccagaagaagcaccgacttcaccagcagagactactacatcaacatcagaaaggccctggtgaccggctacttcatgcaggtggcccacctggagagaaccggccactacctgaccgtgaaggacaaccaggtggtgcagctgcaccccagcaccgtgctggaccacaagcccgagtgggtgctgtacaacgagttcgtgctgaccaccaagaactacatcagaacctgcaccgacatcaagcccgagtggctggtgaagatcgccccccagtactacgacatgagcaacttcccccagtgcgaggccaagagacagctggacagaatcatcgccaagctgcagagcaaggagtacagccagtactag

SEQ ID NO: 78747 - DNA, 2355 bp, synthetic construct
  misc_feature 1..2355: note = Description of Artificial Sequence: Synthetic coding sequence
  source 1..2355: mol_type = other DNA
atgagcaagagacacagactggacctgggcgaggactaccccagcggcaagaagagagccggcaccgacggcaaggacagagacagagacagagagagagacagaggcgacagagagagagagagagagaaggagaaggagaaggagctgagagccagcaccaacgccatgctgatcagcgccggcctgccccccctgaaggccagccacagcgcccacagcacccacagcgcccacagcacccacagcacccacagcgcccacagcacccacgccggccacgccggccacaccagcctgccccagtgcatcaaccccttcaccaacctgccccacacccccagatactacgacatcctgaagaagagactgcagctgcccgtgtgggagtacaaggacagattcaccgacatcctggtgagacaccagagcttcgtgctggtgggcgagaccggcagcggcaagaccacccagatcccccagtggtgcgtggagtacatgagaagcctgcccggccccaagagaggcgtggcctgcacccagcccagaagagtggccgccatgagcgtggcccagagagtggccgacgagatggacgtgatgctgggccaggaggtgggctacagcatcagattcgaggactgcagcagcgccaagaccatcctgaagtacatgaccgacggcatgctgctgagagaggccatgaacgaccccctgctggagagatacggcgtgatcatcctggacgaggcccacgagagaaccctggccaccgacatcctgatgggcgtgctgaaggaggtggtgagacagagaagcgacctgaaggtgatcgtgatgagcgccaccctggacgccggcaagttccagatctacttcgacaactgccccctgctgaccatccccggcagaacccaccccgtggagatcttctacacccccgagcccgagagagactacctggaggccgccatcagaaccgtgatccagatccacatgtgcgaggaggaggagggcgacctgctgctgttcctgaccggccaggaggagatcgacgaggcctgcaagagaatcaagagagaggtggacgacctgggccccgaggtgggcgacatcaagatcatccccctgtacagcaccctgcccccccagcagcagcagagaatcttcgagccccccccccccaagaagcagaacggcgccatcggcagaaaggtggtggtgagcaccaacatcgccgagaccagcctgaccatcgacggcgtggtgttcgtgatcgaccccggcttcgccaagcagaaggtgtacaaccccagaatcagagtggagagcctgctggtgaccgccatcagcaaggccagcgcccagcagagagccggcagagccggcagaaccagacccggcaagtgcttcagactgtacaccgagaaggcctacaagaccgagatgcaggacaacacctaccccgagatcctgagaagcaacctgggcagcgtggtgctgcagctgaagaagctgggcatcgacgacctggtgcacttcgacttcatggacccccccgcccccgagaccctgatgagagccctggagctgctgaactacctggccgccctgaacgacgacggcgacctgaccgagctgggcagcatgatggccgagttccccctggacccccagctggccaagatggtgatcgccagctgcgactacaactgcagcaacgaggtgctgagcatcaccgccatgctgagcgtgccccagtgcttcgtgagacccaccgaggccaagaaggccgccgacgaggccaagatgagattcgcccacatcgacggcgaccacctgaccctgctgaacgtgtaccacgccttcaagcagaaccacgagagcgtgcagtggtgctacgacaacttcatcaactacagaagcctgatgagcgccgacaacgtgagacagcagctgagcagaatcatggacagattcaacctgcccagaagaagcaccgacttcaccagcagagactactacatcaacatcagaaaggccctggtgaccggctacttcatgcaggtggcccacctggagagaaccggccactacctgaccgtgaaggacaaccaggtggtgcagctgcaccccagcaccgtgctggaccacaagcccgagtgggtgctgtacaacgagttcgtgctgaccaccaagaactacatcagaacctgcaccgacatcaagcccgagtggctggtgaagatcgccccccagtactacgacatgagcaacttcccccagtgcgaggccaagagacagctggacagaatcatcgccaagctgcagagcaaggagtacagccagtactag

SEQ ID NO: 78748 - DNA, 1683 bp, synthetic construct
  misc_feature 1..1683: note = Description of Artificial Sequence: Synthetic coding sequence
  source 1..1683: mol_type = other DNA
atggagagccagcccgcccaggagtgcctgatgcagatgttcctgcccatcgagcccgcctgcttcgtggagtggctgggcaccagccccagccagctgggcgtggtgatggtggacgaggcccacgagagaaccctgcacaccgacatcctgttcggcctgatcaaggacgtggccagattcagacccgagctgaaggtgctggtggccagcgccaccatggacaccgccagattcagcaccttcttcgacgacgcccccgtgttcagaatccccggcagaagattccccgtggacatcttctacaccaaggcccccgaggccgactacctggaggcctgcgtggtgagcgtgctgcagatccacgtgacccagccccccggcgacatcctggtgttcctgaccggccaggaggagatcgaggccgcctgcgagatgctgcaggacagatgcagaagactgggcagcaagatcagagagctgctggtgctgcccatctacgccaacctgcccagcgacatgcaggccagaatcttccagcccaccccccccggcgccagaaaggtggtggtggccaccaacatcgccgagaccagcctgaccatcgagggcatcatctacgtgctggaccccggcttctgcaagcagaagagctacaaccccagaaccggcatggagagcctgaccgtgaccccctgcagcaaggccagcgccaaccagagagccggcagagccggcagagtggccgccggcaagtgcttcagactgtacaccgcctgggcctaccagcacgagctggaggagaccaccgtgcccgagatccagagaaccagcctgggcaacgtggtgctgctgctgaagagcctgggcatccacgacctgatgcacttcgacttcctggacccccccccctacgagaccctgctgctggccctggagcagctgtacgccctgggcgccctgaaccacctgggcgagctgaccaccagcggcagaaagatggccgagctgcccgtggaccccatgctgagcaagatgatcctggccagcgagaagtacagctgcagcgaggagatcctgaccgtggccgccatgctgagcgtgaacaacagcatcttctacagacccaaggacaaggtggtgcacgccgacaacgccagagtgaacttcttcctgcccggcggcgaccacctggtgctgctgaacgtgtacacccagtgggccgagagcggctacagcagccagtggtgctacgagaacttcgtgcagttcagaagcatgagaagagccagagacgtgagagagcagctggagggcctgctggagagagtggaggtgggcctgagcagctgccagggcgactacatcagagtgagaaaggccatcaccgccggctacttctaccacaccgccagactgaccagaagcggctacagaaccgtgaagcagcagcagaccgtgttcatccaccccaacagcagcctgttcgagcagcagcccagatggctgctgtaccacgagctggtgctgaccaccaaggagttcatgagacaggtgctggagatcgagagcagctggctgctggaggtggccccccactactacaaggccaaggagctggaggacccccacgccaagaagatgcccaagaagatcggcaagaccagagaggagctgggctag

SEQ ID NO: 78749 - DNA, 3126 bp, synthetic construct
  misc_feature 1..3126: note = Description of Artificial Sequence: Synthetic coding sequence
  source 1..3126: mol_type = other DNA
atggccacccccgccggcctggagagatgggtgcaggacgagctgcacagcgtgctgggcctgagcgagagacacgtggcccagttcctgatcggcaccgcccagagatgcaccagcgccgaggagttcgtgcagagactgagagacaccgacaccctggacctgagcggccccgccagagacttcgccctgagactgtggaacaaggtgcccagaaaggccgtggtggagaagcccgccagagccgccgagagagaggccagagccctgctggagaagaacagaagctacagactgctggaggacagcgaggagagcagcgaggagaccgtgagcagagccggcagcagcctgcagaagaagagaaagaagagaaagcacctgagaaagaagagagaggaggaggaggaggaggaggccagcgagaagggcaagaagaagaccggcggcagcaagcagcagaccgagaagcccgagagcgaggacgagtgggagagaaccgagagagagagactgcaggacctggaggagagagacgccttcgccgagagagtgagacagagagacaaggacagaaccagaaacgtgctggagagaagcgacaagaaggcctacgaggaggcccagaagagactgaagatggccgaggaggacagaaaggccatggtgcccgagctgagaaagaagagcagaagagagtacctggccaagagagagagagagaagctggaggacctggaggccgagctggccgacgaggagttcctgttcggcgacgtggagctgagcagacacgagagacaggagctgaagtacaagagaagagtgagagacctggccagagagtacagagccgccggcgagcaggagaagctggaggccaccaacagataccacatgcccaaggagaccagaggccagcccgccagagccgtggacctggtggaggaggagagcggcgcccccggcgaggagcagagaagatgggaggaggccagactgggcgccgccagcctgaagttcggcgccagagacgccgccagccaggagcccaagtaccagctggtgctggaggaggaggagaccatcgagttcgtgagagccacccagctgcagggcgacgaggagcccagcgccccccccaccagcacccaggcccagcagaaggagagcatccaggccgtgagaagaagcctgcccgtgttccccttcagagaggagctgctggccgccatcgccaaccaccaggtgctgatcatcgagggcgagaccggcagcggcaagaccacccagatcccccagtacctgttcgaggagggctacaccaacaagggcatgaagatcgcctgcacccagcccagaagagtggccgccatgagcgtggccgccagagtggccagagagatgggcgtgaagctgggcaacgaggtgggctacagcatcagattcgaggactgcaccagcgagagaaccgtgctgagatacatgaccgacggcatgctgctgagagagttcctgagcgagcccgacctggccagctacagcgtggtgatggtggacgaggcccacgagagaaccctgcacaccgacatcctgttcggcctgatcaaggacgtggccagattcagacccgagctgaaggtgctggtggccagcgccaccatggacaccgccagattcagcaccttcttcgacgacgcccccgtgttcagaatccccggcagaagattccccgtggacatcttctacaccaaggcccccgaggccgactacctggaggcctgcgtggtgagcgtgctgcagatccacgtgacccagccccccggcgacatcctggtgttcctgaccggccaggaggagatcgaggccgcctgcgagatgctgcaggacagatgcagaagactgggcagcaagatcagagagctgctggtgctgcccatctacgccaacctgcccagcgacatgcaggccagaatcttccagcccaccccccccggcgccagaaaggtggtggtggccaccaacatcgccgagaccagcctgaccatcgagggcatcatctacgtgctggaccccggcttctgcaagcagaagagctacaaccccagaaccggcatggagagcctgaccgtgaccccctgcagcaaggccagcgccaaccagagagccggcagagccggcagagtggccgccggcaagtgcttcagactgtacaccgcctgggcctaccagcacgagctggaggagaccaccgtgcccgagatccagagaaccagcctgggcaacgtggtgctgctgctgaagagcctgggcatccacgacctgatgcacttcgacttcctggacccccccccctacgagaccctgctgctggccctggagcagctgtacgccctgggcgccctgaaccacctgggcgagctgaccaccagcggcagaaagatggccgagctgcccgtggaccccatgctgagcaagatgatcctggccagcgagaagtacagctgcagcgaggagatcctgaccgtggccgccatgctgagcgtgaacaacagcatcttctacagacccaaggacaaggtggtgcacgccgacaacgccagagtgaacttcttcctgcccggcggcgaccacctggtgctgctgaacgtgtacacccagtgggccgagagcggctacagcagccagtggtgctacgagaacttcgtgcagttcagaagcatgagaagagccagagacgtgagagagcagctggagggcctgctggagagagtggaggtgggcctgagcagctgccagggcgactacatcagagtgagaaaggccatcaccgccggctacttctaccacaccgccagactgaccagaagcggctacagaaccgtgaagcagcagcagaccgtgttcatccaccccaacagcagcctgttcgagcagcagcccagatggctgctgtaccacgagctggtgctgaccaccaaggagttcatgagacaggtgctggagatcgagagcagctggctgctggaggtggccccccactactacaaggccaaggagctggaggacccccacgccaagaagatgcccaagaagatcggcaagaccagagaggagctgggctag

SEQ ID NO: 78750 - DNA, 1683 bp, synthetic construct
  misc_feature 1..1683: note = Description of Artificial Sequence: Synthetic coding sequence
  source 1..1683: mol_type = other DNA
atggagagccagcccgcccaggagtgcctgatgcagatgttcctgcccatcgagcccgcctgcttcgtggagtggctgggcaccagccccagccagctgggcgtggtgatggtggacgaggcccacgagagaaccctgcacaccgacatcctgttcggcctgatcaaggacgtggccagattcagacccgagctgaaggtgctggtggccagcgccaccatggacaccgccagattcagcaccttcttcgacggcgcccccgtgttcagaatccccggcagaagattccccgtggacatcttctacaccaaggcccccgaggccgactacctggaggcctgcgtggtgagcgtgctgcagatccacgtgacccagccccccggcgacatcctggtgttcctgaccggccaggaggagatcgaggccgcctgcgagatgctgcaggacagatgcagaagactgggcagcaagatcagagagctgctggtgctgcccatctacgccaacctgcccagcgacatgcaggccagaatcttccagcccaccccccccggcgccagaaaggtggtggtggccaccaacatcgccgagaccagcctgaccatcgagggcatcatctacgtgctggaccccggcttctgcaagcagaagagctacaaccccagaaccggcatggagagcctgaccgtgaccccctgcagcaaggccagcgccaaccagagagccggcagagccggcagagtggccgccggcaagtgcttcagactgtacaccgcctgggcctaccagcacgagctggaggagaccaccgtgcccgagatccagagaaccagcctgggcaacgtggtgctgctgctgaagagcctgggcatccacgacctgatgcacttcgacttcctggacccccccccctacgagaccctgctgctggccctggagcagctgtacgccctgggcgccctgaaccacctgggcgagctgaccaccagcggcagaaagatggccgagctgcccgtggaccccatgctgagcaagatgatcctggccagcgagaagtacagctgcagcgaggagatcctgaccgtggccgccatgctgagcgtgaacaacagcatcttctacagacccaaggacaaggtggtgcacgccgacaacgccagagtgaacttcttcctgcccggcggcgaccacctggtgctgctgaacgtgtacacccagtgggccgagagcggctacagcagccagtggtgctacgagaacttcgtgcagttcagaagcatgagaagagccagagacgtgagagagcagctggagggcctgctggagagagtggaggtgggcctgagcagctgccagggcgactacatcagagtgagaaaggccatcaccgccggctacttctaccacaccgccagactgaccagaagcggctacagaaccgtgaagcagcagcagaccgtgttcatccaccccaacagcagcctgttcgagcagcagcccagatggctgctgtaccacgagctggtgctgaccaccaaggagttcatgagacaggtgctggagatcgagagcagctggctgctggaggtggccccccactactacaaggccaaggagctggaggacccccacgccaagaagatgcccaagaagatcggcaagaccagagaggagctgggctag

SEQ ID NO: 78751 - DNA, 3126 bp, synthetic construct
  misc_feature 1..3126: note = Description of Artificial Sequence: Synthetic coding sequence
  source 1..3126: mol_type = other DNA
atggccacccccgccggcctggagagatgggtgcaggacgagctgcacagcgtgctgggcctgagcgagagacacgtggcccagttcctgatcggcaccgcccagagatgcaccagcgccgaggagttcgtgcagagactgagagacaccgacaccctggacctgagcggccccgccagagacttcgccctgagactgtggaacaaggtgcccagaaaggccgtggtggagaagcccgccagagccgccgagagagaggccagagccctgctggagaagaacagaagctacagactgctggaggacagcgaggagagcagcgaggagaccgtgagcagagccggcagcagcctgcagaagaagagaaagaagagaaagcacctgagaaagaagagagaggaggaggaggaggaggaggccagcgagaagggcaagaagaagaccggcggcagcaagcagcagaccgagaagcccgagagcgaggacgagtgggagagaaccgagagagagagactgcaggacctggaggagagagacgccttcgccgagagagtgagacagagagacaaggacagaaccagaaacgtgctggagagaagcgacaagaaggcctacgaggaggcccagaagagactgaagatggccgaggaggacagaaaggccatggtgcccgagctgagaaagaagagcagaagagagtacctggccaagagagagagagagaagctggaggacctggaggccgagctggccgacgaggagttcctgttcggcgacgtggagctgagcagacacgagagacaggagctgaagtacaagagaagagtgagagacctggccagagagtacagagccgccggcgagcaggagaagctggaggccaccaacagataccacatgcccaaggagaccagaggccagcccgccagagccgtggacctggtggaggaggagagcggcgcccccggcgaggagcagagaagatgggaggaggccagactgggcgccgccagcctgaagttcggcgccagagacgccgccagccaggagcccaagtaccagctggtgctggaggaggaggagaccatcgagttcgtgagagccacccagctgcagggcgacgaggagcccagcgccccccccaccagcacccaggcccagcagaaggagagcatccaggccgtgagaagaagcctgcccgtgttccccttcagagaggagctgctggccgccatcgccaaccaccaggtgctgatcatcgagggcgagaccggcagcggcaagaccacccagatcccccagtacctgttcgaggagggctacaccaacaagggcatgaagatcgcctgcacccagcccagaagagtggccgccatgagcgtggccgccagagtggccagagagatgggcgtgaagctgggcaacgaggtgggctacagcatcagattcgaggactgcaccagcgagagaaccgtgctgagatacatgaccgacggcatgctgctgagagagttcctgagcgagcccgacctggccagctacagcgtggtgatggtggacgaggcccacgagagaaccctgcacaccgacatcctgttcggcctgatcaaggacgtggccagattcagacccgagctgaaggtgctggtggccagcgccaccatggacaccgccagattcagcaccttcttcgacggcgcccccgtgttcagaatccccggcagaagattccccgtggacatcttctacaccaaggcccccgaggccgactacctggaggcctgcgtggtgagcgtgctgcagatccacgtgacccagccccccggcgacatcctggtgttcctgaccggccaggaggagatcgaggccgcctgcgagatgctgcaggacagatgcagaagactgggcagcaagatcagagagctgctggtgctgcccatctacgccaacctgcccagcgacatgcaggccagaatcttccagcccaccccccccggcgccagaaaggtggtggtggccaccaacatcgccgagaccagcctgaccatcgagggcatcatctacgtgctggaccccggcttctgcaagcagaagagctacaaccccagaaccggcatggagagcctgaccgtgaccccctgcagcaaggccagcgccaaccagagagccggcagagccggcagagtggccgccggcaagtgcttcagactgtacaccgcctgggcctaccagcacgagctggaggagaccaccgtgcccgagatccagagaaccagcctgggcaacgtggtgctgctgctgaagagcctgggcatccacgacctgatgcacttcgacttcctggacccccccccctacgagaccctgctgctggccctggagcagctgtacgccctgggcgccctgaaccacctgggcgagctgaccaccagcggcagaaagatggccgagctgcccgtggaccccatgctgagcaagatgatcctggccagcgagaagtacagctgcagcgaggagatcctgaccgtggccgccatgctgagcgtgaacaacagcatcttctacagacccaaggacaaggtggtgcacgccgacaacgccagagtgaacttcttcctgcccggcggcgaccacctggtgctgctgaacgtgtacacccagtgggccgagagcggctacagcagccagtggtgctacgagaacttcgtgcagttcagaagcatgagaagagccagagacgtgagagagcagctggagggcctgctggagagagtggaggtgggcctgagcagctgccagggcgactacatcagagtgagaaaggccatcaccgccggctacttctaccacaccgccagactgaccagaagcggctacagaaccgtgaagcagcagcagaccgtgttcatccaccccaacagcagcctgttcgagcagcagcccagatggctgctgtaccacgagctggtgctgaccaccaaggagttcatgagacaggtgctggagatcgagagcagctggctgctggaggtggccccccactactacaaggccaaggagctggaggacccccacgccaagaagatgcccaagaagatcggcaagaccagagaggagctgggctag

SEQ ID NO: 78752 - DNA, 1683 bp, synthetic construct; identical to SEQ ID NO: 78748
  misc_feature 1..1683: note = Description of Artificial Sequence: Synthetic coding sequence
  source 1..1683: mol_type = other DNA

SEQ ID NO: 78753 - DNA, 888 bp, synthetic construct
  misc_feature 1..888: note = Description of Artificial Sequence: Synthetic coding sequence
  source 1..888: mol_type = other DNA
atgagcgaggaccccagaggccccaaggtgcccagaaaggccgtggtggagaagcccgccagagccgccgagagagaggccagagccctgctggagaagaacagaagctacagactgctggaggacagcgaggagagcagcgaggagaccgtgagcagagccggcagcagcctgcagaagaagagaaagaagagaaagcacctgagaaagaagagagaggaggaggaggaggaggaggccagcgagaagggcaagaagaagaccggcggcagcaagcagcagaccgagaagcccgagagcgaggacgagtgggagagaaccgagagagagagactgcaggacctggaggagagagacgccttcgccgagagagtgagacagagagacaaggacagaaccagaaacgtgctggagagaagcgacaagaaggcctacgaggaggcccagaagagactgaagatggccgaggaggacagaaaggccatggtgcccgagctgagaaagaagagcagaagagagtacctggccaagagagagagagagaagctggaggacctggaggccgagctggccgacgaggagttcctgttcggcgacgtggagctgagcagacacgagagacaggagctgaagtacaagagaagagtgagagacctggccagagagtacagagccgccggcgagcaggagaagctggaggccaccaacagataccacatgcccaaggagaccagaggccagcccgccagagccgtggacctggtggaggaggagagcggcgcccccggcgaggagcagagaagatgggaggaggccagactgggcgccgccagcctgaagttcggcgccagagacgccgccagccaggagcccaagtaccagctgtag

SEQ ID NO: 78754 - DNA, 3126 bp, synthetic construct; identical to SEQ ID NO: 78749
  misc_feature 1..3126: note = Description of Artificial Sequence: Synthetic coding sequence
  source 1..3126: mol_type = other DNA

SEQ ID NO: 78755 - DNA, 3126 bp, synthetic construct; identical to SEQ ID NO: 78749
  misc_feature 1..3126: note = Description of Artificial Sequence: Synthetic coding sequence
  source 1..3126: mol_type = other DNA

SEQ ID NO: 78756 - DNA, 3126 bp, synthetic construct; identical to SEQ ID NO: 78749
  misc_feature 1..3126: note = Description of Artificial Sequence: Synthetic coding sequence
  source 1..3126: mol_type = other DNA

SEQ ID NO: 78757 - DNA, 888 bp, synthetic construct; identical to SEQ ID NO: 78753
  misc_feature 1..888: note = Description of Artificial Sequence: Synthetic coding sequence
  source 1..888: mol_type = other DNA

SEQ ID NO: 78758 - DNA, 888 bp, synthetic construct; identical to SEQ ID NO: 78753
  misc_feature 1..888: note = Description of Artificial Sequence: Synthetic coding sequence
  source 1..888: mol_type = other DNA

SEQ ID NO: 78759 - DNA, 1683 bp, synthetic construct; identical to SEQ ID NO: 78748
  misc_feature 1..1683: note = Description of Artificial Sequence: Synthetic coding sequence
  source 1..1683: mol_type = other DNA

SEQ ID NO: 78760 - DNA, 888 bp, synthetic construct; identical to SEQ ID NO: 78753
  misc_feature 1..888: note = Description of Artificial Sequence: Synthetic coding sequence
  source 1..888: mol_type = other DNA

SEQ ID NO: 78761 - DNA, 888 bp, synthetic construct; identical to SEQ ID NO: 78753
  misc_feature 1..888: note = Description of Artificial Sequence: Synthetic coding sequence
  source 1..888: mol_type = other DNA

SEQ ID NO: 78762 - DNA, 888 bp, synthetic construct; identical to SEQ ID NO: 78753
  misc_feature 1..888: note = Description of Artificial Sequence: Synthetic coding sequence
  source 1..888: mol_type = other DNA

SEQ ID NO: 78763 - DNA, 888 bp, synthetic construct; identical to SEQ ID NO: 78753
  misc_feature 1..888: note = Description of Artificial Sequence: Synthetic coding sequence
  source 1..888: mol_type = other DNA

SEQ ID NO: 78764 - DNA, 1683 bp, synthetic construct; identical to SEQ ID NO: 78748
  misc_feature 1..1683: note = Description of Artificial Sequence: Synthetic coding sequence
  source 1..1683: mol_type = other DNA

SEQ ID NO: 78765 - DNA, 888 bp, synthetic construct; identical to SEQ ID NO: 78753
  misc_feature 1..888: note = Description of Artificial Sequence: Synthetic coding sequence
  source 1..888: mol_type = other DNA

SEQ ID NO: 78766 - DNA, 2010 bp, synthetic construct
  misc_feature 1..2010: note = Description of Artificial Sequence: Synthetic coding sequence
  source 1..2010: mol_type = other DNA
atggccacccccgccggcctggagagatgggtgcaggacgagctgcacagcgtgctgggcctgagcgagagacacgtggcccagttcctgatcggcaccgcccagagatgcaccagcgccgaggagttcgtgcagagactgagagacaccgacaccctggacctgagcggccccgccagagacttcgccctgagactgtggaacaaggtgcccagaaaggccgtggtggagaagcccgccagagccgccgagagagaggccagagccctgctggagaagaacagaagctacagactgctggaggacagcgaggagagcagcgaggagaccgtgagcagagccggcagcagcctgcagaagaagagaaagaagagaaagcacctgagaaagaagagagaggaggaggaggaggaggaggccagcgagaagggcaagaagaagaccggcggcagcaagcagcagaccgagaagcccgagagcgaggacgagtgggagagaaccgagagagagagactgcaggacctggaggagagagacgccttcgccgagagagtgagacagagagacaaggacagaaccagaaacgtgctggagagaagcgacaagaaggcctacgaggaggcccagaagagactgaagatggccgaggaggacagaaaggccatggtgcccgagctgagaaagaagagcagaagagagtacctggccaagagagagagagagaagctggaggacctggaggccgagctggccgacgaggagttcctgttcggcgacgtggagctgagcagacacgagagacaggagctgaagtacaagagaagagtgagagacctggccagagagtacagagccgccggcgagcaggagaagctggaggccaccaacagataccacatgcccaaggagaccagaggccagcccgccagagccgtggacctggtggaggaggagagcggcgcccccggcgaggagcagagaagatgggaggaggccagactgggcgccgccagcctgaagttcggcgccagagacgccgccagccaggagcccaagtaccagctggtgctggaggaggaggagaccatcgagttcgtgagagccacccagctgcagggcgacgaggagcccagcgccccccccaccagcacccaggcccagcagaaggagagcatccaggccgtgagaagaagcctgcccgtgttccccttcagagaggagctgctggccgccatcgccaaccaccaggtgctgatcatcgagggcgagaccggcagcggcaagaccacccagatcccccagtacctgttcgaggagggctacaccaacaagggcatgaagatcgcctgcacccagcccagaagagtggccgccatgagcgtggccgccagagtggccagagagatgggcgtgaagctgggcaacgaggtgggctacagcatcagattcgaggactgcaccagcgagagaaccgtgctgagatacatgaccgacggcatgctgctgagagagttcctgagcgagcccgacctggccagctacagcgtggtgatggtggacgaggcccacgagagaaccctgcacaccgacatcctgttcggcctgatcaaggacgtggccagattcagacccgagctgaaggtgctggtggccagcgccaccatggacaccgccagattcagcaccttcttcgacgacgcccccgtgttcagaatccccggcagaagattccccgtggacatcttctacaccaaggcccccgaggccgactacctggaggcctgcgtggtgagcgtgctgcagatccacgtgacccagccccccggcgacatcctggtgttcctgaccggccaggaggagatcgaggccgcctgcgagatgctgcaggacagatgcagaagactgggcagcaagatcagagagctgctggtgctgcccatctacgccaacctgcccagcgacatgcaggccagaatcttccagcccaccccccccggcgccagaaagtag

SEQ ID NO: 78767 - DNA, 3126 bp, synthetic construct; identical to SEQ ID NO: 78749
  misc_feature 1..3126: note = Description of Artificial Sequence: Synthetic coding sequence
  source 1..3126: mol_type = other DNA

SEQ ID NO: 78768 - DNA, 1683 bp, synthetic construct; identical to SEQ ID NO: 78748
  misc_feature 1..1683: note = Description of Artificial Sequence: Synthetic coding sequence
  source 1..1683: mol_type = other DNA

SEQ ID NO: 78769 - DNA, 1683 bp, synthetic construct; identical to SEQ ID NO: 78748
  misc_feature 1..1683: note = Description of Artificial Sequence: Synthetic coding sequence
  source 1..1683: mol_type = other DNA

SEQ ID NO: 78770 - DNA, 567 bp, synthetic construct
  misc_feature 1..567: note = Description of Artificial Sequence: Synthetic coding sequence
  source 1..567: mol_type = other DNA
atggagagccagcccgcccaggagtgcctgatgcagatgttcctgcccatcgagcccgcctgcttcgtggagtggctgggcaccagccccagccagctgggcgtggtgatggtggacgaggcccacgagagaaccctgcacaccgacatcctgttcggcctgatcaaggacgtggccagattcagacccgagctgaaggtgctggtggccagcgccaccatggacaccgccagattcagcaccttcttcgacgacgcccccgtgttcagaatccccggcagaagattccccgtggacatcttctacaccaaggcccccgaggccgactacctggaggcctgcgtggtgagcgtgctgcagatccacgtgacccagccccccggcgacatcctggtgttcctgaccggccaggaggagatcgaggccgcctgcgagatgctgcaggacagatgcagaagactgggcagcaagatcagagagctgctggtgctgcccatctacgccaacctgcccagcgacatgcaggccagaatcttccagcccaccccccccggcgccagaaagtag

SEQ ID NO: 78771 - DNA, 3126 bp, synthetic construct; identical to SEQ ID NO: 78749
  misc_feature 1..3126: note = Description of Artificial Sequence: Synthetic coding sequence
  source 1..3126: mol_type = other DNA

SEQ ID NO: 78772 - DNA, 444 bp, synthetic construct
  misc_feature 1..444: note = Description of Artificial Sequence: Synthetic coding sequence
  source 1..444: mol_type = other DNA
atggccacccccgccggcctggagagatgggtgcaggacgagctgcacagcgtgctgggcctgagcgagagacacgtggcccagttcctgatcggcaccgcccagagatgcaccagcgccgaggagttcgtgcagagactgagagacaccgacaccctggacctgagcggccccgccagagacttcgccctgagactgtggaacaaggtgcccagaaaggccgtggtggagaagcccgccagagccgccgagagagaggccagagccctgctggagaagaacagaagctacagactgctggaggacagcgaggagagcagcgaggagaccgtgagcagagccggcagcagcctgcagaagaagagaaagaagagaaagcacctgagaaagaagagagaggaggaggaggaggaggaggccagcgagaagggcaagaagaagtag

SEQ ID NO: 78773 - DNA, 4110 bp, synthetic construct
  misc_feature 1..4110: note = Description of Artificial Sequence: Synthetic coding sequence
  source 1..4110: mol_type = other DNA
atgggcggcaagaacaagaagcacaaggcccccgccgccgccgtggtgagagccgccgtgagcgccagcagagccaagagcgccgaggccggcatcgccggcgaggcccagagcaagaagcccgtgagcagacccgccaccgccgccgccgccgccgccggcagcagagagcccagagtgaagcagggccccaagatctacagcttcaacagcaccaacgacagcagcggccccgccaacctggacaagagcatcctgaaggtggtgatcaacaacaagctggagcagagaatcatcggcgtgatcaacgagcacaagaagcagaacaacgacaagggcatgatcagcggcagactgaccgccaagaagctgcaggacctgtacatggccctgcaggccttcagcttcaagaccaaggacatcgaggacgccatgaccaacaccctgctgtacggcggcgacctgcacagcgccctggactggctgtgcctgaacctgagcgacgacgccctgcccgagggcttcagccaggagttcgaggagcagcagcccaagagcagacccaagttccagagcccccagatccaggccaccatcagcccccccctgcagcccaagaccaagacctacgaggaggaccccaagagcaagcccaagaaggaggagaagaacatggaggtgaacatgaaggagtggatcctgagatacgccgagcagcagaacgaggaggagaagaacgagaacagcaagagcctggaggaggaggagaagttcgaccccaacgagagatacctgcacctggccgccaagctgctggacgccaaggagcaggccgccaccttcaagctggagaagaacaagcagggccagaaggaggcccaggagaagatcagaaagttccagagagagatggagaccctggaggaccaccccgtgttcaaccccgccatgaagatcagccaccagcagaacgagagaaagaagccccccgtggccaccgagggcgagagcgccctgaacttcaacctgttcgagaagagcgccgccgccaccgaggaggagaaggacaagaagaaggagccccacgacgtgagaaacttcgactacaccgccagaagctggaccggcaagagccccaagcagttcctgatcgactgggtgagaaagaacctgcccaagagccccaaccccagcttcgagaaggtgcccgtgggcagatactggaagtgcagagtgagagtgatcaagagcgaggacgacgtgctggtggtgtgccccaccatcctgaccgaggacggcatgcaggcccagcacctgggcgccaccctggccctgtacagactggtgaagggccagagcgtgcaccagctgctgccccccacctacagagacgtgtggctggagtggagcgacgccgagaagaagagagaggagctgaacaagatggagaccaacaagcccagagacctgttcatcgccaagctgctgaacaagctgaagcagcagcagcagcagcagcagcagcacagcgagaacaagagagagaacagcgaggaccccgaggagagctgggagaacctggtgagcgacgaggacttcagcgccctgagcctggagagcgccaacgtggaggacctggagcccgtgagaaacctgttcagaaagctgcagagcacccccaagtaccagaagctgctgaaggagagacagcagctgcccgtgttcaagcacagagacagcatcgtggagaccctgaagagacacagagtggtggtggtggccggcgagaccggcagcggcaagagcacccaggtgccccacttcctgctggaggacctgctgctgaacgagtgggaggccagcaagtgcaacatcgtgtgcacccagcccagaagaatcagcgccgtgagcctggccaacagagtgtgcgacgagctgggctgcgagaacggccccggcggcagaaacagcctgtgcggctaccagatcagaatggagagcagagcctgcgagagcaccagactgctgtactgcaccaccggcgtgctgctgagaaagctgcaggaggacggcctgctgagcaacgtgagccacgtgatcgtggacgaggtgcacgagagaagcgtgcagagcgacttcctgctgatcatcctgaaggagatcctgcagaagagaagcgacctgcacctgatcctgatgagcgccaccgtggacagcgagaagttcagcacctacttcacccactgccccatcctgagaatcagcggcagaagctaccccgtggaggtgttccacctggaggacatcatcgaggagaccggcttcgtgctggagaaggacagcgagtactgccagaagttcctggaggaggaggaggaggtgaccatcaacgtgaccagcaaggccggcggcatcaagaagtaccaggagtacatccccgtgcagaccggcgcccacgccgacctgaaccccttctaccagaagtacagcagcagaacccagcacgccatcctgtacatgaacccccacaagatcaacctggacctgatcctggagctgctggcctacctggacaagagcccccagttcagaaacatcgagggcgccgtgctgatcttcctgcccggcctggcccacatccagcagctgtacgacctgctgagcaacgacagaagattctacagcgagagatacaaggtgatcgccctgcacagcatcctgagcacccaggaccaggccgccgccttcaccctgcccccccccggcgtgagaaagatcgtgctggccaccaacatcgccgagaccggcatcaccatccccgacgtggtgttcgtgatcgacaccggcagaaccaaggagaacaagtaccacgagagcagccagatgagcagcctggtggagaccttcgtgagcaaggccagcgccctgcagagacagggcagagccggcagagtgagagacggcttctgcttcagaatgtacaccagagagagattcgagggcttcatggactacagcgtgcccgagatcctgagagtgcccctggaggagctgtgcctgcacatcatgaagtgcaacctgggcagccccgaggacttcctgagcaaggccctggaccccccccagctgcaggtgatcagcaacgccatgaacctgctgagaaagatcggcgcctgcgagctgaacgagcccaagctgacccccctgggccagcacctggccgccctgcccgtgaacgtgaagatcggcaagatgctgatcttcggcgccatcttcggctgcctggaccccgtggccaccctggccgccgtgatgaccgagaagagccccttcaccacccccatcggcagaaaggacgaggccgacctggccaagagcgccctggccatggccgacagcgaccacctgaccatctacaacgcctacctgggctggaagaaggccagacaggagggcggctacagaagcgagatcacctactgcagaagaaacttcctgaacagaaccagcctgctgaccctggaggacgtgaagcaggagctgatcaagctggtgaaggccgccggcttcagcagcagcaccaccagcaccagctgggagggcaacagagccagccagaccctgagcttccaggagatcgccctgctgaaggccgtgctggtggccggcctgtacgacaacgtgggcaagatcatctacaccaagagcgtggacgtgaccgagaagctggcctgcatcgtggagaccgcccagggcaaggcccaggtgcaccccagcagcgtgaacagagacctgcagacccacggctggctgctgtaccaggagaagatcagatacgccagagtgtacctgagagagaccaccctgatcacccccttccccgtgctgctgttcggcggcgacatcgaggtgcagcacagagagagactgctgagcatcgacggctggatctacttccaggcccccgtgaagatcgccgtgatcttcaagcagctgagagtgctgatcgacagcgtgctgagaaagaagctggagaaccccaagatgagcctggagaacgacaagatcctgcagatcatcaccgagctgatcaagaccgagaacaactag

SEQ ID NO: 78774 - DNA, 1989 bp, synthetic construct
  misc_feature 1..1989: note = Description of Artificial Sequence: Synthetic coding sequence
  source 1..1989: mol_type = other DNA
atggaggaggagggcctggagtgccccaacagcagcagcgagaagagatacttccccgagagcctggacagcagcgacggcgacgaggaggaggtgctggcctgcgaggacctggagctgaaccccttcgacggcctgccctacagcagcagatactacaagctgctgaaggagagagaggacctgcccatctggaaggagaagtacagcttcatggagaacctgctgcagaaccagatcgtgatcgtgagcggcgacgccaagtgcggcaagagcgcccaggtgccccagtggtgcgccgagtactgcctgagcatccactaccagcacggcggcgtgatctgcacccaggtgcacaagcagaccgtggtgcagctggccctgagagtggccgacgagatggacgtgaacatcggccacgaggtgggctacgtgatccccttcgagaactgctgcaccaacgagaccatcctgagatactgcaccgacgacatgctgcagagagagatgatgagcaaccccttcctgggcagctacggcgtgatcatcctggacgacatccacgagagaagcatcgccaccgacgtgctgctgggcctgctgaaggacgtgctgctggccagacccgagctgaagctgatcatcaacagcagcccccacctgatcagcaagctgaacagctactacggcaacgtgcccgtgatcgaggtgaagaacaagcaccccgtggaggtggtgtacctgagcgaggcccagaaggacagcttcgagagcatcctgagactgatcttcgagatccaccacagcggcgagaagggcgacatcgtggtgttcctggcctgcgagcaggtgtacaaccccagaatcagagccaacagcctggtgatgcagcccatcagccagagccaggccgagatcagaaagcagatcctgggcagcagcagcagcggcaagttcttctgcctgtacaccgaggagttcgccagcaaggacatgacccccctgaagcccgccgagatgcaggaggccaacctgaccagcatggtgctgttcatgaagagaatcgacatcgccggcctgggccactgcgacttcatgaacagacccgcccccgagagcctgatgcaggccctggaggacctggactacctggccgccctggacaacgacggcaacctgagcgagttcggcatcatcatgagcgagttccccctggacccccagctgagcaagagcatcctggccagctgcgagttcgactgcgtggacgaggtgctgaccatcgccgccatggtgaccgcccccaactgcttcagccacgtgccccacggcgccgaggaggccgccctgacctgctggaagaccttcctgcaccccgagggcgaccacttcaccctgatcagcatctacaaggcctaccaggacaccaccctgaacagcagcagcgagtactgcgtggagaagtggtgcagagactacttcctgaactgcagcgccctgagaatggccgacgtgatcagagccgagctgctggagatcatcaagagaatcgagctgccctacgccgagcccgccttcggcagcaaggagaacaccctgaacatcaagaaggccctgctgagcggctacttcatgcagatcgccagagacgtggacggcagcggcaactacctgatgctgacccacaagcaggtggcccagctgcaccccctgagcggctacagcatcaccaagaagatgcccgagtgggtgctgttccacaagttcagcatcagcgagaacaactacatcagaatcaccagcgagatcagccccgagctgttcatgcagctggtgccccagtactacttcagcaacctgccccccagcgagagcaaggacatcctgcagcaggtggtggaccacctgagccccgtgagcaccatgaacaaggagcagcagatgtgcgagacctgccccgagaccgagcagagatgcaccctgcagtag

SEQ ID NO: 78775 - DNA, 2232 bp, synthetic construct
  misc_feature 1..2232: note = Description of Artificial Sequence: Synthetic coding sequence
  source 1..2232: mol_type = other DNA
atggaggaggagggcctggagtgccccaacagcagcagcgagaagagatacttccccgagagcctggacagcagcgacggcgacgaggaggaggtgctggcctgcgaggacctggagctgaaccccttcgacggcctgccctacagcagcagatactacaagctgctgaaggagagagaggacctgcccatctggaaggagaagtacagcttcatggagaacctgctgcagaaccagatcgtgatcgtgagcggcgacgccaagtgcggcaagagcgcccaggtgccccagtggtgcgccgagtactgcctgagcatccactaccagcacggcggcgtgatctgcacccaggtgcacaagcagaccgtggtgcagctggccctgagagtggccgacgagatggacgtgaacatcggccacgaggtgggctacgtgatccccttcgagaactgctgcaccaacgagaccatcctgagatactgcaccgacgacatgctgcagagagagatgatgagcaaccccttcctgggcagctacggcgtgatcatcctggacgacatccacgagagaagcatcgccaccgacgtgctgctgggcctgctgaaggacgtgctgctggccagacccgagctgaagctgatcatcaacagcagcccccacctgatcagcaagctgaacagctactacggcaacgtgcccgtgatcgaggtgaagaacaagcaccccgtggaggtggtgtacctgagcgaggcccagaaggacagcttcgagagcatcctgagactgatcttcgagatccaccacagcggcgagaagggcgacatcgtggtgttcctggcctgcgagcaggacatcgagaaggtgtgcgagaccgtgtaccagggcagcaacctgaaccccgacctgggcgagctggtggtggtgcccctgtaccccaaggagaagtgcagcctgttcaagcccctggacgagaccgagaagagatgccaggtgtaccagagaagagtggtgctgaccaccagcagcggcgagttcctgatctggagcaacagcgtgagattcgtgatcgacgtgggcgtggagagaagaaaggtgtacaaccccagaatcagagccaacagcctggtgatgcagcccatcagccagagccaggccgagatcagaaagcagatcctgggcagcagcagcagcggcaagttcttctgcctgtacaccgaggagttcgccagcaaggacatgacccccctgaagcccgccgagatgcaggaggccaacctgaccagcatggtgctgttcatgaagagaatcgacatcgccggcctgggccactgcgacttcatgaacagacccgcccccgagagcctgatgcaggccctggaggacctggactacctggccgccctggacaacgacggcaacctgagcgagttcggcatcatcatgagcgagttccccctggacccccagctgagcaagagcatcctggccagctgcgagttcgactgcgtggacgaggtgctgaccatcgccgccatggtgaccgcccccaactgcttcagccacgtgccccacggcgccgaggaggccgccctgacctgctggaagaccttcctgcaccccgagggcgaccacttcaccctgatcagcatctacaaggcctaccaggacaccaccctgaacagcagcagcgagtactgcgtggagaagtggtgcagagactacttcctgaactgcagcgccctgagaatggccgacgtgatcagagccgagctgctggagatcatcaagagaatcgagctgccctacgccgagcccgccttcggcagcaaggagaacaccctgaacatcaagaaggccctgctgagcggctacttcatgcagatcgccagagacgtggacggcagcggcaactacctgatgctgacccacaagcaggtggcccagctgcaccccctgagcggctacagcatcaccaagaagatgcccgagtgggtgctgttccacaagttcagcatcagcgagaacaactacatcagaatcaccagcgagatcagccccgagctgttcatgcagctggtgccccagtactacttcagcaacctgccccccagcgagagcaaggacatcctgcagcaggtggtggaccacctgagccccgtgagcaccatgaacaaggagcagcagatgtgcgagacctgccccgagaccgagcagagatgcaccctgcagtag

SEQ ID NO: 78776 - DNA, 1104 bp, synthetic construct
  misc_feature 1..1104: note = Description of Artificial Sequence: Synthetic coding sequence
  source 1..1104: mol_type = other DNA
atgcagcccatcagccagagccaggccgagatcagaaagcagatcctgggcagcagcagcagcggcaagttcttctgcctgtacaccgaggagttcgccagcaaggacatgacccccctgaagcccgccgagatgcaggaggccaacctgaccagcatggtgctgttcatgaagagaatcgacatcgccggcctgggccactgcgacttcatgaacagacccgcccccgagagcctgatgcaggccctggaggacctggactacctggccgccctggacaacgacggcaacctgagcgagttcggcatcatcatgagcgagttccccctggacccccagctgagcaagagcatcctggccagctgcgagttcgactgcgtggacgaggtgctgaccatcgccgccatggtgaccgcccccaactgcttcagccacgtgccccacggcgccgaggaggccgccctgacctgctggaagaccttcctgcaccccgagggcgaccacttcaccctgatcagcatctacaaggcctaccaggacaccaccctgaacagcagcagcgagtactgcgtggagaagtggtgcagagactacttcctgaactgcagcgccctgagaatggccgacgtgatcagagccgagctgctggagatcatcaagagaatcgagctgccctacgccgagcccgccttcggcagcaaggagaacaccctgaacatcaagaaggccctgctgagcggctacttcatgcagatcgccagagacgtggacggcagcggcaactacctgatgctgacccacaagcaggtggcccagctgcaccccctgagcggctacagcatcaccaagaagatgcccgagtgggtgctgttccacaagttcagcatcagcgagaacaactacatcagaatcaccagcgagatcagccccgagctgttcatgcagctggtgccccagtactacttcagcaacctgccccccagcgagagcaaggacatcctgcagcaggtggtggaccacctgagccccgtgagcaccatgaacaaggagcagcagatgtgcgagacctgccccgagaccgagcagagatgcaccctgcagtag

SEQ ID NO: 78777 - DNA, 339 bp, synthetic construct
  misc_feature 1..339: note = Description of Artificial Sequence: Synthetic coding sequence
  source 1..339: mol_type = other DNA
atggaggaggagggcctggagtgccccaacagcagcagcgagaagagatacttccccgagagcctggacagcagcgacggcgacgaggaggaggtgctggcctgcgaggacctggagctgaaccccttcgacggcctgccctacagcagcagatactacaagctgctgaaggagagagaggacctgcccatctggaaggagaagtacagcttcatggagaacctgctgcagaaccagatcgtgatcgtgagcggcgacgccaagtgcggcaagagcgcccaggtgccccagtggtgcgccgagtactgcctgagcatccactaccagcacggcggctag

SEQ ID NO: 78778 - DNA, 1935 bp, synthetic construct
  misc_feature 1..1935: note = Description of Artificial Sequence: Synthetic coding sequence
  source 1..1935: mol_type = other DNA
atgaccatcgagatcgacttcctgcagaagaagagcatcgacagcaacccctacgacaccgacaagatggccgccgagttcatccagcagttcaacaaccaggccttcagcgtgggccagcagctggtgttcagcttcaacgagaagctgttcggcctgctggtgaaggacatcgaggccatggaccccagcatcctgaagggcgagcccgccaccggcaagagacagaagatcgaggtgggcctggtggtgggcaacagccaggtggccttcgagaaggccgagaacagcagcctgaacctgatcggcaaggccaagaccaaggagaacagacagagcatcatcaaccccgactggaacttcgagaagatgggcatcggcggcctggacaaggagttcagcgacatcttcagaagagccttcgccagcagagtgttcccccccgagatcgtggagcagatgggctgcaagcacgtgaagggcatcctgctgtacggcccccccggctgcggcaagaccctgctggccagacagatcggcaagatgctgaacgccagagagcccaaggtggtgaacggccccgagatcctgaacaagtacgtgggcgagagcgaggccaacatcagaaagctgttcgccgacgccgaggaggagcagagaagactgggcgccaacagcggcctgcacatcatcatcttcgacgagatcgacgccatctgcaagcagagaggcagcatggccggcagcaccggcgtgcacgacaccgtggtgaaccagctgctgagcaagatcgacggcgtggagcagctgaacaacatcctggtgatcggcatgaccaacagacccgacctgatcgacgaggccctgctgagacccggcagactggaggtgaagatggagatcggcctgcccgacgagaagggcagactgcagatcctgcacatccacaccgccagaatgagaggccaccagctgctgagcgccgacgtggacatcaaggagctggccgtggagaccaagaacttcagcggcgccgagctggagggcctggtgagagccgcccagagcaccgccatgaacagacacatcaaggccagcaccaaggtggaggtggacatggagaaggccgagagcctgcaggtgaccagaggcgacttcctggccagcctggagaacgacatcaagcccgccttcggcaccaaccaggaggactacgccagctacatcatgaacggcatcatcaagtggggcgaccccgtgaccagagtgctggacgacggcgagctgctggtgcagcagaccaagaacagcgacagaacccccctggtgagcgtgctgctggagggccccccccacagcggcaagaccgccctggccgccaagatcgccgaggagagcaacttccccttcatcaagatctgcagccccgacaagatgatcggcttcagcgagaccgccaagtgccaggccatgaagaagatcttcgacgacgcctacaagagccagctgagctgcgtggtggtggacgacatcgagagactgctggactacgtgcccatcggccccagattcagcaacctggtgctgcaggccctgctggtgctgctgaagaaggcccccccccagggcagaaagctgctgatcatcggcaccaccagcagaaaggacgtgctgcaggagatggagatgctgaacgccttcagcaccaccatccacgtgcccaacatcgccaccggcgagcagctgctggaggccctggagctgctgggcaacttcaaggacaaggagagaaccaccatcgcccagcaggtgaagggcaagaaggtgtggatcggcatcaagaagctgctgatgctgatcgagatgagcctgcagatggaccccgagtacagagtgagaaagttcctggccctgctgagagaggagggcgcctag

SEQ ID NO: 78779 - DNA, 1452 bp, synthetic construct
  misc_feature 1..1452: note = Description of Artificial Sequence: Synthetic coding sequence
  source 1..1452: mol_type = other DNA
atgcccgaggaggccggcttcccccccgccaagagattcagacccggcagcggcccccccagcagagccggcagcttcccccccggcagacaggtggtgatgctgctgaccgccggcagcggcggcagaggcggcggcggcggcagaagacagcagccccccctggcccagcccagcgccagcccctaccccgaggccgtggagctgcagagaagaagcctgcccatcttccaggccagaggccagctgctggcccagctgagaaacctggacaacgccgtgctgatcggcagccccttcttcaccggccaccccggcgtgccccactgggccggcggcgacagaagccacgagcaggacgtgcccagacactgcaaggccccccccagaagactgccctgcgacgccggccccagcagcgtgagactgcccgccctgtgcaccgccgcccccagcctgcccagaggccccaaggacagcggcctggaggtgctggccgtgcagagagtgagcaagacccaggcctggcagagaaccggcagagccggcagagaggacagcggcatctgctacagactgtacaccgaggacgagttcgagaagttcgacaagatgaccgtgcccgagatccagagatgcaacctggccagcgtgatgctgcagctgctggccatgaaggtgcccaacgtgctgaccttcgacttcatgagcaagcccagccccgaccacatccaggccgccatcgcccagctggacctgctgggcgccctggagcacaaggacgaccagctgaccctgacccccatgggcagaaagatggccgccttccccctggagcccaagttcgccaagaccatcctgatgagccccaagttccactgcaccgaggagatcctgaccatcgtgagcctgctgagcgtggacagcgtgctgcacaacccccccagcagaagagaggaggtgcagggcgtgagaaagaagttcatcagcagcgagggcgaccacatgaccctgctgaacatctacagaaccttcaagaacctgggcggcaacaaggactggtgcaaggagaacttcgtgaacagcaagaacatgaccctggtggccgaggtgagagcccagctgagagacatctgcctgaagatgagcatgcccatcgccagcagcagaggcgacgtggagagcgtgagaagatgcctggcccacagcctgttcatgagcaccgccgagctgcagcccgacggcacctacgccaccaccgacacccaccagcccgtggccatccaccccagcagcgtgctgttccactgcaagcccgcctgcgtggtgtacaccgagctgctgtacaccaacaagtgctacatgagagacctgtgcgtgatcgacgcccagtggctgtacgaggccgcccccgagtacttcagaagaaagctgagaaccgccagaaactag

SEQ ID NO: 78780 - DNA, 2940 bp, synthetic construct
  misc_feature 1..2940: note = Description of Artificial Sequence: Synthetic coding sequence
  source 1..2940: mol_type = other DNA
atgagctacgactaccaccagaactggggcagagacggcggccccagaagcagcggcggcggctacggcggcggccccgccggcggccacggcggcaacagaggcagcggcggcggcggcggcggcggcggcggcggcagaggcggcagaggcagacaccccggccacctgaagggcagagagatcggcatgtggtacgccaagaagcagggccagaagaacaaggaggccgagagacaggagagagccgtggtgcacatggacgagagaagagaggagcagatcgtgcagctgctgaacagcgtgcaggccaagaacgacaaggagagcgaggcccagatcagctggttcgcccccgaggaccacggctacggcaccgaggtgagcaccaagaacaccccctgcagcgagaacaagctggacatccaggagaagaagctgatcaaccaggagaagaagatgttcagaatcagaaacagaagctacatcgacagagacagcgagtacctgctgcaggagaacgagcccgacggcaccctggaccagaagctgctggaggacctgcagaagaagaagaacgacctgagatacatcgagatgcagcacttcagagagaagctgcccagctacggcatgcagaaggagctggtgaacctgatcgacaaccaccaggtgaccgtgatcagcggcgagaccggctgcggcaagaccacccaggtgacccagttcatcctggacaactacatcgagagaggcaagggcagcgcctgcagaatcgtgtgcacccagcccagaagaatcagcgccatcagcgtggccgagagagtggccgccgagagagccgagagctgcggcagcggcaacagcaccggctaccagatcagactgcagagcagactgcccagaaagcagggcagcatcctgtactgcaccaccggcatcatcctgcagtggctgcagagcgacccctacctgagcagcgtgagccacatcgtgctggacgagatccacgagagaaacctgcagagcgacgtgctgatgaccgtggtgaaggacctgctgaacttcagaagcgacctgaaggtgatcctgatgagcgccaccctgaacgccgagaagttcagcgagtacttcggcaactgccccatgatccacatccccggcttcaccttccccgtggtggagtacctgctggaggacgtgatcgagaagatcagatacgtgcccgagcagaaggagcacagaagccagttcaagagaggcttcatgcagggccacgtgaacagacaggagaaggaggagaaggaggccatctacaaggagagatggcccgactacgtgagagagctgagaagaagatacagcgccagcaccgtggacgtgatcgagatgatggaggacgacaaggtggacctgaacctgatcgtggccctgatcagatacatcgtgctggaggaggaggacggcgccatcctggtgttcctgcccggctgggacaacatcagcaccctgcacgacctgctgatgagccaggtgatgttcaagagcgacaagttcctgatcatccccctgcacagcctgatgcccaccgtgaaccagacccaggtgttcaagagaaccccccccggcgtgagaaagatcgtgatcgccaccaacatcgccgagaccagcatcaccatcgacgacgtggtgtacgtgatcgacggcggcaagatcaaggagacccacttcgacacccagaacaacatcagcaccatgagcgccgagtgggtgagcaaggccaacgccaagcagagaaagggcagagccggcagagtgcagcccggccactgctaccacctgtacaacggcctgagagccagcctgctggacgactaccagctgcccgagatcctgagaacccccctggaggagctgtgcctgcagatcaagatcctgagactgggcggcatcgcctacttcctgagcagactgatggacccccccagcaacgaggccgtgctgctgagcatcagacacctgatggagctgaacgccctggacaagcaggaggagctgacccccctgggcgtgcacctggccagactgcccgtggagccccacatcggcaagatgatcctgttcggcgccctgttctgctgcctggaccccgtgctgaccatcgccgccagcctgagcttcaaggaccccttcgtgatccccctgggctgggaggaggccagaagaagaggcttcagatacgagaaggactactgctgggagtacttcctgagcagcaacaccctgcagatgctgcacaacatgaagggccagttcgccgagcacctgctgggcgccggcttcgtgagcagcagaaaccccaaggaccccgagagcaacatcaacagcgacaacgagaagatcatcaaggccgtgatctgcgccggcctgtaccccaaggtggccaagatcagactgaacctgggcaagaagagaaagatggtgaaggtgtacaccaagaccgacggcctggtggccgtgcaccccaagagcgtgaacgtggagcagaccgacttccactacaactggctgatctaccacctgaagatgagaaccagcagcatctacctgtacgactgcaccgaggtgagcccctactgcctgctgttcttcggcggcgacatcagcatccagaaggacaacgaccaggagaccatcgccgtggacgagtggatcgtgttccagagccccgccagaatcgcccacctggtgaaggagctgagaaaggagctggacatcctgctgcaggagaagatcgagagcccccaccccgtggactggaacgacaccaagagcagagactgcgccgtgctgagcgccatcatcgacctgatcaagacccaggagaaggccacccccagaaacttcccccccagattccaggacggctactacagctag

SEQ ID NO: 78781 - DNA, 2985 bp, synthetic construct
  misc_feature 1..2985: note = Description of Artificial Sequence: Synthetic coding sequence
  source 1..2985: mol_type = other DNA
atgagctacgactaccaccagaactggggcagagacggcggccccagaagcagcggcggcggctacggcggcggccccgccggcggccacggcggcaacagaggcagcggcggcggcggcggcggcggcggcggcggcagaggcggcagaggcagacaccccggccacctgaagggcagagagatcggcatgtggtacgccaagaagcagggccagaagaacaaggaggccgagagacaggagagagccgtggtgcacatggacgagagaagagaggagcagatcgtgcagctgctgaacagcgtgcaggccaagaacgacaaggagagcgaggcccagatcagctggttcgcccccgaggaccacggctacggcaccgaggtgagcaccaagaacaccccctgcagcgagaacaagctggacatccaggagaagaagctgatcaaccaggagaagaagatgttcagaatcagaaacagaagctacatcgacagagacagcgagtacctgctgcaggagaacgagcccgacggcaccctggaccagaagctgctggaggacctgcagaagaagaagaacgacctgagatacatcgagatgcagcacttcagagagaagctgcccagctacggcatgcagaaggagctggtgaacctgatcgacaaccaccaggtgaccgtgatcagcggcgagaccggctgcggcaagaccacccaggtgacccagttcatcctggacaactacatcgagagaggcaagggcagcgcctgcagaatcgtgtgcacccagcccagaagaatcagcgccatcagcgtggccgagagagtggccgccgagagagccgagagctgcggcagcggcaacagcaccggctaccagatcagactgcagagcagactgcccagaaagcagggcagcatcctgtactgcaccaccggcatcatcctgcagtggctgcagagcgacccctacctgagcagcgtgagccacatcgtgctggacgagatccacgagagaaacctgcagagcgacgtgctgatgaccgtggtgaaggacctgctgaacttcagaagcgacctgaaggtgatcctgatgagcgccaccctgaacgccgagaagttcagcgagtacttcggcaactgccccatgatccacatccccggcttcaccttccccgtggtggagtacctgctggaggacgtgatcgagaagatcagatacgtgcccgagcagaaggagcacagaagccagttcaagagaggcttcatgcagggccacgtgaacagacaggagaaggaggagaaggaggccatctacaaggagagatggcccgactacgtgagagagctgagaagaagatacagcgccagcaccgtggacgtgatcgagatgatggaggacgacaaggtggacctgaacctgatcgtggccctgatcagatacatcgtgctggaggaggaggacggcgccatcctggtgttcctgcccggctgggacaacatcagcaccctgcacgacctgctgatgagccaggtgatgttcaagagcgtgaaccagacccaggtgttcaagagaaccccccccggcgtgagaaagatcgtgatcgccaccaacatcgccgagaccagcatcaccatcgacgacgtggtgtacgtgatcgacggcggcaagatcaaggagacccacttcgacacccagaacaacatcagcaccatgagcgccgagtgggtgagcaaggccaacgccaagcagagaaagggcagagccggcagagtgcagcccggccactgctaccacctgtacaacggcctgagagccagcctgctggacgactaccagctgcccgagatcctgagaacccccctggaggagctgtgcctgcagatcaagatcctgagactgggcggcatcgcctacttcctgagcagactgatggacccccccagcaacgaggccgtgctgctgagcatcagacacctgatggagctgaacgccctggacaagcaggaggagctgacccccctgggcgtgcacctggccagactgcccgtggagccccacatcggcaagatgatcctgttcggcgccctgttctgctgcctggaccccgtgctgaccatcgccgccagcctgagcttcaaggaccccttcgtgatccccctgggcaaggagaagatcgccgacgccagaagaaaggagctggccaaggacaccagaagcgaccacctgaccgtggtgaacgccttcgagggctgggaggaggccagaagaagaggcttcagatacgagaaggactactgctgggagtacttcctgagcagcaacaccctgcagatgctgcacaacatgaagggccagttcgccgagcacctgctgggcgccggcttcgtgagcagcagaaaccccaaggaccccgagagcaacatcaacagcgacaacgagaagatcatcaaggccgtgatctgcgccggcctgtaccccaaggtggccaagatcagactgaacctgggcaagaagagaaagatggtgaaggtgtacaccaagaccgacggcctggtggccgtgcaccccaagagcgtgaacgtggagcagaccgacttccactacaactggctgatctaccacctgaagatgagaaccagcagcatctacctgtacgactgcaccgaggtgagcccctactgcctgctgttcttcggcggcgacatcagcatccagaaggacaacgaccaggagaccatcgccgtggacgagtggatcgtgttccagagccccgccagaatcgcccacctggtgaaggagctgagaaaggagctggacatcctgctgcaggagaagatcgagagcccccaccccgtggactggaacgacaccaagagcagagactgcgccgtgctgagcgccatcatcgacctgatcaagacccaggagaaggccacccccagaaacttcccccccagattccaggacggctactacagctag

SEQ ID NO: 78782 - DNA, 3027 bp, synthetic construct
  misc_feature 1..3027: note = Description of Artificial Sequence: Synthetic coding sequence
  source 1..3027: mol_type = other DNA
atgagctacgactaccaccagaactggggcagagacggcggccccagaagcagcggcggcggctacggcggcggccccgccggcggccacggcggcaacagaggcagcggcggcggcggcggcggcggcggcggcggcagaggcggcagaggcagacaccccggccacctgaagggcagagagatcggcatgtggtacgccaagaagcagggccagaagaacaaggaggccgagagacaggagagagccgtggtgcacatggacgagagaagagaggagcagatcgtgcagctgctgaacagcgtgcaggccaagaacgacaaggagagcgaggcccagatcagctggttcgcccccgaggaccacggctacggcaccgaggtgagcaccaagaacaccccctgcagcgagaacaagctggacatccaggagaagaagctgatcaaccaggagaagaagatgttcagaatcagaaacagaagctacatcgacagagacagcgagtacctgctgcaggagaacgagcccgacggcaccctggaccagaagctgctggaggacctgcagaagaagaagaacgacctgagatacatcgagatgcagcacttcagagagaagctgcccagctacggcatgcagaaggagctggtgaacctgatcgacaaccaccaggtgaccgtgatcagcggcgagaccggctgcggcaagaccacccaggtgacccagttcatcctggacaactacatcgagagaggcaagggcagcgcctgcagaatcgtgtgcacccagcccagaagaatcagcgccatcagcgtggccgagagagtggccgccgagagagccgagagctgcggcagcggcaacagcaccggctaccagatcagactgcagagcagactgcccagaaagcagggcagcatcctgtactgcaccaccggcatcatcctgcagtggctgcagagcgacccctacctgagcagcgtgagccacatcgtgctggacgagatccacgagagaaacctgcagagcgacgtgctgatgaccgtggtgaaggacctgctgaacttcagaagcgacctgaaggtgatcctgatgagcgccaccctgaacgccgagaagttcagcgagtacttcggcaactgccccatgatccacatccccggcttcaccttccccgtggtggagtacctgctggaggacgtgatcgagaagatcagatacgtgcccgagcagaaggagcacagaagccagttcaagagaggcttcatgcagggccacgtgaacagacaggagaaggaggagaaggaggccatctacaaggagagatggcccgactacgtgagagagctgagaagaagatacagcgccagcaccgtggacgtgatcgagatgatggaggacgacaaggtggacctgaacctgatcgtggccctgatcagatacatcgtgctggaggaggaggacggcgccatcctggtgttcctgcccggctgggacaacatcagcaccctgcacgacctgctgatgagccaggtgatgttcaagagcgacaagttcctgatcatccccctgcacagcctgatgcccaccgtgaaccagacccaggtgttcaagagaaccccccccggcgtgagaaagatcgtgatcgccaccaacatcgccgagaccagcatcaccatcgacgacgtggtgtacgtgatcgacggcggcaagatcaaggagacccacttcgacacccagaacaacatcagcaccatgagcgccgagtgggtgagcaaggccaacgccaagcagagaaagggcagagccggcagagtgcagcccggccactgctaccacctgtacaacggcctgagagccagcctgctggacgactaccagctgcccgagatcctgagaacccccctggaggagctgtgcctgcagatcaagatcctgagactgggcggcatcgcctacttcctgagcagactgatggacccccccagcaacgaggccgtgctgctgagcatcagacacctgatggagctgaacgccctggacaagcaggaggagctgacccccctgggcgtgcacctggccagactgcccgtggagccccacatcggcaagatgatcctgttcggcgccctgttctgctgcctggaccccgtgctgaccatcgccgccagcctgagcttcaaggaccccttcgtgatccccctgggcaaggagaagatcgccgacgccagaagaaaggagctggccaaggacaccagaagcgaccacctgaccgtggtgaacgccttcgagggctgggaggaggccagaagaagaggcttcagatacgagaaggactactgctgggagtacttcctgagcagcaacaccctgcagatgctgcacaacatgaagggccagttcgccgagcacctgctgggcgccggcttcgtgagcagcagaaaccccaaggaccccgagagcaacatcaacagcgacaacgagaagatcatcaaggccgtgatctgcgccggcctgtaccccaaggtggccaagatcagactgaacctgggcaagaagagaaagatggtgaaggtgtacaccaagaccgacggcctggtggccgtgcaccccaagagcgtgaacgtggagcagaccgacttccactacaactggctgatctaccacctgaagatgagaaccagcagcatctacctgtacgactgcaccgaggtgagcccctactgcctgctgttcttcggcggcgacatcagcatccagaaggacaacgaccaggagaccatcgccgtggacgagtggatcgtgttccagagccccgccagaatcgcccacctggtgaaggagctgagaaaggagctggacatcctgctgcaggagaagatcgagagcccccaccccgtggactggaacgacaccaagagcagagactgcgccgtgctgagcgccatcatcgacctgatcaagacccaggagaaggccacccccagaaacttcccccccagattccaggacggctactacagctag

SEQ ID NO: 78783 - DNA, 2985 bp, synthetic construct
  misc_feature 1..2985: note = Description of Artificial Sequence: Synthetic coding sequence
  source 1..2985: mol_type = other DNA
atgagctacgactaccaccagaactggggcagagacggcggccccagaagcagcggcggcggctacggcggcggccccgccggcggccacggcggcaacagaggcagcggcggcggcggcggcggcggcggcggcggcagaggcggcagaggcagacaccccggccacctgaagggcagagagatcggcatgtggtacgccaagaagcagggccagaagaacaaggaggccgagagacaggagagagccgtggtgcacatggacgagagaagagaggagcagatcgtgcagctgctgaacagcgtgcaggccaagaacgacaaggagagcgaggcccagatcagctggttcgcccccgaggaccacggctacggcaccgaggtgagcaccaagaacaccccctgcagcgagaacaagctggacatccaggagaagaagctgatcaaccaggagaagaagatgttcagaatcagaaacagaagctacatcgacagagacagcgagtacctgctgcaggagaacgagcccgacggcaccctggaccagaagctgctggaggacctgcagaagaagaagaacgacctgagatacatcgagatgcagcacttcagagagaagctgcccagctacggcatgcagaaggagctggtgaacctgatcgacaaccaccaggtgaccgtgatcagcggcgagaccggctgcggcaagaccacccaggtgacccagttcatcctggacaactacatcgagagaggcaagggcagcgcctgcagaatcgtgtgcacccagcccagaagaatcagcgccatcagcgtggccgagagagtggccgccgagagagccgagagctgcggcagcggcaacagcaccggctaccagatcagactgcagagcagactgcccagaaagcagggcagcatcctgtactgcaccaccggcatcatcctgcagtggctgcagagcgacccctacctgagcagcgtgagccacatcgtgctggacgagatccacgagagaaacctgcagagcgacgtgctgatgaccgtggtgaaggacctgctgaacttcagaagcgacctgaaggtgatcctgatgagcgccaccctgaacgccgagaagttcagcgagtacttcggcaactgccccatgatccacatccccggcttcaccttccccgtggtggagtacctgctggaggacgtgatcgagaagatcagatacgtgcccgagcagaaggagcacagaagccagttcaagagaggcttcatgcagggccacgtgaacagacaggagaaggaggagaaggaggccatctacaaggagagatggcccgactacgtgagagagctgagaagaagatacagcgccagcaccgtggacgtgatcgagatgatggaggacgacaaggtggacctgaacctgatcgtggccctgatcagatacatcgtgctggaggaggaggacggcgccatcctggtgttcctgcccggctgggacaacatcagcaccctgcacgacctgctgatgagccaggtgatgttcaagagcggcaccatgagccaggtgttcaagagaaccccccccggcgtgagaaagatcgtgatcgccaccaacatcgccgagaccagcatcaccatcgacgacgtggtgtacgtgatcgacggcggcaagatcaaggagacccacttcgacacccagaacaacatcagcaccatgagcgccgagtgggtgagcaaggccaacgccaagcagagaaagggcagagccggcagagtgcagcccggccactgctaccacctgtacaacggcctgagagccagcctgctggacgactaccagctgcccgagatcctgagaacccccctggaggagctgtgcctgcagatcaagatcctgagactgggcggcatcgcctacttcctgagcagactgatggacccccccagcaacgaggccgtgctgctgagcatcagacacctgatggagctgaacgccctggacaagcaggaggagctgacccccctgggcgtgcacctggccagactgcccgtggagccccacatcggcaagatgatcctgttcggcgccctgttctgctgcctggaccccgtgctgaccatcgccgccagcctgagcttcaaggaccccttcgtgatccccctgggcaaggagaagatcgccgacgccagaagaaaggagctggccaaggacaccagaagcgaccacctgaccgtggtgaacgccttcgagggctgggaggaggccagaagaagaggcttcagatacgagaaggactactgctgggagtacttcctgagcagcaacaccctgcagatgctgcacaacatgaagggccagttcgccgagcacctgctgggcgccggcttcgtgagcagcagaaaccccaaggaccccgagagcaacatcaacagcgacaacgagaagatcatcaaggccgtgatctgcgccggcctgtaccccaaggtggccaagatcagactgaacctgggcaagaagagaaagatggtgaaggtgtacaccaagaccgacggcctggtggccgtgcaccccaagagcgtgaacgtggagcagaccgacttccactacaactggctgatctaccacctgaagatgagaaccagcagcatctacctgtacgactgcaccgaggtgagcccctactgcctgctgttcttcggcggcgacatcagcatccagaaggacaacgaccaggagaccatcgccgtggacgagtggatcgtgttccagagccccgccagaatcgcccacctggtgaaggagctgagaaaggagctggacatcctgctgcaggagaagatcgagagcccccaccccgtggactggaacgacaccaagagcagagactgcgccgtgctgagcgccatcatcgacctgatcaagacccaggagaaggccacccccagaaacttcccccccagattccaggacggctactacagctag

SEQ ID NO: 78784 - DNA, 3684 bp, synthetic construct
  misc_feature 1..3684: note = Description of Artificial Sequence: Synthetic coding sequence
  source 1..3684: mol_type = other DNA
atgggcgacaccagcgaggacgccagcatccacagactggagggcaccgacctggactgccaggtgggcggcctgatctgcaagagcaagagcgccgccagcgagcagcacgtgttcaaggcccccgcccccagacccagcctgctgggcctggacctgctggccagcctgaagagaagagagagagaggagaaggacgacggcgaggacaagaagaagagcaaggtgagcagctacaaggactgggaggagagcaaggacgaccagaaggacgccgaggaggagggcggcgaccaggccggccagaacatcagaaaggacagacactacagaagcgccagagtggagacccccagccaccccggcggcgtgagcgaggagttctgggagagaagcagacagagagagagagagagaagagagcacggcgtgtacgccagcagcaaggaggagaaggactggaagaaggagaagagcagagacagagactacgacagaaagagagacagagacgagagagacagaagcagacacagcagcagaagcgagagagacggcggcagcgagagaagcagcagaagaaacgagcccgagagccccagacacagacccaaggacgccgccacccccagcagaagcacctgggaggaggaggacagcggctacggcagcagcagaagaagccagtgggagagccccagccccacccccagctacagagacagcgagagaagccacagactgagcaccagagacagagacagaagcgtgagaggcaagtacagcgacgacacccccctgcccacccccagctacaagtacaacgagtgggccgacgacagaagacacctgggcagcacccccagactgagcagaggcagaggcagaagagaggagggcgaggagggcatcagcttcgacaccgaggaggagagacagcagtgggaggacgaccagagacaggccgacagagactggtacatgatggacgagggctacgacgagttccacaaccccctggcctacagcagcgaggactacgtgagaagaagagagcagcacctgcacaagcagaagcagaagagaatcagcgcccagagaagacagatcaacgaggacaacgagagatgggagaccaacagaatgctgaccagcggcgtggtgcacagactggaggtggacgaggacttcgaggaggacaacgccgccaaggtgcacctgatggtgcacaacctggtgccccccttcctggacggcagaatcgtgttcaccaagcagcccgagcccgtgatccccgtgaaggacgccaccagcgacctggccatcatcgccagaaagggcagccagaccgtgagaaagcacagagagcagaaggagagaaagaaggcccagcacaagcactgggagctggccggcaccaagctgggcgacatcatgggcgtgaagaaggaggaggagcccgacaaggccgtgaccgaggacggcaaggtggactacagaaccgagcagaagttcgccgaccacatgaagagaaagagcgaggccagcagcgagttcgccaagaagaagagcatcctggagcagagacagtacctgcccatcttcgccgtgcagcaggagctgctgaccatcatcagagacaacagcatcgtgatcgtggtgggcgagaccggcagcggcaagaccacccagctgacccagtacctgcacgaggacggctacaccgactacggcatgatcggctgcacccagcccagaagagtggccgccatgagcgtggccaagagagtgagcgaggagatgggcggcaacctgggcgaggaggtgggctacgccatcagattcgaggactgcaccagcgagaacaccctgatcaagtacatgaccgacggcatcctgctgagagagagcctgagagaggccgacctggaccactacagcgccatcatcatggacgaggcccacgagagaagcctgaacaccgacgtgctgttcggcctgctgagagaggtggtggccagaagaagcgacctgaagctgatcgtgaccagcgccaccatggacgccgagaagttcgccgccttcttcggcaacgtgcccatcttccacatccccggcagaaccttccccgtggacatcctgttcagcaagaccccccaggaggactacgtggaggccgccgtgaagcagagcctgcaggtgcacctgagcggcgcccccggcgacatcctgatcttcatgcccggccaggaggacatcgaggtgaccagcgaccagatcgtggagcacctggaggagctggagaacgcccccgccctggccgtgctgcccatctacagccagctgcccagcgacctgcaggccaagatcttccagaaggcccccgacggcgtgagaaagtgcatcgtggccaccaacatcgccgagaccagcctgaccgtggacggcatcatgttcgtgatcgacagcggctactgcaagctgaaggtgttcaaccccagaatcggcatggacgccctgcagatctaccccatcagccaggccaacgccaaccagagaagcggcagagccggcagaaccggccccggccagtgcttcagactgtacacccagagcgcctacaagaacgagctgctgaccaccaccgtgcccgagatccagagaaccaacctggccaacgtggtgctgctgctgaagagcctgggcgtgcaggacctgctgcagttccacttcatggaccccccccccgaggacaacatgctgaacagcatgtaccagctgtggatcctgggcgccctggacaacaccggcggcctgaccagcaccggcagactgatggtggagttccccctggaccccgccctgagcaagatgctgatcgtgagctgcgacatgggctgcagcagcgagatcctgctgatcgtgagcatgctgagcgtgcccgccatcttctacagacccaagggcagagaggaggagagcgaccagatcagagagaagttcgccgtgcccgagagcgaccacctgacctacctgaacgtgtacctgcagtggaagaacaacaactacagcaccatctggtgcaacgaccacttcatccacgccaaggccatgagaaaggtgagagaggtgagagcccagctgaaggacatcatggtgcagcagagaatgagcctggccagctgcggcaccgactgggacatcgtgagaaagtgcatctgcgccgcctacttccaccaggccgccaagctgaagggcatcggcgagtacgtgaacatcagaaccggcatgccctgccacctgcaccccaccagcagcctgttcggcatgggctacacccccgactacatcgtgtaccacgagctggtgatgaccaccaaggagtacatgcagtgcgtgaccgccgtggacggcgagtggctggccgagctgggccccatgttctacagcgtgaagcaggccggcaagagcagacaggagaacagaagaagagccaaggaggaggccagcgccatggaggaggagatggccctggccgaggagcagctgagagccagaagacaggagcaggagaagagaagccccctgggcagcgtgagaagcaccaagatctacacccccggcagaaaggagcagggcgagcccatgacccccagaagaacccccgccagattcggcctgtag

SEQ ID NO: 78785 - DNA, 1620 bp, synthetic construct
  misc_feature 1..1620: note = Description of Artificial Sequence: Synthetic coding sequence
  source 1..1620: mol_type = other DNA
atgggcgacaccagcgaggacgccagcatccacagactggagggcaccgacctggactgccaggtgggcggcctgatctgcaagagcaagagcgccgccagcgagcagcacgtgttcaaggcccccgcccccagacccagcctgctgggcctggacctgctggccagcctgaagagaagagagagagaggagaaggacgacggcgaggacaagaagaagagcaaggtgagcagctacaaggactgggaggagagcaaggacgaccagaaggacgccgaggaggagggcggcgaccaggccaagatcttccagaaggcccccgacggcgtgagaaagtgcatcgtggccaccaacatcgccgagaccagcctgaccgtggacggcatcatgttcgtgatcgacagcggctactgcaagctgaaggtgttcaaccccagaatcggcatggacgccctgcagatctaccccatcagccaggccaacgccaaccagagaagcggcagagccggcagaaccggccccggccagtgcttcagactgtacacccagagcgcctacaagaacgagctgctgaccaccaccgtgcccgagatccagagaaccaacctggccaacgtggtgctgctgctgaagagcctgggcgtgcaggacctgctgcagttccacttcatggaccccccccccgaggacaacatgctgaacagcatgtaccagctgtggatcctgggcgccctggacaacaccggcggcctgaccagcaccggcagactgatggtggagttccccctggaccccgccctgagcaagatgctgatcgtgagctgcgacatgggctgcagcagcgagatcctgctgatcgtgagcatgctgagcgtgcccgccatcttctacagacccaagggcagagaggaggagagcgaccagatcagagagaagttcgccgtgcccgagagcgaccacctgacctacctgaacgtgtacctgcagtggaagaacaacaactacagcaccatctggtgcaacgaccacttcatccacgccaaggccatgagaaaggtgagagaggtgagagcccagctgaaggacatcatggtgcagcagagaatgagcctggccagctgcggcaccgactgggacatcgtgagaaagtgcatctgcgccgcctacttccaccaggccgccaagctgaagggcatcggcgagtacgtgaacatcagaaccggcatgccctgccacctgcaccccaccagcagcctgttcggcatgggctacacccccgactacatcgtgtaccacgagctggtgatgaccaccaaggagtacatgcagtgcgtgaccgccgtggacggcgagtggctggccgagctgggccccatgttctacagcgtgaagcaggccggcaagagcagacaggagaacagaagaagagccaaggaggaggccagcgccatggaggaggagatggccctggccgaggagcagctgagagccagaagacaggagcaggagaagagaagccccctgggcagcgtgagaagcaccaagatctacacccccggcagaaaggagcagggcgagcccatgacccccagaagaacccccgccagattcggcctgtag

SEQ ID NO: 78786 - DNA, 2340 bp, synthetic construct
  misc_feature 1..2340: note = Description of Artificial Sequence: Synthetic coding sequence
  source 1..2340: mol_type = other DNA
atgagcagattccccgccgtggccggcagagcccccagaagacaggaggagggcgagagaagcagagacctgcaggaggagagactgagcgccgtgtgcatcgccgacagagaggagaagggctgcaccagccaggagggcggcaccacccccaccttccccatccagaagcagagaaagaagatcatccaggccgtgagagacaacagcttcctgatcgtgaccggcaacaccggcagcggcaagaccacccagctgcccaagtacctgtacgaggccggcttcagccagcacggcatgatcggcgtgacccagcccagaaaggtggccgccatcagcgtggcccagagagtggccgaggagatgaagtgcaccctgggcagcaaggtgggctaccaggtgagattcgacgactgcagcagcaaggagaccgccatcaagtacatgaccgacggctgcctgctgaagcacatcctgggcgaccccaacctgaccaagttcagcgtgatcatcctggacgaggcccacgagagaaccctgaccaccgacatcctgttcggcctgctgaagaagctgttccaggagaagagccccaacagaaaggagcacctgaaggtggtggtgatgagcgccaccatggagctggccaagctgagcgccttcttcggcaactgccccatcttcgacatccccggcagactgtaccccgtgagagagaagttctgcaacctgatcggccccagagacagagagaacaccgcctacatccaggccatcgtgaaggtgaccatggacatccacctgaacgagatggccggcgacatcctggtgttcctgaccggccagttcgagatcgagaagagctgcgagctgctgttccagatggccgagagcgtggactacgactacgacgtgcaggacaccaccctggacggcctgctgatcctgccctgctacggcagcatgaccaccgaccagcagagaagaatcttcctgccccccccccccggcatcagaaagtgcgtgatcagcaccaacatcagcgccaccagcctgaccatcgacggcatcagatacgtggtggacggcggcttcgtgaagcagctgaaccacaaccccagactgggcctggacatcctggaggtggtgcccatcagcaagagcgaggccctgcagagaagcggcagagccggcagaaccagcagcggcaagtgcttcagaatctacagcaaggacttctggaaccagtgcatgcccgaccacgtgatccccgagatcaagagaaccagcctgaccagcgtggtgctgaccctgaagtgcctggccatccacgacgtgatcagattcccctacctggacccccccaacgagagactgatcctggaggccctgaagcagctgtaccagtgcgacgccatcgacagaagcggccacgtgaccagactgggcctgagcatggtggagttccccctgcccccccacctgacctgcgccgtgatcaaggccgccagcctggactgcgaggacctgctgctgcccatcgccgccatgctgagcgtggagaacgtgttcatcagacccgtggaccccgagtaccagaaggaggccgagcagagacacagagagctggccgccaaggccggcggcttcaacgacttcgccaccctggccgtgatcttcgagcagtgcaagagcagcggcgcccccgccagctggtgccagaagcactggatccactggagatgcctgttcagcgccttcagagtggaggcccagctgagagagctgatcagaaagctgaagcagcagagcgacttccccaaggagaccttcgagggccccaagcacgaggtgctgagaagatgcctgtgcgccggctacttcaagaacgtggccagaagaagcgtgggcagaaccttctgcaccatggacggcagaggcagccccgtgcacatccaccccagcagcgccctgcacgagcaggagaccaagctggagtggatcatcttccacgaggtgctggtgaccaccaaggtgtacgccagaatcgtgtgccccatcagatacgagtgggtgagagacctgctgcccaagctgcacgagttcaacgcccacgacctgagcagcgtggccagaagagaggtgagagaggacgccagaagaagatggaccaacaaggagaacgtgaagcagctgaaggacggcatcagcaaggacgtgctgaagaagatgcagagaagaaacgacgacaagagcatcagcgacgccagagccagattcctggagagaaagcagcagagaacccaggaccacagcgacaccagaaaggagaccggctag

SEQ ID NO: 78787 - DNA, 2169 bp, synthetic construct
  misc_feature 1..2169: note = Description of Artificial Sequence: Synthetic coding sequence
  source 1..2169: mol_type = other DNA
atgagcagattccccgccgtggccggcagagcccccagaagacaggaggagggcgagagaagcagagacctgcaggaggagagactgagcgccgtgtgcatcgccgacagagaggagaagggctgcaccagccaggagggcggcaccacccccaccttccccatccagaagcagagaaagaagatcatccaggccgtgagagacaacagcttcctgatcgtgaccggcaacaccggcagcggcaagaccacccagctgcccaagtacctgtacgaggccggcttcagccagcacggcatgatcggcgtgacccagcccagaaaggtggccgccatcagcgtggcccagagagtggccgaggagatgaagtgcaccctgggcagcaaggtgggctaccaggtgagattcgacgactgcagcagcaaggagaccgccatcaagtacatgaccgacggctgcctgctgaagcacatcctgggcgaccccaacctgaccaagttcagcgtgatcatcctggacgaggcccacgagagaaccctgaccaccgacatcctgttcggcctgctgaagaagctgttccaggagaagagccccaacagaaaggagcacctgaaggtggtggtgatgagcgccaccatggagctggccaagctgagcgccttcttcggcaactgccccatcttcgacatccccggcagactgtaccccgtgagagagaagttctgcaacctgatcggccccagagacagagagaacaccgcctacatccaggccatcgtgaaggtgaccatggacatccacctgaacgagatggccggcgacatcctggtgttcctgaccggccagttcgagatcgagaagagctgcgagctgctgttccagatggccgagagcgtggactacgactacgacgtgcaggacaccaccctggacggcctgctgatcctgccctgctacggcagcatgaccaccgaccagcagagaagaatcttcctgccccccccccccggcatcagaaagtgcgtgatcagcaccaacatcagcgccaccagcctgaccatcgacggcatcagatacgtggtggacggcggcttcgtgaagcagctgaaccacaaccccagactgggcctggacatcctggaggtggtgcccatcagcaagagcgaggccctgcagagaagcggcagagccggcagaaccagcagcggcaagtgcttcagaatctacagcaaggacttctggaaccagtgcatgcccgaccacgtgatccccgagatcaagagaaccagcctgaccagcgtggtgctgaccctgaagtgcctggccatccacgacgtgatcagattcccctacctggacccccccaacgagagactgatcctggaggccctgaagcagctgtaccagtgcgacgccatcgacagaagcggccacgtgaccagactgggcctgagcatggtggagttccccctgcccccccacctgacctgcgccgtgatcaaggccgccagcctggactgcgaggacctgctgctgcccatcgccgccatgctgagcgtggagaacgtgttcatcagacccgtggaccccgagtaccagaaggaggccgagcagagacacagagagctggccgccaaggccggcggcttcaacgacttcgccaccctggccgtgatcttcgagcagtgcaagagcagcggcgcccccgccagctggtgccagaagcactggatccactggagatgcctgttcagcgccttcagagtggaggcccagctgagagagctgatcagaaagctgaagcagcagagcgacttccccaaggagaccttcgagggccccaagcacgaggtgctgagaagatgcctgtgcgccggctacttcaagaacgtggccagaagaagcgtgggcagaaccttctgcaccatggacggcagaggcagccccgtgcacatccaccccagcagcgccctgcacgagcaggagaccaagctggagtggatcatcttccacgaggtgctggtgaccaccaaggtgtacgccagaatcgtgtgccccatcagatacgagtgggtgagagacctgctgcccaagctgcacgagttcaacgcccacgacctgagcagcgtggccagaagagaggtgagcaagatcaagctgttccagtag

SEQ ID NO: 78788 - DNA, 2196 bp, synthetic construct
  misc_feature 1..2196: note = Description of Artificial Sequence: Synthetic coding sequence
  source 1..2196: mol_type = other DNA
atgatcggcgtgacccagcccagaaaggtggccgccatcagcgtggcccagagagtggccgaggagatgaagtgcaccctgggcagcaaggtgggctaccaggtgagattcgacgactgcagcagcaaggagaccgccatcaagtacatgaccgacggctgcctgctgaagcacatcctgggcgaccccaacctgaccaagttcagcgtgatcatcctggacgaggcccacgagagaaccctgaccaccgacatcctgttcggcctgctgaagaagctgttccaggagaagagccccaacagaaaggagcacctgaaggtggtggtgatgagcgccaccatggagctggccaagctgagcgccttcttcggcaactgccccatcttcgacatccccggcagactgtaccccgtgagagagaagttctgcaacctgatcggccccagagacagagagaacaccgcctacatccaggccatcgtgaaggtgaccatggacatccacctgaacgagatggccggcgacatcctggtgttcctgaccggccagttcgagatcgagaagagctgcgagctgctgttccagatggccgagagcgtggactacgactacgacgtgcaggacaccaccctggacggcctgctgatcctgccctgctacggcagcatgaccaccgtgagccagaccagcctgaccttcgtgacccacatccagatcatgaagcagatcagcgagaaccagcacagcctgaccggcctgaccatcgccggcatcaccggcgtgagccaccacgccagacccagaaacatgacctgcaacgagaagctgaaccagcagagaagaatcttcctgccccccccccccggcatcagaaagtgcgtgatcagcaccaacatcagcgccaccagcctgaccatcgacggcatcagatacgtggtggacggcggcttcgtgaagcagctgaaccacaaccccagactgggcctggacatcctggaggtggtgcccatcagcaagagcgaggccctgcagagaagcggcagagccggcagaaccagcagcggcaagtgcttcagaatctacagcaaggacttctggaaccagtgcatgcccgaccacgtgatccccgagatcaagagaaccagcctgaccagcgtggtgctgaccctgaagtgcctggccatccacgacgtgatcagattcccctacctggacccccccaacgagagactgatcctggaggccctgaagcagctgtaccagtgcgacgccatcgacagaagcggccacgtgaccagactgggcctgagcatggtggagttccccctgcccccccacctgacctgcgccgtgatcaaggccgccagcctggactgcgaggacctgctgctgcccatcgccgccatgctgagcgtggagaacgtgttcatcagacccgtggaccccgagtaccagaaggaggccgagcagagacacagagagctggccgccaaggccggcggcttcaacgacttcgccaccctggccgtgatcttcgagcagtgcaagagcagcggcgcccccgccagctggtgccagaagcactggatccactggagatgcctgttcagcgccttcagagtggaggcccagctgagagagctgatcagaaagctgaagcagcagagcgacttccccaaggagaccttcgagggccccaagcacgaggtgctgagaagatgcctgtgcgccggctacttcaagaacgtggccagaagaagcgtgggcagaaccttctgcaccatggacggcagaggcagccccgtgcacatccaccccagcagcgccctgcacgagcaggagaccaagctggagtggatcatcttccacgaggtgctggtgaccaccaaggtgtacgccagaatcgtgtgccccatcagatacgagtgggtgagagacctgctgcccaagctgcacgagttcaacgcccacgacctgagcagcgtggccagaagagaggtgagagaggacgccagaagaagatggaccaacaaggagaacgtgaagcagctgaaggacggcatcagcaaggacgtgctgaagaagatgcagagaagaaacgacgacaagagcatcagcgacgccagagccagattcctggagagaaagcagcagagaacccaggaccacagcgacaccagaaaggagaccggctag

SEQ ID NO: 78789 - DNA, 2109 bp, synthetic construct
  misc_feature 1..2109: note = Description of Artificial Sequence: Synthetic coding sequence
  source 1..2109: mol_type = other DNA
atgagcagattccccgccgtggccggcagagcccccagaagacaggaggagggcgagagaagcagagacctgcaggaggagagactgagcgccgtgtgcatcgccgacagagaggagaagggctgcaccagccaggagggcggcaccacccccaccttccccatccagaagcagagaaagaagatcatccaggccgagaccgccatcaagtacatgaccgacggctgcctgctgaagcacatcctgggcgaccccaacctgaccaagttcagcgtgatcatcctggacgaggcccacgagagaaccctgaccaccgacatcctgttcggcctgctgaagaagctgttccaggagaagagccccaacagaaaggagcacctgaaggtggtggtgatgagcgccaccatggagctggccaagctgagcgccttcttcggcaactgccccatcttcgacatccccggcagactgtaccccgtgagagagaagttctgcaacctgatcggccccagagacagagagaacaccgcctacatccaggccatcgtgaaggtgaccatggacatccacctgaacgagatggccggcgacatcctggtgttcctgaccggccagttcgagatcgagaagagctgcgagctgctgttccagatggccgagagcgtggactacgactacgacgtgcaggacaccaccctggacggcctgctgatcctgccctgctacggcagcatgaccaccgaccagcagagaagaatcttcctgccccccccccccggcatcagaaagtgcgtgatcagcaccaacatcagcgccaccagcctgaccatcgacggcatcagatacgtggtggacggcggcttcgtgaagcagctgaaccacaaccccagactgggcctggacatcctggaggtggtgcccatcagcaagagcgaggccctgcagagaagcggcagagccggcagaaccagcagcggcaagtgcttcagaatctacagcaaggacttctggaaccagtgcatgcccgaccacgtgatccccgagatcaagagaaccagcctgaccagcgtggtgctgaccctgaagtgcctggccatccacgacgtgatcagattcccctacctggacccccccaacgagagactgatcctggaggccctgaagcagctgtaccagtgcgacgccatcgacagaagcggccacgtgaccagactgggcctgagcatggtggagttccccctgcccccccacctgacctgcgccgtgatcaaggccgccagcctggactgcgaggacctgctgctgcccatcgccgccatgctgagcgtggagaacgtgttcatcagacccgtggaccccgagtaccagaaggaggccgagcagagacacagagagctggccgccaaggccggcggcttcaacgacttcgccaccctggccgtgatcttcgagcagtgcaagagcagcggcgcccccgccagctggtgccagaagcactggatccactggagatgcctgttcagcgccttcagagtggaggcccagctgagagagctgatcagaaagctgaagcagcagagcgacttccccaaggagaccttcgagggccccaagcacgaggtgctgagaagatgcctgtgcgccggctacttcaagaacgtggccagaagaagcgtgggcagaaccttctgcaccatggacggcagaggcagccccgtgcacatccaccccagcagcgccctgcacgagcaggagaccaagctggagtggatcatcttccacgaggtgctggtgaccaccaaggtgtacgccagaatcgtgtgccccatcagatacgagtgggtgagagacctgctgcccaagctgcacgagttcaacgcccacgacctgagcagcgtggccagaagagaggtgagagaggacgccagaagaagatggaccaacaaggagaacgtgaagcagctgaaggacggcatcagcaaggacgtgctgaagaagatgcagagaagaaacgacgacaagagcatcagcgacgccagagccagattcctggagagaaagcagcagagaacccaggaccacagcgacaccagaaaggagaccggctag

SEQ ID NO: 78790 - DNA, 3663 bp, synthetic construct
  misc_feature 1..3663: note = Description of Artificial Sequence: Synthetic coding sequence
  source 1..3663: mol_type = other DNA
atggccgtggccgtggccatggccggcgccctgatcggcagcgagcccggccccgccgaggagctggccaagctggagtacctgagcctggtgagcaaggtgtgcaccgagctggacaaccacctgggcatcaacgacaaggacctggccgagttcgtgatcagcctggccgagaagaacaccaccttcgacaccttcaaggccagcctggtgaagaacggcgccgagttcaccgacagcctgatcagcaacctgctgagactgatccagaccatgagaccccccgccaagcccagcaccagcaaggaccccgtggtgaagcccaagaccgagaaggagaagctgaaggagctgttccccgtgctgtgccagcccgacaaccccagcgtgagaaccatgctggacgaggacgacgtgaaggtggccgtggacgtgctgaaggagctggaggccctgatgcccagcgccgccggccaggagaagcagagagacgccgagcacagagacagaaccaagaagaagaagagaagcagaagcagagacagaaacagagacagagacagagacagagagagaaacagagacagagaccacaagagaagacacagaagcagaagcagaagcagaagcagaaccagagagagaaacaaggtgaagagcagatacagaagcagaagcagaagccagagcccccccaaggacagaaaggacagagacaagtacggcgagagaaacctggacagatggagagacaagcacgtggacagacccccccccgaggagcccaccatcggcgacatctacaacggcaaggtgaccagcatcatgcagttcggctgcttcgtgcagctggagggcctgagaaagagatgggagggcctggtgcacatcagcgagctgagaagagagggcagagtggccaacgtggccgacgtggtgagcaagggccagagagtgaaggtgaaggtgctgagcttcaccggcaccaagaccagcctgagcatgaaggacgtggaccaggagaccggcgaggacctgaaccccaacagaagaagaaacctggtgggcgagaccaacgaggagaccagcatgagaaaccccgacagacccacccacctgagcctggtgagcgcccccgaggtggaggacgacagcctggagagaaagagactgaccagaatcagcgaccccgagaagtgggagatcaagcagatgatcgccgccaacgtgctgagcaaggaggagttccccgacttcgacgaggagaccggcatcctgcccaaggtggacgacgaggaggacgaggacctggagatcgagctggtggaggaggagccccccttcctgagaggccacaccaagcagagcatggacatgagccccatcaagatcgtgaagaaccccgacggcagcctgagccaggccgccatgatgcagagcgccctggccaaggagagaagagagctgaagcaggcccagagagaggccgagatggacagcatccccatgggcctgaacaagcactgggtggaccccctgcccgacgccgagggcagacagatcgccgccaacatgagaggcatcggcatgatgcccaacgacatccccgagtggaagaagcacgccttcggcggcaacaaggccagctacggcaagaagacccagatgagcatcctggagcagagagagagcctgcccatctacaagctgaaggagcagctggtgcaggccgtgcacgacaaccagatcctgatcgtgatcggcgagaccggcagcggcaagaccacccagatcacccagtacctggccgaggccggctacaccagcagaggcaagatcggctgcacccagcccagaagagtggccgccatgagcgtggccaagagagtgagcgaggagttcggctgctgcctgggccaggaggtgggctacaccatcagattcgaggactgcaccagccccgagaccgtgatcaagtacatgaccgacggcatgctgctgagagagtgcctgatcgaccccgacctgacccagtacgccatcatcatgctggacgaggcccacgagagaaccatccacaccgacgtgctgttcggcctgctgaagaagaccgtgcagaagagacaggacatgaagctgatcgtgaccagcgccaccctggacgccgtgaagttcagccagtacttctacgaggcccccatcttcaccatccccggcagaacctaccccgtggagatcctgtacaccaaggagcccgagaccgactacctggacgccagcctgatcaccgtgatgcagatccacctgaccgagccccccggcgacatcctggtgttcctgaccggccaggaggagatcgacaccgcctgcgagatcctgtacgagagaatgaagagcctgggccccgacgtgcccgagctgatcatcctgcccgtgtacagcgccctgcccagcgagatgcagaccagaatcttcgaccccgccccccccggcagcagaaaggtggtgatcgccaccaacatcgccgagaccagcctgaccatcgacggcatctactacgtggtggaccccggcttcgtgaagcagaaggtgtacaacagcaagaccggcatcgaccagctggtggtgacccccatcagccaggcccaggccaagcagagagccggcagagccggcagaaccggccccggcaagtgctacagactgtacaccgagagagcctacagagacgagatgctgaccaccaacgtgcccgagatccagagaaccaacctggccagcaccgtgctgagcctgaaggccatgggcatcaacgacctgctgagcttcgacttcatggacgccccccccatggagaccctgatcaccgccatggagcagctgtacaccctgggcgccctggacgacgagggcctgctgaccagactgggcagaagaatggccgagttccccctggagcccatgctgtgcaagatgctgatcatgagcgtgcacctgggctgcagcgaggagatgctgaccatcgtgagcatgctgagcgtgcagaacgtgttctacagacccaaggacaagcaggccctggccgaccagaagaaggccaagttccaccagaccgagggcgaccacctgaccctgctggccgtgtacaacagctggaagaacaacaagttcagcaacccctggtgctacgagaacttcatccaggccagaagcctgagaagagcccaggacatcagaaagcagatgctgggcatcatggacagacacaagctggacgtggtgagctgcggcaagagcaccgtgagagtgcagaaggccatctgcagcggcttcttcagaaacgccgccaagaaggacccccaggagggctacagaaccctgatcgaccagcaggtggtgtacatccaccccagcagcgccctgttcaacagacagcccgagtgggtggtgtaccacgagctggtgctgaccaccaaggagtacatgagagaggtgaccaccatcgaccccagatggctggtggagttcgcccccgccttcttcaaggtgagcgaccccaccaagctgagcaagcagaagaagcagcagagactggagcccctgtacaacagatacgaggagcccaacgcctggagaatcagcagagccttcagaagaagatag

SEQ ID NO: 78791 - DNA, 3546 bp, synthetic construct
  misc_feature 1..3546: note = Description of Artificial Sequence: Synthetic coding sequence
  source 1..3546: mol_type = other DNA
atggccgtggccgtggccatggccggcgccctgatcggcagcgagcccggccccgccgaggagctggccaagctggagtacctgagcctggtgagcaaggtgtgcaccgagctggacaaccacctgggcatcaacgacaaggacctggccgagttcgtgatcagcctggccgagaagaacaccaccttcgacaccttcaaggccagcctggtgaagaacggcgccgagttcaccgacagcctgatcagcaacctgctgagactgatccagaccatgagaccccccgccaagcccagcaccagcaaggaccccgtggtgaagcccaagaccgagaaggagaagctgaaggagctgttccccgtgctgtgccagcccgacaaccccagcgtgagaaccatgctggacgaggacgacgtgaaggtggccgtggacgtgctgaaggagctggaggccctgatgcccagcgccgccggccaggagaagcagagagacgccgagcacagagacagaaccaagaagaagaagagaagcagaagcagagacagaaacagagacagagacagagacagagagagaaacagagacagagaccacaagagaagacacagaagcagaagcagaagcagaagcagaaccagagagagaaacaaggtgaagagcagatacagaagcagaagcagaagccagagcccccccaaggacagaaaggacagagacaagtacggcgagagaaacctggacagatggagagacaagcacgtggacagacccccccccgaggagcccaccatcggcgacatctacaacggcaaggtgaccagcatcatgcagttcggctgcttcgtgcagctggagggcctgagaaagagatgggagggcctggtgcacatcagcgagctgagaagagagggcagagtggccaacgtggccgacgtggtgagcaagggccagagagtgaaggtgaaggtgctgagcttcaccggcaccaagaccagcctgagcatgaaggacgtggaccaggagaccggcgaggacctgaaccccaacagaagaagaaacctggtgggcgagaccaacgaggagaccagcatgagaaaccccgacagacccacccacctgagcctggtgagcgcccccgaggtggaggacgacagcctggagagaaagagactgaccagaatcagcgaccccgagaagtgggagatcaagcagatgatcgccgccaacgtgctgagcaaggaggagttccccgacttcgacgaggagaccggcatcctgcccaaggtggacgacgaggaggacgaggacctggagatcgagctggtggaggaggagccccccttcctgagaggccacaccaagcagagcatggacatgagccccatcaagatcgtgaagaaccccgacggcagcctgagccaggccgccatgatgcagagcgccctggccaaggagagaagagagctgaagcaggcccagagagaggccgagatggacagcatccccatgggcctgaacaagcactgggtggaccccctgcccgacgccgagggcagacagatcgccgccaacatgagaggcatcggcatgatgcccaacgacatccccgagtggaagaagcacgccttcggcggcaacaaggccagctacggcaagaagacccagatgagcatcctggagcagagagagagcctgcccatctacaagctgaaggagcagctggtgcaggccgtgcacgacaaccagatcctgatcgtgatcggcgagaccggcagcggcaagaccacccagatcacccagtacctggccgaggccggctacaccagcagaggcaagatcggctgcacccagcccagaagagtggccgccatgagcgtggccaagagagtgagcgaggagttcggctgctgcctgggccaggaggtgggctacaccatcagattcgaggactgcaccagccccgagaccgtgatcaagtacatgaccgacggcatgctgctgagagagtgcctgatcgaccccgacctgacccagtacgccatcatcatgctggacgaggcccacgagagaaccatccacaccgacgtgctgttcggcctgctgaagaagaccgtgcagaagagacaggacatgaagctgatcgtgaccagcgccaccctggacgccgtgaagttcagccagtacttctacgaggcccccatcttcaccatccccggcagaacctaccccgtggagatcctgtacaccaaggagcccgagaccgactacctggacgccagcctgatcaccgtgatgcagatccacctgaccgagccccccggcgacatcctggtgttcctgaccggccaggaggagatcgacaccgcctgcgagatcctgtacgagagaatgaagagcctgggccccgacgtgcccgagctgatcatcctgcccgtgtacagcgccctgcccagcgagatgcagaccagaatcttcgaccccgccccccccggcagcagaaaggtggtgatcgccaccaacatcgccgagaccagcctgaccatcgacggcatctactacgtggtggaccccggcttcgtgaagcagaaggtgtacaacagcaagaccggcatcgaccagctggtggtgacccccatcagccaggcccaggccaagcagagagccggcagagccggcagaaccggccccggcaagtgctacagactgtacaccgagagagcctacagagacgagatgctgaccaccaacgtgcccgagatccagagaaccaacctggccagcaccgtgctgagcctgaaggccatgggcatcaacgacctgctgagcttcgacttcatggacgccccccccatggagaccctgatcaccgccatggagcagctgtacaccctgggcgccctggacgacgagggcctgctgaccagactgggcagaagaatggccgagttccccctggagcccatgctgtgcaagatgctgatcatgagcgtgcacctgggctgcagcgaggagatgctgaccatcgtgagcatgctgagcgtgcagaacgtgttctacagacccaaggacaagcaggccctggccgaccagaagaaggccaagttccaccagaccgagggcgaccacctgaccctgctggccgtgtacaacagctggaagaacaacaagttcagcaacccctggtgctacgagaacttcatccaggccagaagcctgagaagagcccaggacatcagaaagcagatgctgggcatcatggacagacacaagctggacgtggtgagctgcggcaagagcaccgtgagagtgcagaaggccatctgcagcggcttcttcagaaacgccgccaagaaggacccccaggagggctacagaaccctgatcgaccagcaggtggtgtacatccaccccagcagcgccctgttcaacagacagcccgagtgccccaagcacttcctgcccgtggtggccgtggccgtgagcctggagcagtgcctgagcaagttcgaggacctgaacaaggagctgggcctggtgacctgctag

SEQ ID NO: 78792 - DNA, 3813 bp, synthetic construct
  misc_feature 1..3813: note = Description of Artificial Sequence: Synthetic coding sequence
  source 1..3813: mol_type = other DNA
atgggcgacgtgaagaacttcctgtacgcctggtgcggcaagagaaagatgacccccagctacgagatcagagccgtgggcaacaagaacagacagaagttcatgtgcgaggtgcaggtggagggctacaactacaccggcatgggcaacagcaccaacaagaaggacgcccagagcaacgccgccagagacttcgtgaactacctggtgagaatcaacgagatcaagagcgaggaggtgcccgccttcggcgtggccagccccccccccctgaccgacacccccgacaccaccgccaacgccgagggcgacctgcccaccaccatgggcggccccctgcccccccacctggccctgaaggccgagaacaacagcgaggtgggcgccagcggctacggcgtgcccggccccacctgggacagaggcgccaacctgaaggactactacagcagaaaggaggagcaggaggtgcaggccaccctggagagcgaggaggtggacctgaacgccggcctgcacggcaactggaccctggagaacgccaaggccagactgaaccagtacttccagaaggagaagatccagggcgagtacaagtacacccaggtgggccccgaccacaacagaagcttcatcgccgagatgaccatctacatcaagcagctgggcagaagaatcttcgccagagagcacggcagcaacaagaagctggccgcccagagctgcgccctgagcctggtgagacagctgtaccacctgggcgtggtggaggcctacagcggcctgaccaagaagaaggagggcgagaccgtggagccctacaaggtgaacctgagccaggacctggagcaccagctgcagaacatcatccaggagctgaacctggagatcctgcccccccccgaggaccccagcgtgcccgtggccctgaacatcggcaagctggcccagttcgagcccagccagagacagaaccaggtgggcgtggtgccctggagccccccccagagcaactggaacccctggaccagcagcaacatcgacgagggccccctggccttcgccacccccgagcagatcagcatggacctgaagaacgagctgatgtaccagctggagcaggaccacgacctgcaggccatcctgcaggagagagagctgctgcccgtgaagaagttcgagagcgagatcctggaggccatcagccagaacagcgtggtgatcatcagaggcgccaccggctgcggcaagaccacccaggtgccccagttcatcctggacgacttcatccagaacgacagagccgccgagtgcaacatcgtggtgacccagcccagaagaatcagcgccgtgagcgtggccgagagagtggccttcgagagaggcgaggagcccggcaagagctgcggctacagcgtgagattcgagagcatcctgcccagaccccacgccagcatcatgttctgcaccgtgggcgtgctgctgagaaagctggaggccggcatcagaggcatcagccacgtgatcgtggacgagatccacgagagagacatcaacaccgacttcctgctggtggtgctgagagacgtggtgcaggcctaccccgaggtgagaatcgtgctgatgagcgccaccatcgacaccagcatgttctgcgagtacttcttcaactgccccatcatcgaggtgtacggcagaacctaccccgtgcaggagtacttcctggaggactgcatccagatgacccacttcgtgcccccccccaaggacaagaagaagaaggacaaggacgacgacggcggcgaggacgacgacgccaactgcaacctgatctgcggcgacgagtacggccccgagaccagactgagcatgagccagctgaacgagaaggagacccccttcgagctgatcgaggccctgctgaagtacatcgagaccctgaacgtgcccggcgccgtgctggtgttcctgcccggctggaacctgatctacaccatgcagaagcacctggagatgaacccccacttcggcagccacagataccagatcctgcccctgcacagccagatccccagagaggagcagagaaaggtgttcgaccccgtgcccgtgggcgtgaccaaggtgatcctgagcaccaacatcgccgagaccagcatcaccatcaacgacgtggtgtacgtgatcgacagctgcaagcagaaggtgaagctgttcaccgcccacaacaacatgaccaactacgccaccgtgtgggccagcaagaccaacctggagcagagaaagggcagagccggcagagtgagacccggcttctgcttccacctgtgcagcagagccagattcgagagactggagacccacatgacccccgagatgttcagaacccccctgcacgagatcgccctgagcatcaagctgctgagactgggcggcatcggccagttcctggccaaggccatcgagcccccccccctggacgccgtgatcgaggccgagcacaccctgagagagctggacgccctggacgccaacgacgagctgacccccctgggcagaatcctggccaagctgcccatcgagcccagattcggcaagatgatgatcatgggctgcatcttctacgtgggcgacgccatctgcaccatcgccgccgccacctgcttccccgagcccttcatcaacgagggcaagagactgggctacatccacagaaacttcgccggcaacagattcagcgaccacgtggccctgctgagcgtgttccaggcctgggacgacgccagaatgggcggcgaggaggccgagatcagattctgcgagcacaagagactgaacatggccaccctgagaatgacctgggaggccaaggtgcagctgaaggagatcctgatcaacagcggcttccccgaggactgcctgctgacccaggtgttcaccaacaccggccccgacaacaacctggacgtggtgatcagcctgctggccttcggcgtgtaccccaacgtgtgctaccacaaggagaagagaaagatcctgaccaccgagggcagaaacgccctgatccacaagagcagcgtgaactgccccttcagcagccaggacatgaagtaccccagccccttcttcgtgttcggcgagaagatcagaaccagagccatcagcgccaagggcatgaccctggtgacccccctgcagctgctgctgttcgccagcaagaaggtgcagagcgacggccagatcgtgctggtggacgactggatcaagctgcagatcagccacgaggccgccgcctgcatcaccggcctgagagccgccatggaggccctggtggtggaggtgaccaagcagcccgccatcatcagccagctggaccccgtgaacgagagaatgctgaacatgatcagacagatcagcagacccagcgccgccggcatcaacctgatgatcggcagcaccagatacggcgacggccccagaccccccaagatggccagatacgacaacggcagcggctacagaagaggcggcagcagctacagcggcggcggctacggcggcggctacagcagcggcggctacggcagcggcggctacggcggcagcgccaacagcttcagagccggctacggcgccggcgtgggcggcggctacagaggcgtgagcagaggcggcttcagaggcaacagcggcggcgactacagaggccccagcggcggctacagaggcagcggcggcttccagagaggcggcggcagaggcgcctacggcaccggctacttcggccagggcagaggcggcggcggctactag

SEQ ID NO: 78793 - DNA, 1800 bp, synthetic construct
  misc_feature 1..1800: note = Description of Artificial Sequence: Synthetic coding sequence
  source 1..1800: mol_type = other DNA
atgggcgacgtgaagaacttcctgtacgcctggtgcggcaagagaaagatgacccccagctacgagatcagagccgtgggcaacaagaacagacagaagttcatgtgcgaggtgcaggtggagggctacaactacaccggcatgggcaacagcaccaacaagaaggacgcccagagcaacgccgccagagacttcgtgaactacctggtgagaatcaacgagatcaagagcgaggaggtgcccgccttcggcgtggccagccccccccccctgaccgacacccccgacaccaccgccaacgccgagggcgacctgcccaccaccatgggcggccccctgcccccccacctggccctgaaggccgagaacaacagcgaggtgggcgccagcggctacggcgtgcccggccccacctgggacagaggcgccaacctgaaggactactacagcagaaaggaggagcaggaggtgcaggccaccctggagagcgaggaggtggacctgaacgccggcctgcacggcaactggaccctggagaacgccaaggccagactgaaccagtacttccagaaggagaagatccagggcgagtacaagtacacccaggtgggccccgaccacaacagaagcttcatcgccgagatgaccatctacatcaagcagctgggcagaagaatcttcgccagagagcacggcagcaacaagaagctggccgcccagagctgcgccctgagcctggtgagacagctgtaccacctgggcgtggtggaggcctacagcggcctgaccaagaagaaggagggcgagaccgtggagccctacaaggtgaacctgagccaggacctggagcaccagctgcagaacatcatccaggagctgaacctggagatcctgcccccccccgaggaccccagcgtgcccgtggccctgaacatcggcaagctggcccagttcgagcccagccagagacagaaccaggtgggcgtggtgccctggagccccccccagagcaactggaacccctggaccagcagcaacatcgacgagggccccctggccttcgccacccccgagcagatcagcatggacctgaagaacgagctgatgtaccagctggagcaggaccacgacctgcaggccatcctgcaggagagagagctgctgcccgtgaagaagttcgagagcgagatcctggaggccatcagccagaacagcgtggtgatcatcagaggcgccaccggctgcggcaagaccacccaggtgccccagttcatcctggacgacttcatccagaacgacagagccgccgagtgcaacatcgtggtgacccagcccagaagaatcagcgccgtgagcgtggccgagagagtggccttcgagagaggcgaggagcccggcaagagctgcggctacagcgtgagattcgagagcatcctgcccagaccccacgccagcatcatgttctgcaccgtgggcgtgctgctgagaaagctggaggccggcatcagaggcatcagccacgtgatcgtggacgagatccacgagagagacatcaacaccgacttcctgctggtggtgctgagagacgtggtgcaggcctaccccgaggtgagaatcgtgctgatgagcgccaccatcgacaccagcatgttctgcgagtacttcttcaactgccccatcatcgaggtgtacggcagaacctaccccgtgcaggagtacttcctggaggactgcatccagatgacccacttcgtgcccccccccaaggacaagaagaagaaggacaagaagaagaagtag

SEQ ID NO: 78794 - DNA, 1197 bp, synthetic construct
  misc_feature 1..1197: note = Description of Artificial Sequence: Synthetic coding sequence
  source 1..1197: mol_type = other DNA
atgatgctgaagggcatcaccagactgatcagcagaatccacaagctggaccccggcagattcctgcacatgggcacccaggccagacagagcatcgccgcccacctggacaaccaggtgcccgtggagagccccagagccatcagcagaaccaacgagaacgaccccgccaagcacggcgaccagcacgagggccagcactacaacatcagcccccaggacctggagaccgtgttcccccacggcctgccccccagattcgtgatgcaggtgaagaccttcagcgaggcctgcctgatggtgagaaagcccgccctggagctgctgcactacctgaagaacaccagcttcgcctaccccgccatcagatacctgctgtacggcgagaagggcaccggcaagaccctgagcctgtgccacgtgatccacttctgcgccaagcaggactggctgatcctgcacatccccgacgcccacctgtgggtgaagaactgcagagacctgctgcagagcagctacaacaagcagagattcgaccagcccctggaggccagcacctggctgaagaacttcaagaccaccaacgagagattcctgaaccagatcaaggtgcaggagaagtacgtgtggaacaagagagagagcaccgagaagggcagccccctgggcgaggtggtggagcagggcatcaccagagtgagaaacgccaccgacgccgtgggcatcgtgctgaaggagctgaagagacagagcagcctgggcatgttccacctgctggtggccgtggacggcatcaacgccctgtggggcagaaccaccctgaagagagaggacaagagccccatcgcccccgaggagctggccctggtgcacaacctgagaaagatgatgaagaacgactggcacggcggcgccatcgtgagcgccctgagccagaccggcagcctgttcaagcccagaaaggcctacctgccccaggagctgctgggcaaggagggcttcgacgccctggaccccttcatccccatcctggtgagcaactacaaccccaaggagttcgagagctgcatccagtactacctggagaacaactggctgcagcacgagaaggcccccaccgaggagggcaagaaggagctgctgttcctgagcaacgccaaccccagcctgctggagagacactgcgcctacctgtag

SEQ ID NO: 78795 - DNA, 1197 bp, synthetic construct; identical to SEQ ID NO: 78794
  misc_feature 1..1197: note = Description of Artificial Sequence: Synthetic coding sequence
  source 1..1197: mol_type = other DNA

SEQ ID NO: 78796 - DNA, 1095 bp, synthetic construct
  misc_feature 1..1095: note = Description of Artificial Sequence: Synthetic coding sequence
  source 1..1095: mol_type = other DNA
atgatgctgaagggcatcaccagactgatcagcagaatccacaagctggaccccggcagattcctgcacatgggcacccaggccagacagagcatcgccgcccacctggacaaccaggtgcccgtggagagccccagagccatcagcagaaccaacgagaacgaccccgtgaagaccttcagcgaggcctgcctgatggtgagaaagcccgccctggagctgctgcactacctgaagaacaccagcttcgcctaccccgccatcagatacctgctgtacggcgagaagggcaccggcaagaccctgagcctgtgccacgtgatccacttctgcgccaagcaggactggctgatcctgcacatccccgacgcccacctgtgggtgaagaactgcagagacctgctgcagagcagctacaacaagcagagattcgaccagcccctggaggccagcacctggctgaagaacttcaagaccaccaacgagagattcctgaaccagatcaaggtgcaggagaagtacgtgtggaacaagagagagagcaccgagaagggcagccccctgggcgaggtggtggagcagggcatcaccagagtgagaaacgccaccgacgccgtgggcatcgtgctgaaggagctgaagagacagagcagcctgggcatgttccacctgctggtggccgtggacggcatcaacgccctgtggggcagaaccaccctgaagagagaggacaagagccccatcgcccccgaggagctggccctggtgcacaacctgagaaagatgatgaagaacgactggcacggcggcgccatcgtgagcgccctgagccagaccggcagcctgttcaagcccagaaaggcctacctgccccaggagctgctgggcaaggagggcttcgacgccctggaccccttcatccccatcctggtgagcaactacaaccccaaggagttcgagagctgcatccagtactacctggagaacaactggctgcagcacgagaaggcccccaccgaggagggcaagaaggagctgctgttcctgagcaacgccaaccccagcctgctggagagacactgcgcctacctgtag

SEQ ID NO: 78797 - DNA, 1074 bp, synthetic construct
  misc_feature 1..1074: note = Description of Artificial Sequence: Synthetic coding sequence
  source 1..1074: mol_type = other DNA
atgatgctgaagggcatcaccagactgatcagcagaatccacaaggccaagcacggcgaccagcacgagggccagcactacaacatcagcccccaggacctggagaccgtgttcccccacggcctgccccccagattcgtgatgcaggtgaagaccttcagcgaggcctgcctgatggtgagaaagcccgccctggagctgctgcactacctgaagaacaccagcttcgcctaccccgccatcagatacctgctgtacggcgagaagggcaccggcaagaccctgagcctgtgccacgtgatccacttctgcgccaagcaggactggctgatcctgcacatccccgacgcccacctgtgggtgaagaactgcagagacctgctgcagagcagctacaacaagcagagattcgaccagcccctggaggccagcacctggctgaagaacttcaagaccaccaacgagagattcctgaaccagatcaaggtgcaggagaagtacgtgtggaacaagagagagagcaccgagaagggcagccccctgggcgaggtggtggagcagggcatcaccagagtgagaaacgccaccgacgccgtgggcatcgtgctgaaggagctgaagagacagagcagcctgggcatgttccacctgctggtggccgtggacggcatcaacgccctgtggggcagaaccaccctgaagagagaggacaagagccccatcgcccccgaggagctggccctggtgcacaacctgagaaagatgatgaagaacgactggcacggcggcgccatcgtgagcgccctgagccagaccggcagcctgttcaagcccagaaaggcctacctgccccaggagctgctgggcaaggagggcttcgacgccctggaccccttcatccccatcctggtgagcaactacaaccccaaggagttcgagagctgcatccagtactacctggagaacaactggctgcagcacgagaaggcccccaccgaggagggcaagaaggagctgctgttcctgagcaacgccaaccccagcctgctggagagacactgcgcctacctgtag

SEQ ID NO: 78798 - DNA, 1047 bp, synthetic construct
  misc_feature 1..1047: note = Description of Artificial Sequence: Synthetic coding sequence
  source 1..1047: mol_type = other DNA
atggccggcctgaagagaagagccagccaggtgtggcccgaggagcacggcgagcaggagcacggcctgtacagcctgcacagaatgttcgacatcgtgggcacccacctgacccacagagacgtgagagtgctgagcttcctgttcgtggacgtgatcgacgaccacgagagaggcctgatcagaaacggcagagacttcctgctggccctggagagacagggcagatgcgacgagagcaacttcagacaggtgctgcagctgctgagaatcatcaccagacacgacctgctgccctacgtgaccctgaagagaagaagagccgtgtgccccgacctggtggacaagtacctggaggagaccagcatcagatacgtgacccccagagccctgagcgaccccgagcccagacccccccagcccagcaagaccgtgcccccccactaccccgtggtgtgctgccccaccagcggcccccagatgtgcagcaagagacccgccagaggcagagccaccctgggcagccagagaaagagaagaaagagcgtgacccccgaccccaaggagaagcagacctgcggcgaggaggtgcagggcttccagagatggagcagactggagggcgagtacaaggagctgctgggccactgggccgtgtacgccatccagtacatcagactgagagtgagagccgagtactgccagcacgagaccgccctgcagggcaacgtgttcagcaacaagcaggaccccctggagagacagttcgagagattcaaccaggccaacaccatcctgaagagcagagacctgggcagcatcatctgcgacatcaagttcagcgagctgacctacctggacgccttctggagagactacatcaacggcagcctgctggaggccctgaagggcgtgttcatcaccgacagcctgaagcaggccgtgggccacgaggccatcaagctgctggtgaacgtggacgaggaggactacgagctgggcagacagaagctgctgagaaacctgatgctgcaggccctgccctag

SEQ ID NO: 78799 - DNA, 957 bp, synthetic construct
  misc_feature 1..957: note = Description of Artificial Sequence: Synthetic coding sequence
  source 1..957: mol_type = other DNA
atggccggcctgaagagaagagccagccaggtgtggcccgaggagcacggcgagcaggagcacggcctgtacagcctgcacagaatgttcgacatcgtgggcacccacctgacccacagagacgtgagagtgctgagcttcctgttcgtggacgtgatcgacgaccacgagagaggcctgatcagaaacggcagagacttcctgctggccctggagagacagggcagatgcgacgagagcaacttcagacaggtgctgcagctgctgagaatcatcaccagacacgacctgctgccctacgtgaccctgaagagaagaagagccgtgtgccccgacctggtggacaagtacctggaggagaccagcatcagatacgtgacccccagagccctgagcgaccccgagcccagacccccccagcccagcaagaccgtgcccccccactaccccgtggtgtgctgccccaccagcggcccccagatgtgcagcaagagacccgccagaggcagagccaccctgggcagccagagaaagagaagaaagagcgtgacccccgaccccaaggagaagcagacctgcgacatcagactgagagtgagagccgagtactgccagcacgagaccgccctgcagggcaacgtgttcagcaacaagcaggaccccctggagagacagttcgagagattcaaccaggccaacaccatcctgaagagcagagacctgggcagcatcatctgcgacatcaagttcagcgagctgacctacctggacgccttctggagagactacatcaacggcagcctgctggaggccctgaagggcgtgttcatcaccgacagcctgaagcaggccgtgggccacgaggccatcaagctgctggtgaacgtggacgaggaggactacgagctgggcagacagaagctgctgagaaacctgatgctgcaggccctgccctag

SEQ ID NO: 78800 - DNA, 1047 bp, synthetic construct; identical to SEQ ID NO: 78798
  misc_feature 1..1047: note = Description of Artificial Sequence: Synthetic coding sequence
  source 1..1047: mol_type = other DNA

SEQ ID NO: 78801 - DNA, 957 bp, synthetic construct; identical to SEQ ID NO: 78799
  misc_feature 1..957: note = Description of Artificial Sequence: Synthetic coding sequence
  source 1..957: mol_type = other DNA

SEQ ID NO: 78802 - DNA, 828 bp, synthetic construct
  misc_feature 1..828: note = Description of Artificial Sequence: Synthetic coding sequence
  source 1..828: mol_type = other DNA
atggccggcctgaagagaagagccagccaggtgtggcccgaggagcacggcgagcaggagcacggcctgtacagcctgcacagaatgttcgacatcgtgggcacccacctgacccacagagacgtgctgcagctgctgagaatcatcaccagacacgacctgctgccctacgtgaccctgaagagaagaagagccgtgtgccccgacctggtggacaagtacctggaggagaccagcatcagatacgtgacccccagagccctgagcgaccccgagcccagacccccccagcccagcaagaccgtgcccccccactaccccgtggtgtgctgccccaccagcggcccccagatgtgcagcaagagacccgccagaggcagagccaccctgggcagccagagaaagagaagaaagagcgtgacccccgaccccaaggagaagcagacctgcgacatcagactgagagtgagagccgagtactgccagcacgagaccgccctgcagggcaacgtgttcagcaacaagcaggaccccctggagagacagttcgagagattcaaccaggccaacaccatcctgaagagcagagacctgggcagcatcatctgcgacatcaagttcagcgagctgacctacctggacgccttctggagagactacatcaacggcagcctgctggaggccctgaagggcgtgttcatcaccgacagcctgaagcaggccgtgggccacgaggccatcaagctgctggtgaacgtggacgaggaggactacgagctgggcagacagaagctgctgagaaacctgatgctgcaggccctgccctag

SEQ ID NO: 78803 - DNA, 957 bp, synthetic construct; identical to SEQ ID NO: 78799
  misc_feature 1..957: note = Description of Artificial Sequence: Synthetic coding sequence
  source 1..957: mol_type = other DNA

SEQ ID NO: 78804 - DNA, 957 bp, synthetic construct; identical to SEQ ID NO: 78799
  misc_feature 1..957: note = Description of Artificial Sequence: Synthetic coding sequence
  source 1..957: mol_type = other DNA

SEQ ID NO: 78805 - DNA, 1917 bp, synthetic construct
  misc_feature 1..1917: note = Description of Artificial Sequence: Synthetic coding sequence
  source 1..1917: mol_type = other DNA
atggacctgtggcagctgctgctgaccctggccctggccggcagcagcgacgccttcagcggcagcgaggccaccgccgccatcctgagcagagccccctggagcctgcagagcgtgaaccccggcctgaagaccaacagcagcaaggagcccaagttcaccaagtgcagaagccccgagagagagaccttcagctgccactggaccgacgaggtgcaccacggcaccaagaacctgggccccatccagctgttctacaccagaagaaacacccaggagtggacccaggagtggaaggagtgccccgactacgtgagcgccggcgagaacagctgctacttcaacagcagcttcaccagcatctggatcccctactgcatcaagctgaccagcaacggcggcaccgtggacgagaagtgcttcagcgtggacgagatcgtgcagcccgacccccccatcgccctgaactggaccctgctgaacgtgagcctgaccggcatccacgccgacatccaggtgagatgggaggcccccagaaacgccgacatccagaagggctggatggtgctggagtacgagctgcagtacaaggaggtgaacgagaccaagtggaagatgatggaccccatcctgaccaccagcgtgcccgtgtacagcctgaaggtggacaaggagtacgaggtgagagtgagaagcaagcagagaaacagcggcaactacggcgagttcagcgaggtgctgtacgtgaccctgccccagatgagccagttcacctgcgaggaggacttctacttcccctggctgctgatcatcatcttcggcatcttcggcctgaccgtgatgctgttcgtgttcctgttcagcaagcagcagagaatcaagatgctgatcctgccccccgtgcccgtgcccaagatcaagggcatcgaccccgacctgctgaaggagggcaagctggaggaggtgaacaccatcctggccatccacgacagctacaagcccgagttccacagcgacgacagctgggtggagttcatcgagctggacatcgacgagcccgacgagaagaccgaggagagcgacaccgacagactgctgagcagcgaccacgagaagagccacagcaacctgggcgtgaaggacggcgacagcggcagaaccagctgctgcgagcccgacatcctggagaccgacttcaacgccaacgacatccacgagggcaccagcgaggtggcccagccccagagactgaagggcgaggccgacctgctgtgcctggaccagaagaaccagaacaacagcccctaccacgacgcctgccccgccacccagcagcccagcgtgatccaggccgagaagaacaagccccagcccctgcccaccgagggcgccgagagcacccaccaggccgcccacatccagctgagcaaccccagcagcctgagcaacatcgacttctacgcccaggtgagcgacatcacccccgccggcagcgtggtgctgagccccggccagaagaacaaggccggcatgagccagtgcgacatgcaccccgagatggtgagcctgtgccaggagaacttcctgatggacaacgcctacttctgcgaggccgacgccaagaagtgcatccccgtggccccccacatcaaggtggagagccacatccagcccagcctgaaccaggaggacatctacatcaccaccgagagcctgaccaccgccgccggcagacccggcaccggcgagcacgtgcccggcagcgagatgcccgtgcccgactacaccagcatccacatcgtgcagagcccccagggcctgatcctgaacgccaccgccctgcccctgcccgacaaggagttcctgagcagctgcggctacgtgagcaccgaccagctgaacaagatcatgccctag

SEQ ID NO: 78806 - DNA, 1113 bp, synthetic construct
  misc_feature 1..1113: note = Description of Artificial Sequence: Synthetic coding sequence
  source 1..1113: mol_type = other DNA
atgttccaggccagcatgagaagccccaacatggagcccttcaagcagcagaaggtggaggacttctacgacatcggcgaggagctgggcagcggccagttcgccatcgtgaagaagtgcagagagaagagcaccggcctggagtacgccgccaagttcatcaagaagagacagagcagagccagcagaagaggcgtgagcagagaggagatcgagagagaggtgagcatcctgagacaggtgctgcaccacaacgtgatcaccctgcacgacgtgtacgagaacagaaccgacgtggtgctgatcctggagctggtgagcggcggcgagctgttcgacttcctggcccagaaggagagcctgagcgaggaggaggccaccagcttcatcaagcagatcctggacggcgtgaactacctgcacaccaagaagatcgcccacttcgacctgaagcccgagaacatcatgctgctggacaagaacatccccatcccccacatcaagctgatcgacttcggcctggcccacgagatcgaggacggcgtggagttcaagaacatcttcggcacccccgagttcgtggcccccgagatcgtgaactacgagcccctgggcctggaggccgacatgtggagcatcggcgtgatcacctacatcctgctgagcggcgccagccccttcctgggcgacaccaagcaggagaccctggccaacatcaccgccgtgagctacgacttcgacgaggagttcttcagccagaccagcgagctggccaaggacttcatcagaaagctgctggtgaaggagaccagaaagagactgaccatccaggaggccctgagacacccctggatcacccccgtggacaaccagcaggccatggtgagaagagagagcgtggtgaacctggagaacttcagaaagcagtacgtgagaagaagatggaagctgagcttcagcatcgtgagcctgtgcaaccacctgaccagaagcctgatgaagaaggtgcacctgagacccgacgaggacctgagaaactgcgagagcgacaccgaggaggacatcgccagaagaaaggccctgcaccccagaagaagaagcagcaccagctag

SEQ ID NO: 78807 - DNA, 1113 bp, synthetic construct; identical to SEQ ID NO: 78806
  misc_feature 1..1113: note = Description of Artificial Sequence: Synthetic coding sequence
  source 1..1113: mol_type = other DNA

SEQ ID NO: 78808 - DNA, 246 bp, synthetic construct
  misc_feature 1..246: note = Description of Artificial Sequence: Synthetic coding sequence
  source 1..246: mol_type = other DNA
atgttccaggccagcatgagaagccccaacatggagcccttcaagcagcagaaggtggaggacttctacgacatcggcgaggagctgggcagcggccagttcgccatcgtgaagaagtgcagagagaagagcaccggcctggagtacgccgccaagttcatcaagaagagacagagcagagccagcagaagaggcgtgagcagagaggagatcgagagagaggtgagcatcctgagacaggtgtag

SEQ ID NO: 78809 - DNA, 2223 bp, synthetic construct
  misc_feature 1..2223: note = Description of Artificial Sequence: Synthetic coding sequence
  source 1..2223: mol_type = other DNA
atggccaccgccaacagcatcatcgtgctggacgacgacgacgaggacgaggccgccgcccagcccggccccagccaccccctgcccaacgccgccagccccggcgccgaggcccccagcagcagcgagccccacggcgccagaggcagcagcagcagcggcggcaagaagtgctacaagctggagaacgagaagctgttcgaggagttcctggagctgtgcaagatgcagaccgccgaccaccccgaggtggtgcccttcctgtacaacagacagcagagagcccacagcctgttcctggccagcgccgagttctgcaacatcctgagcagagtgctgagcagagccagaagcagacccgccaagctgtacgtgtacatcaacgagctgtgcaccgtgctgaaggcccacagcgccaagaagaagctgaacctggcccccgccgccaccaccagcaacgagcccagcggcaacaacccccccacccacctgagcctggaccccaccaacgccgagaacaccgccagccagagccccagaaccagaggcagcagaagacagatccagagactggagcagctgctggccctgtacgtggccgagatcagaagactgcaggagaaggagctggacctgagcgagctggacgaccccgacagcgcctacctgcaggaggccagactgaagagaaagctgatcagactgttcggcagactgtgcgagctgaaggactgcagcagcctgaccggcagagtgatcgagcagagaatcccctacagaggcaccagataccccgaggtgaacagaagaatcgagagactgatcaacaagcccggccccgacaccttccccgactacggcgacgtgctgagagccgtggagaaggccgccgccagacacagcctgggcctgcccagacagcagctgcagctgatggcccaggacgccttcagagacgtgggcatcagactgcaggagagaagacacctggacctgatctacaacttcggctgccacctgaccgacgactacagacccggcgtggaccccgccctgagcgaccccgtgctggccagaagactgagagagaacagaagcctggccatgagcagactggacgaggtgatcagcaagtacgccatgctgcaggacaagagcgaggagggcgagagaaagaagagaagagccagactgcagggcaccagcagccacagcgccgacacccccgaggccagcctggacagcggcgagggccccagcggcatggccagccagggctgccccagcgccagcagagccgagaccgacgacgaggacgacgaggagagcgacgaggaggaggaggaggaggaggaggaggaggaggaggaggccaccgacagcgaggaggaggaggacctggagcagatgcaggagggccaggaggacgacgaggaggaggacgaggaggaggaggccgccgccggcaaggacggcgacaagagccccatgagcagcctgcagatcagcaacgagaagaacctggagcccggcaagcagatcagcagaagcagcggcgagcagcagaacaagggcagaatcgtgagccccagcctgctgagcgaggagcccctggcccccagcagcatcgacgccgagagcaacggcgagcagcccgaggagctgaccctggaggaggagagccccgtgagccagctgttcgagctggagatcgaggccctgcccctggacacccccagcagcgtggagaccgacatcagcagcagcagaaagcagagcgaggagcccttcaccaccgtgctggagaacggcgccggcatggtgagcagcaccagcttcaacggcggcgtgagcccccacaactggggcgacagcggccccccctgcaagaagagcagaaaggagaagaagcagaccggcagcggccccctgggcaacagctacgtggagagacagagaagcgtgcacgagaagaacggcaagaagatctgcaccctgcccagcccccccagccccctggccagcctggcccccgtggccgacagcagcaccagagtggacagccccagccacggcctggtgaccagcagcctgtgcatccccagccccgccagactgagccagaccccccacagccagccccccagacccggcacctgcaagaccagcgtggccacccagtgcgaccccgaggagatcatcgtgctgagcgacagcgactag

SEQ ID NO: 78810 - DNA, 2223 bp, synthetic construct; identical to SEQ ID NO: 78809
  misc_feature 1..2223: note = Description of Artificial Sequence: Synthetic coding sequence
  source 1..2223: mol_type = other DNA

SEQ ID NO: 78811 - DNA, 2223 bp, synthetic construct; identical to SEQ ID NO: 78809
  misc_feature 1..2223: note = Description of Artificial Sequence: Synthetic coding sequence
  source 1..2223: mol_type = other DNA

SEQ ID NO: 78812 - DNA, 2223 bp, synthetic construct; identical to SEQ ID NO: 78809
  misc_feature 1..2223: note = Description of Artificial Sequence: Synthetic coding sequence
  source 1..2223: mol_type = other DNA

SEQ ID NO: 78813 - DNA, 393 bp, synthetic construct
  misc_feature 1..393: note = Description of Artificial Sequence: Synthetic coding sequence
  source 1..393: mol_type = other DNA
atggccaccgccaacagcatcatcgtgctggacgacgacgacgaggacgaggccgccgcccagcccggccccagccaccccctgcccaacgccgccagccccggcgccgaggcccccagcagcagcgagccccacggcgccagaggcagcagcagcagcggcggcaagaagtgctacaagctggagaacgagaagctgttcgaggagttcctggagctgtgcaagatgcagaccgccgaccaccccgaggtggtgcccttcctgtacaacagacagcagagagcccacagcctgttcctggccagcgccgagttctgcaacatcctgagcagagtgctgagcagagccagaagcagacccgccaagctgtacgtgtacatcaacgagctgtag

SEQ ID NO: 78814 - DNA, 147 bp, synthetic construct
  misc_feature 1..147: note = Description of Artificial Sequence: Synthetic coding sequence
  source 1..147: mol_type = other DNA
atggccaccgccaacagcatcatcgtgctggacgacgacgacgaggacgaggccgccgcccagcccggccccagccaccccctgcccaacgccgccagccccggcgccgaggcccccagcagcagcgagccccacggcgccagatag

SEQ ID NO: 78815 - DNA, 393 bp, synthetic construct; identical to SEQ ID NO: 78813
  misc_feature 1..393: note = Description of Artificial Sequence: Synthetic coding sequence
  source 1..393: mol_type = other DNA

SEQ ID NO: 78816 - DNA, 147 bp, synthetic construct; identical to SEQ ID NO: 78814
  misc_feature 1..147: note = Description of Artificial Sequence: Synthetic coding sequence
  source 1..147: mol_type = other DNA

SEQ ID NO: 78817 - DNA, 537 bp, synthetic construct
  misc_feature 1..537: note = Description of Artificial Sequence: Synthetic coding sequence
  source 1..537: mol_type = other DNA
atggccaccgccaacagcatcatcgtgctggacgacgacgacgaggacgaggccgccgcccagcccggccccagccaccccctgcccaacgccgccagccccggcgccgaggcccccagcagcagcgagccccacggcgccagaggcagcagcagcagcggcggcaagaagtgctacaagctggagaacgagaagctgttcgaggagttcctggagctgtgcaagatgcagaccgccgaccaccccgaggtggtgcccttcctgtacaacagacagcagagagcccacagcctgttcctggccagcgccgagttctgcaacatcctgagcagagtgctgagcagagccagaagcagacccgccaagctgtacgtgtacatcaacgagctgtgcaccgtgctgaaggcccacagcgccaagaagaagctgaacctggcccccgccgccaccaccagcaacgagcccagcggcaacaacccccccacccacctgagcctggaccccaccaacgccgagaacaccgccagccagagctag

SEQ ID NO: 78818 - DNA, 537 bp, synthetic construct; identical to SEQ ID NO: 78817
  misc_feature 1..537: note = Description of Artificial Sequence: Synthetic coding sequence
  source 1..537: mol_type = other DNA

SEQ ID NO: 78819 - DNA, 2223 bp, synthetic construct; identical to SEQ ID NO: 78809
  misc_feature 1..2223: note = Description of Artificial Sequence: Synthetic coding sequence
  source 1..2223: mol_type = other DNA

SEQ ID NO: 78820 - DNA, 2223 bp, synthetic construct; identical to SEQ ID NO: 78809
  misc_feature 1..2223: note = Description of Artificial Sequence: Synthetic coding sequence
  source 1..2223: mol_type = other DNA

SEQ ID NO: 78821 - DNA, 393 bp, synthetic construct; identical to SEQ ID NO: 78813
  misc_feature 1..393: note = Description of Artificial Sequence: Synthetic coding sequence
  source 1..393: mol_type = other DNA

SEQ ID NO: 78822 - DNA, 537 bp, synthetic construct; identical to SEQ ID NO: 78817
  misc_feature 1..537: note = Description of Artificial Sequence: Synthetic coding sequence
  source 1..537: mol_type = other DNA

SEQ ID NO: 78823 - DNA, 2223 bp, synthetic construct; identical to SEQ ID NO: 78809
  misc_feature 1..2223: note = Description of Artificial Sequence: Synthetic coding sequence
  source 1..2223: mol_type = other DNA

SEQ ID NO: 78824 - DNA, 147 bp, synthetic construct; identical to SEQ ID NO: 78814
  misc_feature 1..147: note = Description of Artificial Sequence: Synthetic coding sequence
  source 1..147: mol_type = other DNA

SEQ ID NO: 78825 - DNA, 393 bp, synthetic construct; identical to SEQ ID NO: 78813
  misc_feature 1..393: note = Description of Artificial Sequence: Synthetic coding sequence
  source 1..393: mol_type = other DNA

SEQ ID NO: 78826 - DNA, 537 bp, synthetic construct; identical to SEQ ID NO: 78817
  misc_feature 1..537: note = Description of Artificial Sequence: Synthetic coding sequence
  source 1..537: mol_type = other DNA

SEQ ID NO: 78827 - DNA, 2223 bp, synthetic construct; identical to SEQ ID NO: 78809
  misc_feature 1..2223: note = Description of Artificial Sequence: Synthetic coding sequence
  source 1..2223: mol_type = other DNA

SEQ ID NO: 78828 - DNA, 147 bp, synthetic construct; identical to SEQ ID NO: 78814
  misc_feature 1..147: note = Description of Artificial Sequence: Synthetic coding sequence
  source 1..147: mol_type = other DNA

SEQ ID NO: 78829 - DNA, 1998 bp, synthetic construct
  misc_feature 1..1998: note = Description of Artificial Sequence: Synthetic coding sequence
  source 1..1998: mol_type = other DNA
atgcagaccgccgaccaccccgaggtggtgcccttcctgtacaacagacagcagagagcccacagcctgttcctggccagcgccgagttctgcaacatcctgagcagagtgctgagcagagccagaagcagacccgccaagctgtacgtgtacatcaacgagctgtgcaccgtgctgaaggcccacagcgccaagaagaagctgaacctggcccccgccgccaccaccagcaacgagcccagcggcaacaacccccccacccacctgagcctggaccccaccaacgccgagaacaccgccagccagagccccagaaccagaggcagcagaagacagatccagagactggagcagctgctggccctgtacgtggccgagatcagaagactgcaggagaaggagctggacctgagcgagctggacgaccccgacagcgcctacctgcaggaggccagactgaagagaaagctgatcagactgttcggcagactgtgcgagctgaaggactgcagcagcctgaccggcagagtgatcgagcagagaatcccctacagaggcaccagataccccgaggtgaacagaagaatcgagagactgatcaacaagcccggccccgacaccttccccgactacggcgacgtgctgagagccgtggagaaggccgccgccagacacagcctgggcctgcccagacagcagctgcagctgatggcccaggacgccttcagagacgtgggcatcagactgcaggagagaagacacctggacctgatctacaacttcggctgccacctgaccgacgactacagacccggcgtggaccccgccctgagcgaccccgtgctggccagaagactgagagagaacagaagcctggccatgagcagactggacgaggtgatcagcaagtacgccatgctgcaggacaagagcgaggagggcgagagaaagaagagaagagccagactgcagggcaccagcagccacagcgccgacacccccgaggccagcctggacagcggcgagggccccagcggcatggccagccagggctgccccagcgccagcagagccgagaccgacgacgaggacgacgaggagagcgacgaggaggaggaggaggaggaggaggaggaggaggaggaggccaccgacagcgaggaggaggaggacctggagcagatgcaggagggccaggaggacgacgaggaggaggacgaggaggaggaggccgccgccggcaaggacggcgacaagagccccatgagcagcctgcagatcagcaacgagaagaacctggagcccggcaagcagatcagcagaagcagcggcgagcagcagaacaagggcagaatcgtgagccccagcctgctgagcgaggagcccctggcccccagcagcatcgacgccgagagcaacggcgagcagcccgaggagctgaccctggaggaggagagccccgtgagccagctgttcgagctggagatcgaggccctgcccctggacacccccagcagcgtggagaccgacatcagcagcagcagaaagcagagcgaggagcccttcaccaccgtgctggagaacggcgccggcatggtgagcagcaccagcttcaacggcggcgtgagcccccacaactggggcgacagcggccccccctgcaagaagagcagaaaggagaagaagcagaccggcagcggccccctgggcaacagctacgtggagagacagagaagcgtgcacgagaagaacggcaagaagatctgcaccctgcccagcccccccagccccctggccagcctggcccccgtggccgacagcagcaccagagtggacagccccagccacggcctggtgaccagcagcctgtgcatccccagccccgccagactgagccagaccccccacagccagccccccagacccggcacctgcaagaccagcgtggccacccagtgcgaccccgaggagatcatcgtgctgagcgacagcgactag

SEQ ID NO: 78830 - DNA, 1998 bp, synthetic construct; identical to SEQ ID NO: 78829
  misc_feature 1..1998: note = Description of Artificial Sequence: Synthetic coding sequence
  source 1..1998: mol_type = other DNA

SEQ ID NO: 78831 - DNA, 1998 bp, synthetic construct; identical to SEQ ID NO: 78829
  misc_feature 1..1998: note = Description of Artificial Sequence: Synthetic coding sequence
  source 1..1998: mol_type = other DNA

SEQ ID NO: 78832 - DNA, 1998 bp, synthetic construct; identical to SEQ ID NO: 78829
  misc_feature 1..1998: note = Description of Artificial Sequence: Synthetic coding sequence
  source 1..1998: mol_type = other DNA

SEQ ID NO: 78833 - DNA, 1080 bp, synthetic construct
  misc_feature 1..1080: note = Description of Artificial Sequence: Synthetic coding sequence
  source 1..1080: mol_type = other DNA
atgaaggccaccatcatcctgctgctgctggcccaggtgagctgggccggccccttccagcagagaggcctgttcgacttcatgctggaggacgaggccagcggcatcggccccgaggtgcccgacgacagagacttcgagcccagcctgggccccgtgtgccccttcagatgccagtgccacctgagagtggtgcagtgcagcgacctgggcctggacaaggtgcccaaggacctgccccccgacaccaccctgctggacctgcagaacaacaagatcaccgagatcaaggacggcgacttcaagaacctgaagaacctgcacgccctgatcctggtgaacaacaagatcagcaaggtgagccccggcgccttcacccccctggtgaagctggagagactgtacctgagcaagaaccagctgaaggagctgcccgagaagatgcccaagaccctgcaggagctgagagcccacgagaacgagatcaccaaggtgagaaaggtgaccttcaacggcctgaaccagatgatcgtgatcgagctgggcaccaaccccctgaagagcagcggcatcgagaacggcgccttccagggcatgaagaagctgagctacatcagaatcgccgacaccaacatcaccagcatcccccagggcctgccccccagcctgaccgagctgcacctggacggcaacaagatcagcagagtggacgccgccagcctgaagggcctgaacaacctggccaagctgggcctgagcttcaacagcatcagcgccgtggacaacggcagcctggccaacaccccccacctgagagagctgcacctggacaacaacaagctgaccagagtgcccggcggcctggccgagcacaagtacatccaggtggtgtacctgcacaacaacaacatcagcgtggtgggcagcagcgacttctgcccccccggccacaacaccaagaaggccagctacagcggcgtgagcctgttcagcaaccccgtgcagtactgggagatccagcccagcaccttcagatgcgtgtacgtgagaagcgccatccagctgggcaactacaagtag

SEQ ID NO: 78834 - DNA, 7092 bp, synthetic construct
  misc_feature 1..7092: note = Description of Artificial Sequence: Synthetic coding sequence
  source 1..7092: mol_type = other DNA
atgcccgtgctgggcgtggccagcaagctgagacagcccgccgtgggcagcaagcccgtgcacaccgccctgcccatccccaacctgggcaccaccggcagccagcactgcagcagcagacccctggagctgaccgagaccgagagcagcatgctgagctgccagctggccctgaagagcacctgcgagttcggcgagaagaagcccctgcagggcaaggccaaggagaaggaggacagcaagatctacaccgactgggccaaccactacctggccaagagcggccacaagagactgatcaaggacctgcagcaggacatcgccgacggcgtgctgctggccgagatcatccagatcatcgccaacgagaaggtggaggacatcaacggctgccccagaagccagagccagatgatcgagaacgtggacgtgtgcctgagcttcctggccgccagaggcgtgaacgtgcagggcctgagcgccgaggagatcagaaacggcaacctgaaggccatcctgggcctgttcttcagcctgagcagatacaagcagcagcagcaccaccagcagcagtactaccagagcctggtggagctgcagcagagagtgacccacgccagcccccccagcgaggccagccaggccaagacccagcaggacatgcagagcagcctggccgccagatacgccacccagagcaaccacagcggcatcgccaccagccagaagaagcccaccagactgcccggccccagcagagtgcccgccgccggcagcagcagcaaggtgcagggcgccagcaacctgaacagaagaagccagagcttcaacagcatcgacaagaacaagccccccaactacgccaacggcaacgagaaggacagcagcaagggcccccagagcagcagcggcgtgaacggcaacgtgcagccccccagcaccgccggccagccccccgccagcgccatccccagccccagcgccagcaagccctggagaagcaagagcatgaacgtgaagcacagcgccaccagcaccatgctgaccgtgaagcagagcagcaccgccaccagccccacccccagcagcgacagactgaagccccccgtgagcgagggcgtgaagaccgcccccagcggccagaagagcatgctggagaagttcaagctggtgaacgccagaaccgccctgagacccccccagccccccagcagcggccccagcgacggcggcaaggacgacgacgccttcagcgagagcggcgagatggagggcttcaacagcggcctgaacagcggcggcagcaccaacagcagccccaaggtgagccccaagctggccccccccaaggccggcagcaagaacctgagcaacaagaagagcctgctgcagcccaaggagaaggaggagaagaacagagacaagaacaaggtgtgcaccgagaagcccgtgaaggaggagaaggaccaggtgaccgagatggcccccaagaagaccagcaagatcgccagcctgatccccaagggcagcaagaccaccgccgccaagaaggagagcctgatccccagcagcagcggcatccccaagcccggcagcaaggtgcccaccgtgaagcagaccatcagccccggcagcaccgccagcaaggagagcgagaagttcagaaccaccaagggcagccccagccagagcctgagcaagcccatcaccatggagaaggccagcgccagcagctgccccgcccccctggagggcagagaggccggccaggccagccccagcggcagctgcaccatgaccgtggcccagagcagcggccagagcaccggcaacggcgccgtgcagctgccccagcagcagcagcacagccaccccaacaccgccaccgtggcccccttcatctacagagcccacagcgagaacgagggcaccgccctgcccagcgccgacagctgcaccagccccaccaagatggacctgagctacagcaagaccgccaagcagtgcctggaggagatcagcggcgaggaccccgagaccagaagaatgagaaccgtgaagaacatcgccgacctgagacagaacctggaggagaccatgagcagcctgagaggcacccagatcagccacagcaccctggagaccaccttcgacagcaccgtgaccaccgaggtgaacggcagaaccatccccaacctgaccagcagacccacccccatgacctggagactgggccaggcctgccccagactgcaggccggcgacgcccccagcctgggcgccggctaccccagaagcggcaccagcagattcatccacaccgaccccagcagattcatgtacaccacccccctgagaagagccgccgtgagcagactgggcaacatgagccagatcgacatgagcgagaaggccagcagcgacctggacatgagcagcgaggtggacgtgggcggctacatgagcgacggcgacatcctgggcaagagcctgagaaccgacgacatcaacagcggctacatgaccgacggcggcctgaacctgtacaccagaagcctgaacagaatccccgacaccgccaccagcagagacatcatccagagaggcgtgcacgacgtgaccgtggacgccgacagctgggacgacagcagcagcgtgagcagcggcctgagcgacaccctggacaacatcagcaccgacgacctgaacaccaccagcagcgtgagcagctacagcaacatcaccgtgcccagcagaaagaacacccagctgagaaccgacagcgagaagagaagcaccaccgacgagacctgggacagccccgaggagctgaagaagcccgaggaggacttcgacagccacggcgacgccggcggcaagtggaagaccgtgagcagcggcctgcccgaggaccccgagaaggccggccagaaggccagcctgagcgtgagccagaccggcagctggagaagaggcatgagcgcccagggcggcgcccccagcagacagaaggccggcaccagcgccctgaagacccccggcaagaccgacgacgccaaggccagcgagaagggcaaggcccccctgaagggcagcagcctgcagagaagccccagcgacgccggcaagagcagcggcgacgagggcaagaagccccccagcggcatcggcagaagcaccgccaccagcagcttcggcttcaagaagcccagcggcgtgggcagcagcgccatgatcaccagcagcggcgccaccatcaccagcggcagcgccaccctgggcaagatccccaagagcgccgccatcggcggcaagagcaacgccggcagaaagaccagcctggacggcagccagaaccaggacgacgtggtgctgcacgtgagcagcaagaccaccctgcagtacagaagcctgcccagacccagcaagagcagcaccagcggcatccccggcagaggcggccacagaagcagcaccagcagcatcgacagcaacgtgagcagcaagagcgccggcgccaccaccagcaagctgagagagcccaccaagatcggcagcggcagaagcagccccgtgaccgtgaaccagaccgacaaggagaaggagaaggtggccgtgagcgacagcgagagcgtgagcctgagcggcagccccaagagcagccccaccagcgccagcgcctgcggcgcccagggcctgagacagcccggcagcaagtaccccgacatcgccagccccaccttcagaagactgttcggcgccaaggccggcggcaagagcgccagcgcccccaacaccgagggcgtgaagagcagcagcgtgatgcccagccccagcaccaccctggccagacagggcagcctggagagccccagcagcggcaccggcagcatgggcagcgccggcggcctgagcggcagcagcagccccctgttcaacaagcccagcgacctgaccaccgacgtgatcagcctgagccacagcctggccagcagccccgccagcgtgcacagcttcaccagcggcggcctggtgtgggccgccaacatgagcagcagcagcgccggcagcaaggacacccccagctaccagagcatgaccagcctgcacaccagcagcgagagcatcgacctgcccctgagccaccacggcagcctgagcggcctgaccaccggcacccacgaggtgcagagcctgctgatgagaaccggcagcgtgagaagcaccctgagcgagagcatgcagctggacagaaacaccctgcccaagaagggcctgagatacacccccagcagcagacaggccaaccaggaggagggcaaggagtggctgagaagccacagcaccggcggcctgcaggacaccggcaaccagagccccctggtgagccccagcgccatgagcagcagcgccgccggcaagtaccacttcagcaacctggtgagccccaccaacctgagccagttcaacctgcccggccccagcatgatgagaagcaacagcatccccgcccaggacagcagcttcgacctgtacgacgacagccagctgtgcggcagcgccaccagcctggaggagagacccagagccatcagccacagcggcagcttcagagacagcatggaggaggtgcacggcagcagcctgagcctggtgagcagcaccagcagcctgtacagcaccgccgaggccggcggcagcctggagcagatccacaagctgagaagagagctggtggccagccaggagaaggtggccaccctgaccagccagctgagcgccaacgcccacctggtggccgccttcgagaagagcctgggcaacatgaccggcagactgcagagcctgaccatgaccgccgagcagaaggagagcgagctgatcgagctgagagagaccatcgagatgctgaaggcccagaacagcgccgcccaggccgccatccagggcgccctgaacggccccgaccacccccccaaggacctgagaatcagaagacagcacagcagcgagagcgtgagcagcatcaacagcgccaccagccacagcagcatcggcagcggcaacgacgccgacagcaagaagaagaagaagaagaactgggtgaacagcagaggcagcgagctgagaagcagcttcaagcaggccttcggcaagaagaagagcaccaagccccccagcagccacagcgacatcgaggagctgaccgacagcagcctgcccgccagccccaagctgccccacaacgccggcgactgcggcagcgccagcatgaagcccagccagagcgccagcgccatctgcgagtgcaccgaggccgaggccgagatcatcctgcagctgaagagcgagctgagagagaaggagctgaagctgaccgacatcagactggaggccctgagcagcgcccaccacctggaccagatcagagaggccatgaacagaatgcagaacgagatcgagatcctgaaggccgagaacgacagactgaaggccgagaccggcaacaccgccaagcccaccagaccccccagcgagagcagcagcagcaccagcagcagcagcagcagacagagcctgggcctgagcctgaacaacctgaacatcaccgaggccgtgagcagcgacatcctgctggacgacgccggcgacgccaccggccacaaggacggcagaagcgtgaagatcatcgtgagcatcagcaagggctacggcagagccaaggaccagaagagccaggcctacctgatcggcagcatcggcgtgagcggcaagaccaagtgggacgtgctggacggcgtgatcagaagactgttcaaggagtacgtgttcagaatcgacaccagcaccagcctgggcctgagcagcgactgcatcgccagctactgcatcggcgacctgatcagaagccacaacctggaggtgcccgagctgctgccctgcggctacctggtgggcgacaacaacatcatcaccgtgaacctgaagggcgtggaggagaacagcctggacagcttcgtgttcgacaccctgatccccaagcccatcacccagagatacttcaacctgctgatggagcaccacagaatcatcctgagcggccccagcggcaccggcaagacctacctggccaacaagctggccgagtacgtgatcaccaagagcggcagaaagaagaccgaggacgccatcgccaccttcaacgtggaccacaagagcagcaaggagctgcagcagtacctggccaacctggccgagcagtgcagcgccgacaacaacggcgtggagctgcccgtggtgatcatcctggacaacctgcaccacgtgggcagcctgagcgacatcttcaacggcttcctgaactgcaagtacaacaagtgcccctacatcatcggcaccatgaaccagggcgtgagcagcagccccaacctggagctgcaccacaacttcagatgggtgctgtgcgccaaccacaccgagcccgtgaagggcttcctgggcagatacctgagaagaaagctgatcgagatcgagatcgagagaaacatcagaaacaacgacctggtgaagatcatcgactggatccccaagacctggcaccacctgaacagcttcctggagacccacagcagcagcgacgtgaccatcggccccagactgttcctgccctgccccatggacgtggagggcagcagagtgtggttcatggacctgtggaactacagcctggtgccctacatcctggaggccgtgagagagggcctgcagatgtacggcaagagaaccccctgggaggaccccagcaagtgggtgctggacacctacccctggagcagcgccaccctgccccaggagagccccgccctgctgcagctgagacccgaggacgtgggctacgagagctgcaccagcaccaaggaggccaccaccagcaagcacatcccccagaccgacaccgagggcgaccccctgatgaacatgctgatgaagctgcaggaggccgccaactacagcagcacccagagctgcgacagcgagagcaccagccaccacgaggacatcctggacagcagcctggagagcaccctgtag

SEQ ID NO: 78835 - DNA, 519 bp, synthetic construct
  misc_feature 1..519: note = Description of Artificial Sequence: Synthetic coding sequence
  source 1..519: mol_type = other DNA
atgaaggccaccatcatcctgctgctgctggcccaggtgagctgggccggccccttccagcagagaggcctgttcgacttcatgctggaggacgaggccagcggcatcggccccgaggtgcccgacgacagagacttcgagcccagcctgggccccgtgtgccccttcagatgccagtgccacctgagagtggtgcagtgcagcgacctgggcctggacaaggtgcccaaggacctgccccccgacaccaccctgctggacctgcagaacaacaagatcaccgagatcaaggacggcgacttcaagaacctgaagaacctgcacgtggtgtacctgcacaacaacaacatcagcgtggtgggcagcagcgacttctgcccccccggccacaacaccaagaaggccagctacagcggcgtgagcctgttcagcaaccccgtgcagtactgggagatccagcccagcaccttcagatgcgtgtacgtgagaagcgccatccagctgggcaactacaagtag

SEQ ID NO: 78836 - DNA, 1080 bp, synthetic construct; identical to SEQ ID NO: 78833
  misc_feature 1..1080: note = Description of Artificial Sequence: Synthetic coding sequence
  source 1..1080: mol_type = other DNA

SEQ ID NO: 78837 - DNA, 753 bp, synthetic construct
  misc_feature 1..753: note = Description of Artificial Sequence: Synthetic coding sequence
  source 1..753: mol_type = other DNA
atgaaggccaccatcatcctgctgctgctggcccaggtgagctgggccggccccttccagcagagaggcctgttcgacttcatgctggaggacgaggccagcggcatcggccccgaggtgcccgacgacagagacttcgagcccagcctgggccccgtgtgccccttcagatgccagtgccacctgagagtggtgcagtgcagcgacctggagctgggcaccaaccccctgaagagcagcggcatcgagaacggcgccttccagggcatgaagaagctgagctacatcagaatcgccgacaccaacatcaccagcatcccccagggcctgccccccagcctgaccgagctgcacctggacggcaacaagatcagcagagtggacgccgccagcctgaagggcctgaacaacctggccaagctgggcctgagcttcaacagcatcagcgccgtggacaacggcagcctggccaacaccccccacctgagagagctgcacctggacaacaacaagctgaccagagtgcccggcggcctggccgagcacaagtacatccaggtggtgtacctgcacaacaacaacatcagcgtggtgggcagcagcgacttctgcccccccggccacaacaccaagaaggccagctacagcggcgtgagcctgttcagcaaccccgtgcagtactgggagatccagcccagcaccttcagatgcgtgtacgtgagaagcgccatccagctgggcaactacaagtag

SEQ ID NO: 78838 - DNA, 639 bp, synthetic construct
  misc_feature 1..639: note = Description of Artificial Sequence: Synthetic coding sequence
  source 1..639: mol_type = other DNA
atgaaggccaccatcatcctgctgctgctggcccaggtgagctgggccggccccttccagcagagaggcctgttcgacttcatgctggaggacgaggccagcggcatcggccccgaggtgcccgacgacagagacttcgagcccagcctgggccccgtgtgccccttcagatgccagtgccacctgagagtggtgcagtgcagcgacctgggcctgccccccagcctgaccgagctgcacctggacggcaacaagatcagcagagtggacgccgccagcctgaagggcctgaacaacctggccaagctgggcctgagcttcaacagcatcagcgccgtggacaacggcagcctggccaacaccccccacctgagagagctgcacctggacaacaacaagctgaccagagtgcccggcggcctggccgagcacaagtacatccaggtggtgtacctgcacaacaacaacatcagcgtggtgggcagcagcgacttctgcccccccggccacaacaccaagaaggccagctacagcggcgtgagcctgttcagcaaccccgtgcagtactgggagatccagcccagcaccttcagatgcgtgtacgtgagaagcgccatccagctgggcaactacaagtag

SEQ ID NO: 78839 - DNA, 519 bp, synthetic construct; identical to SEQ ID NO: 78835
  misc_feature 1..519: note = Description of Artificial Sequence: Synthetic coding sequence
  source 1..519: mol_type = other DNA

SEQ ID NO: 78840 - DNA, 228 bp, synthetic construct
  misc_feature 1..228: note = Description of Artificial Sequence: Synthetic coding sequence
  source 1..228: mol_type = other DNA
atgaaggccaccatcatcctgctgctgctggcccaggtgagctgggccggccccttccagcagagaggcctgttcgacttcatgctggaggacgaggccagcggcatcggccccgaggtgcccgacgacagagacttcgagcccagcctgggccccgtgtgccccttcagatgccagtgccacctgagagtggtgcagtgcagcgacctgggctgcctgcccagctag

SEQ ID NO: 78841 - DNA, 639 bp, synthetic construct; identical to SEQ ID NO: 78838
  misc_feature 1..639: note = Description of Artificial Sequence: Synthetic coding sequence
  source 1..639: mol_type = other DNA

SEQ ID NO: 78842 - DNA, 540 bp, synthetic construct
  misc_feature 1..540: note = Description of Artificial Sequence: Synthetic coding sequence
  source 1..540: mol_type = other DNA
atgaaggccaccatcatcctgctgctgctggcccaggtgagctgggccggccccttccagcagagaggcctgttcgacttcatgctggaggacgaggccagcggcatcggccccgaggtgcccgacgacagagacttcgagcccagcctgggccccgtgtgccccttcagatgccagtgccacctgagagtggtgcagtgcagcgacctgggcctggacaaggtgcccaaggacctgccccccgacaccaccctgctggacctgcagaacaacaagatcaccgagatcaaggacggcgacttcaagaacctgaagaacctgcacgccctgatcctggtgaacaacaagatcagcaaggtgagccccggcgccttcacccccctggtgaagctggagagactgtacctgagcaagaaccagctgaaggagctgcccgagaagatgcccaagaccctgcaggagctgagagcccacgagaacgagatcaccaaggtgagaaaggtgaccttcaacggcctgaaccagatgatcgtgatctag

SEQ ID NO: 78843 - DNA, 360 bp, synthetic construct
  misc_feature 1..360: note = Description of Artificial Sequence: Synthetic coding sequence
  source 1..360: mol_type = other DNA
atgaaggccaccatcatcctgctgctgctggcccaggtgagctgggccggccccttccagcagagaggcctgttcgacttcatgctggaggacgaggccagcggcatcggccccgaggtgcccgacgacagagacttcgagcccagcctgggccccgtgtgccccttcagatgccagtgccacctgagagtggtgcagtgcagcgacctgggcctggacaaggtgcccaaggacctgccccccgacaccaccctgctggacctgcagaacaacaagatcaccgagatcaaggacggcgacttcaagaacctgaagaacctgcacgccctgatcctggtgaacaacaagatcagcaagtag

SEQ ID NO: 78844 - DNA, 525 bp, synthetic construct
  misc_feature 1..525: note = Description of Artificial Sequence: Synthetic coding sequence
  source 1..525: mol_type = other DNA
atgaaggccaccatcatcctgctgctgctggcccaggtgagctgggccggccccttccagcagagaggcctgttcgacttcatgctggaggacgaggccagcggcatcggccccgaggtgcccgacgacagagacttcgagcccagcctgggccccgtgtgccccttcagatgccagtgccacctgagagtggtgcagtgcagcgacctgggcctggacaaggtgcccaaggacctgccccccgacaccaccctgctggacctgcagaacaacaagatcaccgagatcaaggacggcgacttcaagaacctgaagaacctgcacgccctgatcctggtgaacaacaagatcagcaaggtgagccccggcgccttcacccccctggtgaagctggagagactgtacctgagcaagaaccagctgaaggagctgcccgagaagatgcccaagaccctgcaggagctgagagcccacgagaacgagatcaccaaggtgagaaaggtgaccttcaacggcctgaactag

SEQ ID NO: 78845 - DNA, 537 bp, synthetic construct
  misc_feature 1..537: note = Description of Artificial Sequence: Synthetic coding sequence
  source 1..537: mol_type = other DNA
atgaaggccaccatcatcctgctgctgctggcccaggtgagctgggccggccccttccagcagagaggcctgttcgacttcatgctggaggacgaggccagcggcatcggccccgaggtgcccgacgacagagacttcgagcccagcctgggccccgtgtgccccttcagatgccagtgccacctgagagtggtgcagtgcagcgacctgggcctggacaaggtgcccaaggacctgccccccgacaccaccctgctggacctgcagaacaacaagatcaccgagatcaaggacggcgacttcaagaacctgaagaacctgcacgccctgatcctggtgaacaacaagatcagcaaggtgagccccggcgccttcacccccctggtgaagctggagagactgtacctgagcaagaaccagctgaaggagctgcccgagaagatgcccaagaccctgcaggagctgagagcccacgagaacgagatcaccaaggtgagaaaggtgaccttcaacggcctgaaccagatgatcgtgtag

SEQ ID NO: 78846 - DNA, 1080 bp, synthetic construct; identical to SEQ ID NO: 78833
  misc_feature 1..1080: note = Description of Artificial Sequence: Synthetic coding sequence
  source 1..1080: mol_type = other DNA

SEQ ID NO: 78847 - DNA, 5598 bp, synthetic construct
  misc_feature 1..5598: note = Description of Artificial Sequence: Synthetic coding sequence
  source 1..5598: mol_type = other DNA
atgaccagatgggtgcccaccaagagagaggagaagtacggcgtggccttctacaactacgacgccagaggcgccgacgagctgagcctgcagatcggcgacaccgtgcacatcctggagacctacgagggctggtacagaggctacaccctgagaaagaagagcaagaagggcatcttccccgccagctacatccacctgaaggaggccatcgtggagggcaagggccagcacgagaccgtgatccccggcgacctgcccctgatccaggaggtgaccaccaccctgagagagtggagcaccatctggagacagctgtacgtgcaggacaacagagagatgttcagaagcgtgagacacatgatctacgacctgatcgagtggagaagccagatcctgagcggcaccctgccccaggacgagctgaaggagctgaagaagaaggtgaccgccaagatcgactacggcaacagaatcctggacctggacctggtggtgagagacgaggacggcaacatcctggaccccgagctgaccagcaccatcagcctgttcagagcccacgagatcgccagcaagcaggtggaggagagactgcaggaggagaagagccagaagcagaacatcgacatcaacagacaggccaagttcgccgccacccccagcctggccctgttcgtgaacctgaagaacgtggtgtgcaagatcggcgaggacgccgaggtgctgatgagcctgtacgaccccgtggagagcaagttcatcagcgagaactacctggtgagatggagcagcagcggcctgcccaaggacatcgacagactgcacaacctgagagccgtgttcaccgacctgggcagcaaggacctgaagagagagaagatcagcttcgtgtgccagatcgtgagagtgggcagaatggagctgagagacaacaacaccagaaagctgaccagcggcctgagaagacccttcggcgtggccgtgatggacgtgaccgacatcatcaacggcaaggtggacgacgaggacaagcagcacttcatccccttccagcccgtggccggcgagaacgacttcctgcagaccgtgatcaacaaggtgatcgccgccaaggaggtgaaccacaagggccagggcctgtgggtgaccctgaagctgctgcccggcgacatccaccagatcagaaaggagttcccccacctggtggacagaaccaccgccgtggccagaaagaccggcttccccgagatcatcatgcccggcgacgtgagaaacgacatctacgtgaccctggtgcagggcgacttcgacaagggcagcaagaccaccgccaagaacgtggaggtgaccgtgagcgtgtacgacgaggacggcaagagactggagcacgtgatcttccccggcgccggcgacgaggccatcagcgagtacaagagcgtgatctactaccaggtgaagcagcccagatggttcgagaccgtgaaggtggccatccccatcgaggacgtgaacagaagccacctgagattcaccttcagacacagaagcagccaggacagcaaggacaagagcgagaagatcttcgccctggccttcgtgaagctgatgagatacgacggcaccaccctgagagacggcgagcacgacctgatcgtgtacaaggccgaggccaagaagctggaggacgccgccacctacctgagcctgcccagcaccaaggccgagctggaggagaagggccacagcgccaccggcaagagcatgcagagcctgggcagctgcaccatcagcaaggacagcttccagatcagcaccctggtgtgcagcaccaagctgacccagaacgtggacctgctgggcctgctgaagtggagaagcaacaccagcctgctgcagcagaacctgagacagctgatgaaggtggacggcggcgaggtggtgaagttcctgcaggacaccctggacgccctgttcaacatcatgatggagaacagcgagagcgagaccttcgacaccctggtgttcgacgccctggtgttcatcatcggcctgatcgccgacagaaagttccagcacttcaaccccgtgctggagacctacatcaagaagcacttcagcgccaccctggcctacaccaagctgaccaaggtgctgaagaactacgtggacggcgccgagaagcccggcgtgaacgagcagctgtacaaggccatgaaggccctggagagcatcttcaagttcatcgtgagaagcagaatcctgttcaaccagctgtacgagaacaagggcgaggccgacttcgtggagagcctgctgcagctgttcagaagcatcaacgacatgatgagcagcatgagcgaccagaccgtgagagtgaagggcgccgccctgaagtacctgcccaccatcgtgaacgacgtgaagctggtgttcgaccccaaggagctgagcaagatgttcaccgagttcatcctgaacgtgcccatgggcctgctgaccatccagaagctgtactgcctgatcgagatcgtgcacagcgacctgttcacccagcacgactgcagagagatcctgctgcccatgatgaccgaccagctgaagtaccacctggagagacaggaggacctggaggcctgctgccagctgctgagccacatcctggaggtgctgtacagaaaggacgtgggccccacccagagacacgtgcagatcatcatggagaagctgctgagaaccgtgaacagaaccgtgatcagcatgggcagagacagcgagctgatcggcaacttcgtggcctgcatgaccgccatcctgagacagatggaggactaccactacgcccacctgatcaagaccttcggcaagatgagaaccgacgtggtggacttcctgatggagaccttcatcatgttcaagaacctgatcggcaagaacgtgtaccccttcgactgggtgatcatgaacatggtgcagaacaaggtgttcctgagagccatcaaccagtacgccgacatgctgaacaagaagttcctggaccaggccaacttcgagctgcagctgtggaacaactacttccacctggccgtggccttcctgacccaggagagcctgcagctggagaacttcagcagcgccaagagagccaagatcctgaacaagtacggcgacatgagaagacagatcggcttcgagatcagagacatgtggtacaacctgggccagcacaagatcaagttcatccccgagatggtgggccccatcctggagatgaccctgatccccgagaccgagctgagaaaggccaccatccccatcttcttcgacatgatgcagtgcgagttccacagcaccagaagcttccagatgttcgagaacgagatcatcaccaagctggaccacgaggtggagggcggcagaggcgacgagcagtacaaggtgctgttcgacaagatcctgctggagcactgcagaaagcacaagtacctggccaagaccggcgagaccttcgtgaagctggtggtgagactgatggagagactgctggactacagaaccatcatgcacgacgagaacaaggagaacagaatgagctgcaccgtgaacgtgctgaacttctacaaggagatcgagagagaggagatgtacatcagatacctgtacaagctgtgcgacctgcacaaggagtgcgacaactacaccgaggccgcctacaccctgctgctgcacgccaagctgctgaagtggagcgaggacgtgtgcgtggcccacctgacccagagagacggctaccaggccaccacccagggccagctgaaggagcagctgtaccaggagatcatccactacttcgacaagggcaagatgtgggaggaggccatcgccctgggcaaggagctggccgagcagtacgagaacgagatgttcgactacgagcagctgagcgagctgctgaagaagcaggcccagttctacgagaacatcgtgaaggtgatcagacccaagcccgactacttcgccgtgggctactacggccagggcttccccaccttcctgagaggcaaggtgttcatctacagaggcaaggagtacgagagaagagaggacttcgaggccagactgctgacccagttccccaacgccgagaagatgaagaccaccagcccccccggcgacgacatcaagaacagccccggccagtacatccagtgcttcaccgtgaagcccaagctggacctgccccccaagttccacagacccgtgagcgagcagatcgtgagcttctacagagtgaacgaggtgcagagattcgagtacagcagacccatcagaaagggcgagaagaaccccgacaacgagttcgccaacatgtggatcgagagaaccatctacaccaccgcctacaagctgcccggcatcctgagatggttcgaggtgaagagcgtgttcatggtggagatcagccccctggagaacgccatcgagaccatgcagctgaccaacgacaagatcaacagcatggtgcagcagcacctggacgaccccagcctgcccatcaaccccctgagcatgctgctgaacggcatcgtggaccccgccgtgatgggcggcttcgccaactacgagaaggccttcttcaccgacagatacctgcaggagcaccccgaggcccacgagaagatcgagaagctgaaggacctgatcgcctggcagatccccttcctggccgagggcatcagaatccacggcgacaaggtgaccgaggccctgagacccttccacgagagaatggaggcctgcttcaagcagctgaaggagaaggtggagaaggagtacggcgtgagaatcatgcccagcagcctggacgacagaagaggcagcagacccagaagcatggtgagaagcttcaccatgcccagcagcagcagacccctgagcgtggccagcgtgagcagcctgagcagcgacagcacccccagcagacccggcagcgacggcttcgccctggagcccctgctgcccaagaagatgcacagcagaagccaggacaagctggacaaggacgacctggagaaggagaagaaggacaagaagaaggagaagagaaacagcaagcaccaggagatcttcgagaaggagttcaagcccaccgacatcagcctgcagcagagcgaggccgtgatcctgagcgagaccatcagccccctgagaccccagagacccaagagccaggtgatgaacgtgatcggcagcgagagaagattcagcgtgagccccagcagccccagcagccagcagacccccccccccgtgacccccagagccaagctgagcttcagcatgcagagcagcctggagctgaacggcatgaccggcgccgacgtggccgacgtgcccccccccctgcccctgaagggcagcgtggccgactacggcaacctgatggagaaccaggacctgctgggcagccccacccccccccccccccccccccaccagagacacctgcccccccccctgcccagcaagaccccccccccccccccccccaagaccaccagaaagcaggccagcgtggacagcggcatcgtgcagtag

SEQ ID NO: 78848 - DNA, 6561 bp, synthetic construct
  misc_feature 1..6561: note = Description of Artificial Sequence: Synthetic coding sequence
  source 1..6561: mol_type = other DNA
atggccggcgagagaaccagaagattcaccagaagcctgctgagacccggccaggccgccgagctgagacacagcgccgccagcgccgccgccgtggccgtgagcagcagacagcagcagagacaggagaagcccagactgctggagcccctggactacgagaccgtgatcgaggagctggagaagacctacagaaacgaccccctgcaggacctgctgttcttccccagcgacgacttcagcgccgccaccgtgagctgggacatcagaaccctgtacagcaccgtgcccgaggacgccgagcacaaggccgagaacctgctggtgaaggaggcctgcaagttctacagcagccagtggcacgtggtgaactacaagtacgagcagtacagcggcgacatcagacagctgcccagagccgagtacaagcccgagaagctgcccagccacagcttcgagatcgaccacgaggacgccgacaaggacgaggacaccaccagccacagcagcagcaagggcggcggcggcgccggcggcaccggcgtgttcaagagcggctggctgtacaagggcaacttcaacagcaccgtgaacaacaccgtgaccgtgagaagcttcaagaagagatacttccagctgacccagctgcccgacaacagctacatcatgaacttctacaaggacgagaagatcagcaaggagcccaagggctgcatcttcctggacagctgcaccggcgtggtgcagaacaacagactgagaaagtacgccttcgagctgaagatgaacgacctgacctacttcgtgctggccgccgagaccgagagcgacatggacgagtggatccacaccctgaacagaatcctgcagatcagccccgagggccccctgcagggcagaagaagcaccgagctgaccgacctgggcctggacagcctggacaacagcgtgacctgcgagtgcacccccgaggagaccgacagcagcgagaacaacctgcacgccgacttcgccaagtacctgaccgagaccgaggacaccgtgaagaccaccagaaacatggagagactgaacctgttcagcctggaccccgacatcgacaccctgaagctgcagaagaaggacctgctggagcccgagagcgtgatcaagcccttcgaggagaaggccgccaagagaatcatgatcatctgcaaggccctgaacagcaacctgcagggctgcgtgaccgagaacgagaacgaccccatcaccaacatcgagcccttcttcgtgagcgtggccctgtacgacctgagagacagcagaaagatcagcgccgacttccacgtggacctgaaccacgccgccgtgagacagatgctgctgggcgccagcgtggccctggagaacggcaacatcgacaccatcacccccagacagagcgaggagccccacatcaagggcctgcccgaggagtggctgaagttccccaagcaggccgtgttcagcgtgagcaacccccacagcgagatcgtgctggtggccaagatcgagaaggtgctgatgggcaacatcgccagcggcgccgagccctacatcaagaaccccgacagcaacaagtacgcccagaagatcctgaagagcaacagacagttctgcagcaagctgggcaagtacagaatgcccttcgcctgggccgtgagaagcgtgttcaaggacaaccagggcaacgtggacagagacagcagattcagccccctgttcagacaggagagcagcaagatcagcaccgaggacctggtgaagctggtgagcgactacagaagagccgacagaatcagcaagatgcagaccatccccggcagcctggacatcgccgtggacaacgtgcccctggagcaccccaactgcgtgaccagcagcttcatccccgtgaagcccttcaacatgatggcccagaccgagcccaccgtggaggtggaggagttcgtgtacgacagcaccaagtactgcagaccctacagagtgtacaagaaccagatctacatctaccccaagcacctgaagtacgacagccagaagtgcttcaacaaggccagaaacatcaccgtgtgcatcgagttcaagaacagcgacgaggagagcgccaagcccctgaagtgcatctacggcaagcccggcggccccctgttcaccagcgccgcctacaccgccgtgctgcaccacagccagaaccccgacttcagcgacgaggtgaagatcgagctgcccacccagctgcacgagaagcaccacatcctgttcagcttctaccacgtgacctgcgacatcaacgccaaggccaacgccaagaagaaggaggccctggagaccagcgtgggctacgcctggctgcccctgatgaagcacgaccagatcgccagccaggagtacaacatccccatcgccaccagcctgccccccaactacctgagcttccaggacagcgccagcggcaagcacggcggcagcgacatcaagtgggtggacggcggcaagcccctgttcaaggtgagcaccttcgtggtgagcaccgtgaacacccaggacccccacgtgaacgccttcttccaggagtgccagaagagagagaaggacatgagccagagccccaccagcaacttcatcagaagctgcaagaacctgctgaacgtggagaagatccacgccatcatgagcttcctgcccatcatcctgaaccagctgttcaaggtgctggtgcagaacgaggaggacgagatcaccaccaccgtgaccagagtgctgaccgacatcgtggccaagtgccacgaggagcagctggaccacagcgtgcagagctacatcaagttcgtgttcaagaccagagcctgcaaggagagaaccgtgcacgaggagctggccaagaacgtgaccggcctgctgaagagcaacgacagcaccaccgtgaagcacgtgctgaagcacagctggttcttcttcgccatcatcctgaagagcatggcccagcacctgatcgacaccaacaagatccagctgcccagaccccagagattccccgagagctaccagaacgagctggacaacctggtgatggtgctgagcgaccacgtgatctggaagtacaaggacgccctggaggagaccagaagagccaaccacagcgtggccagattcctgaagagatgcttcaccttcatggacagaggctacgtgttcaagatggtgaacaactacatcagcatgttcagcagcggcgacctgaagaccctgtgccagtacaagttcgacttcctgcaggaggtgtgccagcacgagcacttcatccccctgtgcctgcccatcagaagcgccaacatccccgaccccctgacccccagcgagagcacccaggagctgcacgccagcgacatgcccgagtacagcgtgaccaacgagttctgcagaaagcacttcctgatcggcatcctgctgagagaggtgggcttcgccctgcaggaggaccaggacgtgagacacctggccctggccgtgctgaagaacctgatggccaagcacagcttcgacgacagatacagagagcccagaaagcaggcccagatcgccagcctgtacatgcccctgtacggcatgctgctggacaacatgcccagaatctacctgaaggacctgtaccccttcaccgtgaacaccagcaaccagggcagcagagacgacctgagcaccaacggcggcttccagagccagaccgccatcaagcacgccaacagcgtggacaccagcttcagcaaggacgtgctgaacagcatcgccgccttcagcagcatcgccatcagcaccgtgaaccacgccgacagcagagccagcctggccagcctggacagcaaccccagcaccaacgagaagagcagcgagaagaccgacaactgcgagaagatccccagacccctgagcctgatcggcagcaccctgagattcgacaagctggaccaggccgagaccagaagcctgctgatgtgcttcctgcacatcatgaagaccatcagctacgagaccctgatcgcctactggcagagagcccccagccccgaggtgagcgacttcttcagcatcctggacgtgtgcctgcagaacttcagatacctgggcaagagaaacatcatcagaaagatcgccgccgccttcaagttcgtgcagagcacccagaacaacggcaccctgaagggcagcaaccccagctgccagaccagcggcctgctgagccagtggatgcacagcaccagcagccacgagggccacaagcagcacagaagccagaccctgcccatcatcagaggcaagaacgccctgagcaaccccaagctgctgcagatgctggacaacaccatgaccagcaacagcaacgagatcgacatcgtgcaccacgtggacaccgaggccaacatcgccaccgaggtgtgcctgaccatcctggacctgctgagcctgttcacccagacccaccagagacagctgcagcagtgcgactgccagaacagcctgatgaagagagtgttcgacacctacatgctgttcttccaggtgaaccagagcgccaccgccctgaagcacgtgttcgccagcctgagactgttcgtgtgcaagttccccagcgccttcttccagggccccgccgacctgtgcggcagcttctgctacgaggtgctgaagtgctgcaaccacagaagcagaagcacccagaccgaggccagcgccctgctgtacttcttcatgagaaagaacttcgagttcaacaagcagaagagcatcgtgagaagccacctgcagctgatcaaggccgtgagccagctgatcgccgacgccggcatcggcggcagcagattccagcacagcctggccatcaccaacaacttcgccaacggcgacaagcagatgaagaacagcaacttccccgccgaggtgaaggacctgaccaagagaatcagaaccgtgctgatggccaccgcccagatgaaggagcacgagaaggaccccgagatgctggtggacctgcagtacagcctggccaacagctacgccagcacccccgagctgagaagaacctggctggagagcatggccaagatccacgccagaaacggcgacctgagcgaggccgccatgtgctacatccacatcgccgccctgatcgccgagtacctgaagagaaagggctactggaaggtggagaagatctgcaccgccagcctgctgagcgaggacacccacccctgcgacagcaacagcctgctgaccacccccagcggcggcagcatgttcagcatgggctggcccgccttcctgagcatcacccccaacatcaaggaggagggcgccatgaaggaggacagcggcatgcaggacaccccctacaacgagaacatcctggtggagcagctgtacatgtgcgtggagttcctgtggaagagcgagagatacgagctgatcgccgacgtgaacaagcccatcatcgccgtgttcgagaagcagagagacttcaagaagctgagcgacctgtactacgacatccacagaagctacctgaaggtggccgaggtggtgaacagcgagaagagactgttcggcagatactacagagtggccttctacggccagggcttcttcgaggaggaggagggcaaggagtacatctacaaggagcccaagctgaccggcctgagcgagatcagccagagactgctgaagctgtacgccgacaagttcggcgccgacaacgtgaagatcatccaggacagcaacaaggtgaaccccaaggacctggaccccaagtacgcctacatccaggtgacctacgtgacccccttcttcgaggagaaggagatcgaggacagaaagaccgacttcgagatgcaccacaacatcaacagattcgtgttcgagacccccttcaccctgagcggcaagaagcacggcggcgtggccgagcagtgcaagagaagaaccatcctgaccaccagccacctgttcccctacgtgaagaagagaatccaggtgatcagccagagcagcaccgagctgaaccccatcgaggtggccatcgacgagatgagcaagaaggtgagcgagctgaaccagctgtgcaccatggaggaggtggacatgatcagactgcagctgaagctgcagggcagcgtgagcgtgaaggtgaacgccggccccatggcctacgccagagccttcctggaggagaccaacgccaagaagtaccccgacaaccaggtgaagctgctgaaggagatcttcagacagttcgccgacgcctgcggccaggccctggacgtgaacgagagactgatcaaggaggaccagctggagtaccaggaggagctgagaagccactacaaggacatgctgagcgagctgagcaccgtgatgaacgagcagatcaccggcagagacgacctgagcaagagaggcgtggaccagacctgcaccagagtgatcagcaaggccacccccgccctgcccaccgtgagcatcagcagcagcgccgaggtgtag

SEQ ID NO: 78849 - DNA, 2103 bp, synthetic construct
  misc_feature 1..2103: note = Description of Artificial Sequence: Synthetic coding sequence
  source 1..2103: mol_type = other DNA
atgaccagcaacagcaacgagatcgacatcgtgcaccacgtggacaccgaggccaacatcgccaccgaggtgtgcctgaccatcctggacctgctgagcctgttcacccagacccaccagagacagctgcagcagtgcgactgccagaacagcctgatgaagagagtgttcgacacctacatgctgttcttccaggtgaaccagagcgccaccgccctgaagcacgtgttcgccagcctgagactgttcgtgtgcaagttccccagcgccttcttccagggccccgccgacctgtgcggcagcttctgctacgaggtgctgaagtgctgcaaccacagaagcagaagcacccagaccgaggccagcgccctgctgtacttcttcatgagaaagaacttcgagttcaacaagcagaagagcatcgtgagaagccacctgcagctgatcaaggccgtgagccagctgatcgccgacgccggcatcggcggcagcagattccagcacagcctggccatcaccaacaacttcgccaacggcgacaagcagatgaagaacagcaacttccccgccgaggtgaaggacctgaccaagagaatcagaaccgtgctgatggccaccgcccagatgaaggagcacgagaaggaccccgagatgctggtggacctgcagtacagcctggccaacagctacgccagcacccccgagctgagaagaacctggctggagagcatggccaagatccacgccagaaacggcgacctgagcgaggccgccatgtgctacatccacatcgccgccctgatcgccgagtacctgaagagaaagggcatgttcagcatgggctggcccgccttcctgagcatcacccccaacatcaaggaggagggcgccatgaaggaggacagcggcatgcaggacaccccctacaacgagaacatcctggtggagcagctgtacatgtgcgtggagttcctgtggaagagcgagagatacgagctgatcgccgacgtgaacaagcccatcatcgccgtgttcgagaagcagagagacttcaagaagctgagcgacctgtactacgacatccacagaagctacctgaaggtggccgaggtggtgaacagcgagaagagactgttcggcagatactacagagtggccttctacggccagggcgtgggcttcttcgaggaggaggagggcaaggagtacatctacaaggagcccaagctgaccggcctgagcgagatcagccagagactgctgaagctgtacgccgacaagttcggcgccgacaacgtgaagatcatccaggacagcaacaaggtgaaccccaaggacctggaccccaagtacgcctacatccaggtgacctacgtgacccccttcttcgaggagaaggagatcgaggacagaaagaccgacttcgagatgcaccacaacatcaacagattcgtgttcgagacccccttcaccctgagcggcaagaagcacggcggcgtggccgagcagtgcaagagaagaaccatcctgaccaccagccacctgttcccctacgtgaagaagagaatccaggtgatcagccagagcagcaccgagctgaaccccatcgaggtggccatcgacgagatgagcaagaaggtgagcgagctgaaccagctgtgcaccatggaggaggtggacatgatcagactgcagctgaagctgcagggcagcgtgagcgtgaaggtgaacgccggccccatggcctacgccagagccttcctggaggagaccaacgccaagaagtaccccgacaaccaggtgaagctgctgaaggagatcttcagacagttcgccgacgcctgcggccaggccctggacgtgaacgagagactgatcaaggaggaccagctggagtaccaggaggagctgagaagccactacaaggacatgctgagcgagctgagcaccgtgatgaacgagcagctgtgcagaggcccctgcctgtacagcttctgcagcagcgtgagcagcatcagcctgagcaccgtgagcaagagcgactacggccagggcagacccgtgaaggccagaagcggccccaacctgcacagcagcaactag

SEQ ID NO: 78850 - DNA, 6543 bp, synthetic construct
  misc_feature 1..6543: note = Description of Artificial Sequence: Synthetic coding sequence
  source 1..6543: mol_type = other DNA
atgagcttcagaggcaaggtgttcaagagagagcccagcgagttctggaagaagagaagaaccgtgagaagagtgaaccaggaggagatccacagattcagcagccaggagaagcccagactgctggagcccctggactacgagaccgtgatcgaggagctggagaagacctacagaaacgaccccctgcaggacctgctgttcttccccagcgacgacttcagcgccgccaccgtgagctgggacatcagaaccctgtacagcaccgtgcccgaggacgccgagcacaaggccgagaacctgctggtgaaggaggcctgcaagttctacagcagccagtggcacgtggtgaactacaagtacgagcagtacagcggcgacatcagacagctgcccagagccgagtacaagcccgagaagctgcccagccacagcttcgagatcgaccacgaggacgccgacaaggacgaggacaccaccagccacagcagcagcaagggcggcggcggcgccggcggcaccggcgtgttcaagagcggctggctgtacaagggcaacttcaacagcaccgtgaacaacaccgtgaccgtgagaagcttcaagaagagatacttccagctgacccagctgcccgacaacagctacatcatgaacttctacaaggacgagaagatcagcaaggagcccaagggctgcatcttcctggacagctgcaccggcgtggtgcagaacaacagactgagaaagtacgccttcgagctgaagatgaacgacctgacctacttcgtgctggccgccgagaccgagagcgacatggacgagtggatccacaccctgaacagaatcctgcagatcagccccgagggccccctgcagggcagaagaagcaccgagctgaccgacctgggcctggacagcctggacaacagcgtgacctgcgagtgcacccccgaggagaccgacagcagcgagaacaacctgcacgccgacttcgccaagtacctgaccgagaccgaggacaccgtgaagaccaccagaaacatggagagactgaacctgttcagcctggaccccgacatcgacaccctgaagctgcagaagaaggacctgctggagcccgagagcgtgatcaagcccttcgaggagaaggccgccaagagaatcatgatcatctgcaaggccctgaacagcaacctgcagggctgcgtgaccgagaacgagaacgaccccatcaccaacatcgagcccttcttcgtgagcgtggccctgtacgacctgagagacagcagaaagatcagcgccgacttccacgtggacctgaaccacgccgccgtgagacagatgctgctgggcgccagcgtggccctggagaacggcaacatcgacaccatcacccccagacagagcgaggagccccacatcaagggcctgcccgaggagtggctgaagttccccaagcaggccgtgttcagcgtgagcaacccccacagcgagatcgtgctggtggccaagatcgagaaggtgctgatgggcaacatcgccagcggcgccgagccctacatcaagaaccccgacagcaacaagtacgcccagaagatcctgaagagcaacagacagttctgcagcaagctgggcaagtacagaatgcccttcgcctgggccgtgagaagcgtgttcaaggacaaccagggcaacgtggacagagacagcagattcagccccctgttcagacaggagagcagcaagatcagcaccgaggacctggtgaagctggtgagcgactacagaagagccgacagaatcagcaagatgcagaccatccccggcagcctggacatcgccgtggacaacgtgcccctggagcaccccaactgcgtgaccagcagcttcatccccgtgaagcccttcaacatgatggcccagaccgagcccaccgtggaggtggaggagttcgtgtacgacagcaccaagtactgcagaccctacagagtgtacaagaaccagatctacatctaccccaagcacctgaagtacgacagccagaagtgcttcaacaaggccagaaacatcaccgtgtgcatcgagttcaagaacagcgacgaggagagcgccaagcccctgaagtgcatctacggcaagcccggcggccccctgttcaccagcgccgcctacaccgccgtgctgcaccacagccagaaccccgacttcagcgacgaggtgaagatcgagctgcccacccagctgcacgagaagcaccacatcctgttcagcttctaccacgtgacctgcgacatcaacgccaaggccaacgccaagaagaaggaggccctggagaccagcgtgggctacgcctggctgcccctgatgaagcacgaccagatcgccagccaggagtacaacatccccatcgccaccagcctgccccccaactacctgagcttccaggacagcgccagcggcaagcacggcggcagcgacatcaagtgggtggacggcggcaagcccctgttcaaggtgagcaccttcgtggtgagcaccgtgaacacccaggacccccacgtgaacgccttcttccaggagtgccagaagagagagaaggacatgagccagagccccaccagcaacttcatcagaagctgcaagaacctgctgaacgtggagaagatccacgccatcatgagcttcctgcccatcatcctgaaccagctgttcaaggtgctggtgcagaacgaggaggacgagatcaccaccaccgtgaccagagtgctgaccgacatcgtggccaagtgccacgaggagcagctggaccacagcgtgcagagctacatcaagttcgtgttcaagaccagagcctgcaaggagagaaccgtgcacgaggagctggccaagaacgtgaccggcctgctgaagagcaacgacagcaccaccgtgaagcacgtgctgaagcacagctggttcttcttcgccatcatcctgaagagcatggcccagcacctgatcgacaccaacaagatccagctgcccagaccccagagattccccgagagctaccagaacgagctggacaacctggtgatggtgctgagcgaccacgtgatctggaagtacaaggacgccctggaggagaccagaagagccaaccacagcgtggccagattcctgaagagatgcttcaccttcatggacagaggctacgtgttcaagatggtgaacaactacatcagcatgttcagcagcggcgacctgaagaccctgtgccagtacaagttcgacttcctgcaggaggtgtgccagcacgagcacttcatccccctgtgcctgcccatcagaagcgccaacatccccgaccccctgacccccagcgagagcacccaggagctgcacgccagcgacatgcccgagtacagcgtgaccaacgagttctgcagaaagcacttcctgatcggcatcctgctgagagaggtgggcttcgccctgcaggaggaccaggacgtgagacacctggccctggccgtgctgaagaacctgatggccaagcacagcttcgacgacagatacagagagcccagaaagcaggcccagatcgccagcctgtacatgcccctgtacggcatgctgctggacaacatgcccagaatctacctgaaggacctgtaccccttcaccgtgaacaccagcaaccagggcagcagagacgacctgagcaccaacggcggcttccagagccagaccgccatcaagcacgccaacagcgtggacaccagcttcagcaaggacgtgctgaacagcatcgccgccttcagcagcatcgccatcagcaccgtgaaccacgccgacagcagagccagcctggccagcctggacagcaaccccagcaccaacgagaagagcagcgagaagaccgacaactgcgagaagatccccagacccctgagcctgatcggcagcaccctgagattcgacaagctggaccaggccgagaccagaagcctgctgatgtgcttcctgcacatcatgaagaccatcagctacgagaccctgatcgcctactggcagagagcccccagccccgaggtgagcgacttcttcagcatcctggacgtgtgcctgcagaacttcagatacctgggcaagagaaacatcatcagaaagatcgccgccgccttcaagttcgtgcagagcacccagaacaacggcaccctgaagggcagcaaccccagctgccagaccagcggcctgctgagccagtggatgcacagcaccagcagccacgagggccacaagcagcacagaagccagaccctgcccatcatcagaggcaagaacgccctgagcaaccccaagctgctgcagatgctggacaacaccatgaccagcaacagcaacgagatcgacatcgtgcaccacgtggacaccgaggccaacatcgccaccgaggtgtgcctgaccatcctggacctgctgagcctgttcacccagacccaccagagacagctgcagcagtgcgactgccagaacagcctgatgaagagagtgttcgacacctacatgctgttcttccaggtgaaccagagcgccaccgccctgaagcacgtgttcgccagcctgagactgttcgtgtgcaagttccccagcgccttcttccagggccccgccgacctgtgcggcagcttctgctacgaggtgctgaagtgctgcaaccacagaagcagaagcacccagaccgaggccagcgccctgctgtacttcttcatgagaaagaacttcgagttcaacaagcagaagagcatcgtgagaagccacctgcagctgatcaaggccgtgagccagctgatcgccgacgccggcatcggcggcagcagattccagcacagcctggccatcaccaacaacttcgccaacggcgacaagcagatgaagaacagcaacttccccgccgaggtgaaggacctgaccaagagaatcagaaccgtgctgatggccaccgcccagatgaaggagcacgagaaggaccccgagatgctggtggacctgcagtacagcctggccaacagctacgccagcacccccgagctgagaagaacctggctggagagcatggccaagatccacgccagaaacggcgacctgagcgaggccgccatgtgctacatccacatcgccgccctgatcgccgagtacctgaagagaaagggctactggaaggtggagaagatctgcaccgccagcctgctgagcgaggacacccacccctgcgacagcaacagcctgctgaccacccccagcggcggcagcatgttcagcatgggctggcccgccttcctgagcatcacccccaacatcaaggaggagggcgccatgaaggaggacagcggcatgcaggacaccccctacaacgagaacatcctggtggagcagctgtacatgtgcgtggagttcctgtggaagagcgagagatacgagctgatcgccgacgtgaacaagcccatcatcgccgtgttcgagaagcagagagacttcaagaagctgagcgacctgtactacgacatccacagaagctacctgaaggtggccgaggtggtgaacagcgagaagagactgttcggcagatactacagagtggccttctacggccagggcttcttcgaggaggaggagggcaaggagtacatctacaaggagcccaagctgaccggcctgagcgagatcagccagagactgctgaagctgtacgccgacaagttcggcgccgacaacgtgaagatcatccaggacagcaacaaggtgaaccccaaggacctggaccccaagtacgcctacatccaggtgacctacgtgacccccttcttcgaggagaaggagatcgaggacagaaagaccgacttcgagatgcaccacaacatcaacagattcgtgttcgagacccccttcaccctgagcggcaagaagcacggcggcgtggccgagcagtgcaagagaagaaccatcctgaccaccagccacctgttcccctacgtgaagaagagaatccaggtgatcagccagagcagcaccgagctgaaccccatcgaggtggccatcgacgagatgagcaagaaggtgagcgagctgaaccagctgtgcaccatggaggaggtggacatgatcagactgcagctgaagctgcagggcagcgtgagcgtgaaggtgaacgccggccccatggcctacgccagagccttcctggaggagaccaacgccaagaagtaccccgacaaccaggtgaagctgctgaaggagatcttcagacagttcgccgacgcctgcggccaggccctggacgtgaacgagagactgatcaaggaggaccagctggagtaccaggaggagctgagaagccactacaaggacatgctgagcgagctgagcaccgtgatgaacgagcagatcaccggcagagacgacctgagcaagagaggcgtggaccagacctgcaccagagtgatcagcaaggccacccccgccctgcccaccgtgagcatcagcagcagcgccgaggtgtag

SEQ ID NO: 78851 - DNA, 5493 bp, synthetic construct
  misc_feature 1..5493: note = Description of Artificial Sequence: Synthetic coding sequence
  source 1..5493: mol_type = other DNA
atggccccctggagaaaggccgacaaggagagacacggcgtggccatctacaacttccagggcagcggcgccccccagctgagcctgcagatcggcgacgtggtgagaatccaggagacctgcggcgactggtacagaggctacctgatcaagcacaagatgctgcagggcatcttccccaagagcttcatccacatcaaggaggtgaccgtggagaagagaagaaacaccgagaacatcatccccgccgagatccccctggcccaggaggtgaccaccaccctgtgggagtggggcagcatctggaagcagctgtacgtggccagcaagaaggagagattcctgcaggtgcagagcatgatgtacgacctgatggagtggagaagccagctgctgagcggcaccctgcccaaggacgagctgaaggagctgaagcagaaggtgaccagcaagatcgactacggcaacaagatcctggagctggacctgatcgtgagagacgaggacggcaacatcctggaccccgacaacaccagcgtgatcagcctgttccacgcccacgaggaggccaccgacaagatcaccgagagaatcaaggaggagatgagcaaggaccagcccgactacgccatgtacagcagaatcagcagcagccccacccacagcctgtacgtgttcgtgagaaacttcgtgtgcagaatcggcgaggacgccgagctgttcatgagcctgtacgaccccaacaagcagaccgtgatcagcgagaactacctggtgagatggggcagcagaggcttccccaaggagatcgagatgctgaacaacctgaaggtggtgttcaccgacctgggcaacaaggacctgaacagagacaagatctacctgatctgccagatcgtgagagtgggcaagatggacctgaaggacaccggcgccaagaagtgcacccagggcctgagaagacccttcggcgtggccgtgatggacatcaccgacatcatcaagggcaaggccgagagcgacgaggagaagcagcacttcatccccttccaccccgtgaccgccgagaacgacttcctgcacagcctgctgggcaaggtgatcgccagcaagggcgacagcggcggccagggcctgtgggtgaccatgaagatgctggtgggcgacatcatccagatcagaaaggactacccccacctggtggacagaaccaccgtggtggccagaaagctgggcttccccgagatcatcatgcccggcgacgtgagaaacgacatctacatcaccctgctgcagggcgacttcgacaagtacaacaagaccacccagagaaacgtggaggtgatcatgtgcgtgtgcgccgaggacggcaagaccctgcccaacgccatctgcgtgggcgccggcgacaagcccatgaacgagtacagaagcgtggtgtactaccaggtgaagcagcccagatggatggagaccgtgaaggtggccgtgcccatcgaggacatgcagagaatccacctgagattcatgttcagacacagaagcagcctggagagcaaggacaagggcgagaagaacttcgccatgagctacgtgaagctgatgaaggaggacggcaccaccctgcacgacggcttccacgacctggtggtgctgaagggcgacagcaagaagatggaggacgccagcgcctacctgaccctgcccagctacagacaccacgtggagaacaagggcgccaccctgagcagaagcagcagcagcgtgggcggcctgagcgtgagcagcagagacgtgttcagcatcagcaccctggtgtgcagcaccaagctgacccagaacgtgggcctgctgggcctgctgaagtggagaatgaagccccagctgctgcaggagaacctggagaagctgaagatcgtggacggcgaggaggtggtgaagttcctgcaggacaccctggacgccctgttcaacatcatgatggagcacagccagagcgacgagtacgacatcctggtgttcgacgccctgatctacatcatcggcctgatcgccgacagaaagttccagcacttcaacaccgtgctggaggcctacatccagcagcacttcagcgccaccctggcctacaagaagctgatgaccgtgctgaagacctacctggacaccagcagcagaggcgagcagtgcgagcccatcctgagaaccctgaaggccctggagtacgtgttcaagttcatcgtgagaagcagaaccctgttcagccagctgtacgagggcaaggagcagatggagttcgaggagagcatgagaagactgttcgagagcatcaacaacctgatgaagagccagtacaagaccaccatcctgctgcaggtggccgccctgaagtacatccccagcgtgctgcacgacgtggagatggtgttcgacgccaagctgctgagccagctgctgtacgagttctacacctgcatcccccccgtgaagctgcagaagcagaaggtgcagagcatgaacgagatcgtgcagagcaacctgttcaagaagcaggagtgcagagacatcctgctgcccgtgatcaccaaggagctgaaggagctgctggagcagaaggacgacatgcagcaccaggtgctggagagaaagtactgcgtggagctgctgaacagcatcctggaggtgctgagctaccaggacgccgccttcacctaccaccacatccaggagatcatggtgcagctgctgagaaccgtgaacagaaccgtgatcaccatgggcagagaccacatcctgatcagccacttcgtggcctgcatgaccgccatcctgaaccagatgggcgaccagcactacagcttctacatcgagaccttccagaccagcagcgagctggtggacttcctgatggagaccttcatcatgttcaaggacctgatcggcaagaacgtgtaccccggcgactggatggccatgagcatggtgcagaacagagtgttcctgagagccatcaacaagttcgccgagaccatgaaccagaagttcctggagcacaccaacttcgagttccagctgtggaacaactacttccacctggccgtggccttcatcacccaggacagcctgcagctggagcagttcagccacgccaagtacaacaagatcctgaacaagtacggcgacatgagaagactgatcggcttcagcatcagagacatgtggtacaagctgggccagaacaagatctgcttcatccccggcatggtgggccccatcctggagatgaccctgatccccgaggccgagctgagaaaggccaccatccccatcttcttcgacatgatgctgtgcgagtaccagagaagcggcgacttcaagaagttcgagaacgagatcatcctgaagctggaccacgaggtggagggcggcagaggcgacgagcagtacatgcagctgctggagagcatcctgatggagtgcgccgccgagcaccccaccatcgccaagagcgtggagaacttcgtgaacctggtgaagggcctgctggagaagctgctggactacagaggcgtgatgaccgacgagagcaaggacaacagaatgagctgcaccgtgaacctgctgaacttctacaaggacaacaacagagaggagatgtacatcagatacctgtacaagctgagagacctgcacctggactgcgacaactacaccgaggccgcctacaccctgctgctgcacacctggctgctgaagtggagcgacgagcagtgcgccagccaggtgatgcagaccggccagcagcacccccagacccacagacagctgaaggagaccctgtacgagaccatcatcggctacttcgacaagggcaagatgtgggaggaggccatcagcctgtgcaaggagctggccgagcagtacgagatggagatcttcgactacgagctgctgagccagaacctgatccagcaggccaagttctacgagagcatcatgaagatcctgagacccaagcccgactacttcgccgtgggctactacggccagggcttccccagcttcctgagaaacaaggtgttcatctacagaggcaaggagtacgagagaagagaggacttccagatgcagctgatgacccagttccccaacgccgagaagatgaacaccaccagcgcccccggcgacgacgtgaagaacgcccccggccagtacatccagtgcttcaccgtgcagcccgtgctggacgagcaccccagattcaagaacaagcccgtgcccgaccagatcatcaacttctacaagagcaactacgtgcagagattccactacagcagacccgtgagaagaggcaccgtggaccccgagaacgagttcgccagcatgtggatcgagagaaccagcttcgtgaccgcctacaagctgcccggcatcctgagatggttcgaggtggtgcacatgagccagaccaccatcagccccctggagaacgccatcgagaccatgagcaccgccaacgagaagatcctgatgatgatcaaccagtaccagagcgacgagaccctgcccatcaaccccctgagcatgctgctgaacggcatcgtggaccccgccgtgatgggcggcttcgccaagtacgagaaggccttcttcaccgaggagtacgtgagagaccaccccgaggaccaggacaagctgacccacctgaaggacctgatcgcctggcagatccccttcctgggcgccggcatcaagatccacgagaagagagtgagcgacaacctgagacccttccacgacagaatggaggagtgcttcaagaacctgaagatgaaggtggagaaggagtacggcgtgagagagatgcccgacttcgacgacagaagagtgggcagacccagaagcatgctgagaagctacagacagatgagcatcatcagcctggccagcatgaacagcgactgcagcacccccagcaagcccaccagcgagagcttcgacctggagctggccagccccaagacccccagagtggagcaggaggagcccatcagccccggcagcaccctgcccgaggtgaagctgagaagaagcaagaagagaaccaagagaagcagcgtggtgttcgccgacgagaaggccgccgccgagagcgacctgaagagactgagcagaaagcacgagttcatgagcgacaccaacctgagcgagcacgccgccatccccctgaaggccagcgtgctgagccagatgagcttcgccagccagagcatgcccaccatccccgccctggccctgagcgtggccggcatccccggcctggacgaggccaacaccagccccagactgagccagaccttcctgcagctgagcgacggcgacaagaagaccctgaccagaaagaaggtgaaccagttcttcaagaccatgctggccagcaagagcgccgaggagggcaagcagatccccgacagcctgagcaccgacctgtag

SEQ ID NO: 78852 - DNA, 1011 bp, synthetic construct
  misc_feature 1..1011: note = Description of Artificial Sequence: Synthetic coding sequence
  source 1..1011: mol_type = other DNA
atgtgcgtgtgcgccgaggacggcaagaccctgcccgtggccgtgcccatcgaggacatgcagagaatccacctgagattcatgttcagacacagaagcagcctggagagcaaggacaagggcgagaagaacttcgccatgagctacgtgaagctgatgaaggaggacggcaccaccctgcacgacggcttccacgacctggtggtgctgaagggcgacagcaagaagatggaggacgccagcgcctacctgaccctgcccagctacagacaccacgtggagaacaagggcgccaccctgagcagaagcagcagcagcgtgggcggcctgagcgtgagcagcagagacgtgttcagcatcagcaccctggtgtgcagcaccaagctgacccagaacgtgggcctgctgggcctgctgaagtggagaatgaagccccagctggaggagagcatgagaagactgttcgagagcatcaacaacctgatgaagagccagtacaagaccaccatcctgctgcaggtggccgccctgaagtacatccccagcgtgctgcacgacgtggagatggtgttcgacgccaagctgctgagccagctgctgtacgagttctacacctgcatcccccccgtgaagctgcagaagcagaaggtgcagagcatgaacgagatcgtgcagagcaacctgttcaagaagcaggagtgcagagacatcctgctgcccgtgatcaccaaggagctgaaggagctgctggagcagaaggacgacatgcagcaccaggtgctggagagaaagtactgcgtggagctgctgaacagcatcctggaggtgctgagctaccaggacgccgccttcacctaccaccacatccaggagatcatggtgcagctgctgagaaccgtgaacagaaccgtgatcaccatgggcagagaccacatcctgatcggcgcctgctgcaactgcggcttccccagcagcaccccccacagcctgatccagtggctgtggggctag

SEQ ID NO: 78853 - DNA, 2676 bp, synthetic construct
  misc_feature 1..2676: note = Description of Artificial Sequence: Synthetic coding sequence
  source 1..2676: mol_type = other DNA
atgaccgccatcctgaaccagatgggcgaccagcactacagcttctacatcgagaccttccagaccagcagcgagctggtggacttcctgatggagaccttcatcatgttcaaggacctgatcggcaagaacgtgtaccccggcgactggatggccatgagcatggtgcagaacagagtgttcctgagagccatcaacaagttcgccgagaccatgaaccagaagttcctggagcacaccaacttcgagttccagctgtggaacaactacttccacctggccgtggccttcatcacccaggacagcctgcagctggagcagttcagccacgccaagtacaacaagatcctgaacaagtacggcgacatgagaagactgatcggcttcagcatcagagacatgtggtacaagctgggccagaacaagatctgcttcatccccggcatggtgggccccatcctggagatgaccctgatccccgaggccgagctgagaaaggccaccatccccatcttcttcgacatgatgctgtgcgagtaccagagaagcggcgacttcaagaagttcgagaacgagatcatcctgaagctggaccacgaggtggagggcggcagaggcgacgagcagtacatgcagctgctggagagcatcctgatggagtgcgccgccgagcaccccaccatcgccaagagcgtggagaacttcgtgaacctggtgaagggcctgctggagaagctgctggactacagaggcgtgatgaccgacgagagcaaggacaacagaatgagctgcaccgtgaacctgctgaacttctacaaggacaacaacagagaggagatgtacatcagatacctgtacaagctgagagacctgcacctggactgcgacaactacaccgaggccgcctacaccctgctgctgcacacctggctgctgaagtggagcgacgagcagtgcgccagccaggtgatgcagaccggccagcagcacccccagacccacagacagctgaaggagaccctgtacgagaccatcatcggctacttcgacaagggcaagatgtgggaggaggccatcagcctgtgcaaggagctggccgagcagtacgagatggagatcttcgactacgagctgctgagccagaacctgatccagcaggccaagttctacgagagcatcatgaagatcctgagacccaagcccgactacttcgccgtgggctactacggccagggcttccccagcttcctgagaaacaaggtgttcatctacagaggcaaggagtacgagagaagagaggacttccagatgcagctgatgacccagttccccaacgccgagaagatgaacaccaccagcgcccccggcgacgacgtgaagaacgcccccggccagtacatccagtgcttcaccgtgcagcccgtgctggacgagcaccccagattcaagaacaagcccgtgcccgaccagatcatcaacttctacaagagcaactacgtgcagagattccactacagcagacccgtgagaagaggcaccgtggaccccgagaacgagttcgccagcatgtggatcgagagaaccagcttcgtgaccgcctacaagctgcccggcatcctgagatggttcgaggtggtgcacatgagccagaccaccatcagccccctggagaacgccatcgagaccatgagcaccgccaacgagaagatcctgatgatgatcaaccagtaccagagcgacgagaccctgcccatcaaccccctgagcatgctgctgaacggcatcgtggaccccgccgtgatgggcggcttcgccaagtacgagaaggccttcttcaccgaggagtacgtgagagaccaccccgaggaccaggacaagctgacccacctgaaggacctgatcgcctggcagatccccttcctgggcgccggcatcaagatccacgagaagagagtgagcgacaacctgagacccttccacgacagaatggaggagtgcttcaagaacctgaagatgaaggtggagaaggagtacggcgtgagagagatgcccgacttcgacgacagaagagtgggcagacccagaagcatgctgagaagctacagacagatgagcatcatcagcctggccagcatgaacagcgactgcagcacccccagcaagcccaccagcgagagcttcgacctggagctggccagccccaagacccccagagtggagcaggaggagcccatcagccccggcagcaccctgcccgaggtgaagctgagaagaagcaagaagagaaccaagagaagcagcgtggtgttcgccgacgagaaggccgccgccgagagcgacctgaagagactgagcagaaagcacgagttcatgagcgacaccaacctgagcgagcacgccgccatccccctgaaggccagcgtgctgagccagatgagcttcgccagccagagcatgcccaccatccccgccctggccctgagcgtggccggcatccccggcctggacgaggccaacaccagccccagactgagccagaccttcctgcagctgagcgacggcgacaagaagaccctgaccagaaagaaggtgaaccagttcttcaagaccatgctggccagcaagagcgccgaggagggcaagcagatccccgacagcctgagcaccgacctgtag

SEQ ID NO: 78854 - DNA, 6093 bp, synthetic construct
  misc_feature 1..6093: note = Description of Artificial Sequence: Synthetic coding sequence
  source 1..6093: mol_type = other DNA
atgtggacccccaccgaggaggagaagtacggcgtggtgatctgcagcttcagaggcagcgtgccccagggcctggtgctggagatcggcgagaccgtgcagatcctggagaagtgcgagggctggtacagaggcgtgagcaccaagaagcccaacgtgaagggcatcttccccgccaactacatccacctgaagaaggccatcgtgagcaacagaggccagtacgagaccgtggtgcccctggaggacagcatcgtgaccgaggtgaccgccaccctgcaggagtgggccagcctgtggaagcagctgtacgtgaagcacaaggtggacctgttctacaagctgagacacgtgatgaacgagctgatcgacctgagaagacagctgctgagcggccacctgacccaggaccaggtgagagaggtgaagagacacatcaccgtgagactggactggggcaacgagcacctgggcctggacctggtgcccagaaaggacttcgaggtggtggacagcgaccagatcagcgtgagcgacctgtacaagatgcacctgagcagcagacagagcgtgcagcagagcaccagccaggtggacaccatgagacccagacacggcgagacctgcagaatgcccgtgccccaccacttcttcctgagcctgaagagcttcacctacaacaccatcggcgaggacaccgacgtgttcttcagcctgtacgacatgagagagggcaagcagatcagcgagagattcctggtgagactgaacaagaacggcggccccagaaaccccgagaagatcgagagaatgtgcgccctgttcaccgacctgagcagcaaggacatgaagagagacctgtacatcgtggcccacgtgatcagaatcggcagaatgctgctgaacgacagcaagaagggccccccccacctgcactacagaagaccctacggctgcgccgtgctgagcatcctggacgtgctgcagagcctgaccgaggtgaaggaggagaaggacttcgtgctgaaggtgtacacctgcaacaacgagagcgagtggagccagatccacgagaacatcatcagaaagagcagcgccaagtacagcgcccccagcgccagccacggcctgatcatcagcctgcagctgctgagaggcgacatggagcagatcagaagagagaaccccatgatcttcaacagaggcctggccatcaccagaaagctgggcttccccgacgtgatcatgcccggcgacatcagaaacgacctgtacctgaccctggagaagggcgacttcgagagaggcggcaagagcgtgcagaagaacatcgaggtgaccatgtacgtgctgtacgccgacggcgagatcctgaaggactgcatcagcctgggcagcggcgagcccaacagaagcagctaccacagcttcgtgctgtaccacagcaacagccccagatggggcgagatcatcaagctgcccatccccatcgacagattcagaggcagccacctgagattcgagttcagacactgcagcaccaaggacaagggcgagaagaagctgttcggcttcgccttcagcaccctgatgagagacgacggcaccaccctgagcgacgacatccacgagctgtacgtgtacaagtgcgacgagaacagcaccttcaacaaccacgccctgtacctgggcctgccctgctgcaaggaggactacaacggctgccccaacatccccagcagcctgatcttccagagaagcaccaaggagagcttcttcatcagcacccagctgagcagcaccaagctgacccagaacgtggacctgctggccctgctgaagtggaaggccttccccgacagaatcatggacgtgctgggcagactgagacacgtgagcggcgaggagatcgtgaagttcctgcaggacatcctggacaccctgttcgtgatcctggacgacaacaccgagaagtacggcctgctggtgttccagagcctggtgttcatcatcaacctgctgagagacatcaagtacttccacttcagacccgtgatggacacctacatccagaagcacttcgccggcgccctggcctacaaggagctgatcagatgcctgaagtggtacatggactgcagcgccgagctgatcagacaggaccacatccaggaggccatgagagccctggagtacctgttcaagttcatcgtgcagagcagaatcctgtacagcagagccacctgcggcatggaggaggagcagttcagaagcagcatccaggagctgttccagagcatcagattcgtgctgagcctggacagcagaaacagcgagaccctgctgttcacccaggccgccctgctgaacagcttccccaccatcttcgacgagctgctgcagatgttcaccgtgcaggaggtggccgagttcgtgagaggcaccctgggcagcatgcccagcaccgtgcacatcggccagagcatggacgtggtgaagctgcagagcatcgccagaaccgtggacagcagactgttcagcttcagcgagagcagaagaatcctgctgcccgtggtgctgcaccacatccacctgcacctgagacagcagaaggagctgctgatctgcagcggcatcctgggcagcatcttcagcatcgtgaagaccagcagcctggaggccgacgtgatggaggaggtggagatgatggtggagagcctgctggacgtgctgctgcagaccctgctgaccatcatgagcaagagccacgcccaggaggccgtgagaggccagagatgcccccagtgcaccgccgagatcaccggcgagtacgtgagctgcctgctgagcctgctgagacagatgtgcgacacccacttccagcacctgctggacaacttccagagcaaggacgagctgaaggagttcctgctgaagatcttctgcgtgttcagaaacctgatgaagatgagcgtgttccccagagactggatggtgatgagactgctgaccagcaacatcatcgtgaccaccgtgcagtacctgagcagcgccctgcacaagaacttcaccgagaccgacttcgacttcaaggtgtggaacagctacttcagcctggccgtgctgttcatcaaccagcccagcctgcagctggagatcatcaccagcgccaagagaaagaagatcctggacaagtacggcgacatgagagtgatgatggcctacgagctgttcagcatgtggcagaacctgggcgagcacaagatccacttcatccccggcatgatcggccccttcctgggcgtgaccctggtgccccagcccgaggtgagaaacatcatgatccccatcttccacgacatgatggactgggagcagagaaagaacggcaacttcaagcaggtggaggccgagctgatcgacaagctggacagcatggtgagcgagggcaagggcgacgagagctacagagagctgttcagcctgctgacccagctgttcggcccctaccccagcctgctggagaaggtggagcaggagacctggagagagaccggcatcagcttcgtgaccagcgtgaccagactgatggagagactgctggactacagagactgcatgaagggcgaggagaccgagaacaagaagatcggctgcaccgtgaacctgatgaacttctacaagagcgagatcaacaaggaggagatgtacatcagatacatccacaagctgtgcgacatgcacctgcaggccgagaactacaccgaggccgccttcaccctgctgctgtactgcgagctgctgcagtgggaggacagacccctgagagagttcctgcactaccccagccagaccgagtggcagagaaaggagggcctgtgcagaaagatcatccactacttcaacaagggcaagagctgggagttcggcatccccctgtgcagagagctggcctgccagtacgagagcctgtacgactaccagagcctgagctggatcagaaagatggaggccagctactacgacaacatcatggagcagcagagactggagcccgagttcttcagagtgggcttctacggcagaaagttccccttcttcctgagaaacaaggagtacgtgtgcagaggccacgactacgagagactggaggccttccagcagagaatgctgagcgagttcccccaggccgtggccatgcagcaccccaaccaccccgacgacgccatcctgcagtgcgacgcccagtacctgcagatctacgccgtgacccccatccccgactacgtggacgtgctgcagatggacagagtgcccgacagagtgaagagcttctacagagtgaacaacgtgagaaagttcagatacgacagacccttccacaagggccccaaggacaaggagaacgagttcaagagcctgtggatcgagagaaccaccctgaccctgacccacagcctgcccggcatcagcagatggttcgaggtggagagaagagagctggtggaggtgagccccctggagaacgccatccaggtggtggagaacaagaaccaggagctgagaagcctgatcagccagtaccagcacaagcaggtgcacggcaacatcaacctgctgagcatgtgcctgaacggcgtgatcgacgccgccgtgaacggcggcatcgccagataccaggaggccttcttcgacaaggactacatcaacaagcaccccggcgacgccgagaagatcacccagctgaaggagctgatgcaggagcaggtgcacgtgctgggcgtgggcctggccgtgcacgagaagttcgtgcaccccgagatgagacccctgcacaagaagctgatcgaccagttccagatgatgagagccagcctgtaccacgagttccccggcctggacaagctgagccccgcctgcagcggcaccagcacccccagaggcaacgtgctggccagccacagccccatgagccccgagagcatcaagatgacccacagacacagccccatgaacctgatgggcaccggcagacacagcagcagcagcctgagcagccacgccagcagcgaggccggcaacatggtgatgctgggcgacggcagcatgggcgacgcccccgaggacctgtaccaccacatgcagctggcctaccccaaccccagataccagggcagcgtgaccaacgtgagcgtgctgagcagcagccaggccagccccagcagcagcagcctgagcagcacccacagcgcccccagccagatgatcaccagcgcccccagcagcgccagaggcagccccagcctgcccgacaagtacagacacgccagagagatgatgctgctgctgcccacctacagagacagacccagcagcgccatgtaccccgccgccatcctggagaacggccagccccccaacttccagagagccctgttccagcaggtggtgggcgcctgcaagccctgcagcgaccccaacctgagcgtggccgagaagggccactacagcctgcacttcgacgccttccaccaccccctgggcgacaccccccccgccctgcccgccagaaccctgagaaagagccccctgcaccccatccccgccagccccaccagcccccagagcggcctggacggcagcaacagcaccctgagcggcagcgccagcagcggcgtgagcagcctgagcgagagcaacttcggccacagcagcgaggccccccccagaaccgacaccatggacagcatgcccagccaggcctggaacgccgacgaggacctggagcccccctacctgcccgtgcactacagcctgagcgagagcgccgtgctggacagcatcaaggcccagccctgcagaagccacagcgcccccggctgcgtgatcccccaggaccccatggacccccccgccctgccccccaagccctaccaccccagactgcccgccctggagcacgacgagggcgtgctgctgagagaggagaccgagagacccagaggcctgcacagaaaggcccccctgccccccggcagcgccaaggaggagcaggccagaatggcctgggagcacggcagaggcgagcagtag

SEQ ID NO: 78855 - DNA, 1785 bp, synthetic construct
  misc_feature 1..1785: note = Description of Artificial Sequence: Synthetic coding sequence
  source 1..1785: mol_type = other DNA
atgcccaagtggctggaggagaccgagaacaagaagatcggctgcaccgtgaacctgatgaacttctacaagagcgagatcaacaaggaggagatgtacatcagatacatccacaagctgtgcgacatgcacctgcaggccgagaactacaccgaggccgccttcaccctgctgctgtactgcgagctgctgcagtgggaggacagacccctgagagagttcctgcactaccccagccagaccgagtggcagagaaaggagggcctgtgcagaaagatcatccactacttcaacaagggcaagagctgggagttcggcatccccctgtgcagagagctggcctgccagtacgagagcctgtacgactaccagagcctgagctggatcagaaagatggaggccagctactacgacaacatcatggagcagcagagactggagcccgagttcttcagagtgggcttctacggcagaaagttccccttcttcctgagaaacaaggagtacgtgtgcagaggccacgactacgagagactggaggccttccagcagagaatgctgagcgagttcccccaggccgtggccatgcagcaccccaaccaccccgacgacgccatcctgcagtgcgacgcccagtacctgcagatctacgccgtgacccccatccccgactacgtggacgtgctgcagatggacagagtgcccgacagagtgaagagcttctacagagtgaacaacgtgagaaagttcagatacgacagacccttccacaagggccccaaggacaaggagaacgagttcaagagcctgtggatcgagagaaccaccctgaccctgacccacagcctgcccggcatcagcagatggttcgaggtggagagaagagagctggtggaggtgagccccctggagaacgccatccaggtggtggagaacaagaaccaggagctgagaagcctgatcagccagtaccagcacaagcaggtgcacggcaacatcaacctgctgagcatgtgcctgaacggcgtgatcgacgccgccgtgaacggcggcatcgccagataccaggaggccttcttcgacaaggactacatcaacaagcaccccggcgacgccgagaagatcacccagctgaaggagctgatgcaggagcaggtgcacgtgctgggcgtgggcctggccgtgcacgagaagttcgtgcaccccgagatgagacccctgcacaagaagctgatcgaccagttccagatgatgagagccagcctgtaccacgagttccccggcctggacaagctgagccccgcctgcagcggcaccagcacccccagaggcaacgtgctggccagccacagccccatgagccccgagagcatcaagatgacccacagacacagccccatgaacctgatgggcaccggcagacacagcagcagcagcctgagcagccacgccagcagcgaggccggcaacatggtgatgctgggcgacggcagcatgggcgacgcccccgaggacctgtaccaccacatgcagctggcctaccccaaccccagataccagggcagcgtgaccaacgtgagcgtgctgagcagcagccaggccagccccagcagcagcagcctgagcagcacccacagcgcccccagccagatgatcaccagcgcccccagcagcgccagaggcagccccagcctgcccgacaagtacagacacgccagagagatgatgctgctgctgcccacctacagagacagacccagcagcgccatgtaccccgccgcctag

SEQ ID NO: 78856 - DNA, 5778 bp, synthetic construct
  misc_feature 1..5778: note = Description of Artificial Sequence: Synthetic coding sequence
  source 1..5778: mol_type = other DNA
gtgatcgccagcttcagaggcaccgtgccctacggcctgagcctggagatcggcgacaccgtgcagatcctggagaagtgcgacggctggtacagaggcttcgccctgaagaaccccaacatcaagggcatcttccccagcagctacgtgcacctgaagaacgcctgcgtgaagaacaagggccagttcgagatggtgatccccaccgaggacagcgtgatcaccgagatgaccagcaccctgagagactggggcaccatgtggaagcagctgtacgtgagaaacgagggcgacctgttccacagactgtggcacatcatgaacgagatcctggacctgagaagacaggtgctggtgggccacctgacccacgacagaatgaaggacgtgaagagacacatcaccgccagactggactggggcaacgagcagctgggcctggacctggtgcccagaaaggagtacgccatggtggaccccgaggacatcagcatcaccgagctgtacagactgatggagcacagacacagaaagaaggacacccccgtgcaggccagcagccaccacctgttcgtgcagatgaagagcctgatgtgcagcaacctgggcgaggagctggaggtgatcttcagcctgttcgacagcaaggagaacagacccatcagcgagagattcttcctgagactgaacagaaacggcctgcccaaggcccccgacaagcccgagagacactgcagcctgttcgtggacctgggcagcagcgagctgagaaaggacatctacatcaccgtgcacatcatcagaatcggcagaatgggcgccggcgagaagaagaacgcctgcagcgtgcagtacagaagacccttcggctgcgccgtgctgagcatcgccgacctgctgaccggcgagaccaaggacgacctgatcctgaaggtgtacatgtgcaacaccgagagcgagtggtaccagatccacgagaacatcatcaagaagctgaacgccagatacaacctgaccggcagcaacgccggcctggccgtgagcctgcagctgctgcacggcgacatcgagcagatcagaagagagtacagcagcgtgttcagccacggcgtgagcatcaccagaaagctgggcttcagcaacatcatcatgcccggcgagatgagaaacgacctgtacatcaccatcgagagaggcgagttcgagaagggcggcaagagcgtggccagaaacgtggaggtgaccatgttcatcgtggacagcagcggccagaccctgaaggacttcatcagcttcggcagcggcgagccccccgccagcgagtaccacagcttcgtgctgtaccacaacaacagccccagatggagcgagctgctgaagctgcccatccccgtggacaagttcagaggcgcccacatcagattcgagttcagacactgcagcaccaaggagaagggcgagaagaagctgttcggcttcagcttcgtgcccctgatgcaggaggacggcagaaccctgcccgacggcacccacgagctgatcgtgcacaagtgcgaggagaacaccaacctgcaggacaccaccagatacctgaagctgcccttcagcaagggcatcttcctgggcaacaacaaccaggccatgaaggccaccaaggagagcttctgcatcaccagcttcctgtgcagcaccaagctgacccagaacggcgacatgctggacctgctgaagtggagaacccaccccgacaagatcaccggctgcctgagcaagctgaaggagatcgacggcagcgagatcgtgaagttcctgcaggacaccctggacaccctgttcggcatcctggacgagaacagccagaagtacggcagcaaggtgttcgacagcctggtgcacatcatcaacctgctgcaggacagcaagttccaccacttcaagcccgtgatggacacctacatcgagagccacttcgccggcgccctggcctacagagacctgatcaaggtgctgaagtggtacgtggacagaatcaccgaggccgagagacaggagcacatccaggaggtgctgaaggcccaggagtacatcttcaagtacatcgtgcagagcagaagactgttcagcctggccaccggcggccagaacgaggaggagttcagatgctgcatccaggagctgctgatgagcgtgagattcttcctgagccaggagagcaagggcagcggcgccctgagccagagccaggccgtgttcctgagcagcttccccgccgtgtacagcgagctgctgaagctgttcgacgtgagagaggtggccaacctggtgcaggacaccctgggcagcctgcccaccatcctgcacgtggacgacagcctgcaggccatcaagctgcagtgcatcggcaagaccgtggagagccagctgtacaccaaccccgacagcagatacatcctgctgcccgtggtgctgcaccacctgcacatccacctgcaggagcagaaggacctgatcatgtgcgccagaatcctgagcaacgtgttctgcctgatcaagaagaacagcagcgagaagagcgtgctggaggagatcgacgtgatcgtggccagcctgctggacatcctgctgagaaccatcctggagatcaccagcagaccccagcccagcagcagcgccatgagattccagttccaggacgtgaccggcgagttcgtggcctgcctgctgagcctgctgagacagatgaccgacagacactaccagcagctgctggacagcttcaacaccaaggaggagctgagagacttcctgctgcagatcttcaccgtgttcagaatcctgatcagacccgagatgttccccaaggactggaccgtgatgagactggtggccaacaacgtgatcatcaccaccgtgctgtacctgagcgacgccctgagaaagaacttcctgaacgagaacttcgactacaagatctgggacagctacttctacctggccgtgatcttcatcaaccagctgtgcctgcagctggagatgttcacccccagcaagaagaagaaggtgctggagaagtacggcgacatgagagtgaccatgggctgcgagatcttcagcatgtggcagaacctgggcgagcacaagctgcacttcatccccgccctgatcggccccttcctggaggtgaccctgatcccccagcccgacctgagaaacgtgatgatccccatcttccacgacatgatggactgggagcagagaagaagcggcaacttcaagcaggtggaggccaagctgatcgacaagctggacagcctgatgagcgagggcaagggcgacgagacctacagagagctgttcaacagcatcatccccctgttcggcccctaccccagcctgctgaagaagatcgagagagagacctggagagagagcggcgtgagcctgatcgccaccgtgaccagactgatggagagactgctggactacagagactgcatgaagatgggcgaggtggacggcaagaagatcggctgcaccgtgagcctgctgaacttctacaagaccgagctgaacaaggaggagatgtacatcagatacatccacaagctgtacgacctgcacctgaaggcccagaacttcaccgaggccgcctacaccctgctgctgtacgacgagctgctggagtggagcgacagacccctgagagagttcctgacctaccccatgcagaccgagtggcagagaaaggagcacctgcacctgaccatcatccagaacttcgacagaggcaagtgctgggagaacggcatcatcctgtgcagaaagatcgccgagcagtacgagagctactacgactacagaaacctgagcaagatgagaatgatggaggccagcctgtacgacaagatcatggaccagcagagactggagcccgagttcttcagagtgggcttctacggcaagaagttccccttcttcctgagaaacaaggagttcgtgtgcagaggccacgactacgagagactggaggccttccagcagagaatgctgaacgagttcccccacgccatcgccatgcagcacgccaaccagcccgacgagaccatcttccaggccgaggcccagtacctgcagatctacgccgtgacccccatccccgagagccaggaggtgctgcagagagagggcgtgcccgacaacatcaagagcttctacaaggtgaaccacatctggaagttcagatacgacagacccttccacaagggcaccaaggacaaggagaacgagttcaagagcctgtgggtggagagaaccagcctgtacctggtgcagagcctgcccggcatcagcagatggttcgaggtggagaagagagaggtggtggagatgagccccctggagaacgccatcgaggtgctggagaacaagaaccagcagctgaagaccctgatcagccagtgccagaccagacagatgcagaacatcaaccccctgaccatgtgcctgaacggcgtgatcgacgccgccgtgaacggcggcgtgagcagataccaggaggccttcttcgtgaaggagtacatcctgagccaccccgaggacggcgagaagatcgccagactgagagagctgatgctggagcaggcccagatcctggagttcggcctggccgtgcacgagaagttcgtgccccaggacatgagacccctgcacaagaagctggtggaccagttcttcgtgatgaagagcagcctgggcatccaggagttcagcgcctgcatgcaggccagccccgtgcacttccccaacggcagccccagagtgtgcagaaacagcgcccccgccagcgtgagccccgacggcaccagagtgatccccagaagaagccccctgagctaccccgccgtgaacagatacagcagcagcagcctgagcagccaggccagcgccgaggtgagcaacatcaccggccagagcgagagcagcgacgaggtgttcaacatgcagcccagccccagcaccagcagcctgagcagcacccacagcgccagccccaacgtgaccagcagcgcccccagcagcgccagagccagccccctgctgagcgacaagcacaagcacagcagagagaacagctgcctgagccccagagagagaccctgcagcgccatctaccccacccccgtggagcccagccagagaatgctgttcaaccacatcggcgacggcgccctgcccagaagcgaccccaacctgagcgcccccgagaaggccagccccgccagacacaccaccagcgtgagccccagccccgccggcagaagccccctgaagggcagcgtgcagagcttcacccccagccccgtggagtaccacagccccggcctgatcagcaacagccccgtgctgagcggcagctacagcagcggcatcagcagcctgagcagatgcagcaccagcgagaccagcggcttcgagaaccaggtgaacgagcagagcgcccccctgcccgtgcccgtgcccgtgcccgtgcccagctacggcggcgaggagcccgtgagaaaggagagcaagaccccccccccctacagcgtgtacgagagaaccctgagaagacccgtgcccctgccccacagcctgagcatccccgtgaccagcgagccccccgccctgccccccaagcccctggccgccagaagcagccacctggagaacggcgccagaagaaccgaccccggccccagacccagacccctgcccagaaaggtgagccagctgtag

SEQ ID NO: 78857 - DNA, 5865 bp, synthetic construct
  misc_feature 1..5865: note = Description of Artificial Sequence: Synthetic coding sequence
  source 1..5865: mol_type = other DNA
gtgatcgccagcttcagaggcaccgtgccctacggcctgagcctggagatcggcgacaccgtgcagatcctggagaagtgcgacggctggtacagaggcttcgccctgaagaaccccaacatcaagggcatcttccccagcagctacgtgcacctgaagaacgcctgcgtgaagaacaagggccagttcgagatggtgatccccaccgaggacagcgtgatcaccgagatgaccagcaccctgagagactggggcaccatgtggaagcagctgtacgtgagaaacgagggcgacctgttccacagactgtggcacatcatgaacgagatcctggacctgagaagacaggtgctggtgggccacctgacccacgacagaatgaaggacgtgaagagacacatcaccgccagactggactggggcaacgagcagctgggcctggacctggtgcccagaaaggagtacgccatggtggaccccgaggacatcagcatcaccgagctgtacagactgatggagcacagacacagaaagaaggacacccccgtgcaggccagcagccaccacctgttcgtgcagatgaagagcctgatgtgcagcaacctgggcgaggagctggaggtgatcttcagcctgttcgacagcaaggagaacagacccatcagcgagagattcttcctgagactgaacagaaacggcctgcccaaggcccccgacaagcccgagagacactgcagcctgttcgtggacctgggcagcagcgagctgagaaaggacatctacatcaccgtgcacatcatcagaatcggcagaatgggcgccggcgagaagaagaacgcctgcagcgtgcagtacagaagacccttcggctgcgccgtgctgagcatcgccgacctgctgaccggcgagaccaaggacgacctgatcctgaaggtgtacatgtgcaacaccgagagcgagtggtaccagatccacgagaacatcatcaagaagctgaacgccagatacaacctgaccggcagcaacgccggcctggccgtgagcctgcagctgctgcacggcgacatcgagcagatcagaagagagtacagcagcgtgttcagccacggcgtgagcatcaccagaaagctgggcttcagcaacatcatcatgcccggcgagatgagaaacgacctgtacatcaccatcgagagaggcgagttcgagaagggcggcaagagcgtggccagaaacgtggaggtgaccatgttcatcgtggacagcagcggccagaccctgaaggacttcatcagcttcggcagcggcgagccccccgccagcgagtaccacagcttcgtgctgtaccacaacaacagccccagatggagcgagctgctgaagctgcccatccccgtggacaagttcagaggcgcccacatcagattcgagttcagacactgcagcaccaaggagaagggcgagaagaagctgttcggcttcagcttcgtgcccctgatgcaggaggacggcagaaccctgcccgacggcacccacgagctgatcgtgcacaagtgcgaggagaacaccaacctgcaggacaccaccagatacctgaagctgcccttcagcaagggcatcttcctgggcaacaacaaccaggccatgaaggccaccaaggagagcttctgcatcaccagcttcctgtgcagcaccaagctgacccagaacggcgacatgctggacctgctgaagtggagaacccaccccgacaagatcaccggctgcctgagcaagctgaaggagatcgacggcagcgagatcgtgaagttcctgcaggacaccctggacaccctgttcggcatcctggacgagaacagccagaagtacggcagcaaggtgttcgacagcctggtgcacatcatcaacctgctgcaggacagcaagttccaccacttcaagcccgtgatggacacctacatcgagagccacttcgccggcgccctggcctacagagacctgatcaaggtgctgaagtggtacgtggacagaatcaccgaggccgagagacaggagcacatccaggaggtgctgaaggcccaggagtacatcttcaagtacatcgtgcagagcagaagactgttcagcctggccaccggcggccagaacgaggaggagttcagatgctgcatccaggagctgctgatgagcgtgagattcttcctgagccaggagagcaagggcagcggcgccctgagccagagccaggccgtgttcctgagcagcttccccgccgtgtacagcgagctgctgaagctgttcgacgtgagagaggtggccaacctggtgcaggacaccctgggcagcctgcccaccatcctgcacgtggacgacagcctgcaggccatcaagctgcagtgcatcggcaagaccgtggagagccagctgtacaccaaccccgacagcagatacatcctgctgcccgtggtgctgcaccacctgcacatccacctgcaggagcagaaggacctgatcatgtgcgccagaatcctgagcaacgtgttctgcctgatcaagaagaacagcagcgagaagagcgtgctggaggagatcgacgtgatcgtggccagcctgctggacatcctgctgagaaccatcctggagatcaccagcagaccccagcccagcagcagcgccatgagattccagttccaggacgtgaccggcgagttcgtggcctgcctgctgagcctgctgagacagatgaccgacagacactaccagcagctgctggacagcttcaacaccaaggaggagctgagagacttcctgctgcagatcttcaccgtgttcagaatcctgatcagacccgagatgttccccaaggactggaccgtgatgagactggtggccaacaacgtgatcatcaccaccgtgctgtacctgagcgacgccctgagaaagaacttcctgaacgagaacttcgactacaagatctgggacagctacttctacctggccgtgatcttcatcaaccagctgtgcctgcagctggagatgttcacccccagcaagaagaagaaggtgctggagaagtacggcgacatgagagtgaccatgggctgcgagatcttcagcatgtggcagaacctgggcgagcacaagctgcacttcatccccgccctgatcggccccttcctggaggtgaccctgatcccccagcccgacctgagaaacgtgatgatccccatcttccacgacatgatggactgggagcagagaagaagcggcaacttcaagcaggtggaggccaagctgatcgacaagctggacagcctgatgagcgagggcaagggcgacgagacctacagagagctgttcaacagcatcctgctgaagaagatcgagagagagacctggagagagagcggcgtgagcctgatcgccaccgtgaccagactgatggagagactgctggactacagagactgcatgaagatgggcgaggtggacggcaagaagatcggctgcaccgtgagcctgctgaacttctacaagaccgagctgaacaaggaggagatgtacatcagatacatccacaagctgtacgacctgcacctgaaggcccagaacttcaccgaggccgcctacaccctgctgctgtacgacgagctgctggagtggagcgacagacccctgagagagttcctgacctaccccatgcagaccgagtggcagagaaaggagcacctgcacctgaccatcatccagaacttcgacagaggcaagtgctgggagaacggcatcatcctgtgcagaaagatcgccgagcagtacgagagctactacgactacagaaacctgagcaagatgagaatgatggaggccagcctgtacgacaagatcatggaccagcagagactggagcccgagttcttcagagtgggcttctacggcaagaagttccccttcttcctgagaaacaaggagttcgtgtgcagaggccacgactacgagagactggaggccttccagcagagaatgctgaacgagttcccccacgccatcgccatgcagcacgccaaccagcccgacgagaccatcttccaggccgaggcccagtacctgcagatctacgccgtgacccccatccccgagagccaggaggtgctgcagagagagggcgtgcccgacaacatcaagagcttctacaaggtgaaccacatctggaagttcagatacgacagacccttccacaagggcaccaaggacaaggagaacgagttcaagagcctgtgggtggagagaaccagcctgtacctggtgcagagcctgcccggcatcagcagatggttcgaggtggagaagagagaggtggtggagatgagccccctggagaacgccatcgaggtgctggagaacaagaaccagcagctgaagaccctgatcagccagtgccagaccagacagatgcagaacatcaaccccctgaccatgtgcctgaacggcgtgatcgacgccgccgtgaacggcggcgtgagcagataccaggaggccttcttcgtgaaggagtacatcctgagccaccccgaggacggcgagaagatcgccagactgagagagctgatgctggagcaggcccagatcctggagttcggcctggccgtgcacgagaagttcgtgccccaggacatgagacccctgcacaagaagctggtggaccagttcttcgtgatgaagagcagcctgggcatccaggagttcagcgcctgcatgcaggccagccccgtgcacttccccaacggcagccccagagtgtgcagaaacagcgcccccgccagcgtgagccccgacggcaccagagtgatccccagaagaagccccctgagctaccccgccgtgaacagatacagcagcagcagcctgagcagccaggccagcgccgaggtgagcaacatcaccggccagagcgagagcagcgacgaggtgttcaacatgcagcccagccccagcaccagcagcctgagcagcacccacagcgccagccccaacgtgaccagcagcgcccccagcagcgccagagccagccccctgctgagcgacaagcacaagcacagcagagagaacagctgcctgagccccagagagagaccctgcagcgccatctaccccacccccgtggagcccagccagagaatgctgttcaaccacatcggcgacggcgccctgcccagaagcgaccccaacctgagcgcccccgagaaggccgtgaaccccacccccagcagctggagcctggacagcggcaaggaggccaagaacatgagcgacagcggcaagctgatcagcccccccgtgccccccagacccacccagaccgccagccccgccagacacaccaccagcgtgagccccagccccgccggcagaagccccctgaagggcagcgtgcagagcttcacccccagccccgtggagtaccacagccccggcctgatcagcaacagccccgtgctgagcggcagctacagcagcggcatcagcagcctgagcagatgcagcaccagcgagaccagcggcttcgagaaccaggtgaacgagcagagcgcccccctgcccgtgcccgtgcccgtgcccgtgcccagctacggcggcgaggagcccgtgagaaaggagagcaagaccccccccccctacagcgtgtacgagagaaccctgagaagacccgtgcccctgccccacagcctgagcatccccgtgaccagcgagccccccgccctgccccccaagcccctggccgccagaagcagccacctggagaacggcgccagaagaaccgaccccggccccagacccagacccctgcccagaaaggtgagccagctgtag

SEQ ID NO: 78858 - DNA, 5928 bp, synthetic construct
  misc_feature 1..5928: note = Description of Artificial Sequence: Synthetic coding sequence
  source 1..5928: mol_type = other DNA
atgtggatccccaccgagcacgagaagtacggcgtggtgatcgccagcttcagaggcaccgtgccctacggcctgagcctggagatcggcgacaccgtgcagatcctggagaagtgcgacggctggtacagaggcttcgccctgaagaaccccaacatcaagggcatcttccccagcagctacgtgcacctgaagaacgcctgcgtgaagaacaagggccagttcgagatggtgatccccaccgaggacagcgtgatcaccgagatgaccagcaccctgagagactggggcaccatgtggaagcagctgtacgtgagaaacgagggcgacctgttccacagactgtggcacatcatgaacgagatcctggacctgagaagacaggtgctggtgggccacctgacccacgacagaatgaaggacgtgaagagacacatcaccgccagactggactggggcaacgagcagctgggcctggacctggtgcccagaaaggagtacgccatggtggaccccgaggacatcagcatcaccgagctgtacagactgatggagcacagacacagaaagaaggacacccccgtgcaggccagcagccaccacctgttcgtgcagatgaagagcctgatgtgcagcaacctgggcgaggagctggaggtgatcttcagcctgttcgacagcaaggagaacagacccatcagcgagagattcttcctgagactgaacagaaacggcctgcccaaggcccccgacaagcccgagagacactgcagcctgttcgtggacctgggcagcagcgagctgagaaaggacatctacatcaccgtgcacatcatcagaatcggcagaatgggcgccggcgagaagaagaacgcctgcagcgtgcagtacagaagacccttcggctgcgccgtgctgagcatcgccgacctgctgaccggcgagaccaaggacgacctgatcctgaaggtgtacatgtgcaacaccgagagcgagtggtaccagatccacgagaacatcatcaagaagctgaacgccagatacaacctgaccggcagcaacgccggcctggccgtgagcctgcagctgctgcacggcgacatcgagcagatcagaagagagtacagcagcgtgttcagccacggcgtgagcatcaccagaaagctgggcttcagcaacatcatcatgcccggcgagatgagaaacgacctgtacatcaccatcgagagaggcgagttcgagaagggcggcaagagcgtggccagaaacgtggaggtgaccatgttcatcgtggacagcagcggccagaccctgaaggacttcatcagcttcggcagcggcgagccccccgccagcgagtaccacagcttcgtgctgtaccacaacaacagccccagatggagcgagctgctgaagctgcccatccccgtggacaagttcagaggcgcccacatcagattcgagttcagacactgcagcaccaaggagaagggcgagaagaagctgttcggcttcagcttcgtgcccctgatgcaggaggacggcagaaccctgcccgacggcacccacgagctgatcgtgcacaagtgcgaggagaacaccaacctgcaggacaccaccagatacctgaagctgcccttcagcaagggcatcttcctgggcaacaacaaccaggccatgaaggccaccaaggagagcttctgcatcaccagcttcctgtgcagcaccaagctgacccagaacggcgacatgctggacctgctgaagtggagaacccaccccgacaagatcaccggctgcctgagcaagctgaaggagatcgacggcagcgagatcgtgaagttcctgcaggacaccctggacaccctgttcggcatcctggacgagaacagccagaagtacggcagcaaggtgttcgacagcctggtgcacatcatcaacctgctgcaggacagcaagttccaccacttcaagcccgtgatggacacctacatcgagagccacttcgccggcgccctggcctacagagacctgatcaaggtgctgaagtggtacgtggacagaatcaccgaggccgagagacaggagcacatccaggaggtgctgaaggcccaggagtacatcttcaagtacatcgtgcagagcagaagactgttcagcctggccaccggcggccagaacgaggaggagttcagatgctgcatccaggagctgctgatgagcgtgagattcttcctgagccaggagagcaagggcagcggcgccctgagccagagccaggccgtgttcctgagcagcttccccgccgtgtacagcgagctgctgaagctgttcgacgtgagagaggtggccaacctggtgcaggacaccctgggcagcctgcccaccatcctgcacgtggacgacagcctgcaggccatcaagctgcagtgcatcggcaagaccgtggagagccagctgtacaccaaccccgacagcagatacatcctgctgcccgtggtgctgcaccacctgcacatccacctgcaggagcagaaggacctgatcatgtgcgccagaatcctgagcaacgtgttctgcctgatcaagaagaacagcagcgagaagagcgtgctggaggagatcgacgtgatcgtggccagcctgctggacatcctgctgagaaccatcctggagatcaccagcagaccccagcccagcagcagcgccatgagattccagttccaggacgtgaccggcgagttcgtggcctgcctgctgagcctgctgagacagatgaccgacagacactaccagcagctgctggacagcttcaacaccaaggaggagctgagagacttcctgctgcagatcttcaccgtgttcagaatcctgatcagacccgagatgttccccaaggactggaccgtgatgagactggtggccaacaacgtgatcatcaccaccgtgctgtacctgagcgacgccctgagaaagaacttcctgaacgagaacttcgactacaagatctgggacagctacttctacctggccgtgatcttcatcaaccagctgtgcctgcagctggagatgttcacccccagcaagaagaagaaggtgctggagaagtacggcgacatgagagtgaccatgggctgcgagatcttcagcatgtggcagaacctgggcgagcacaagctgcacttcatccccgccctgatcggccccttcctggaggtgaccctgatcccccagcccgacctgagaaacgtgatgatccccatcttccacgacatgatggactgggagcagagaagaagcggcaacttcaagcaggtggaggccaagctgatcgacaagctggacagcctgatgagcgagggcaagggcgacgagacctacagagagctgttcaacagcatcatccccctgttcggcccctaccccagcctgctgaagaagatcgagagagagacctggagagagagcggcgtgagcctgatcgccaccgtgaccagactgatggagagactgctggactacagagactgcatgaagatgggcgaggtggacggcaagaagatcggctgcaccgtgagcctgctgaacttctacaagaccgagctgaacaaggaggagatgtacatcagatacatccacaagctgtacgacctgcacctgaaggcccagaacttcaccgaggccgcctacaccctgctgctgtacgacgagctgctggagtggagcgacagacccctgagagagttcctgacctaccccatgcagaccgagtggcagagaaaggagcacctgcacctgaccatcatccagaacttcgacagaggcaagtgctgggagaacggcatcatcctgtgcagaaagatcgccgagcagtacgagagctactacgactacagaaacctgagcaagatgagaatgatggaggccagcctgtacgacaagatcatggaccagcagagactggagcccgagttcttcagagtgggcttctacggcaagaagttccccttcttcctgagaaacaaggagttcgtgtgcagaggccacgactacgagagactggaggccttccagcagagaatgctgaacgagttcccccacgccatcgccatgcagcacgccaaccagcccgacgagaccatcttccaggccgaggcccagtacctgcagatctacgccgtgacccccatccccgagagccaggaggtgctgcagagagagggcgtgcccgacaacatcaagagcttctacaaggtgaaccacatctggaagttcagatacgacagacccttccacaagggcaccaaggacaaggagaacgagttcaagagcctgtgggtggagagaaccagcctgtacctggtgcagagcctgcccggcatcagcagatggttcgaggtggagaagagagaggtggtggagatgagccccctggagaacgccatcgaggtgctggagaacaagaaccagcagctgaagaccctgatcagccagtgccagaccagacagatgcagaacatcaaccccctgaccatgtgcctgaacggcgtgatcgacgccgccgtgaacggcggcgtgagcagataccaggaggccttcttcgtgaaggagtacatcctgagccaccccgaggacggcgagaagatcgccagactgagagagctgatgctggagcaggcccagatcctggagttcggcctggccgtgcacgagaagttcgtgccccaggacatgagacccctgcacaagaagctggtggaccagttcttcgtgatgaagagcagcctgggcatccaggagttcagcgcctgcatgcaggccagccccgtgcacttccccaacggcagccccagagtgtgcagaaacagcgcccccgccagcgtgagccccgacggcaccagagtgatccccagaagaagccccctgagctaccccgccgtgaacagatacagcagcagcagcctgagcagccaggccagcgccgaggtgagcaacatcaccggccagagcgagagcagcgacgaggtgttcaacatgcagcccagccccagcaccagcagcctgagcagcacccacagcgccagccccaacgtgaccagcagcgcccccagcagcgccagagccagccccctgctgagcgacaagcacaagcacagcagagagaacagctgcctgagccccagagagagaccctgcagcgccatctaccccacccccgtggagcccagccagagaatgctgttcaaccacatcggcgacggcgccctgcccagaagcgaccccaacctgagcgcccccgagaaggccgtgaaccccacccccagcagctggagcctggacagcggcaaggaggccaagaacatgagcgacagcggcaagctgatcagcccccccgtgccccccagacccacccagaccgccagccccgccagacacaccaccagcgtgagccccagccccgccggcagaagccccctgaagggcagcgtgcagagcttcacccccagccccgtggagtaccacagccccggcctgatcagcaacagccccgtgctgagcggcagctacagcagcggcatcagcagcctgagcagatgcagcaccagcgagaccagcggcttcgagaaccaggtgaacgagcagagcgcccccctgcccgtgcccgtgcccgtgcccgtgcccagctacggcggcgaggagcccgtgagaaaggagagcaagaccccccccccctacagcgtgtacgagagaaccctgagaagacccgtgcccctgccccacagcctgagcatccccgtgaccagcgagccccccgccctgccccccaagcccctggccgccagaagcagccacctggagaacggcgccagaagaaccgaccccggccccagacccagacccctgcccagaaaggtgagccagctgtag

SEQ ID NO: 78859 - DNA, 5901 bp, synthetic construct
  misc_feature 1..5901: note = Description of Artificial Sequence: Synthetic coding sequence
  source 1..5901: mol_type = other DNA
atgtggatccccaccgagcacgagaagtacggcgtggtgatcgccagcttcagaggcaccgtgccctacggcctgagcctggagatcggcgacaccgtgcagatcctggagaagtgcgacggctggtacagaggcttcgccctgaagaaccccaacatcaagggcatcttccccagcagctacgtgcacctgaagaacgcctgcgtgaagaacaagggccagttcgagatggtgatccccaccgaggacagcgtgatcaccgagatgaccagcaccctgagagactggggcaccatgtggaagcagctgtacgtgagaaacgagggcgacctgttccacagactgtggcacatcatgaacgagatcctggacctgagaagacaggtgctggtgggccacctgacccacgacagaatgaaggacgtgaagagacacatcaccgccagactggactggggcaacgagcagctgggcctggacctggtgcccagaaaggagtacgccatggtggaccccgaggacatcagcatcaccgagctgtacagactgatggagcacagacacagaaagaaggacacccccgtgcaggccagcagccaccacctgttcgtgcagatgaagagcctgatgtgcagcaacctgggcgaggagctggaggtgatcttcagcctgttcgacagcaaggagaacagacccatcagcgagagattcttcctgagactgaacagaaacggcctgcccaaggcccccgacaagcccgagagacactgcagcctgttcgtggacctgggcagcagcgagctgagaaaggacatctacatcaccgtgcacatcatcagaatcggcagaatgggcgccggcgagaagaagaacgcctgcagcgtgcagtacagaagacccttcggctgcgccgtgctgagcatcgccgacctgctgaccggcgagaccaaggacgacctgatcctgaaggtgtacatgtgcaacaccgagagcgagtggtaccagatccacgagaacatcatcaagaagctgaacgccagatacaacctgaccggcagcaacgccggcctggccgtgagcctgcagctgctgcacggcgacatcgagcagatcagaagagagtacagcagcgtgttcagccacggcgtgagcatcaccagaaagctgggcttcagcaacatcatcatgcccggcgagatgagaaacgacctgtacatcaccatcgagagaggcgagttcgagaagggcggcaagagcgtggccagaaacgtggaggtgaccatgttcatcgtggacagcagcggccagaccctgaaggacttcatcagcttcggcagcggcgagccccccgccagcgagtaccacagcttcgtgctgtaccacaacaacagccccagatggagcgagctgctgaagctgcccatccccgtggacaagttcagaggcgcccacatcagattcgagttcagacactgcagcaccaaggagaagggcgagaagaagctgttcggcttcagcttcgtgcccctgatgcaggaggacggcagaaccctgcccgacggcacccacgagctgatcgtgcacaagtgcgaggagaacaccaacctgcaggacaccaccagatacctgaagctgcccttcagcaagggcatcttcctgggcaacaacaaccaggccatgaaggccaccaaggagagcttctgcatcaccagcttcctgtgcagcaccaagctgacccagaacggcgacatgctggacctgctgaagtggagaacccaccccgacaagatcaccggctgcctgagcaagctgaaggagatcgacggcagcgagatcgtgaagttcctgcaggacaccctggacaccctgttcggcatcctggacgagaacagccagaagtacggcagcaaggtgttcgacagcctggtgcacatcatcaacctgctgcaggacagcaagttccaccacttcaagcccgtgatggacacctacatcgagagccacttcgccggcgccctggcctacagagacctgatcaaggtgctgaagtggtacgtggacagaatcaccgaggccgagagacaggagcacatccaggaggtgctgaaggcccaggagtacatcttcaagtacatcgtgcagagcagaagactgttcagcctggccaccggcggccagaacgaggaggagttcagatgctgcatccaggagctgctgatgagcgtgagattcttcctgagccaggagagcaagggcagcggcgccctgagccagagccaggccgtgttcctgagcagcttccccgccgtgtacagcgagctgctgaagctgttcgacgtgagagaggtggccaacctggtgcaggacaccctgggcagcctgcccaccatcctgcacgtggacgacagcctgcaggccatcaagctgcagtgcatcggcaagaccgtggagagccagctgtacaccaaccccgacagcagatacatcctgctgcccgtggtgctgcaccacctgcacatccacctgcaggagcagaaggacctgatcatgtgcgccagaatcctgagcaacgtgttctgcctgatcaagaagaacagcagcgagaagagcgtgctggaggagatcgacgtgatcgtggccagcctgctggacatcctgctgagaaccatcctggagatcaccagcagaccccagcccagcagcagcgccatgagattccagttccaggacgtgaccggcgagttcgtggcctgcctgctgagcctgctgagacagatgaccgacagacactaccagcagctgctggacagcttcaacaccaaggaggagctgagagacttcctgctgcagatcttcaccgtgttcagaatcctgatcagacccgagatgttccccaaggactggaccgtgatgagactggtggccaacaacgtgatcatcaccaccgtgctgtacctgagcgacgccctgagaaagaacttcctgaacgagaacttcgactacaagatctgggacagctacttctacctggccgtgatcttcatcaaccagctgtgcctgcagctggagatgttcacccccagcaagaagaagaaggtgctggagaagtacggcgacatgagagtgaccatgggctgcgagatcttcagcatgtggcagaacctgggcgagcacaagctgcacttcatccccgccctgatcggccccttcctggaggtgaccctgatcccccagcccgacctgagaaacgtgatgatccccatcttccacgacatgatggactgggagcagagaagaagcggcaacttcaagcaggtggaggccaagctgatcgacaagctggacagcctgatgagcgagggcaagggcgacgagacctacagagagctgttcaacagcatcctgctgaagaagatcgagagagagacctggagagagagcggcgtgagcctgatcgccaccgtgaccagactgatggagagactgctggactacagagactgcatgaagatgggcgaggtggacggcaagaagatcggctgcaccgtgagcctgctgaacttctacaagaccgagctgaacaaggaggagatgtacatcagatacatccacaagctgtacgacctgcacctgaaggcccagaacttcaccgaggccgcctacaccctgctgctgtacgacgagctgctggagtggagcgacagacccctgagagagttcctgacctaccccatgcagaccgagtggcagagaaaggagcacctgcacctgaccatcatccagaacttcgacagaggcaagtgctgggagaacggcatcatcctgtgcagaaagatcgccgagcagtacgagagctactacgactacagaaacctgagcaagatgagaatgatggaggccagcctgtacgacaagatcatggaccagcagagactggagcccgagttcttcagagtgggcttctacggcaagaagttccccttcttcctgagaaacaaggagttcgtgtgcagaggccacgactacgagagactggaggccttccagcagagaatgctgaacgagttcccccacgccatcgccatgcagcacgccaaccagcccgacgagaccatcttccaggccgaggcccagtacctgcagatctacgccgtgacccccatccccgagagccaggaggtgctgcagagagagggcgtgcccgacaacatcaagagcttctacaaggtgaaccacatctggaagttcagatacgacagacccttccacaagggcaccaaggacaaggagaacgagttcaagagcctgtgggtggagagaaccagcctgtacctggtgcagagcctgcccggcatcagcagatggttcgaggtggagaagagagaggtggtggagatgagccccctggagaacgccatcgaggtgctggagaacaagaaccagcagctgaagaccctgatcagccagtgccagaccagacagatgcagaacatcaaccccctgaccatgtgcctgaacggcgtgatcgacgccgccgtgaacggcggcgtgagcagataccaggaggccttcttcgtgaaggagtacatcctgagccaccccgaggacggcgagaagatcgccagactgagagagctgatgctggagcaggcccagatcctggagttcggcctggccgtgcacgagaagttcgtgccccaggacatgagacccctgcacaagaagctggtggaccagttcttcgtgatgaagagcagcctgggcatccaggagttcagcgcctgcatgcaggccagccccgtgcacttccccaacggcagccccagagtgtgcagaaacagcgcccccgccagcgtgagccccgacggcaccagagtgatccccagaagaagccccctgagctaccccgccgtgaacagatacagcagcagcagcctgagcagccaggccagcgccgaggtgagcaacatcaccggccagagcgagagcagcgacgaggtgttcaacatgcagcccagccccagcaccagcagcctgagcagcacccacagcgccagccccaacgtgaccagcagcgcccccagcagcgccagagccagccccctgctgagcgacaagcacaagcacagcagagagaacagctgcctgagccccagagagagaccctgcagcgccatctaccccacccccgtggagcccagccagagaatgctgttcaaccacatcggcgacggcgccctgcccagaagcgaccccaacctgagcgcccccgagaaggccgtgaaccccacccccagcagctggagcctggacagcggcaaggaggccaagaacatgagcgacagcggcaagctgatcagcccccccgtgccccccagacccacccagaccgccagccccgccagacacaccaccagcgtgagccccagccccgccggcagaagccccctgaagggcagcgtgcagagcttcacccccagccccgtggagtaccacagccccggcctgatcagcaacagccccgtgctgagcggcagctacagcagcggcatcagcagcctgagcagatgcagcaccagcgagaccagcggcttcgagaaccaggtgaacgagcagagcgcccccctgcccgtgcccgtgcccgtgcccgtgcccagctacggcggcgaggagcccgtgagaaaggagagcaagaccccccccccctacagcgtgtacgagagaaccctgagaagacccgtgcccctgccccacagcctgagcatccccgtgaccagcgagccccccgccctgccccccaagcccctggccgccagaagcagccacctggagaacggcgccagaagaaccgaccccggccccagacccagacccctgcccagaaaggtgagccagctgtag

SEQ ID NO: 78860 - DNA, 2550 bp, synthetic construct
  misc_feature 1..2550: note = Description of Artificial Sequence: Synthetic coding sequence
  source 1..2550: mol_type = other DNA
atgaagatgcacagcaccgagagaatccccctgttcggcccctaccccagcctgctgaagaagatcgagagagagacctggagagagagcggcgtgagcctgatcgccaccgtgaccagactgatggagagactgctggactacagagactgcatgaagatgggcgaggtggacggcaagaagatcggctgcaccgtgagcctgctgaacttctacaagaccgagctgaacaaggaggagatgtacatcagatacatccacaagctgtacgacctgcacctgaaggcccagaacttcaccgaggccgcctacaccctgctgctgtacgacgagctgctggagtggagcgacagacccctgagagagttcctgacctaccccatgcagaccgagtggcagagaaaggagcacctgcacctgaccatcatccagaacttcgacagaggcaagtgctgggagaacggcatcatcctgtgcagaaagatcgccgagcagtacgagagctactacgactacagaaacctgagcaagatgagaatgatggaggccagcctgtacgacaagatcatggaccagcagagactggagcccgagttcttcagagtgggcttctacggcaagaagttccccttcttcctgagaaacaaggagttcgtgtgcagaggccacgactacgagagactggaggccttccagcagagaatgctgaacgagttcccccacgccatcgccatgcagcacgccaaccagcccgacgagaccatcttccaggccgaggcccagtacctgcagatctacgccgtgacccccatccccgagagccaggaggtgctgcagagagagggcgtgcccgacaacatcaagagcttctacaaggtgaaccacatctggaagttcagatacgacagacccttccacaagggcaccaaggacaaggagaacgagttcaagagcctgtgggtggagagaaccagcctgtacctggtgcagagcctgcccggcatcagcagatggttcgaggtggagaagagagaggtggtggagatgagccccctggagaacgccatcgaggtgctggagaacaagaaccagcagctgaagaccctgatcagccagtgccagaccagacagatgcagaacatcaaccccctgaccatgtgcctgaacggcgtgatcgacgccgccgtgaacggcggcgtgagcagataccaggaggccttcttcgtgaaggagtacatcctgagccaccccgaggacggcgagaagatcgccagactgagagagctgatgctggagcaggcccagatcctggagttcggcctggccgtgcacgagaagttcgtgccccaggacatgagacccctgcacaagaagctggtggaccagttcttcgtgatgaagagcagcctgggcatccaggagttcagcgcctgcatgcaggccagccccgtgcacttccccaacggcagccccagagtgtgcagaaacagcgcccccgccagcgtgagccccgacggcaccagagtgatccccagaagaagccccctgagctaccccgccgtgaacagatacagcagcagcagcctgagcagccaggccagcgccgaggtgagcaacatcaccggccagagcgagagcagcgacgaggtgttcaacatgcagcccagccccagcaccagcagcctgagcagcacccacagcgccagccccaacgtgaccagcagcgcccccagcagcgccagagccagccccctgctgagcgacaagcacaagcacagcagagagaacagctgcctgagccccagagagagaccctgcagcgccatctaccccacccccgtggagcccagccagagaatgctgttcaaccacatcggcgacggcgccctgcccagaagcgaccccaacctgagcgcccccgagaaggccgtgaaccccacccccagcagctggagcctggacagcggcaaggaggccaagaacatgagcgacagcggcaagctgatcagcccccccgtgccccccagacccacccagaccgccagccccgccagacacaccaccagcgtgagccccagccccgccggcagaagccccctgaagggcagcgtgcagagcttcacccccagccccgtggagtaccacagccccggcctgatcagcaacagccccgtgctgagcggcagctacagcagcggcatcagcagcctgagcagatgcagcaccagcgagaccagcggcttcgagaaccaggtgaacgagcagagcgcccccctgcccgtgcccgtgcccgtgcccgtgcccagctacggcggcgaggagcccgtgagaaaggagagcaagaccccccccccctacagcgtgtacgagagaaccctgagaagacccgtgcccctgccccacagcctgagcatccccgtgaccagcgagccccccgccctgccccccaagcccctggccgccagaagcagccacctggagaacggcgccagaagaaccgaccccggccccagacccagacccctgcccagaaaggtgagccagctgtag

SEQ ID NO: 78861 - DNA, 3318 bp, synthetic construct
  misc_feature 1..3318: note = Description of Artificial Sequence: Synthetic coding sequence
  source 1..3318: mol_type = other DNA
tggatccccagcgagaagcagaccttcttcaccgtgatcgccagcttcagaggcaccgtgccctacggcctgagcctggagatcggcgacaccgtgcagatcctggagaagtgcgacggctggtacagaggcttcgccctgaagaaccccaacatcaagggcatcttccccagcagctacgtgcacctgaagaacgcctgcgtgaagaacaagggccagttcgagatggtgatccccaccgaggacagcgtgatcaccgagatgaccagcaccctgagagactggggcaccatgtggaagcagctgtacgtgagaaacgagggcgacctgttccacagactgtggcacatcatgaacgagatcctggacctgagaagacaggtgctggtgggccacctgacccacgacagaatgaaggacgtgaagagacacatcaccgccagactggactggggcaacgagcagctgggcctggacctggtgcccagaaaggagtacgccatggtggaccccgaggacatcagcatcaccgagctgtacagactgatggagcacagacacagaaagaaggacacccccgtgcaggccagcagccaccacctgttcgtgcagatgaagagcctgatgtgcagcaacctgggcgaggagctggaggtgatcttcagcctgttcgacagcaaggagaacagacccatcagcgagagattcttcctgagactgaacagaaacggcctgcccaaggcccccgacaagcccgagagacactgcagcctgttcgtggacctgggcagcagcgagctgagaaaggacatctacatcaccgtgcacatcatcagaatcggcagaatgggcgccggcgagaagaagaacgcctgcagcgtgcagtacagaagacccttcggctgcgccgtgctgagcatcgccgacctgctgaccggcgagaccaaggacgacctgatcctgaaggtgtacatgtgcaacaccgagagcgagtggtaccagatccacgagaacatcatcaagaagctgaacgccagatacaacctgaccggcagcaacgccggcctggccgtgagcctgcagctgctgcacggcgacatcgagcagatcagaagagagtacagcagcgtgttcagccacggcgtgagcatcaccagaaagctgggcttcagcaacatcatcatgcccggcgagatgagaaacgacctgtacatcaccatcgagagaggcgagttcgagaagggcggcaagagcgtggccagaaacgtggaggtgaccatgttcatcgtggacagcagcggccagaccctgaaggacttcatcagcttcggcagcggcgagccccccgccagcgagtaccacagcttcgtgctgtaccacaacaacagccccagatggagcgagctgctgaagctgcccatccccgtggacaagttcagaggcgcccacatcagattcgagttcagacactgcagcaccaaggagaagggcgagaagaagctgttcggcttcagcttcgtgcccctgatgcaggaggacggcagaaccctgcccgacggcacccacgagctgatcgtgcacaagtgcgaggagaacaccaacctgcaggacaccaccagatacctgaagctgcccttcagcaagggcatcttcctgggcaacaacaaccaggccatgaaggccaccaaggagagcttctgcatcaccagcttcctgtgcagcaccaagctgacccagaacggcgacatgctggacctgctgaagtggagaacccaccccgacaagatcaccggctgcctgagcaagctgaaggagatcgacggcagcgagatcgtgaagttcctgcaggacaccctggacaccctgttcggcatcctggacgagaacagccagaagtacggcagcaaggtgttcgacagcctggtgcacatcatcaacctgctgcaggacagcaagttccaccacttcaagcccgtgatggacacctacatcgagagccacttcgccggcgccctggcctacagagacctgatcaaggtgctgaagtggtacgtggacagaatcaccgaggccgagagacaggagcacatccaggaggtgctgaaggcccaggagtacatcttcaagtacatcgtgcagagcagaagactgttcagcctggccaccggcggccagaacgaggaggagttcagatgctgcatccaggagctgctgatgagcgtgagattcttcctgagccaggagagcaagggcagcggcgccctgagccagagccaggccgtgttcctgagcagcttccccgccgtgtacagcgagctgctgaagctgttcgacgtgagagaggtggccaacctggtgcaggacaccctgggcagcctgcccaccatcctgcacgtggacgacagcctgcaggccatcaagctgcagtgcatcggcaagaccgtggagagccagctgtacaccaaccccgacagcagatacatcctgctgcccgtggtgctgcaccacctgcacatccacctgcaggagcagaaggacctgatcatgtgcgccagaatcctgagcaacgtgttctgcctgatcaagaagaacagcagcgagaagagcgtgctggaggagatcgacgtgatcgtggccagcctgctggacatcctgctgagaaccatcctggagatcaccagcagaccccagcccagcagcagcgccatgagattccagttccaggacgtgaccggcgagttcgtggcctgcctgctgagcctgctgagacagatgaccgacagacactaccagcagctgctggacagcttcaacaccaaggaggagctgagagacttcctgctgcagatcttcaccgtgttcagaatcctgatcagacccgagatgttccccaaggactggaccgtgatgagactggtggccaacaacgtgatcatcaccaccgtgctgtacctgagcgacgccctgagaaagaacttcctgaacgagaacttcgactacaagatctgggacagctacttctacctggccgtgatcttcatcaaccagctgtgcctgcagctggagatgttcacccccagcaagaagaagaaggtgctggagaagtacggcgacatgagagtgaccatgggctgcgagatcttcagcatgtggcagaacctgggcgagcacaagctgcacttcatccccgccctgagacaggagaacagactgaacctgggcggcggcggctgcagcgagcccagagcctgccactgcacccccgcctgggccaccaagagagactgcgtgagcaagaagaaggagaagaagacctag

SEQ ID NO: 78862 - DNA, 6144 bp, synthetic construct
  misc_feature 1..6144: note = Description of Artificial Sequence: Synthetic coding sequence
  source 1..6144: mol_type = other DNA
atggccgccagcgagagaagagccttcgcccacaagatcaacagaaccgtggccgccgaggtgagaaagcaggtgagcagagagagaagcggcagcccccacagcagcagaagatgcagcagcagcctgggcgtgcccctgaccgaggtggtggagcccctggacttcgaggacgtgctgctgagcagaccccccgacgccgagcccggccccctgagagacctggtggagttccccgccgacgacctggagctgctgctgcagcccagagagtgcagaaccaccgagcccggcatccccaaggacgagaagctggacgcccaggtgagagccgccgtggagatgtacatcgaggactgggtgatcgtgcacagaagataccagtacctgagcgccgcctacagccccgtgaccaccgacacccagagagagagacagaagggcctgcccagacaggtgttcgagcaggacgccagcggcgacgagagaagcggccccgaggacagcaacgacagcagaagaggcagcggcagccccgaggacacccccagaagcagcggcgccagcagcatcttcgacctgagaaacctggccgccgacagcctgctgcccagcctgctggagagagccgcccccgaggacgtggacagaagaaacgagaccctgagaagacagcacagaccccccgccctgctgaccctgtaccccgcccccgacgaggacgaggccgtggagagatgcagcagacccgagccccccagagagcacttcggccagagaatcctggtgaagtgcctgagcctgaagttcgagatcgagatcgagcccatcttcggcatcctggccctgtacgacgtgagagagaagaagaagatcagcgagaacttctacttcgacctgaacagcgacagcatgaagggcctgctgagagcccacggcacccaccccgccatcagcaccctggccagaagcgccatcttcagcgtgacctaccccagccccgacatcttcctggtgatcaagctggagaaggtgctgcagcagggcgacatcagcgagtgctgcgagccctacatggtgctgaaggaggtggacaccgccaagaacaaggagaagctggagaagctgagactggccgccgagcagttctgcaccagactgggcagatacagaatgcccttcgcctggaccgccgtgcacctggccaacatcgtgagcagcgccggccagctggacagagacagcgacagcgagggcgagagaagacccgcctggaccgacagaagaagaagaggcccccaggacagagccagcagcggcgacgacgcctgcagcttcagcggcttcagacccgccaccctgaccgtgaccaacttcttcaagcaggaggccgagagactgagcgacgaggacctgttcaagttcctggccgacatgagaagacccagcagcctgctgagaagactgagacccgtgaccgcccagctgaagatcgacatcagccccgcccccgagaacccccacttctgcctgagccccgagctgctgcacatcaagccctaccccgaccccagaggcagacccaccaaggagatcctggagttccccgccagagaggtgtacgccccccacaccagctacagaaacctgctgtacgtgtacccccacagcctgaacttcagcagcagacagggcagcgtgagaaacctggccgtgagagtgcagtacatgaccggcgaggaccccagccaggccctgcccgtgatcttcggcaagagcagctgcagcgagttcaccagagaggccttcacccccgtggtgtaccacaacaagagccccgagttctacgaggagttcaagctgcacctgcccgcctgcgtgaccgagaaccaccacctgctgttcaccttctaccacgtgagctgccagcccagacccggcaccgccctggagacccccgtgggcttcacctggatccccctgctgcagcacggcagactgagaaccggccccttctgcctgcccgtgagcgtggaccagcccccccccagctacagcgtgctgacccccgacgtggccctgcccggcatgagatgggtggacggccacaagggcgtgttcagcgtggagctgaccgccgtgagcagcgtgcacccccaggacccctacctggacaagttcttcaccctggtgcacgtgctggaggagggcgccttccccttcagactgaaggacaccgtgctgagcgagggcaacgtggagcaggagctgagagccagcctggccgccctgagactggccagccccgagcccctggtggccttcagccaccacgtgctggacaagctggtgagactggtgatcagaccccccatcatcagcggccagatcgtgaacctgggcagaggcgccttcgaggccatggcccacgtggtgagcctggtgcacagaagcctggaggccgcccaggacgccagaggccactgcccccagctggccgcctacgtgcactacgccttcagactgcccggcaccgagcccagcctgcccgacggcgccccccccgtgaccgtgcaggccgccaccctggccagaggcagcggcagacccgccagcctgtacctggccagaagcaagagcatcagcagcagcaaccccgacctggccgtggcccccggcagcgtggacgacgaggtgagcagaatcctggccagcaagctgctgcacgaggagctggccctgcagtgggtggtgagcagcagcgccgtgagagaggccatcctgcagcacgcctggttcttcttccagctgatggtgaagagcatggccctgcacctgctgctgggccagagactggacacccccagaaagctgagattccccggcagattcctggacgacatcaccgccctggtgggcagcgtgggcctggaggtgatcaccagagtgcacaaggacgtggagctggccgagcacctgaacgccagcctggccttcttcctgagcgacctgctgagcctggtggacagaggcttcgtgttcagcctggtgagagcccactacaagcaggtggccaccagactgcagagcagccccaaccccgccgccctgctgaccctgagaatggagttcaccagaatcctgtgcagccacgagcactacgtgaccctgaacctgccctgctgccccctgagcccccccgccagccccagccccagcgtgagcagcaccaccagccagagcagcaccttcagcagccaggcccccgaccccaaggtgaccagcatgttcgagctgagcggccccttcagacagcagcacttcctggccggcctgctgctgaccgagctggccctggccctggagcccgaggccgagggcgccttcctgctgcacaagaaggccatcagcgccgtgcacagcctgctgtgcggccacgacaccgaccccagatacgccgaggccaccgtgaaggccagagtggccgagctgtacctgcccctgctgagcatcgccagagacaccctgcccagactgcacgacttcgccgagggccccggccagagaagcagactggccagcatgctggacagcgacaccgagggcgagggcgacatcgccggcaccatcaaccccagcgtggccatggccatcgccggcggccccctggcccccggcagcagagccagcatcagccagggcccccccaccgccagcagagccggctgcgccctgagcgccgagagcagcagaaccctgctggcctgcgtgctgtgggtgctgaagaacaccgagcccgccctgctgcagagatgggccaccgacctgaccctgccccagctgggcagactgctggacctgctgtacctgtgcctggccgccttcgagtacaagggcaagaaggccttcgagagaatcaacagcctgaccttcaagaagagcctggacatgaaggccagactggaggaggccatcctgggcaccatcggcgccagacaggagatggtgagaagaagcagagagagaagccccttcggcaaccccgagaacgtgagatggagaaagagcgtgacccactggaagcagaccagcgacagagtggacaagaccaaggacgagatggagcacgaggccctggtggagggcaacctggccaccgaggccagcctggtggtgctggacaccctggagatcatcgtgcagaccgtgatgctgagcgaggccagagagagcgtgctgggcgccgtgctgaaggtggtgctgtacagcctgggcagcgcccagagcgccctgttcctgcagcacggcctggccacccagagagccctggtgagcaagttccccgagctgctgttcgaggaggacaccgagctgtgcgccgacctgtgcctgagactgctgagacactgcggcagcagaatcagcaccatcagaacccacgccagcgccagcctgtacctgctgatgagacagaacttcgagatcggccacaacttcgccagagtgaagatgcaggtgaccatgagcctgagcagcctggtgggcaccacccagaacttcagcgaggagcacctgagaagaagcctgaagaccatcctgacctacgccgaggaggacatgggcctgagagacagcaccttcgccgagcaggtgcaggacctgatgttcaacctgcacatgatcctgaccgacaccgtgaagatgaaggagcaccaggaggaccccgagatgctgatcgacctgatgtacagaatcgccagaggctaccagggcagccccgacctgagactgacctggctgcagaacatggccggcaagcacgccgagctgggcaaccacgccgaggccgcccagtgcatggtgcacgccgccgccctggtggccgagtacctggccctgctggaggaccacagacacctgcccgtgggctgcgtgagcttccagaacatcagcagcaacgtgctggaggagagcgccatcagcgacgacatcctgagccccgacgaggagggcttctgcagcggcaagcacttcaccgagctgggcctggtgggcctgctggagcaggccgccggctacttcaccatgggcggcctgtacgaggccgtgaacgaggtgtacaagaacctgatccccatcctggaggcccacagagactacaagaagctggccgccgtgcacggcaagctgcaggaggccttcaccaagatcatgcaccagagcagcggctgggagagagtgttcggcacctacttcagagtgggcttctacggcgcccacttcggcgacctggacgagcaggagttcgtgtacaaggagcccagcatcaccaagctggccgagatcagccacagactggaggagttctacaccgagagattcggcgacgacgtggtggagatcatcaaggacagcaaccccgtggacaagagcaagctggacagccagaaggcctacatccagatcacctacgtggagccctacttcgacacctacgagctgaaggacagagtgacctacttcgacagaaactacggcctgagaaccttcctgttctgcacccccttcacccccgacggcagagcccacggcgagctgcccgagcagcacaagagaaagaccctgctgagcaccgaccacgccttcccctacatcaagaccagaatcagagtgtgccacagagaggagaccgtgctgacccccgtggaggtggccatcgaggacatgcagaagaagaccagagagctggccttcgccaccgagcaggacccccccgacgccaagatgctgcagatggtgctgcagggcagcgtgggccccaccgtgaaccagggccccctggaggtggcccaggtgttcctggccgagatccccgaggaccccaagctgttcagacaccacaacaagctgagactgtgcttcaaggacttctgcaagaagtgcgaggacgccctgagaaagaacaaggccctgatcggccccgaccagaaggagtaccacagagagctggagagaaactactgcagactgagagaggccctgcagcccctgctgacccagagactgccccagctgatggcccccaccccccccggcctgagaaacagcctgaacagagccagcttcagaaaggccgacctgtag

SEQ ID NO: 78863 - DNA, 4161 bp, synthetic construct
  misc_feature 1..4161: note = Description of Artificial Sequence: Synthetic coding sequence
  source 1..4161: mol_type = other DNA
atgagatgggtggacggccacaagggcgtgttcagcgtggagctgaccgccgtgagcagcgtgcacccccaggacccctacctggacaagttcttcaccctggtgcacgtgctggaggagggcgccttccccttcagactgaaggacaccgtgctgagcgagggcaacgtggagcaggagctgagagccagcctggccgccctgagactggccagccccgagcccctggtggccttcagccaccacgtgctggacaagctggtgagactggtgatcagaccccccatcatcagcggccagatcgtgaacctgggcagaggcgccttcgaggccatggcccacgtggtgagcctggtgcacagaagcctggaggccgcccaggacgccagaggccactgcccccagctggccgcctacgtgcactacgccttcagactgcccggcaccgagcccagcctgcccgacggcgccccccccgtgaccgtgcaggccgccaccctggccagaggcagcggcagacccgccagcctgtacctggccagaagcaagagcatcagcagcagcaaccccgacctggccgtggcccccggcagcgtggacgacgaggtgagcagaatcctggccagcaagggcatcgacagaagccacagctgggtgaacagcgcctacgcccccggcggcagcaaggccgtgctgagaagagcccccccctactgcggcgccgaccccagacagctgctgcacgaggagctggccctgcagtgggtggtgagcagcagcgccgtgagagaggccatcctgcagcacgcctggttcttcttccagctgatggtgaagagcatggccctgcacctgctgctgggccagagactggacacccccagaaagctgagattccccggcagattcctggacgacatcaccgccctggtgggcagcgtgggcctggaggtgatcaccagagtgcacaaggacgtggagctggccgagcacctgaacgccagcctggccttcttcctgagcgacctgctgagcctggtggacagaggcttcgtgttcagcctggtgagagcccactacaagcaggtggccaccagactgcagagcagccccaaccccgccgccctgctgaccctgagaatggagttcaccagaatcctgtgcagccacgagcactacgtgaccctgaacctgccctgctgccccctgagcccccccgccagccccagccccagcgtgagcagcaccaccagccagagcagcaccttcagcagccaggcccccgaccccaaggtgaccagcatgttcgagctgagcggccccttcagacagcagcacttcctggccggcctgctgctgaccgagctggccctggccctggagcccgaggccgagggcgccttcctgctgcacaagaaggccatcagcgccgtgcacagcctgctgtgcggccacgacaccgaccccagatacgccgaggccaccgtgaaggccagagtggccgagctgtacctgcccctgctgagcatcgccagagacaccctgcccagactgcacgacttcgccgagggccccggccagagaagcagactggccagcatgctggacagcgacaccgagggcgagggcgacatcgccggcaccatcaaccccagcgtggccatggccatcgccggcggccccctggcccccggcagcagagccagcatcagccagggcccccccaccgccagcagagccggctgcgccctgagcgccgagagcagcagaaccctgctggcctgcgtgctgtgggtgctgaagaacaccgagcccgccctgctgcagagatgggccaccgacctgaccctgccccagctgggcagactgctggacctgctgtacctgtgcctggccgccttcgagtacaagggcaagaaggccttcgagagaatcaacagcctgaccttcaagaagagcctggacatgaaggccagactggaggaggccatcctgggcaccatcggcgccagacaggagatggtgagaagaagcagagagagaagccccttcggcaaccccgagaacgtgagatggagaaagagcgtgacccactggaagcagaccagcgacagagtggacaagaccaaggacgagatggagcacgaggccctggtggagggcaacctggccaccgaggccagcctggtggtgctggacaccctggagatcatcgtgcagaccgtgatgctgagcgaggccagagagagcgtgctgggcgccgtgctgaaggtggtgctgtacagcctgggcagcgcccagagcgccctgttcctgcagcacggcctggccacccagagagccctggtgagcaagttccccgagctgctgttcgaggaggacaccgagctgtgcgccgacctgtgcctgagactgctgagacactgcggcagcagaatcagcaccatcagaacccacgccagcgccagcctgtacctgctgatgagacagaacttcgagatcggccacaacttcgccagagtgaagatgcaggtgaccatgagcctgagcagcctggtgggcaccacccagaacttcagcgaggagcacctgagaagaagcctgaagaccatcctgacctacgccgaggaggacatgggcctgagagacagcaccttcgccgagcaggtgcaggacctgatgttcaacctgcacatgatcctgaccgacaccgtgaagatgaaggagcaccaggaggaccccgagatgctgatcgacctgatgtacagaatcgccagaggctaccagggcagccccgacctgagactgacctggctgcagaacatggccggcaagcacgccgagctgggcaaccacgccgaggccgcccagtgcatggtgcacgccgccgccctggtggccgagtacctggccctgctggaggaccacagacacctgcccgtgggctgcgtgagcttccagaacatcagcagcaacgtgctggaggagagcgccatcagcgacgacatcctgagccccgacgaggagggcttctgcagcggcaagcacttcaccgagctgggcctggtgggcctgctggagcaggccgccggctacttcaccatgggcggcctgtacgaggccgtgaacgaggtgtacaagaacctgatccccatcctggaggcccacagagactacaagaagctggccgccgtgcacggcaagctgcaggaggccttcaccaagatcatgcaccagagcagcggctgggagagagtgttcggcacctacttcagagtgggcttctacggcgcccacttcggcgacctggacgagcaggagttcgtgtacaaggagcccagcatcaccaagctggccgagatcagccacagactggaggagttctacaccgagagattcggcgacgacgtggtggagatcatcaaggacagcaaccccgtggacaagagcaagctggacagccagaaggcctacatccagatcacctacgtggagccctacttcgacacctacgagctgaaggacagagtgacctacttcgacagaaactacggcctgagaaccttcctgttctgcacccccttcacccccgacggcagagcccacggcgagctgcccgagcagcacaagagaaagaccctgctgagcaccgaccacgccttcccctacatcaagaccagaatcagagtgtgccacagagaggagaccgtgctgacccccgtggaggtggccatcgaggacatgcagaagaagaccagagagctggccttcgccaccgagcaggacccccccgacgccaagatgctgcagatggtgctgcagggcagcgtgggccccaccgtgaaccagggccccctggaggtggcccaggtgttcctggccgagatccccgaggaccccaagctgttcagacaccacaacaagctgagactgtgcttcaaggacttctgcaagaagtgcgaggacgccctgagaaagaacaaggccctgatcggccccgaccagaaggagtaccacagagagctggagagaaactactgcagactgagagaggccctgcagcccctgctgacccagagactgccccagctgatggcccccaccccccccggcctgagaaacagcctgaacagagccagcttcagaaaggccgacctgtag

SEQ ID NO: 78864 - DNA, 5973 bp, synthetic construct
  misc_feature 1..5973: note = Description of Artificial Sequence: Synthetic coding sequence
  source 1..5973: mol_type = other DNA
atggccaccctgcccagcgccgagagaagagccttcgccctgaagatcaacagatacagcagcgccgagatcagaaagcagttcaccctgccccccaacctgggccagtaccacagacagagcatcagcaccagcggcttccccagcctgcagctgccccagttctacgaccccgtggagcccgtggacttcgagggcctgctgatgacccacctgaacagcctggacgtgcagctggcccaggagctgggcgacttcaccgacgacgacctggacgtggtgttcacccccaaggagtgcagaaccctgcagcccagcctgcccgaggagggcgtggagctggacccccacgtgagagactgcgtgcagacctacatcagagagtggctgatcgtgaacagaaagaaccagggcagccccgagatctgcggcttcaagaagaccggcagcagaaaggacttccacaagaccctgcccaagcagaccttcgagagcgagaccctggagtgcagcgagcccgccgcccaggccggccccagacacctgaacgtgctgtgcgacgtgagcggcaagggccccgtgaccgcctgcgacttcgacctgagaagcctgcagcccgacaagagactggagaacctgctgcagcaggtgagcgccgaggacttcgagaagcagaacgaggaggccagaagaaccaacagacaggccgagctgttcgccctgtaccccagcgtggacgaggaggacgccgtggagatcagacccgtgcccgagtgccccaaggagcacctgggcaacagaatcctggtgaagctgctgaccctgaagttcgagatcgagatcgagcccctgttcgccagcatcgccctgtacgacgtgaaggagagaaagaagatcagcgagaacttccactgcgacctgaacagcgaccagttcaagggcttcctgagagcccacacccccagcgtggccgccagcagccaggccagaagcgccgtgttcagcgtgacctaccccagcagcgacatctacctggtggtgaagatcgagaaggtgctgcagcagggcgagatcggcgactgcgccgagccctacaccgtgatcaaggagagcgacggcggcaagagcaaggagaagatcgagaagctgaagctgcaggccgagagcttctgccagagactgggcaagtacagaatgcccttcgcctgggcccccatcagcctgagcagcttcttcaacgtgagcaccctggagagagaggtgaccgacgtggacagcgtggtgggcagaagcagcgtgggcgagagaagaaccctggcccagagcagaagactgagcgagagagccctgagcctggaggagaacggcgtgggcagcaacttcaagaccagcaccctgagcgtgagcagcttcttcaagcaggagggcgacagactgagcgacgaggacctgttcaagttcctggccgactacaagagaagcagcagcctgcagagaagagtgaagagcatccccggcctgctgagactggagatcagcaccgcccccgagatcatcaactgctgcctgacccccgagatgctgcccgtgaagcccttccccgagaacagaaccagaccccacaaggagatcctggagttccccaccagagaggtgtacgtgccccacaccgtgtacagaaacctgctgtacgtgtacccccagagactgaacttcgtgaacaagctggccagcgccagaaacatcaccatcaagatccagttcatgtgcggcgaggacgccagcaacgccatgcccgtgatcttcggcaagagcagcggccccgagttcctgcaggaggtgtacaccgccgtgacctaccacaacaagagccccgacttctacgaggaggtgaagatcaagctgcccgccaagctgaccgtgaaccaccacctgctgttcaccttctaccacatcagctgccagcagaagcagggcgccagcgtggagaccctgctgggctacagctggctgcccatcctgctgaacgagagactgcagaccggcagctactgcctgcccgtggccctggagaagctgccccccaactacagcatgcacagcgccgagaaggtgcccctgcagaacccccccatcaagtgggccgagggccacaagggcgtgttcaacatcgaggtgcaggccgtgagcagcgtgcacacccaggacaaccacctggagaagttcttcaccctgtgccacagcctggagagccaggtgaccttccccatcagagtgctggaccagaagatcagcgagatggccctggagcacgagctgaagctgagcatcatctgcctgaacagcagcagactggagcccctggtgctgttcctgcacctggtgctggacaagctgttccagctgagcgtgcagcccatggtgatcgccggccagaccgccaacttcagccagttcgccttcgagagcgtggtggccatcgccaacagcctgcacaacagcaaggacctgagcaaggaccagcacggcagaaactgcctgctggccagctacgtgcactacgtgttcagactgcccgaggtgcagagagacgtgcccaagagcggcgcccccaccgccctgctggaccccagaagctaccacacctacggcagaaccagcgccgccgccgtgagcagcaagctgctgcaggccagagtgatgagcagcagcaaccccgacctggccggcacccacagcgccgccgacgaggaggtgaagaacatcatgagcagcaagcacttccacgaggagctggccctgcagatggtggtgagcaccggcatggtgagagagaccgtgttcaagtacgcctggttcttcttcgagctgctggtgaagagcatggcccagcacgtgcacaacatggacaagagagacagcttcagaagaaccagattcagcgacagattcatggacgacatcaccaccatcgtgaacgtggtgaccagcgagatcgccgccctgctggtgaagccccagaaggagaacgagcaggccgagaagatgaacatcagcctggccttcttcctgtacgacctgctgagcctgatggacagaggcttcgtgttcaacctgatcagacactactgcagccagctgagcgccaagctgagcaacctgcccaccctgatcagcatgagactggagttcctgagaatcctgtgcagccacgagcactacctgaacctgaacctgttcttcatgaacgccgacaccgcccccaccagcccctgccccagcatcagcagccagaacagcagcagctgcagcagcttccaggaccagaagatcgccagcatgttcgacctgaccagcgagtacagacagcagcacttcctgaccggcctgctgttcaccgagctggccgccgccctggacgccgagggcgagggcatcagcaaggtgcagagaaaggccgtgagcgccatccacagcctgctgagcagccacgacctggaccccagatgcgtgaagcccgaggtgaaggtgaagatcgccgccctgtacctgcccctggtgggcatcatcctggacgccctgccccagctgtgcgacttcaccgtggccgacaccagaagatacagaaccagcggcagcgacgaggagcaggagggcgccggcgccatcaaccagaacgtggccctggccatcgccggcaacaacttcaacctgaagaccagcggcatcgtgctgagcagcctgccctacaagcagtacaacatgctgaacgccgacaccaccagaaacctgatgatctgcttcctgtggatcatgaagaacgccgaccagagcctgatcagaaagtggatcgccgacctgcccagcacccagctgaacagaatcctggacctgctgttcatctgcgtgctgtgcttcgagtacaagggcaagcagagcagcgacaaggtgagcacccaggtgctgcagaagagcagagacgtgaaggccagactggaggaggccctgctgagaggcgagggcgccagaggcgagatgatgagaagaagagcccccggcaacgacagattccccggcctgaacgagaacctgagatggaagaaggagcagacccactggagacaggccaacgagaagctggacaagaccaaggccgagctggaccaggaggccctgatcagcggcaacctggccaccgaggcccacctgatcatcctggacatgcaggagaacatcatccaggccagcagcgccctggactgcaaggacagcctgctgggcggcgtgctgagagtgctggtgaacagcctgaactgcgaccagagcaccacctacctgacccactgcttcgccaccctgagagccctgatcgccaagttcggcgacctgctgttcgaggaggaggtggagcagtgcttcgacctgtgccaccaggtgctgcaccactgcagcagcagcatggacgtgaccagaagccaggcctgcgccaccctgtacctgctgatgagattcagcttcggcgccaccagcaacttcgccagagtgaagatgcaggtgaccatgagcctggccagcctggtgggcagagcccccgacttcaacgaggagcacctgagaagaagcctgagaaccatcctggcctacagcgaggaggacaccgccatgcagatgacccccttccccacccaggtggaggagctgctgtgcaacctgaacagcatcctgtacgacaccgtgaagatgagagagttccaggaggaccccgagatgctgatggacctgatgtacagaatcgccaagagctaccaggccagccccgacctgagactgacctggctgcagaacatggccgagaagcacaccaagaagaagtgctacaccgaggccgccatgtgcctggtgcacgccgccgccctggtggccgagtacctgagcatgctggaggaccacagctacctgcccgtgggcagcgtgagcttccagaacatcagcagcaacgtgctggaggagagcgtggtgagcgaggacaccctgagccccgacgaggacggcgtgtgcgccggccagtacttcaccgagagcggcctggtgggcctgctggagcaggccgccgagctgttcagcaccggcggcctgtacgagaccgtgaacgaggtgtacaagctggtgatccccatcctggaggcccacagagagttcagaaagctgaccctgacccacagcaagctgcagagagccttcgacagcatcgtgaacaaggaccacaagagaatgttcggcacctacttcagagtgggcttcttcggcagcaagttcggcgacctggacgagcaggagttcgtgtacaaggagcccgccatcaccaagctgcccgagatcagccacagactggaggccttctacggccagtgcttcggcgccgagttcgtggaggtgatcaaggacagcacccccgtggacaagaccaagctggaccccaacaaggcctacatccagatcaccttcgtggagccctacttcgacgagtacgagatgaaggacagagtgacctacttcgagaagaacttcaacctgagaagattcatgtacaccacccccttcaccctggagggcagacccagaggcgagctgcacgagcagtacagaagaaacaccgtgctgaccaccatgcacgccttcccctacatcaagaccagaatcagcgtgatccagaaggaggagttcgtgctgacccccatcgaggtggccatcgaggacatgaagaagaagaccctgcagctggccgtggccatcaaccaggagccccccgacgccaagatgctgcagatggtgctgcagggcagcgtgggcgccaccgtgaaccagggccccctggaggtggcccaggtgttcctggccgagatccccgccgaccccaagctgtacagacaccacaacaagctgagactgtgcttcaaggagttcatcatgtag

SEQ ID NO: 78865 - DNA, 6096 bp, synthetic construct
  misc_feature 1..6096: note = Description of Artificial Sequence: Synthetic coding sequence
  source 1..6096: mol_type = other DNA
atgacccacctgaacagcctggacgtgcagctggcccaggagctgggcgacttcaccgacgacgacctggacgtggtgttcacccccaaggagtgcagaaccctgcagcccagcctgcccgaggagggcgtggagctggacccccacgtgagagactgcgtgcagacctacatcagagagtggctgatcgtgaacagaaagaaccagggcagccccgagatctgcggcttcaagaagaccggcagcagaaaggacttccacaagaccctgcccaagcagaccttcgagagcgagaccctggagtgcagcgagcccgccgcccaggccggccccagacacctgaacgtgctgtgcgacgtgagcggcaagggccccgtgaccgcctgcgacttcgacctgagaagcctgcagcccgacaagagactggagaacctgctgcagcaggtgagcgccgaggacttcgagaagcagaacgaggaggccagaagaaccaacagacaggccgagctgttcgccctgtaccccagcgtggacgaggaggacgccgtggagatcagacccgtgcccgagtgccccaaggagcacctgggcaacagaatcctggtgaagctgctgaccctgaagttcgagatcgagatcgagcccctgttcgccagcatcgccctgtacgacgtgaaggagagaaagaagatcagcgagaacttccactgcgacctgaacagcgaccagttcaagggcttcctgagagcccacacccccagcgtggccgccagcagccaggccagaagcgccgtgttcagcgtgacctaccccagcagcgacatctacctggtggtgaagatcgagaaggtgctgcagcagggcgagatcggcgactgcgccgagccctacaccgtgatcaaggagagcgacggcggcaagagcaaggagaagatcgagaagctgaagctgcaggccgagagcttctgccagagactgggcaagtacagaatgcccttcgcctgggcccccatcagcctgagcagcttcttcaacgtgagcaccctggagagagaggtgaccgacgtggacagcgtggtgggcagaagcagcgtgggcgagagaagaaccctggcccagagcagaagactgagcgagagagccctgagcctggaggagaacggcgtgggcagcaacttcaagaccagcaccctgagcgtgagcagcttcttcaagcaggagggcgacagactgagcgacgaggacctgttcaagttcctggccgactacaagagaagcagcagcctgcagagaagagtgaagagcatccccggcctgctgagactggagatcagcaccgcccccgagatcatcaactgctgcctgacccccgagatgctgcccgtgaagcccttccccgagaacagaaccagaccccacaaggagatcctggagttccccaccagagaggtgtacgtgccccacaccgtgtacagaaacctgctgtacgtgtacccccagagactgaacttcgtgaacaagctggccagcgccagaaacatcaccatcaagatccagttcatgtgcggcgaggacgccagcaacgccatgcccgtgatcttcggcaagagcagcggccccgagttcctgcaggaggtgtacaccgccgtgacctaccacaacaagagccccgacttctacgaggaggtgaagatcaagctgcccgccaagctgaccgtgaaccaccacctgctgttcaccttctaccacatcagctgccagcagaagcagggcgccagcgtggagaccctgctgggctacagctggctgcccatcctgctgaacgagagactgcagaccggcagctactgcctgcccgtggccctggagaagctgccccccaactacagcatgcacagcgccgagaaggtgcccctgcagaacccccccatcaagtgggccgagggccacaagggcgtgttcaacatcgaggtgcaggccgtgagcagcgtgcacacccaggacaaccacctggagaagttcttcaccctgtgccacagcctggagagccaggtgaccttccccatcagagtgctggaccagaagatcagcgagatggccctggagcacgagctgaagctgagcatcatctgcctgaacagcagcagactggagcccctggtgctgttcctgcacctggtgctggacaagctgttccagctgagcgtgcagcccatggtgatcgccggccagaccgccaacttcagccagttcgccttcgagagcgtggtggccatcgccaacagcctgcacaacagcaaggacctgagcaaggaccagcacggcagaaactgcctgctggccagctacgtgcactacgtgttcagactgcccgaggtgcagagagacgtgcccaagagcggcgcccccaccgccctgctggaccccagaagctaccacacctacggcagaaccagcgccgccgccgtgagcagcaagctgctgcaggccagagtgatgagcagcagcaaccccgacctggccggcacccacagcgccgccgacgaggaggtgaagaacatcatgagcagcaagatcgccgacagaaactgcagcagaatgagctactactgcagcggcagcagcgacgcccccagcagccccgccgcccccagacccgccagcaagaagcacttccacgaggagctggccctgcagatggtggtgagcaccggcatggtgagagagaccgtgttcaagtacgcctggttcttcttcgagctgctggtgaagagcatggcccagcacgtgcacaacatggacaagagagacagcttcagaagaaccagattcagcgacagattcatggacgacatcaccaccatcgtgaacgtggtgaccagcgagatcgccgccctgctggtgaagccccagaaggagaacgagcaggccgagaagatgaacatcagcctggccttcttcctgtacgacctgctgagcctgatggacagaggcttcgtgttcaacctgatcagacactactgcagccagctgagcgccaagctgagcaacctgcccaccctgatcagcatgagactggagttcctgagaatcctgtgcagccacgagcactacctgaacctgaacctgttcttcatgaacgccgacaccgcccccaccagcccctgccccagcatcagcagccagaacagcagcagctgcagcagcttccaggaccagaagatcgccagcatgttcgacctgaccagcgagtacagacagcagcacttcctgaccggcctgctgttcaccgagctggccgccgccctggacgccgagggcgagggcatcagcaaggtgcagagaaaggccgtgagcgccatccacagcctgctgagcagccacgacctggaccccagatgcgtgaagcccgaggtgaaggtgaagatcgccgccctgtacctgcccctggtgggcatcatcctggacgccctgccccagctgtgcgacttcaccgtggccgacaccagaagatacagaaccagcggcagcgacgaggagcaggagggcgccggcgccatcaaccagaacgtggccctggccatcgccggcaacaacttcaacctgaagaccagcggcatcgtgctgagcagcctgccctacaagcagtacaacatgctgaacgccgacaccaccagaaacctgatgatctgcttcctgtggatcatgaagaacgccgaccagagcctgatcagaaagtggatcgccgacctgcccagcacccagctgaacagaatcctggacctgctgttcatctgcgtgctgtgcttcgagtacaagggcaagcagagcagcgacaaggtgagcacccaggtgctgcagaagagcagagacgtgaaggccagactggaggaggccctgctgagaggcgagggcgccagaggcgagatgatgagaagaagagcccccggcaacgacagattccccggcctgaacgagaacctgagatggaagaaggagcagacccactggagacaggccaacgagaagctggacaagaccaaggccgagctggaccaggaggccctgatcagcggcaacctggccaccgaggcccacctgatcatcctggacatgcaggagaacatcatccaggccagcagcgccctggactgcaaggacagcctgctgggcggcgtgctgagagtgctggtgaacagcctgaactgcgaccagagcaccacctacctgacccactgcttcgccaccctgagagccctgatcgccaagttcggcgacctgctgttcgaggaggaggtggagcagtgcttcgacctgtgccaccaggtgctgcaccactgcagcagcagcatggacgtgaccagaagccaggcctgcgccaccctgtacctgctgatgagattcagcttcggcgccaccagcaacttcgccagagtgaagatgcaggtgaccatgagcctggccagcctggtgggcagagcccccgacttcaacgaggagcacctgagaagaagcctgagaaccatcctggcctacagcgaggaggacaccgccatgcagatgacccccttccccacccaggtggaggagctgctgtgcaacctgaacagcatcctgtacgacaccgtgaagatgagagagttccaggaggaccccgagatgctgatggacctgatgtacagaatcgccaagagctaccaggccagccccgacctgagactgacctggctgcagaacatggccgagaagcacaccaagaagaagtgctacaccgaggccgccatgtgcctggtgcacgccgccgccctggtggccgagtacctgagcatgctggaggaccacagctacctgcccgtgggcagcgtgagcttccagaacatcagcagcaacgtgctggaggagagcgtggtgagcgaggacaccctgagccccgacgaggacggcgtgtgcgccggccagtacttcaccgagagcggcctggtgggcctgctggagcaggccgccgagctgttcagcaccggcggcctgtacgagaccgtgaacgaggtgtacaagctggtgatccccatcctggaggcccacagagagttcagaaagctgaccctgacccacagcaagctgcagagagccttcgacagcatcgtgaacaaggaccacaagagaatgttcggcacctacttcagagtgggcttcttcggcagcaagttcggcgacctggacgagcaggagttcgtgtacaaggagcccgccatcaccaagctgcccgagatcagccacagactggaggccttctacggccagtgcttcggcgccgagttcgtggaggtgatcaaggacagcacccccgtggacaagaccaagctggaccccaacaaggcctacatccagatcaccttcgtggagccctacttcgacgagtacgagatgaaggacagagtgacctacttcgagaagaacttcaacctgagaagattcatgtacaccacccccttcaccctggagggcagacccagaggcgagctgcacgagcagtacagaagaaacaccgtgctgaccaccatgcacgccttcccctacatcaagaccagaatcagcgtgatccagaaggaggagttcgtgctgacccccatcgaggtggccatcgaggacatgaagaagaagaccctgcagctggccgtggccatcaaccaggagccccccgacgccaagatgctgcagatggtgctgcagggcagcgtgggcgccaccgtgaaccagggccccctggaggtggcccaggtgttcctggccgagatccccgccgaccccaagctgtacagacaccacaacaagctgagactgtgcttcaaggagttcatcatgagatgcggcgaggccgtggagaagaacaagagactgatcaccgccgaccagagagagtaccagcaggagctgaagaagaactacaacaagctgaaggagaacctgagacccatgatcgagagaaagatccccgagctgtacaagcccatcttcagagtggagagccagaagagagacagcttccacagaagcagcttcagaaagtgcgagacccagctgagccagggcagctag

SEQ ID NO: 78866 - DNA, 6300 bp, synthetic construct
  misc_feature 1..6300: note = Description of Artificial Sequence: Synthetic coding sequence
  source 1..6300: mol_type = other DNA
atggccaccctgcccagcgccgagagaagagccttcgccctgaagatcaacagatacagcagcgccgagatcagaaagcagttcaccctgccccccaacctgggccagtaccacagacagagcatcagcaccagcggcttccccagcctgcagctgccccagttctacgaccccgtggagcccgtggacttcgagggcctgctgatgacccacctgaacagcctggacgtgcagctggcccaggagctgggcgacttcaccgacgacgacctggacgtggtgttcacccccaaggagtgcagaaccctgcagcccagcctgcccgaggagggcgtggagctggacccccacgtgagagactgcgtgcagacctacatcagagagtggctgatcgtgaacagaaagaaccagggcagccccgagatctgcggcttcaagaagaccggcagcagaaaggacttccacaagaccctgcccaagcagaccttcgagagcgagaccctggagtgcagcgagcccgccgcccaggccggccccagacacctgaacgtgctgtgcgacgtgagcggcaagggccccgtgaccgcctgcgacttcgacctgagaagcctgcagcccgacaagagactggagaacctgctgcagcaggtgagcgccgaggacttcgagaagcagaacgaggaggccagaagaaccaacagacaggccgagctgttcgccctgtaccccagcgtggacgaggaggacgccgtggagatcagacccgtgcccgagtgccccaaggagcacctgggcaacagaatcctggtgaagctgctgaccctgaagttcgagatcgagatcgagcccctgttcgccagcatcgccctgtacgacgtgaaggagagaaagaagatcagcgagaacttccactgcgacctgaacagcgaccagttcaagggcttcctgagagcccacacccccagcgtggccgccagcagccaggccagaagcgccgtgttcagcgtgacctaccccagcagcgacatctacctggtggtgaagatcgagaaggtgctgcagcagggcgagatcggcgactgcgccgagccctacaccgtgatcaaggagagcgacggcggcaagagcaaggagaagatcgagaagctgaagctgcaggccgagagcttctgccagagactgggcaagtacagaatgcccttcgcctgggcccccatcagcctgagcagcttcttcaacgtgagcaccctggagagagaggtgaccgacgtggacagcgtggtgggcagaagcagcgtgggcgagagaagaaccctggcccagagcagaagactgagcgagagagccctgagcctggaggagaacggcgtgggcagcaacttcaagaccagcaccctgagcgtgagcagcttcttcaagcaggagggcgacagactgagcgacgaggacctgttcaagttcctggccgactacaagagaagcagcagcctgcagagaagagtgaagagcatccccggcctgctgagactggagatcagcaccgcccccgagatcatcaactgctgcctgacccccgagatgctgcccgtgaagcccttccccgagaacagaaccagaccccacaaggagatcctggagttccccaccagagaggtgtacgtgccccacaccgtgtacagaaacctgctgtacgtgtacccccagagactgaacttcgtgaacaagctggccagcgccagaaacatcaccatcaagatccagttcatgtgcggcgaggacgccagcaacgccatgcccgtgatcttcggcaagagcagcggccccgagttcctgcaggaggtgtacaccgccgtgacctaccacaacaagagccccgacttctacgaggaggtgaagatcaagctgcccgccaagctgaccgtgaaccaccacctgctgttcaccttctaccacatcagctgccagcagaagcagggcgccagcgtggagaccctgctgggctacagctggctgcccatcctgctgaacgagagactgcagaccggcagctactgcctgcccgtggccctggagaagctgccccccaactacagcatgcacagcgccgagaaggtgcccctgcagaacccccccatcaagtgggccgagggccacaagggcgtgttcaacatcgaggtgcaggccgtgagcagcgtgcacacccaggacaaccacctggagaagttcttcaccctgtgccacagcctggagagccaggtgaccttccccatcagagtgctggaccagaagatcagcgagatggccctggagcacgagctgaagctgagcatcatctgcctgaacagcagcagactggagcccctggtgctgttcctgcacctggtgctggacaagctgttccagctgagcgtgcagcccatggtgatcgccggccagaccgccaacttcagccagttcgccttcgagagcgtggtggccatcgccaacagcctgcacaacagcaaggacctgagcaaggaccagcacggcagaaactgcctgctggccagctacgtgcactacgtgttcagactgcccgaggtgcagagagacgtgcccaagagcggcgcccccaccgccctgctggaccccagaagctaccacacctacggcagaaccagcgccgccgccgtgagcagcaagctgctgcaggccagagtgatgagcagcagcaaccccgacctggccggcacccacagcgccgccgacgaggaggtgaagaacatcatgagcagcaagatcgccgacagaaactgcagcagaatgagctactactgcagcggcagcagcgacgcccccagcagccccgccgcccccagacccgccagcaagaagcacttccacgaggagctggccctgcagatggtggtgagcaccggcatggtgagagagaccgtgttcaagtacgcctggttcttcttcgagctgctggtgaagagcatggcccagcacgtgcacaacatggacaagagagacagcttcagaagaaccagattcagcgacagattcatggacgacatcaccaccatcgtgaacgtggtgaccagcgagatcgccgccctgctggtgaagccccagaaggagaacgagcaggccgagaagatgaacatcagcctggccttcttcctgtacgacctgctgagcctgatggacagaggcttcgtgttcaacctgatcagacactactgcagccagctgagcgccaagctgagcaacctgcccaccctgatcagcatgagactggagttcctgagaatcctgtgcagccacgagcactacctgaacctgaacctgttcttcatgaacgccgacaccgcccccaccagcccctgccccagcatcagcagccagaacagcagcagctgcagcagcttccaggaccagaagatcgccagcatgttcgacctgaccagcgagtacagacagcagcacttcctgaccggcctgctgttcaccgagctggccgccgccctggacgccgagggcgagggcatcagcaaggtgcagagaaaggccgtgagcgccatccacagcctgctgagcagccacgacctggaccccagatgcgtgaagcccgaggtgaaggtgaagatcgccgccctgtacctgcccctggtgggcatcatcctggacgccctgccccagctgtgcgacttcaccgtggccgacaccagaagatacagaaccagcggcagcgacgaggagcaggagggcgccggcgccatcaaccagaacgtggccctggccatcgccggcaacaacttcaacctgaagaccagcggcatcgtgctgagcagcctgccctacaagcagtacaacatgctgaacgccgacaccaccagaaacctgatgatctgcttcctgtggatcatgaagaacgccgaccagagcctgatcagaaagtggatcgccgacctgcccagcacccagctgaacagaatcctggacctgctgttcatctgcgtgctgtgcttcgagtacaagggcaagcagagcagcgacaaggtgagcacccaggtgctgcagaagagcagagacgtgaaggccagactggaggaggccctgctgagaggcgagggcgccagaggcgagatgatgagaagaagagcccccggcaacgacagattccccggcctgaacgagaacctgagatggaagaaggagcagacccactggagacaggccaacgagaagctggacaagaccaaggccgagctggaccaggaggccctgatcagcggcaacctggccaccgaggcccacctgatcatcctggacatgcaggagaacatcatccaggccagcagcgccctggactgcaaggacagcctgctgggcggcgtgctgagagtgctggtgaacagcctgaactgcgaccagagcaccacctacctgacccactgcttcgccaccctgagagccctgatcgccaagttcggcgacctgctgttcgaggaggaggtggagcagtgcttcgacctgtgccaccaggtgctgcaccactgcagcagcagcatggacgtgaccagaagccaggcctgcgccaccctgtacctgctgatgagattcagcttcggcgccaccagcaacttcgccagagtgaagatgcaggtgaccatgagcctggccagcctggtgggcagagcccccgacttcaacgaggagcacctgagaagaagcctgagaaccatcctggcctacagcgaggaggacaccgccatgcagatgacccccttccccacccaggtggaggagctgctgtgcaacctgaacagcatcctgtacgacaccgtgaagatgagagagttccaggaggaccccgagatgctgatggacctgatgtacagaatcgccaagagctaccaggccagccccgacctgagactgacctggctgcagaacatggccgagaagcacaccaagaagaagtgctacaccgaggccgccatgtgcctggtgcacgccgccgccctggtggccgagtacctgagcatgctggaggaccacagctacctgcccgtgggcagcgtgagcttccagaacatcagcagcaacgtgctggaggagagcgtggtgagcgaggacaccctgagccccgacgaggacggcgtgtgcgccggccagtacttcaccgagagcggcctggtgggcctgctggagcaggccgccgagctgttcagcaccggcggcctgtacgagaccgtgaacgaggtgtacaagctggtgatccccatcctggaggcccacagagagttcagaaagctgaccctgacccacagcaagctgcagagagccttcgacagcatcgtgaacaaggaccacaagagaatgttcggcacctacttcagagtgggcttcttcggcagcaagttcggcgacctggacgagcaggagttcgtgtacaaggagcccgccatcaccaagctgcccgagatcagccacagactggaggccttctacggccagtgcttcggcgccgagttcgtggaggtgatcaaggacagcacccccgtggacaagaccaagctggaccccaacaaggcctacatccagatcaccttcgtggagccctacttcgacgagtacgagatgaaggacagagtgacctacttcgagaagaacttcaacctgagaagattcatgtacaccacccccttcaccctggagggcagacccagaggcgagctgcacgagcagtacagaagaaacaccgtgctgaccaccatgcacgccttcccctacatcaagaccagaatcagcgtgatccagaaggaggagttcgtgctgacccccatcgaggtggccatcgaggacatgaagaagaagaccctgcagctggccgtggccatcaaccaggagccccccgacgccaagatgctgcagatggtgctgcagggcagcgtgggcgccaccgtgaaccagggccccctggaggtggcccaggtgttcctggccgagatccccgccgaccccaagctgtacagacaccacaacaagctgagactgtgcttcaaggagttcatcatgagatgcggcgaggccgtggagaagaacaagagactgatcaccgccgaccagagagagtaccagcaggagctgaagaagaactacaacaagctgaaggagaacctgagacccatgatcgagagaaagatccccgagctgtacaagcccatcttcagagtggagagccagaagagagacagcttccacagaagcagcttcagaaagtgcgagacccagctgagccagggcagctag

SEQ ID NO: 78867 - DNA, 6000 bp, synthetic construct
  misc_feature 1..6000: note = Description of Artificial Sequence: Synthetic coding sequence
  source 1..6000: mol_type = other DNA
atgacccacctgaacagcctggacgtgcagctggcccaggagctgggcgacttcaccgacgacgacctggacgtggtgttcacccccaaggagtgcagaaccctgcagcccagcctgcccgaggagggcgtggagctggacccccacgtgagagactgcgtgcagacctacatcagagagtggctgatcgtgaacagaaagaaccagggcagccccgagatctgcggcttcaagaagaccggcagcagaaaggacttccacaagaccctgcccaagcagaccttcgagagcgagaccctggagtgcagcgagcccgccgcccaggccggccccagacacctgaacgtgctgtgcgacgtgagcggcaagggccccgtgaccgcctgcgacttcgacctgagaagcctgcagcccgacaagagactggagaacctgctgcagcaggtgagcgccgaggacttcgagaagcagaacgaggaggccagaagaaccaacagacaggccgagctgttcgccctgtaccccagcgtggacgaggaggacgccgtggagatcagacccgtgcccgagtgccccaaggagcacctgggcaacagaatcctggtgaagctgctgaccctgaagttcgagatcgagatcgagcccctgttcgccagcatcgccctgtacgacgtgaaggagagaaagaagatcagcgagaacttccactgcgacctgaacagcgaccagttcaagggcttcctgagagcccacacccccagcgtggccgccagcagccaggccagaagcgccgtgttcagcgtgacctaccccagcagcgacatctacctggtggtgaagatcgagaaggtgctgcagcagggcgagatcggcgactgcgccgagccctacaccgtgatcaaggagagcgacggcggcaagagcaaggagaagatcgagaagctgaagctgcaggccgagagcttctgccagagactgggcaagtacagaatgcccttcgcctgggcccccatcagcctgagcagcttcttcaacgtgagcaccctggagagagaggtgaccgacgtggacagcgtggtgggcagaagcagcgtgggcgagagaagaaccctggcccagagcagaagactgagcgagagagccctgagcctggaggagaacggcgtgggcagcaacttcaagaccagcaccctgagcgtgagcagcttcttcaagcaggagggcgacagactgagcgacgaggacctgttcaagttcctggccgactacaagagaagcagcagcctgcagagaagagtgaagagcatccccggcctgctgagactggagatcagcaccgcccccgagatcatcaactgctgcctgacccccgagatgctgcccgtgaagcccttccccgagaacagaaccagaccccacaaggagatcctggagttccccaccagagaggtgtacgtgccccacaccgtgtacagaaacctgctgtacgtgtacccccagagactgaacttcgtgaacaagctggccagcgccagaaacatcaccatcaagatccagttcatgtgcggcgaggacgccagcaacgccatgcccgtgatcttcggcaagagcagcggccccgagttcctgcaggaggtgtacaccgccgtgacctaccacaacaagagccccgacttctacgaggaggtgaagatcaagctgcccgccaagctgaccgtgaaccaccacctgctgttcaccttctaccacatcagctgccagcagaagcagggcgccagcgtggagaccctgctgggctacagctggctgcccatcctgctgaacgagagactgcagaccggcagctactgcctgcccgtggccctggagaagctgccccccaactacagcatgcacagcgccgagaaggtgcccctgcagaacccccccatcaagtgggccgagggccacaagggcgtgttcaacatcgaggtgcaggccgtgagcagcgtgcacacccaggacaaccacctggagaagttcttcaccctgtgccacagcctggagagccaggtgaccttccccatcagagtgctggaccagaagatcagcgagatggccctggagcacgagctgaagctgagcatcatctgcctgaacagcagcagactggagcccctggtgctgttcctgcacctggtgctggacaagctgttccagctgagcgtgcagcccatggtgatcgccggccagaccgccaacttcagccagttcgccttcgagagcgtggtggccatcgccaacagcctgcacaacagcaaggacctgagcaaggaccagcacggcagaaactgcctgctggccagctacgtgcactacgtgttcagactgcccgaggtgcagagagacgtgcccaagagcggcgcccccaccgccctgctggaccccagaagctaccacacctacggcagaaccagcgccgccgccgtgagcagcaagctgctgcaggccagagtgatgagcagcagcaaccccgacctggccggcacccacagcgccgccgacgaggaggtgaagaacatcatgagcagcaagcacttccacgaggagctggccctgcagatggtggtgagcaccggcatggtgagagagaccgtgttcaagtacgcctggttcttcttcgagctgctggtgaagagcatggcccagcacgtgcacaacatggacaagagagacagcttcagaagaaccagattcagcgacagattcatggacgacatcaccaccatcgtgaacgtggtgaccagcgagatcgccgccctgctggtgaagccccagaaggagaacgagcaggccgagaagatgaacatcagcctggccttcttcctgtacgacctgctgagcctgatggacagaggcttcgtgttcaacctgatcagacactactgcagccagctgagcgccaagctgagcaacctgcccaccctgatcagcatgagactggagttcctgagaatcctgtgcagccacgagcactacctgaacctgaacctgttcttcatgaacgccgacaccgcccccaccagcccctgccccagcatcagcagccagaacagcagcagctgcagcagcttccaggaccagaagatcgccagcatgttcgacctgaccagcgagtacagacagcagcacttcctgaccggcctgctgttcaccgagctggccgccgccctggacgccgagggcgagggcatcagcaaggtgcagagaaaggccgtgagcgccatccacagcctgctgagcagccacgacctggaccccagatgcgtgaagcccgaggtgaaggtgaagatcgccgccctgtacctgcccctggtgggcatcatcctggacgccctgccccagctgtgcgacttcaccgtggccgacaccagaagatacagaaccagcggcagcgacgaggagcaggagggcgccggcgccatcaaccagaacgtggccctggccatcgccggcaacaacttcaacctgaagaccagcggcatcgtgctgagcagcctgccctacaagcagtacaacatgctgaacgccgacaccaccagaaacctgatgatctgcttcctgtggatcatgaagaacgccgaccagagcctgatcagaaagtggatcgccgacctgcccagcacccagctgaacagaatcctggacctgctgttcatctgcgtgctgtgcttcgagtacaagggcaagcagagcagcgacaaggtgagcacccaggtgctgcagaagagcagagacgtgaaggccagactggaggaggccctgctgagaggcgagggcgccagaggcgagatgatgagaagaagagcccccggcaacgacagattccccggcctgaacgagaacctgagatggaagaaggagcagacccactggagacaggccaacgagaagctggacaagaccaaggccgagctggaccaggaggccctgatcagcggcaacctggccaccgaggcccacctgatcatcctggacatgcaggagaacatcatccaggccagcagcgccctggactgcaaggacagcctgctgggcggcgtgctgagagtgctggtgaacagcctgaactgcgaccagagcaccacctacctgacccactgcttcgccaccctgagagccctgatcgccaagttcggcgacctgctgttcgaggaggaggtggagcagtgcttcgacctgtgccaccaggtgctgcaccactgcagcagcagcatggacgtgaccagaagccaggcctgcgccaccctgtacctgctgatgagattcagcttcggcgccaccagcaacttcgccagagtgaagatgcaggtgaccatgagcctggccagcctggtgggcagagcccccgacttcaacgaggagcacctgagaagaagcctgagaaccatcctggcctacagcgaggaggacaccgccatgcagatgacccccttccccacccaggtggaggagctgctgtgcaacctgaacagcatcctgtacgacaccgtgaagatgagagagttccaggaggaccccgagatgctgatggacctgatgtacagaatcgccaagagctaccaggccagccccgacctgagactgacctggctgcagaacatggccgagaagcacaccaagaagaagtgctacaccgaggccgccatgtgcctggtgcacgccgccgccctggtggccgagtacctgagcatgctggaggaccacagctacctgcccgtgggcagcgtgagcttccagaacatcagcagcaacgtgctggaggagagcgtggtgagcgaggacaccctgagccccgacgaggacggcgtgtgcgccggccagtacttcaccgagagcggcctggtgggcctgctggagcaggccgccgagctgttcagcaccggcggcctgtacgagaccgtgaacgaggtgtacaagctggtgatccccatcctggaggcccacagagagttcagaaagctgaccctgacccacagcaagctgcagagagccttcgacagcatcgtgaacaaggaccacaagagaatgttcggcacctacttcagagtgggcttcttcggcagcaagttcggcgacctggacgagcaggagttcgtgtacaaggagcccgccatcaccaagctgcccgagatcagccacagactggaggccttctacggccagtgcttcggcgccgagttcgtggaggtgatcaaggacagcacccccgtggacaagaccaagctggaccccaacaaggcctacatccagatcaccttcgtggagccctacttcgacgagtacgagatgaaggacagagtgacctacttcgagaagaacttcaacctgagaagattcatgtacaccacccccttcaccctggagggcagacccagaggcgagctgcacgagcagtacagaagaaacaccgtgctgaccaccatgcacgccttcccctacatcaagaccagaatcagcgtgatccagaaggaggagttcgtgctgacccccatcgaggtggccatcgaggacatgaagaagaagaccctgcagctggccgtggccatcaaccaggagccccccgacgccaagatgctgcagatggtgctgcagggcagcgtgggcgccaccgtgaaccagggccccctggaggtggcccaggtgttcctggccgagatccccgccgaccccaagctgtacagacaccacaacaagctgagactgtgcttcaaggagttcatcatgagatgcggcgaggccgtggagaagaacaagagactgatcaccgccgaccagagagagtaccagcaggagctgaagaagaactacaacaagctgaaggagaacctgagacccatgatcgagagaaagatccccgagctgtacaagcccatcttcagagtggagagccagaagagagacagcttccacagaagcagcttcagaaagtgcgagacccagctgagccagggcagctag

SEQ ID NO: 78868 - DNA, 1182 bp, synthetic construct
  misc_feature 1..1182: note = Description of Artificial Sequence: Synthetic coding sequence
  source 1..1182: mol_type = other DNA
atgaagagaaccagagacgaggtggacgccaccctgcagatcgccaagctgaacgccgccgagctgctgcccgccgtgcactgcctgggcttcggccccggcgccagcggcgccgccgccggcgacttctgcctgctggagctggagcccaccctgtgccagcagctggaggacggccacagcctggtgatcagaggcgacaaggacgagcaggccgtgctgtgcagcaaggacaagacctacgacctgaagatcgccgacaccagcaacatgctgctgttcatccccggctgcaagacccccgaccagctgaagaaggaggacagccactgcaacatcatccacaccgagatcttcggcttcagcaacaactactgggagctgagaagaagaagacccaagctgaagaagctgaagaagctgctgatggagaacccctacgagggccccgacagccagaaggagaaggacagcaacagcagcaagtacaccaccgaggacctgctggaccagatccaggccagcgaggaggagatcatgacccagctgcaggtgctgaacgcctgcaagatcggcggctactggagaatcctggagttcgactacgagatgaagctgctgaaccacgtgacccagctggtggacagcgagagctggagcttcggcaaggtgcccctgaacacctgcctgcaggagctgggccccctggagcccgaggagatgatcgagcactgcctgaagtgctacggcaagaagtacgtggacgagggcgaggtgtacttcgagctggacgccgacaagatctgcagagccgccgccagaatgctgctgcagaacgccgtgaagttcaacctggccgagttccaggaggtgtggcagcagagcgtgcccgagggcatggtgaccagcctggaccagctgaagggcctggccctggtggacagacacagcagacccgagatcatcttcctgctgaaggtggacgacctgcccgaggacaaccaggagagattcaacagcctgttcagcctgagagagaagtggaccgaggaggacatcgccccctacatccaggacctgtgcggcgagaagcagaccatcggcgccctgctgaccaagtacagccacagcagcatgcagaacggcgtgaaggtgtacaacagcagaagacccatcagctag

SEQ ID NO: 78869 - DNA, 342 bp, synthetic construct
  misc_feature 1..342: note = Description of Artificial Sequence: Synthetic coding sequence
  source 1..342: mol_type = other DNA
atgagcgccagcgtggtgagcgtgatcagcagattcctggaggagtacctgagcagcaccccccagagactgaagctgctggacgcctacctgctgtacatcctgctgaccggcgccctgcagttcggctactgcctgctggtgggcaccttccccttcaacagcttcctgagcggcttcatcagctgcgtgggcagcttcatcctggccgtgtgcctgagaatccagatcaacccccagaacaaggccgacttccagggcatcagccccgagagagccttcgccgacttcctgttcgccagcaccatcctgcacctggtggtgatgaacttcgtgggctag

SEQ ID NO: 78870 - DNA, 285 bp, synthetic construct
  misc_feature 1..285: note = Description of Artificial Sequence: Synthetic coding sequence
  source 1..285: mol_type = other DNA
atgagaaccctggccatcctggccgccatcctgctggtggccctgcaggcccaggccgagcccctgcaggccagagccgacgaggtggccgccgcccccgagcagatcgccgccgacatccccgaggtggtggtgagcctggcctgggacgagagcctggcccccaagcaccccggcagcagaaagaacatggcctgctactgcagaatccccgcctgcatcgccggcgagagaagatacggcacctgcatctaccagggcagactgtgggccttctgctgctag

SEQ ID NO: 78871 - DNA, 285 bp, synthetic construct; identical to SEQ ID NO: 78870
  misc_feature 1..285: note = Description of Artificial Sequence: Synthetic coding sequence
  source 1..285: mol_type = other DNA

SEQ ID NO: 78872 - DNA, 294 bp, synthetic construct
  misc_feature 1..294: note = Description of Artificial Sequence: Synthetic coding sequence
  source 1..294: mol_type = other DNA
atgagaatcatcgccctgctggccgccatcctgctggtggccctgcaggtgagagccggccccctgcaggccagaggcgacgaggcccccggccaggagcagagaggccccgaggaccaggacatcagcatcagcttcgcctgggacaagagcagcgccctgcaggtgagcggcagcaccagaggcatggtgtgcagctgcagactggtgttctgcagaagaaccgagctgagagtgggcaactgcctgatcggcggcgtgagcttcacctactgctgcaccagagtggactag

SEQ ID NO: 78873 - DNA, 285 bp, synthetic construct
  misc_feature 1..285: note = Description of Artificial Sequence: Synthetic coding sequence
  source 1..285: mol_type = other DNA
atgagaaccatcgccatcctggccgccatcctgctggtggccctgcaggcccaggccgagagcctgcaggagagagccgacgaggccaccacccagaagcagagcggcgaggacaaccaggacctggccatcagcttcgccggcaacggcctgagcgccctgagaaccagcggcagccaggccagagccacctgctactgcagaaccggcagatgcgccaccagagagagcctgagcggcgtgtgcgagatcagcggcagactgtacagactgtgctgcagatag

SEQ ID NO: 78874 - DNA, 303 bp, synthetic construct
  misc_feature 1..303: note = Description of Artificial Sequence: Synthetic coding sequence
  source 1..303: mol_type = other DNA
atgagaaccctgaccatcctgaccgccgtgctgctggtggccctgcaggccaaggccgagcccctgcaggccgaggacgaccccctgcaggccaaggcctacgaggccgacgcccaggagcagagaggcgccaacgaccaggacttcgccgtgagcttcgccgaggacgccagcagcagcctgagagccctgggcagcaccagagccttcacctgccactgcagaagaagctgctacagcaccgagtacagctacggcacctgcaccgtgatgggcatcaaccacagattctgctgcctgtag

SEQ ID NO: 78875 - DNA, 207 bp, synthetic construct
  misc_feature 1..207: note = Description of Artificial Sequence: Synthetic coding sequence
  source 1..207: mol_type = other DNA
atgagaaccagctacctgctgctgttcaccctgtgcctgctgctgagcgagatggccagcggcggcaacttcctgaccggcctgggccacagaagcgaccactacaactgcgtgagcagcggcggccagtgcctgtacagcgcctgccccatcttcaccaagatccagggcacctgctacagaggcaaggccaagtgctgcaagtag

SEQ ID NO: 78876 - DNA, 372 bp, synthetic construct
  misc_feature 1..372: note = Description of Artificial Sequence: Synthetic coding sequence
  source 1..372: mol_type = other DNA
atgaagctgctgctgctggccctgcccatgctggtgctgctgccccaggtgatccccgcctacagcggcgagaagaagtgctggaacagaagcggccactgcagaaagcagtgcaaggacggcgaggccgtgaaggacacctgcaagaacctgagagcctgctgcatccccagcaacgaggaccacagaagagtgcccgccaccagccccacccccctgagcgacagcacccccggcatcatcgacgacatcctgaccgtgagattcaccaccgactacttcgaggtgagcagcaagaaggacatggtggaggagagcgaggccggcagaggcaccgagaccagcctgcccaacgtgcaccacagcagctag

SEQ ID NO: 78877 - DNA, 1002 bp, synthetic construct
  misc_feature 1..1002: note = Description of Artificial Sequence: Synthetic coding sequence
  source 1..1002: mol_type = other DNA
atgagctggatcaaggagggcgagctgagcctgtgggagagattctgcgccaacatcatcaaggccggccccatgcccaagcacatcgccttcatcatggacggcaacagaagatacgccaagaagtgccaggtggagagacaggagggccacagccagggcttcaacaagctggccgagaccctgagatggtgcctgaacctgggcatcctggaggtgaccgtgtacgccttcagcatcgagaacttcaagagaagcaagagcgaggtggacggcctgatggacctggccagacagaagttcagcagactgatggaggagaaggagaagctgcagaagcacggcgtgtgcatcagagtgctgggcgacctgcacctgctgcccctggacctgcaggagctgatcgcccaggccgtgcaggccaccaagaactacaacaagtgcttcctgaacgtgtgcttcgcctacaccagcagacacgagatcagcaacgccgtgagagagatggcctggggcgtggagcagggcctgctggaccccagcgacatcagcgagagcctgctggacaagtgcctgtacaccaacagaagcccccaccccgacatcctgatcagaaccagcggcgaggtgagactgagcgacttcctgctgtggcagaccagccacagctgcctggtgttccagcccgtgctgtggcccgagtacaccttctggaacctgttcgaggccatcctgcagttccagatgaaccacagcgtgctgcagaaggccagagacatgtacgccgaggagagaaagagacagcagctggagagagaccaggccaccgtgaccgagcagctgctgagagagggcctgcaggccagcggcgacgcccagctgagaagaaccagactgcacaagctgagcgccagaagagaggagagagtgcagggcttcctgcaggccctggagctgaagagagccgactggctggccagactgggcaccgccagcgcctag

SEQ ID NO: 78878 - DNA, 1005 bp, synthetic construct
  misc_feature 1..1005: note = Description of Artificial Sequence: Synthetic coding sequence
  source 1..1005: mol_type = other DNA
atgagctggatcaaggagggcgagctgagcctgtgggagagattctgcgccaacatcatcaaggccggccccatgcccaagcacatcgccttcatcatggacggcaacagaagatacgccaagaagtgccaggtggagagacaggagggccacagccagggcttcaacaagctggccgagaccctgagatggtgcctgaacctgggcatcctggaggtgaccgtgtacgccttcagcatcgagaacttcaagagaagcaagagcgaggtggacggcctgatggacctggccagacagaagttcagcagactgatggaggagaaggagaagctgcagaagcacggcgtgtgcatcagagtgctgggcgacctgcacctgctgcccctggacctgcaggagctgatcgcccaggccgtgcaggccaccaagaactacaacaagtgcttcctgaacgtgtgcttcgcctacaccagcagacacgagatcagcaacgccgtgagagagatggcctggggcgtggagcagggcctgctggaccccagcgacatcagcgagagcctgctggacaagtgcctgtacaccaacagaagcccccaccccgacatcctgatcagaaccagcggcgaggtgagactgagcgacttcctgctgtggcagaccagccacagctgcctggtgttccagcccgtgctgtggcccgagtacaccttctggaacctgttcgaggccatcctgcagttccagatgaaccacagcgtgctgcagcagaaggccagagacatgtacgccgaggagagaaagagacagcagctggagagagaccaggccaccgtgaccgagcagctgctgagagagggcctgcaggccagcggcgacgcccagctgagaagaaccagactgcacaagctgagcgccagaagagaggagagagtgcagggcttcctgcaggccctggagctgaagagagccgactggctggccagactgggcaccgccagcgcctag

SEQ ID NO: 78879 - DNA, 516 bp, synthetic construct
  misc_feature 1..516: note = Description of Artificial Sequence: Synthetic coding sequence
  source 1..516: mol_type = other DNA
atggacctggccagacagaagttcagcagactgatggaggagaaggagaagctgcagaagcacggcgtgtgcatcagagtgctgggcgacctgcacctgctgcccctggacctgcaggagctgatcgcccaggccgtgcaggccaccaagaactacaacaacgacatcagcgagagcctgctggacaagtgcctgtacaccaacagaagcccccaccccgacatcctgatcagaaccagcggcgaggtgagactgagcgacttcctgctgtggcagcagaaggccagagacatgtacgccgaggagagaaagagacagcagctggagagagaccaggccaccgtgaccgagcagctgctgagagagggcctgcaggccagcggcgacgcccagctgagaagaaccagactgcacaagctgagcgccagaagagaggagagagtgcagggcttcctgcaggccctggagctgaagagagccgactggctggccagactgggcaccgccagcgcctag

SEQ ID NO: 78880 - DNA, 501 bp, synthetic construct
  misc_feature 1..501: note = Description of Artificial Sequence: Synthetic coding sequence
  source 1..501: mol_type = other DNA
atggacggcaacagaagatacgccaagaagtgccaggtggagagacaggagggccacagccagggcttcaacaagctggccgagaccctgagatggtgcctgaacctgggcatcctggaggtgaccgtgtacgccttcagcatcgagaacttcaagagaagcaagagcgaggtggacggcctgatggacctggccagacagaagttcagcagactgatggaggagaaggagaagctgcagaagcacggcgtgtgcatcagagtgctgggcgacctgcacctgctgcccctggacctgcaggagctgatcgcccaggccgtgcaggccaccaagaactacaacaagtgcttcctgaacgtgtgcttcgcctacaccagcagacacgagatcagcaacgccgtgagagagatggcctggggcgtggagcagggcctgctggaccccagcagagacagattccaccacatcggccaggccagcctggagctgctgaccagctag

SEQ ID NO: 78881 - DNA, 546 bp, synthetic construct
  misc_feature 1..546: note = Description of Artificial Sequence: Synthetic coding sequence
  source 1..546: mol_type = other DNA
atggaggagaaggagaagctgcagaagcacggcgtgtgcatcagagtgctgggcgacctgcacctgctgcccctggacctgcaggagctgatcgcccaggccgtgcaggccaccaagaactacaacaagtgcttcctgaacgtgtgcttcgcctacaccagcagacacgagatcagcaacgccgtgagagagatggcctggggcgtggagcagggcctgctggaccccagcgacatcagcgagagcctgctggacaagtgcctgtacaccaacagaagcccccaccccgacatcctgatcagaaccagcggcgaggtgagactgagcgacttcctgctgtggcagaccagccacagctgcctggtgttccagcccgtgctgtggcccgagtacaccttctggaacctgttcgaggccatcctgcagttccagatgaaccacagcgtgctgcagcaccccggcagcctgctgaccaaggcctggaagaagcccttccagcaggacggcgagctgtacggcaactgcagcagccccaagagcagctag

SEQ ID NO: 78882 - DNA, 669 bp, synthetic construct
  misc_feature 1..669: note = Description of Artificial Sequence: Synthetic coding sequence
  source 1..669: mol_type = other DNA
atgagctggatcaaggagggcgagctgagcctgtgggagagattctgcgccaacatcatcaaggccggccccatgcccaagcacatcgccttcatcatggacggcaacagaagatacgccaagaagtgccaggtggagagacaggagggccacagccagggcttcaacaagctggccgagaccctgagatggtgcctgaacctgggcatcctggaggtgaccgtgtacgccttcagcatcgagaacttcaagagaagcaagagcgaggtggacggcctgatggacctggccagacagaagttcagcagactgatggaggagaaggagaagctgcagaagcacggcgtgtgcatcagagtgctgggcgacctgcacctgctgcccctggacctgcaggagctgatcgcccaggccgtgcaggccaccaagaactacaacaagtgcttcctgaacgtgtgcttcgcctacaccagcagacacgagatcagcaacgccgtgagagagatggcctggggcgtggagcagggcctgctggaccccagataccccgacgacatcagcgagagcctgctggacaagtgcctgtacaccaacagaagcccccaccccgacatcctgatcagaaccagcggcgaggtgagactgagcgacttcctgctgtggcagtag

SEQ ID NO: 78883 - DNA, 369 bp, synthetic construct
  misc_feature 1..369: note = Description of Artificial Sequence: Synthetic coding sequence
  source 1..369: mol_type = other DNA
atgagctggatcaaggagggcgagctgagcctgtgggagagattctgcgccaacatcatcaaggccggccccatgcccaagcacatcgccttcatcatggacggcaacagaagatacgccaagaagtgccaggtggagagacaggagggccacagccagggcttcaacaagctggccgagaccctgagatggtgcctgaacctgggcatcctggaggtgaccgtgtacgccttcagcatcgagaacttcaagagaagcaagagcgaggtggacggcctgatggacctggccagacagaagttcagcagactgatggaggagaaggagaagctgcagaagcacggcgtgtgcatcagagtgctgggctag

SEQ ID NO: 78884 - DNA, 216 bp, synthetic construct
  misc_feature 1..216: note = Description of Artificial Sequence: Synthetic coding sequence
  source 1..216: mol_type = other DNA
atgagctggatcaaggagggcgagctgagcctgtgggagagattctgcgccaacatcatcaaggccggccccatgcccaagcacatcgccttcatcatggacggcaacagaagatacgccaagaagtgccaggtggagagacaggagggccacagccagggcttcaacaagctggccgagaccctgagatggtgcctgaacctgggcatcctgtag

SEQ ID NO: 78885 - DNA, 258 bp, synthetic construct
  misc_feature 1..258: note = Description of Artificial Sequence: Synthetic coding sequence
  source 1..258: mol_type = other DNA
atgagctggatcaaggagggcgagctgagcctgtgggagagattctgcgccaacatcatcaaggccggccccatgcccaagcacatcgccttcatcatggacggcaacagaagatacgccaagaagtgccaggtggagagacaggagggccacagccagggcttcaacaagctggccgagaccctgagatggtgcctgaacctgggcatcctggaggtgaccgtgtacgccttcagcatcgagaacttcaagagatag

SEQ ID NO: 78886 - DNA, 885 bp, synthetic construct
  misc_feature 1..885: note = Description of Artificial Sequence: Synthetic coding sequence
  source 1..885: mol_type = other DNA
atgagctggatcaaggagggcgagctgagcctgtgggagagattctgcgccaacatcatcaaggccggccccatgcccaagcacatcgccttcatcatggacggcaacagaagatacgccaagaagtgccaggtggagagacaggagggccacagccagggcttcaacaagctggccgagaccctgagatggtgcctgaacctgggcatcctggaggtgaccgtgtacgccttcagcatcgagaacttcaagagaagcaagagcgaggtggacggcctgatggacctggccagacagaagttcagcagactgatggaggagaagtgcttcctgaacgtgtgcttcgcctacaccagcagacacgagatcagcaacgccgtgagagagatggcctggggcgtggagcagggcctgctggaccccagcgacatcagcgagagcctgctggacaagtgcctgtacaccaacagaagcccccaccccgacatcctgatcagaaccagcggcgaggtgagactgagcgacttcctgctgtggcagaccagccacagctgcctggtgttccagcccgtgctgtggcccgagtacaccttctggaacctgttcgaggccatcctgcagttccagatgaaccacagcgtgctgcagaaggccagagacatgtacgccgaggagagaaagagacagcagctggagagagaccaggccaccgtgaccgagcagctgctgagagagggcctgcaggccagcggcgacgcccagctgagaagaaccagactgcacaagctgagcgccagaagagaggagagagtgcagggcttcctgcaggccctggagctgaagagagccgactggctggccagactgggcaccgccagcgcctag

SEQ ID NO: 78887 - DNA, 183 bp, synthetic construct
  misc_feature 1..183: note = Description of Artificial Sequence: Synthetic coding sequence
  source 1..183: mol_type = other DNA
atgagctggatcaaggagggcgagctgagcctgtgggagagattctgcgccaacatcatcaaggccggccccatgcccaagcacatcgccttcatcatggacggcaacagaagatacgccaagaagtgccaggtggagagacaggagggccacagccagggcttcaacaagctggccgagtag

SEQ ID NO: 78888 - DNA, 396 bp, synthetic construct
  misc_feature 1..396: note = Description of Artificial Sequence: Synthetic coding sequence
  source 1..396: mol_type = other DNA
atgagctggatcaaggagggcgagctgagcctgtgggagagattctgcgccaacatcatcaaggccggccccatgcccaagcacatcgccttcatcatggacggcaacagaagatacgccaagaagtgccaggtggagagacaggagggccacagccagggcttcaacaagctggccgagaccctgagatggtgcctgaacctgggcatcctggaggtgaccgtgtacgccttcagcatcgagaacttcaagagaagcaagagcgaggtggacggcctgatggacctggccagacagaagttcagcagactgatggaggagaaggagaagctgcagaagcacggcgtgtgcatcagagtgctgggcgacctgcacctgctgcccctggacctgtag

SEQ ID NO: 78889 - DNA, 501 bp, synthetic construct
  misc_feature 1..501: note = Description of Artificial Sequence: Synthetic coding sequence
  source 1..501: mol_type = other DNA
atgagctggatcaaggagggcgagctgagcctgtgggagagattctgcgccaacatcatcaaggccggccccatgcccaagcacatcgccttcatcatggacggcaacagaagatacgccaagaagtgccaggtggagagacaggagggccacagccagggcttcaacaagctggccgagaccctgagatggtgcctgaacctgggcatcctggaggtgaccgtgtacgccttcagcatcgagaacttcaagagaagcaagagcgaggtggacggcctgatggacctggccagacagaagttcagcagactgatggaggagaaggagaagctgcagaagcacggcgtgtgcatcagagtgctgggcgacctgcacctgctgcccctggacctgcaggagctgatcgcccaggccgtgcaggccaccaagaactacaacaagtgcttcctgaacgtgtgcttcgcctacaccagcagacacgagatcagcaacgccgtgtag

SEQ ID NO: 78890 - DNA, 909 bp, synthetic construct
  misc_feature 1..909: note = Description of Artificial Sequence: Synthetic coding sequence
  source 1..909: mol_type = other DNA
atggtgtggaagagactgggcgccctggtgatgttccccctgcagatgatctacctggtggtgaaggccgccgtgggcctggtgctgcccgccaagctgagagacctgagcagagagaacgtgctgatcaccggcggcggcagaggcatcggcagacagctggccagagagttcgccgagagaggcgccagaaagatcgtgctgtggggcagaaccgagaagtgcctgaaggagaccaccgaggagatcagacagatgggcaccgagtgccactacttcatctgcgacgtgggcaacagagaggaggtgtaccagaccgccaaggccgtgagagagaaggtgggcgacatcaccatcctggtgaacaacgccgccgtggtgcacggcaagagcctgatggacagcgacgacgacgccctgctgaagagccagcacatcaacaccctgggccagttctggaccaccaaggccttcctgcccagaatgctggagctgcagaacggccacatcgtgtgcctgaacagcgtgctggccctgagcgccatccccggcgccatcgactactgcaccagcaaggccagcgccttcgccttcatggagagcctgaccctgggcctgctggactgccccggcgtgagcgccaccaccgtgctgcccttccacaccagcaccgagatgttccagggcatgagagtgagattccccaacctgttcccccccctgaagcccgagaccgtggccagaagaaccgtggaggccgtgcagctgaaccaggccctgctgctgctgccctggaccatgcacgccctggtgatcctgaagagcatcctgccccaggccgccctggaggagatccacaagttcagcggcacctacacctgcatgaacaccttcaagggcagaacctag

SEQ ID NO: 78891 - DNA, 444 bp, synthetic construct
  misc_feature 1..444: note = Description of Artificial Sequence: Synthetic coding sequence
  source 1..444: mol_type = other DNA
atgggcaccgagtgccactacttcatctgcgacgtgggcaacagagaggaggtgtaccagaccgccaaggccgtgagagagaaggtgggcgacatcaccatcctggtgaacaacgccgccgtggtgcacggcaagagcctgatggacagcgacgacgacgccctgctgaagagccagcacatcaacaccctgggccagttctggaccaccaaggccttcctgcccagaatgctggagctgcagaacggccacatcgtgtgcctgaacagcgtgctggccctgagcgccatccccggcgccatcgactactgcaccagcaaggccagcgccttcgccttcatggagagcctgaccctgggcctgctggactgccccggcgtgagcgccaccaccgtgctgcccttccacaccagcaccgagatgttccagggcatgagagtgtag

SEQ ID NO: 78892 - DNA, 423 bp, synthetic construct
  misc_feature 1..423: note = Description of Artificial Sequence: Synthetic coding sequence
  source 1..423: mol_type = other DNA
atggccagcagcggcatgaccagaagagaccccctggccaacaaggtggccctggtgaccgccagcaccgacggcatcggcttcgccatcgccagaagactggcccaggacggcgcccacgtggtggtgagcagcagaaagcagcagaacgtggaccaggccgtggccaccctgcagggcgagggcctgagcgtgaccggcaccgtgtgccacgtgggcaaggccgaggacagagagagactggtggccaccctgtggatggacaaggagaaggaggagagcatgaaggagaccctgagaatcagaagactgggcgagcccgaggactgcgccggcatcgtgagcttcctgtgcagcgaggacgccagctacatcaccggcgagaccgtggtggtgggcggcggcacccccagcagactgtag

SEQ ID NO: 78893 - DNA, 837 bp, synthetic construct
  misc_feature 1..837: note = Description of Artificial Sequence: Synthetic coding sequence
  source 1..837: mol_type = other DNA
atgcacaaggccggcctgctgggcctgtgcgccagagcctggaacagcgtgagaatggccagcagcggcatgaccagaagagaccccctggccaacaaggtggccctggtgaccgccagcaccgacggcatcggcttcgccatcgccagaagactggcccaggacggcgcccacgtggtggtgagcagcagaaagcagcagaacgtggaccaggccgtggccaccctgcagggcgagggcctgagcgtgaccggcaccgtgtgccacgtgggcaaggccgaggacagagagagactggtggccaccgccgtgaagctgcacggcggcatcgacatcctggtgagcaacgccgccgtgaaccccttcttcggcagcatcatggacgtgaccgaggaggtgtgggacaagaccctggacatcaacgtgaaggcccccgccctgatgaccaaggccgtggtgcccgagatggagaagagaggcggcggcagcgtggtgatcgtgagcagcatcgccgccttcagccccagccccggcttcagcccctacaacgtgagcaagaccgccctgctgggcctgaccaagaccctggccatcgagctggcccccagaaacatcagagtgaactgcctggcccccggcctgatcaagaccagcttcagcagaatgctgtggatggacaaggagaaggaggagagcatgaaggagaccctgagaatcagaagactgggcgagcccgaggactgcgccggcatcgtgagcttcctgtgcagcgaggacgccagctacatcaccggcgagaccgtggtggtgggcggcggcacccccagcagactgtag

SEQ ID NO: 78894 - DNA, 513 bp, synthetic construct
  misc_feature 1..513: note = Description of Artificial Sequence: Synthetic coding sequence
  source 1..513: mol_type = other DNA
atggccagcagcggcatgaccagaagagaccccctggccaacaaggtggccctggtgaccgccagcaccgacggcatcggcttcgccatcgccagaagactggcccaggacggcgcccacgtggtggtgagcagcagaaagcagcagaacgtggaccaggccgtggccaccctgcagggcgagggcctgagcgtgaccggcaccgtgtgccacgtgggcaaggccgaggacagagagagactggtggccaccgccgtgaagctgcacggcggcatcgacatcctggtgagcaacgccgccgtgaaccccttcttcggcagcatcatggacgtgaccgaggaggtgtgggacaagagaagactgagcggcgacagagtgttccacagcagcctgcagagcatcagcagcctggacggccagggcaagagaggcaagcacgagagaaaccccgccgacaagaaggtgagaagagccagaggcctgtgctggcacagagtgttccccgtgctgtag

SEQ ID NO: 78895 - DNA, 546 bp, synthetic construct
  misc_feature 1..546: note = Description of Artificial Sequence: Synthetic coding sequence
  source 1..546: mol_type = other DNA
atggccagcagcggcatgaccagaagagaccccctggccaacaaggtggccctggtgaccgccagcaccgacggcatcggcttcgccatcgccagaagactggcccaggacggcgcccacgtggtggtgagcagcagaaagcagcagaacgtggaccaggccgtggccaccctgcagggcgagggcctgagcgtgaccggcaccgtgtgccacgtgggcaaggccgaggacagagagagactggtggccaccaccctggacatcaacgtgaaggcccccgccctgatgaccaaggccgtggtgcccgagatggagaagagaggcggcggcagcgtggtgatcgtgagcagcatcgccgccttcagccccagccccctgtggatggacaaggagaaggaggagagcatgaaggagaccctgagaatcagaagactgggcgagcccgaggactgcgccggcatcgtgagcttcctgtgcagcgaggacgccagctacatcaccggcgagaccgtggtggtgggcggcggcacccccagcagactgtag

SEQ ID NO: 78896 - DNA, 477 bp, synthetic construct
  misc_feature 1..477: note = Description of Artificial Sequence: Synthetic coding sequence
  source 1..477: mol_type = other DNA
atgcacaaggccggcctgctgggcctgtgcgccagagcctggaacagcgtgagaatggccagcagcggcatgaccagaagagaccccctggccaacaaggtggccctggtgaccgccagcaccgacggcatcggcttcgccatcgccagaagactggcccaggacggcgcccacgtggtggtgagcagcagaaagcagcagaacgtggaccaggccgtggccaccctgcagggcgagggcctgagcgtgaccggcaccgtgtgccacgtgggcaaggccgaggacagagagagactggtggccaccctgtggatggacaaggagaaggaggagagcatgaaggagaccctgagaatcagaagactgggcgagcccgaggactgcgccggcatcgtgagcttcctgtgcagcgaggacgccagctacatcaccggcgagaccgtggtggtgggcggcggcacccccagcagactgtag

SEQ ID NO: 78897 - DNA, 579 bp, synthetic construct
  misc_feature 1..579: note = Description of Artificial Sequence: Synthetic coding sequence
  source 1..579: mol_type = other DNA
atgcacaaggccggcctgctgggcctgtgcgccagagcctggaacagcgtgagaatggccagcagcggcatgaccagaagagaccccctggccaacaaggtggccctggtgaccgccagcaccgacggcatcggcttcgccatcgccagaagactggcccaggacggcgcccacgtggtggtgagcagcagaaagcagcagaacgtggaccaggccgtggccaccctgcagggcgagggcctgagcgtgaccggcaccgtgtgccacgtgggcaaggccgaggacagagagagactggtggccaccgccgtgaagctgcacggcggcatcgacatcctggtgagcaacgccgccgtgaaccccttcttcggcagcatcatggacgtgaccgaggaggtgtgggacaagctgtggatggacaaggagaaggaggagagcatgaaggagaccctgagaatcagaagactgggcgagcccgaggactgcgccggcatcgtgagcttcctgtgcagcgaggacgccagctacatcaccggcgagaccgtggtggtgggcggcggcacccccagcagactgtag

SEQ ID NO: 78898 - DNA, 681 bp, synthetic construct
  misc_feature 1..681: note = Description of Artificial Sequence: Synthetic coding sequence
  source 1..681: mol_type = other DNA
atggccagcagcggcatgaccagaagagaccccctggccaacaaggtggccctggtgaccgccagcaccgacggcatcggcttcgccatcgccagaagactggcccaggacggcgcccacgtggtggtgagcagcagaaagcagcagaacgtggaccaggccgtggccaccctgcagggcgagggcctgagcgtgaccggcaccgtgtgccacgtgggcaaggccgaggacagagagagactggtggccaccaccctggacatcaacgtgaaggcccccgccctgatgaccaaggccgtggtgcccgagatggagaagagaggcggcggcagcgtggtgatcgtgagcagcatcgccgccttcagccccagccccggcttcagcccctacaacgtgagcaagaccgccctgctgggcctgaccaagaccctggccatcgagctggcccccagaaacatcagagtgaactgcctggcccccggcctgatcaagaccagcttcagcagaatgctgtggatggacaaggagaaggaggagagcatgaaggagaccctgagaatcagaagactgggcgagcccgaggactgcgccggcatcgtgagcttcctgtgcagcgaggacgccagctacatcaccggcgagaccgtggtggtgggcggcggcacccccagcagactgtag

SEQ ID NO: 78899 - DNA, 567 bp, synthetic construct
  misc_feature 1..567: note = Description of Artificial Sequence: Synthetic coding sequence
  source 1..567: mol_type = other DNA
atgcacaaggccggcctgctgggcctgtgcgccagagcctggaacagcgtgagaatggccagcagcggcatgaccagaagagaccccctggccaacaaggtggccctggtgaccgccagcaccgacggcatcggcttcgccatcgccagaagactggcccaggacggcgcccacgtggtggtgagcagcagaaagcagcagaacgtggaccaggccgtggccaccctgcagggcgagggcctgagcgtgaccggcaccgtgtgccacgtgggcaaggccgaggacagagagagactggtggccaccgccgtgaagctgcacggcggcatcgacatcctggtgagcaacgccgccgtgaaccccttcttcggcagcatcatggacgtgaccgaggaggtgtgggacaagagaagactgagcggcgacagagtgttccacagcagcctgcagagcatcagcagcctggacggccagggcaagagaggcaagcacgagagaaaccccgccgacaagaaggtgagaagagccagaggcctgtgctggcacagagtgttccccgtgctgtag

SEQ ID NO: 78900 - DNA, 600 bp, synthetic construct
  misc_feature 1..600: note = Description of Artificial Sequence: Synthetic coding sequence
  source 1..600: mol_type = other DNA
atgcacaaggccggcctgctgggcctgtgcgccagagcctggaacagcgtgagaatggccagcagcggcatgaccagaagagaccccctggccaacaaggtggccctggtgaccgccagcaccgacggcatcggcttcgccatcgccagaagactggcccaggacggcgcccacgtggtggtgagcagcagaaagcagcagaacgtggaccaggccgtggccaccctgcagggcgagggcctgagcgtgaccggcaccgtgtgccacgtgggcaaggccgaggacagagagagactggtggccaccaccctggacatcaacgtgaaggcccccgccctgatgaccaaggccgtggtgcccgagatggagaagagaggcggcggcagcgtggtgatcgtgagcagcatcgccgccttcagccccagccccctgtggatggacaaggagaaggaggagagcatgaaggagaccctgagaatcagaagactgggcgagcccgaggactgcgccggcatcgtgagcttcctgtgcagcgaggacgccagctacatcaccggcgagaccgtggtggtgggcggcggcacccccagcagactgtag

SEQ ID NO: 78901 - DNA, 1374 bp, synthetic construct
  misc_feature 1..1374: note = Description of Artificial Sequence: Synthetic coding sequence
  source 1..1374: mol_type = other DNA
atgagaagcgccgccgtgctggccctgctgctgtgcgccggccaggtgaccgccctgcccgtgaacagccccatgaacaagggcgacaccgaggtgatgaagtgcatcgtggaggtgatcagcgacaccctgagcaagcccagccccatgcccgtgagccaggagtgcttcgagaccctgagaggcgacgagagaatcctgagcatcctgagacaccagaacctgctgaaggagctgcaggacctggccctgcagggcgccaaggagagagcccaccagcagaagaagcacagcggcttcgaggacgagctgagcgaggtgctggagaaccagagcagccaggccgagctgaaggaggccgtggaggagcccagcagcaaggacgtgatggagaagagagaggacagcaaggaggccgagaagagcggcgaggccaccgacggcgccagaccccaggccctgcccgagcccatgcaggagagcaaggccgagggcaacaaccaggcccccggcgaggaggaggaggaggaggaggaggccaccaacacccacccccccgccagcctgcccagccagaagtaccccggcccccaggccgagggcgacagcgagggcctgagccagggcctggtggacagagagaagggcctgagcgccgagcccggctggcaggccaagagagaggaggaggaggaggaggaggaggaggccgaggccggcgaggaggccgtgcccgaggaggagggccccaccgtggtgctgaacccccaccccagcctgggctacaaggagatcagaaagggcgagagcagaagcgaggccctggccgtggacggcgccggcaagcccggcgccgaggaggcccaggaccccgagggcaagggcgagcaggagcacagccagcagaaggaggaggaggaggagatggccgtggtgccccagggcctgttcagaggcggcaagagcggcgagctggagcaggaggaggagagactgagcaaggagtgggaggacagcaagagatggagcaagatggaccagctggccaaggagctgaccgccgagaagagactggagggccaggaggaggaggaggacaacagagacagcagcatgaagctgagcttcagagccagagcctacggcttcagaggccccggcccccagctgagaagaggctggagacccagcagcagagaggacagcctggaggccggcctgcccctgcaggtgagaggctaccccgaggagaagaaggaggaggagggcagcgccaacagaagacccgaggaccaggagctggagagcctgagcgccatcgaggccgagctggagaaggtggcccaccagctgcaggccctgagaagaggctag

SEQ ID NO: 78902 - DNA, 1128 bp, synthetic construct
  misc_feature 1..1128: note = Description of Artificial Sequence: Synthetic coding sequence
  source 1..1128: mol_type = other DNA
atgaactgggagctgctgctgtggctgctggtgctgtgcgccctgctgctgctgctggtgcagctgctgagattcctgagagccgacggcgacctgaccctgctgtgggccgagtggcagggcagaagacccgagtgggagctgaccgacatggtggtgtgggtgaccggcgccagcagcggcatcggcgaggagctggcctaccagctgagcaagctgggcgtgagcctggtgctgagcgccagaagagtgcacgagctggagagagtgaagagaagatgcctggagaacggcaacctgaaggagaaggacatcctggtgctgcccctggacctgaccgacaccggcagccacgaggccgccaccaaggccgtgctgcaggagttcggcagaatcgacatcctggtgaacaacggcggcatgagccagagaagcctgtgcatggacaccagcctggacgtgtacagaaagctgatcgagctgaactacctgggcaccgtgagcctgaccaagtgcgtgctgccccacatgatcgagagaaagcagggcaagatcgtgaccgtgaacagcatcctgggcatcatcagcgtgcccctgagcatcggctactgcgccagcaagcacgccctgagaggcttcttcaacggcctgagaaccgagctggccacctaccccggcatcatcgtgagcaacatctgccccggccccgtgcagagcaacatcgtggagaacagcctggccggcgaggtgaccaagaccatcggcaacaacggcgaccagagccacaagatgaccaccagcagatgcgtgagactgatgctgatcagcatggccaacgacctgaaggaggtgtggatcagcgagcagcccttcctgctggtgacctacctgtggcagtacatgcccacctgggcctggtggatcaccagatggggcagaaagggcctgagaaccctgagagtggtgtggatgcagaccctgctgatcctgaagagcctgagacagaacatgaccgagaagagcacctgcaccttccaggccaccggcggcagaaacggcaagcacgagaacagcaacctgctgatgctgctgaacaaccagagactgatctgcgacttcaccttctag

SEQ ID NO: 78903 - DNA, 870 bp, synthetic construct
  misc_feature 1..870: note = Description of Artificial Sequence: Synthetic coding sequence
  source 1..870: mol_type = other DNA
atggtggtgtgggtgaccggcgccagcagcggcatcggcgaggagctggcctaccagctgagcaagctgggcgtgagcctggtgctgagcgccagaagagtgcacgagctggagagagtgaagagaagatgcctggagaacggcaacctgaaggagaaggacatcctggtgctgcccctggacctgaccgacaccggcagccacgaggccgccaccaaggccgtgctgcaggagttcggcagaatcgacatcctggtgaacaacggcggcatgagccagagaagcctgtgcatggacaccagcctggacgtgtacagaaagctgatcgagctgaactacctgggcaccgtgagcctgaccaagtgcgtgctgccccacatgatcgagagaaagcagggcaagatcgtgaccgtgaacagcatcctgggcatcatcagcgtgcccctgagcatcggctactgcgccagcaagcacgccctgagaggcttcttcaacggcctgagaaccgagctggccacctaccccggcatcatcgtgagcaacatctgccccggccccgtgcagagcaacatcgtggagaacagcctggccggcgaggtgaccaagaccatcggcaacaacggcgaccagagccacaagatgaccaccagcagatgcgtgagactgatgctgatcagcatggccaacgacctgaaggaggtgtggatcagcgagcagcccttcctgctggtgacctacctgtggcagtacatgcccacctgggcctggtggatcaccaacaagatgggcaagaagagaatcgagaacttcaagagcggcgtggacgccgacagcagctacttcaagatcttcaagaccaagcacgactag

SEQ ID NO: 78904 - DNA, 1020 bp, synthetic construct
  misc_feature 1..1020: note = Description of Artificial Sequence: Synthetic coding sequence
  source 1..1020: mol_type = other DNA
atgaactgggagctgctgctgtggctgctggtgctgtgcgccctgctgctgctgctggtgcagctgctgagattcctgagagccgacggcgacctgaccctgctgtgggccgagtggcagggcagaagacccgagtgggagctgaccgacatggtggtgtgggtgaccggcgccagcagcggcatcggcgaggagctggcctaccagctgagcaagctgggcgtgagcctggtgctgagcgccagaagagtgcacgagctggagagagtgaagagaagatgcctggagaacggcaacctgaaggagaaggacatcctggtgctgcccctggacctgaccgacaccggcagccacgaggccgccaccaaggccgtgctgcaggagttcggcagaatcgacatcctggtgaacaacggcggcatgagccagagaagcctgtgcatggacaccagcctggacgtgtacagaaagctgatcgagctgaactacctgggcaccgtgagcctgaccaagtgcgtgctgccccacatgatcgagagaaagcagggcaagatcgtgaccgtgaacagcatcctgggcatcatcagcgtgcccctgagcatcggctactgcgccagcaagcacgccctgagaggcttcttcaacggcctgagaaccgagctggccacctaccccggcatcatcgtgagcaacatctgccccggccccgtgcagagcaacatcgtggagaacagcctggccggcgaggtgaccaagaccatcggcaacaacggcgaccagagccacaagatgaccaccagcagatgcgtgagactgatgctgatcagcatggccaacgacctgaaggaggtgtggatcagcgagcagcccttcctgctggtgacctacctgtggcagtacatgcccacctgggcctggtggatcaccaacaagatgggcaagaagagaatcgagaacttcaagagcggcgtggacgccgacagcagctacttcaagatcttcaagaccaagcacgactag

SEQ ID NO: 78905 - DNA, 186 bp, synthetic construct
  misc_feature 1..186: note = Description of Artificial Sequence: Synthetic coding sequence
  source 1..186: mol_type = other DNA
atgaactgggagctgctgctgtggctgctggtgctgtgcgccctgctgctgctgctggtgcagctgctgagattcctgagagccgacggcgacctgaccctgctgtgggccgagtggcagggcagaagacccgagtgggagctgaccgacatggtggtgtgggtgaccggcgccagcagcggctag

SEQ ID NO: 78906 - DNA, 960 bp, synthetic construct
  misc_feature 1..960: note = Description of Artificial Sequence: Synthetic coding sequence
  source 1..960: mol_type = other DNA
atgctgttctgggtgctgggcctgctgatcctgtgcggcttcctgtggaccagaaagggcaagctgaagatcgaggacatcaccgacaagtacatcttcatcaccggctgcgacagcggcttcggcaacctggccgccagaaccttcgacaagaagggcttccacgtgatcgccgcctgcctgaccgagagcggcagcaccgccctgaaggccgagaccagcgagagactgagaaccgtgctgctggacgtgaccgaccccgagaacgtgaagagaaccgcccagtgggtgaagaaccaggtgggcgagaagggcctgtggggcctgatcaacaacgccggcgtgcccggcgtgctggcccccaccgactggctgaccctggaggactacagagagcccatcgaggtgaacctgttcggcctgatcagcgtgaccctgaacatgctgcccctggtgaagaaggcccagggcagagtgatcaacgtgagcagcgtgggcggcagactggccatcgtgggcggcggctacacccccagcaagtacgccgtggagggcttcaacgacagcctgagaagagacatgaaggccttcggcgtgcacgtgagctgcatcgagcccggcctgttcaagaccaacctggccgaccccgtgaaggtgatcgagaagaagctggccatctgggagcagctgagccccgacatcaagcagcagtacggcgagggctacatcgagaagagcctggacaagctgaagggcaacaagagctacgtgaacatggacctgagccccgtggtggagtgcatggaccacgccctgaccagcctgttccccaagacccactacgccgccggcaaggacgccaagatcttctggatccccctgagccacatgcccgccgccctgcaggacttcctgctgctgaagcagaaggccgagctggccaaccccaaggccgtgtag

SEQ ID NO: 78907 - DNA, 960 bp, synthetic construct; identical to SEQ ID NO: 78906
  misc_feature 1..960: note = Description of Artificial Sequence: Synthetic coding sequence
  source 1..960: mol_type = other DNA

SEQ ID NO: 78908 - DNA, 960 bp, synthetic construct; identical to SEQ ID NO: 78906
  misc_feature 1..960: note = Description of Artificial Sequence: Synthetic coding sequence
  source 1..960: mol_type = other DNA

SEQ ID NO: 78909 - DNA, 519 bp, synthetic construct
  misc_feature 1..519: note = Description of Artificial Sequence: Synthetic coding sequence
  source 1..519: mol_type = other DNA
atgctgcccctggtgaagaaggcccagggcagagtgatcaacgtgagcagcgtgggcggcagactggccatcgtgggcggcggctacacccccagcaagtacgccgtggagggcttcaacgacagcctgagaagagacatgaaggccttcggcgtgcacgtgagctgcatcgagcccggcctgttcaagaccaacctggccgaccccgtgaaggtgatcgagaagaagctggccatctgggagcagctgagccccgacatcaagcagcagtacggcgagggctacatcgagaagagcctggacaagctgaagggcaacaagagctacgtgaacatggacctgagccccgtggtggagtgcatggaccacgccctgaccagcctgttccccaagacccactacgccgccggcaaggacgccaagatcttctggatccccctgagccacatgcccgccgccctgcaggacttcctgctgctgaagcagaaggccgagctggccaaccccaaggccgtgtag

SEQ ID NO: 78910 - DNA, 960 bp, synthetic construct; identical to SEQ ID NO: 78906
  misc_feature 1..960: note = Description of Artificial Sequence: Synthetic coding sequence
  source 1..960: mol_type = other DNA

SEQ ID NO: 78911 - DNA, 1140 bp, synthetic construct
  misc_feature 1..1140: note = Description of Artificial Sequence: Synthetic coding sequence
  source 1..1140: mol_type = other DNA
atgcccgagggcagaagccactgcgcctgcagcatcaccagcctgaccctgctggtgagcctgaccagagtgaccctggacatcctgcagaagctggaccccccccagcccgcccactggagacaccacctgctggtgctgtacaagaagggcgtgtacctgagccacaccggcggcaagatgctgttctgggtgctgggcctgctgatcctgtgcggcttcctgtggaccagaaagggcaagctgaagatcgaggacatcaccgacaagtacatcttcatcaccggctgcgacagcggcttcggcaacctggccgccagaaccttcgacaagaagggcttccacgtgatcgccgcctgcctgaccgagagcggcagcaccgccctgaaggccgagaccagcgagagactgagaaccgtgctgctggacgtgaccgaccccgagaacgtgaagagaaccgcccagtgggtgaagaaccaggtgggcgagaagggcctgtggggcctgatcaacaacgccggcgtgcccggcgtgctggcccccaccgactggctgaccctggaggactacagagagcccatcgaggtgaacctgttcggcctgatcagcgtgaccctgaacatgctgcccctggtgaagaaggcccagggcagagtgatcaacgtgagcagcgtgggcggcagactggccatcgtgggcggcggctacacccccagcaagtacgccgtggagggcttcaacgacagcctgagaagagacatgaaggccttcggcgtgcacgtgagctgcatcgagcccggcctgttcaagaccaacctggccgaccccgtgaaggtgatcgagaagaagctggccatctgggagcagctgagccccgacatcaagcagcagtacggcgagggctacatcgagaagagcctggacaagctgaagggcaacaagagctacgtgaacatggacctgagccccgtggtggagtgcatggaccacgccctgaccagcctgttccccaagacccactacgccgccggcaaggacgccaagatcttctggatccccctgagccacatgcccgccgccctgcaggacttcctgctgctgaagcagaaggccgagctggccaaccccaaggccgtgtag

SEQ ID NO: 78912 - DNA, 960 bp, synthetic construct; identical to SEQ ID NO: 78906
  misc_feature 1..960: note = Description of Artificial Sequence: Synthetic coding sequence
  source 1..960: mol_type = other DNA

SEQ ID NO: 78913 - DNA, 201 bp, synthetic construct
  misc_feature 1..201: note = Description of Artificial Sequence: Synthetic coding sequence
  source 1..201: mol_type = other DNA
atgctgttctgggtgctgggcctgctgatcctgtgcggcttcctgtggaccagaaagggcaagctgaagatcgaggacatcaccgacaagtacatcttcatcaccggctgcgacagcggcttcggcaacctggccgccagaaccttcgacaagaagggcttccacgtgatcgccgcctgcctgaccgagagcggcagctag

SEQ ID NO: 78914 - DNA, 486 bp, synthetic construct
  misc_feature 1..486: note = Description of Artificial Sequence: Synthetic coding sequence
  source 1..486: mol_type = other DNA
  misc_feature 1..375: note = DNA
  misc_feature 376: note = RNA
  misc_feature 377..486: note = DNA
atgggcctgccccagcccggcctgtggctgaagagactgtgggtgctgctggaggtggccgtgcacgtggtggtgggcaaggtgctgctgatcctgttccccgacagagtgaagagaaacatcctggccatgggcgagaagaccggcatgaccagaaacccccacttcagccacgacaactggatccccaccttcttcagcacccagtacttctggttcgtgctgaaggtgagatggcagagactggaggacaccaccgagctgggcggcctggcccccaactgccccgtggtgagactgagcggccagagatgcaacatctgggagttcatgcagggcaacagacccctggtgctgaacttcggcagctgcacctgacccagcttcatgttcaagttcgaccagttcaagagactgatcgaggacttcagcagcatcgccgacttcctggtgatctacatcgaggaggcccacgccagcggctag

SEQ ID NO: 78915 - DNA, 750 bp, synthetic construct
  misc_feature 1..750: note = Description of Artificial Sequence: Synthetic coding sequence
  source 1..750: mol_type = other DNA
  misc_feature 1..375: note = DNA
  misc_feature 376: note = RNA
  misc_feature 377..750: note = DNA
atgggcctgccccagcccggcctgtggctgaagagactgtgggtgctgctggaggtggccgtgcacgtggtggtgggcaaggtgctgctgatcctgttccccgacagagtgaagagaaacatcctggccatgggcgagaagaccggcatgaccagaaacccccacttcagccacgacaactggatccccaccttcttcagcacccagtacttctggttcgtgctgaaggtgagatggcagagactggaggacaccaccgagctgggcggcctggcccccaactgccccgtggtgagactgagcggccagagatgcaacatctgggagttcatgcagggcaacagacccctggtgctgaacttcggcagctgcacctgacccagcttcatgttcaagttcgaccagttcaagagactgatcgaggacttcagcagcatcgccgacttcctggtgatctacatcgaggaggcccacgccagcgacggctgggccttcaagaacaacatggacatcagaaaccaccagaacctgcaggacagactgcaggccgcccacctgctgctggccagaagcccccagtgccccgtggtggtggacaccatgcagaaccagagcagccagctgtacgccgccctgcccgagagactgtacatcatccaggagggcagaatcctgtacaagggcaagagcggcccctggaactacaaccccgaggaggtgagagccgtgctggagaagctgcacagctag

SEQ ID NO: 78916 - DNA, 606 bp, synthetic construct
  misc_feature 1..606: note = Description of Artificial Sequence: Synthetic coding sequence
  source 1..606: mol_type = other DNA
atgggcctgccccagcccggcctgtggctgaagagactgtgggtgctgctggaggtggccgtgcacgtggtggtgggcaaggtgctgctgatcctgttccccgacagagtgaagagaaacatcctggccatgggcgagaagaccggcatgaccagaaacccccacttcagccacgacaactggatccccaccttcttcagcacccagtacttctggttcgtgctgaaggtgagatggcagagactggaggacaccaccgagctgggcggcctggcccccaactgccccgtggtgagactgagcggccagagatgcaacatctgggagttcatgcaggacggctgggccttcaagaacaacatggacatcagaaaccaccagaacctgcaggacagactgcaggccgcccacctgctgctggccagaagcccccagtgccccgtggtggtggacaccatgcagaaccagagcagccagctgtacgccgccctgcccgagagactgtacatcatccaggagggcagaatcctgtacaagggcaagagcggcccctggaactacaaccccgaggaggtgagagccgtgctggagaagctgcacagctag

SEQ ID NO: 78917 - DNA, 363 bp, synthetic construct
  misc_feature 1..363: note = Description of Artificial Sequence: Synthetic coding sequence
  source 1..363: mol_type = other DNA
atgttcaagttcgaccagttcaagagactgatcgaggacttcagcagcatcgccgacttcctggtgatctacatcgaggaggcccacgccagcgacggctgggccttcaagaacaacatggacatcagaaaccaccagaacctgcaggacagactgcaggccgcccacctgctgctggccagaagcccccagtgccccgtggtggtggacaccatgcagaaccagagcagccagctgtacgccgccctgcccgagagactgtacatcatccaggagggcagaatcctgtacaagggcaagagcggcccctggaactacaaccccgaggaggtgagagccgtgctggagaagctgcacagctag

SEQ ID NO: 78918 - DNA, 558 bp, synthetic construct
  misc_feature 1..558: note = Description of Artificial Sequence: Synthetic coding sequence
  source 1..558: mol_type = other DNA
  misc_feature 1..183: note = DNA
  misc_feature 184: note = RNA
  misc_feature 185..558: note = DNA
atgggcctgccccagcccggcctgtggctgaagagactgtgggtgctgctggaggtggccgtgcacgtggtggtgggcaaggtgctgctgatcctgttccccgacagagtgaagagaaacatcctggccatgggcgagaagaccggcaacagacccctggtgctgaacttcggcagctgcacctgacccagcttcatgttcaagttcgaccagttcaagagactgatcgaggacttcagcagcatcgccgacttcctggtgatctacatcgaggaggcccacgccagcgacggctgggccttcaagaacaacatggacatcagaaaccaccagaacctgcaggacagactgcaggccgcccacctgctgctggccagaagcccccagtgccccgtggtggtggacaccatgcagaaccagagcagccagctgtacgccgccctgcccgagagactgtacatcatccaggagggcagaatcctgtacaagggcaagagcggcccctggaactacaaccccgaggaggtgagagccgtgctggagaagctgcacagctag

SEQ ID NO: 78919 - DNA, 342 bp, synthetic construct
  misc_feature 1..342: note = Description of Artificial Sequence: Synthetic coding sequence
  source 1..342: mol_type = other DNA
atgggcctgccccagcccggcctgtggctgaagagactgtgggtgctgctggaggtggccgtgcacgtggtggtgggcaaggtgctgctgatcctgttccccgacagagtgaagagaaacatcctggccatgggcgagaagaccggcatgaccagaaacccccacttcagccacgacaactggatccccaccttcttcagcacccagtacttctggttcgtgctgaaggtgagatggcagagactggaggacaccaccgagctgggcggcctggcccccaactgccccgtggtgagactgagcggccagagatgcaacatctgggagttcatgcagggctag

SEQ ID NO: 78920 - DNA, 270 bp, synthetic construct
  misc_feature 1..270: note = Description of Artificial Sequence: Synthetic coding sequence
  source 1..270: mol_type = other DNA
atgggcatcctgagcgtggacctgctgatcaccctgcagatcctgcccgtgttcttcagcaactgcctgttcctggccctgtacgacagcgtgatcctgctgaagcacgtggtgctgctgctgagcagaagcaagagcaccagaggcgagtggagaagaatgctgaccagcgagggcctgagatgcgtgtggaagagcttcctgctggacgcctacaagcagctgaactgcccccccagcggcttcagcaaggacggccacatcctgtag

SEQ ID NO: 78921 - DNA, 399 bp, synthetic construct
  misc_feature 1..399: note = Description of Artificial Sequence: Synthetic coding sequence
  source 1..399: mol_type = other DNA
atgggcatcctgagcgtggacctgctgatcaccctgcagatcctgcccgtgttcttcagcaactgcctgttcctggccctgtacgacagcgtgatcctgctgaagcacgtggtgctgctgctgagcagaagcaagagcaccagaggcgagtggagaagaatgctgaccagcgagggcctgagatgcgtgtggaagagcttcctgctggacgcctacaagcaggtgaagctgggcgaggacgcccccaacagcagcgtggtgcacgtgagcagcaccgagggcggcgacaacagcggcaacggcacccaggagaagatcgccgagggcgccacctgccacctgctggacttcgccagccccgagagacccctggtggtgaacttcggcagcgccacctag

SEQ ID NO: 78922 - DNA, 822 bp, synthetic construct
  misc_feature 1..822: note = Description of Artificial Sequence: Synthetic coding sequence
  source 1..822: mol_type = other DNA
  misc_feature 1..396: note = DNA
  misc_feature 397: note = RNA
  misc_feature 398..795: note = DNA
  misc_feature 796: note = RNA
  misc_feature 797..822: note = DNA
atgggcatcctgagcgtggacctgctgatcaccctgcagatcctgcccgtgttcttcagcaactgcctgttcctggccctgtacgacagcgtgatcctgctgaagcacgtggtgctgctgctgagcagaagcaagagcaccagaggcgagtggagaagaatgctgaccagcgagggcctgagatgcgtgtggaagagcttcctgctggacgcctacaagcaggtgaagctgggcgaggacgcccccaacagcagcgtggtgcacgtgagcagcaccgagggcggcgacaacagcggcaacggcacccaggagaagatcgccgagggcgccacctgccacctgctggacttcgccagccccgagagacccctggtggtgaacttcggcagcgccacctgaccccccttcaccagccagctgcccgccttcagaaagctggtggaggagttcagcagcgtggccgacttcctgctggtgtacatcgacgaggcccaccccagcgacggctgggccatccccggcgacagcagcctgagcttcgaggtgaagaagcaccagaaccaggaggacagatgcgccgccgcccagcagctgctggagagattcagcctgcccccccagtgcagagtggtggccgacagaatggacaacaacgccaacatcgcctacggcgtggccttcgagagagtgtgcatcgtgcagagacagaagatcgcctacctgggcggcaagggccccttcagctacaacctgcaggaggtgagacactggctggagaagaacttcagcaagagatgaaagaagaccagactggccggctag

SEQ ID NO: 78923 - DNA, 21 bp, synthetic construct
  misc_feature 1..21: note = Description of Artificial Sequence: Synthetic coding sequence
  source 1..21: mol_type = other DNA
atgggcatcctgagcgtgtag

SEQ ID NO: 78924 - DNA, 21 bp, synthetic construct
  misc_feature 1..21: note = Description of Artificial Sequence: Synthetic coding sequence
  source 1..21: mol_type = other DNA
atgggcatcctgagcgtgtag

SEQ ID NO: 78925 - DNA, 168 bp, synthetic construct
  misc_feature 1..168: note = Description of Artificial Sequence: Synthetic coding sequence
  source 1..168: mol_type = other DNA
atgggcatcctgagcgtggacctgctgatcaccctgcagatcctgcccgtgttcttcagcaactgcctgttcctggccctgtacgacagcgtgatcctgctgaagcacgtggtgctgctgctgagcagaagcaagagcaccagaggcgagtggagaagaatgctgtag

SEQ ID NO: 78926 - DNA, 930 bp, synthetic construct
  misc_feature 1..930: note = Description of Artificial Sequence: Synthetic coding sequence
  source 1..930: mol_type = other DNA
  misc_feature 1..267: note = DNA
  misc_feature 268: note = RNA
  misc_feature 269..504: note = DNA
  misc_feature 505: note = RNA
  misc_feature 506..903: note = DNA
  misc_feature 904: note = RNA
  misc_feature 905..930: note = DNA
atgggcatcctgagcgtggacctgctgatcaccctgcagatcctgcccgtgttcttcagcaactgcctgttcctggccctgtacgacagcgtgatcctgctgaagcacgtggtgctgctgctgagcagaagcaagagcaccagaggcgagtggagaagaatgctgaccagcgagggcctgagatgcgtgtggaagagcttcctgctggacgcctacaagcagctgaactgcccccccagcggcttcagcaaggacggccacatcctgtgactggtgtacgaggcctacaagagcagactgctggtgtacagccacctggacctgtggatggtgaagctgggcgaggacgcccccaacagcagcgtggtgcacgtgagcagcaccgagggcggcgacaacagcggcaacggcacccaggagaagatcgccgagggcgccacctgccacctgctggacttcgccagccccgagagacccctggtggtgaacttcggcagcgccacctgaccccccttcaccagccagctgcccgccttcagaaagctggtggaggagttcagcagcgtggccgacttcctgctggtgtacatcgacgaggcccaccccagcgacggctgggccatccccggcgacagcagcctgagcttcgaggtgaagaagcaccagaaccaggaggacagatgcgccgccgcccagcagctgctggagagattcagcctgcccccccagtgcagagtggtggccgacagaatggacaacaacgccaacatcgcctacggcgtggccttcgagagagtgtgcatcgtgcagagacagaagatcgcctacctgggcggcaagggccccttcagctacaacctgcaggaggtgagacactggctggagaagaacttcagcaagagatgaaagaagaccagactggccggctag

SEQ ID NO: 78927 - DNA, 822 bp, synthetic construct; identical to SEQ ID NO: 78922
  misc_feature 1..822: note = Description of Artificial Sequence: Synthetic coding sequence
  source 1..822: mol_type = other DNA
  misc_feature 1..396: note = DNA
  misc_feature 397: note = RNA
  misc_feature 398..795: note = DNA
  misc_feature 796: note = RNA
  misc_feature 797..822: note = DNA

SEQ ID NO: 78928 - DNA, 915 bp, synthetic construct
  misc_feature 1..915: note = Description of Artificial Sequence: Synthetic coding sequence
  source 1..915: mol_type = other DNA
  misc_feature 1..507: note = DNA
  misc_feature 508: note = RNA
  misc_feature 509..915: note = DNA
atgcccagacaggccaccagcagactggtggtgggcgagggcgagggcagccagggcgccagcggccccgccgccaccatgctgagaagcctgctgctgcacagcctgagactgtgcgcccagaccgccagctgcctggtgctgttccccagattcctgggcaccgccttcatgctgtggctgctggacttcctgtgcatcagaaagcacttcctgggcagaagaagaagaggccagcccgagcccgaggtggagctgaacagcgagggcgaggaggtgccccccgacgacccccccatctgcgtgagcgacgacaacagactgtgcaccctggccagcctgaaggccgtgtggcacggccagaagctggacttcttcaagcaggcccacgagggcggccccgcccccaacagcgaggtggtgctgcccgacggcttccagagccagcacatcctggactacgcccagggcaacagacccctggtgctgaacttcggcagctgcacctgaccccccttcatggccagaatgagcgccttccagagactggtgaccaagtaccagagagacgtggacttcctgatcatctacatcgaggaggcccaccccagcgacggctgggtgaccaccgacagcccctacatcatcccccagcacagaagcctggaggacagagtgagcgccgccagagtgctgcagcagggcgcccccggctgcgccctggtgctggacaccatggccaacagcagcagcagcgcctacggcgcctacttcgagagactgtacgtgatccagagcggcaccatcatgtaccagggcggcagaggccccgacggctaccaggtgagcgagctgagaacctggctggagagatacgacgagcagctgcacggcgccagacccagaagagtgtag

SEQ ID NO: 78929 - DNA, 1026 bp, synthetic construct
  misc_feature 1..1026: note = Description of Artificial Sequence: Synthetic coding sequence
  source 1..1026: mol_type = other DNA
atgagcgccagcgcccccgccgccgagggcgagggcacccccacccagcccgccagcgagaaggagcccgagatgcccggccccagagaggagagcgaggaggaggaggacgaggacgacgaggaggaggaggaggaggagaagggcaagggccagaagctgtgcgagatcgagagaatccacttcttcctgagcaagaagaagaccgacgagctgagaaacctgcacaagctgctgtacaacagacccggcaccgtgagcagcctgaagaagaacgtgggccagttcagcggcttccccttcgagaagggcagcgtgcagtacaagaagaaggaggagatgctgaagaagttcagaaacgccatgctgaagagcatctgcgaggtgctggacctggagagaagcggcgtgaacagcgagctggtgaagagaatcctgaacttcctgatgcaccccaagcccagcggcaagcccctgcccaagagcaagaagacctgcagcaagggcagcaagaaggagagaaacagcagcggcatggccagaaaggccaagagaaccaagtgccccgagatcctgagcgacgagagcagcagcgacgaggacgagaagaagaacaaggaggagagcagcgacgacgaggacaaggagagcgaggaggagccccccaagaagaccgccaagagagagaagcccaagcagaaggccaccagcaagagcaagaagagcgtgaagagcgccaacgtgaagaaggccgacagcagcaccaccaagaagaaccagaacagcagcaagaaggagagcgagagcgaggacagcagcgacgacgagcccctgatcaagaagctgaagaagccccccaccgacgaggagctgaaggagaccatcaagaagctgctggccagcgccaacctggaggaggtgaccatgaagcagatctgcaagaaggtgtacgagaactaccccacctacgacctgaccgagagaaaggacttcatcaagaccaccgtgaaggagctgatcagctag

SEQ ID NO: 78930 - DNA, 1128 bp, synthetic construct
  misc_feature 1..1128: note = Description of Artificial Sequence: Synthetic coding sequence
  source 1..1128: mol_type = other DNA
atgagcgccagcgcccccgccgccgagggcgagggcacccccacccagcccgccagcgagaaggagcccgagatgcccggccccagagaggagagcgaggaggaggaggacgaggacgacgaggaggaggaggaggaggagaaggagaagagcctgatcgtggagggcaagagagagaagaagaaggtggagagactgaccatgcaggtgagcagcctgcagagagagcccttcaccatcgcccagggcaagggccagaagctgtgcgagatcgagagaatccacttcttcctgagcaagaagaagaccgacgagctgagaaacctgcacaagctgctgtacaacagacccggcaccgtgagcagcctgaagaagaacgtgggccagttcagcggcttccccttcgagaagggcagcgtgcagtacaagaagaaggaggagatgctgaagaagttcagaaacgccatgctgaagagcatctgcgaggtgctggacctggagagaagcggcgtgaacagcgagctggtgaagagaatcctgaacttcctgatgcaccccaagcccagcggcaagcccctgcccaagagcaagaagacctgcagcaagggcagcaagaaggagagaaacagcagcggcatggccagaaaggccaagagaaccaagtgccccgagatcctgagcgacgagagcagcagcgacgaggacgagaagaagaacaaggaggagagcagcgacgacgaggacaaggagagcgaggaggagccccccaagaagaccgccaagagagagaagcccaagcagaaggccaccagcaagagcaagaagagcgtgaagagcgccaacgtgaagaaggccgacagcagcaccaccaagaagaaccagaacagcagcaagaaggagagcgagagcgaggacagcagcgacgacgagcccctgatcaagaagctgaagaagccccccaccgacgaggagctgaaggagaccatcaagaagctgctggccagcgccaacctggaggaggtgaccatgaagcagatctgcaagaaggtgtacgagaactaccccacctacgacctgaccgagagaaaggacttcatcaagaccaccgtgaaggagctgatcagctag

SEQ ID NO: 78931 - DNA, 1101 bp, synthetic construct
  misc_feature 1..1101: note = Description of Artificial Sequence: Synthetic coding sequence
  source 1..1101: mol_type = other DNA
atgagcgccgccaaccccgagacccccaacagcaccatcagcagagaggccagcacccagagcagcagcgccgccgccagccagggctgggtgctgcccgagggcaagatcgtgcccaacaccgtgttcgtgggcggcatcgacgccagaatggacgagaccgagatcggcagctgcttcggcagatacggcagcgtgaaggaggtgaagatcatcaccaacagaaccggcgtgagcaagggctacggcttcgtgagcttcgtgaacgacgtggacgtgcagaagatcgtgggcagccagatccacttccacggcaagaagctgaagctgggccccgccatcagaaagcagaagctgtgcgccagacacgtgcagcccagacccctggtggtgaacccccccccccccccccagttccagaacgtgtggagaaaccccaacaccgagacctacctgcagccccagatcacccccaaccccgtgacccagcacgtgcaggcctacagcgcctacccccacagccccggccaggtgatcaccggctgccagctgctggtgtacaactaccaggagtaccccacctaccccgacagcgccttccaggtgaccaccggctaccagctgcccgtgtacaactaccagcccttccccgcctaccccagcagccccttccaggtgaccgccggctaccagctgcccgtgtacaactaccaggccttccccgcctaccccagcagccccttccaggtgaccaccggctaccagctgcccgtgtacaactaccaggccttccccgcctaccccagcagccccttccaggtgaccaccggctaccagctgcccgtgtacaactaccaggccttccccgcctaccccagcagccccttccaggtgaccaccggctaccagctgcccgtgtacaactaccaggccttccccgcctaccccaacagcgccgtgcaggtgaccaccggctaccagttccacgtgtacaactaccagatgcccccccagtgccccgtgggcgagcagagaagaaacctgtggaccgaggcctacaagtggtggtacctggtgtgcctgatccagagaagagactag

SEQ ID NO: 78932 - DNA, 1605 bp, synthetic construct
  misc_feature 1..1605: note = Description of Artificial Sequence: Synthetic coding sequence
  source 1..1605: mol_type = other DNA
atgagcgccgccaaccccgagacccccaacagcaccatcagcagagaggccagcacccagagcagcagcgccgccgccagccagggctgggtgctgcccgagggcaagatcgtgcccaacaccgtgttcgtgggcggcatcgacgccagaatggacgagaccgagatcggcagctgcttcggcagatacggcagcgtgaaggaggtgaagatcatcaccaacagaaccggcgtgagcaagggctacggcttcgtgagcttcgtgaacgacgtggacgtgcagaagatcgtgggcagccagatccacttccacggcaagaagctgaagctgggccccgccatcagaaagcagaagctgtgcgccagacacgtgcagcccagacccctggtggtgaacccccccccccccccccagttccagaacgtgtggagaaaccccaacaccgagacctacctgcagccccagatcacccccaaccccgtgacccagcacgtgcaggcctacagcgcctacccccacagccccggccaggtgatcaccggctgccagctgctggtgtacaactaccaggagtaccccacctaccccgacagcgccttccaggtgaccaccggctaccagctgcccgtgtacaactaccagcccttccccgcctaccccagaagccccttccaggtgaccgccggctaccagctgcccgtgtacaactaccaggccttccccgcctaccccaacagccccttccaggtggccaccggctaccagttccccgtgtacaactaccagcccttccccgcctaccccagcagccccttccaggtgaccgccggctaccagctgcccgtgtacaactaccaggccttccccgcctaccccaacagccccttccaggtggccaccggctaccagttccccgtgtacaactaccaggccttccccgcctaccccaacagccccgtgcaggtgaccaccggctaccagctgcccgtgtacaactaccaggccttccccgcctaccccagcagccccttccaggtgaccaccggctaccagctgcccgtgtacaactaccaggccttccccgcctaccccagcagccccttccaggtgaccaccggctaccagctgcccgtgtacaactaccaggccttccccgcctaccccagcagccccttccaggtgaccaccggctaccagctgcccgtgtacaactaccaggccttccccgcctaccccagcagccccttccaggtgaccaccggctaccagctgcccgtgtacaactaccaggccttccccgcctaccccagcagccccttccaggtgaccaccggctaccagctgcccgtgtacaactaccaggccttccccgcctaccccagcagccccttccaggtgaccaccggctaccagctgcccgtgtacaactaccaggccttccccgcctaccccaacagcgccgtgcaggtgaccaccggctaccagttccacgtgtacaactaccagatgcccccccagtgccccgtgggcgagcagagaagaaacctgtggaccgaggcctacaagtggtggtacctggtgtgcctgatccagagaagagactag

SEQ ID NO: 78933 - DNA, 1821 bp, synthetic construct
  misc_feature 1..1821: note = Description of Artificial Sequence: Synthetic coding sequence
  source 1..1821: mol_type = other DNA
atgagcgccgccaaccccgagacccccaacagcaccatcagcagagaggccagcacccagagcagcagcgccgccgccagccagggctgggtgctgcccgagggcaagatcgtgcccaacaccgtgttcgtgggcggcatcgacgccagaatggacgagaccgagatcggcagctgcttcggcagatacggcagcgtgaaggaggtgaagatcatcaccaacagaaccggcgtgagcaagggctacggcttcgtgagcttcgtgaacgacgtggacgtgcagaagatcgtgggcagccagatccacttccacggcaagaagctgaagctgggccccgccatcagaaagcagaagctgtgcgccagacacgtgcagcccagacccctggtggtgaacccccccccccccccccagttccagaacgtgtggagaaaccccaacaccgagacctacctgcagccccagatcacccccaaccccgtgacccagcacgtgcaggcctacagcgcctacccccacagccccggccaggtgatcaccggctgccagctgctggtgtacaactaccaggagtaccccacctaccccgacagcgccttccaggtgaccaccggctaccagctgcccgtgtacaactaccagcccttccccgcctaccccagaagccccttccaggtgaccgccggctaccagctgcccgtgtacaactaccaggccttccccgcctaccccaacagccccttccaggtggccaccggctaccagttccccgtgtacaactaccagcccttccccgcctaccccagcagccccttccaggtgaccgccggctaccagctgcccgtgtacaactaccaggccttccccgcctaccccaacagccccttccaggtggccaccggctaccagttccccgtgtacaactaccagcccttccccgcctaccccagcagccccttccaggtgaccgccggctaccagctgcccgtgtacaactaccaggccttccccgcctaccccaacagccccttccaggtggccaccggctaccagttccccgtgtacaactaccaggccttccccgcctaccccaacagccccgtgcaggtgaccaccggctaccagctgcccgtgtacaactaccaggccttccccgcctaccccaacagccccgtgcaggtgaccaccggctaccagctgcccgtgtacaactaccaggccttccccgcctaccccagcagccccttccaggtgaccaccggctaccagctgcccgtgtacaactaccaggccttccccgcctaccccagcagccccttccaggtgaccaccggctaccagctgcccgtgtacaactaccaggccttccccgcctaccccagcagccccttccaggtgaccaccggctaccagctgcccgtgtacaactaccaggccttccccgcctaccccagcagccccttccaggtgaccaccggctaccagctgcccgtgtacaactaccaggccttccccgcctaccccagcagccccttccaggtgaccaccggctaccagctgcccgtgtacaactaccaggccttccccgcctaccccagcagccccttccaggtgaccaccggctaccagctgcccgtgtacaactaccaggccttccccgcctaccccaacagcgccgtgcaggtgaccaccggctaccagttccacgtgtacaactaccagatgcccccccagtgccccgtgggcgagcagagaagaaacctgtggaccgaggcctacaagtggtggtacctggtgtgcctgatccagagaagagactag

SEQ ID NO: 78934 - DNA, 1461 bp, synthetic construct
  misc_feature 1..1461: note = Description of Artificial Sequence: Synthetic coding sequence
  source 1..1461: mol_type = other DNA
atgagcgccgccaaccccgagacccccaacagcaccatcagcagagaggccagcacccagagcagcagcgccgccgccagccagggctgggtgctgcccgagggcaagatcgtgcccaacaccgtgttcgtgggcggcatcgacgccagaatggacgagaccgagatcggcagctgcttcggcagatacggcagcgtgaaggaggtgaagatcatcaccaacagaaccggcgtgagcaagggctacggcttcgtgagcttcgtgaacgacgtggacgtgcagaagatcgtgggcagccagatccacttccacggcaagaagctgaagctgggccccgccatcagaaagcagaagctgtgcgccagacacgtgcagcccagacccctggtggtgaacccccccccccccccccagttccagaacgtgtggagaaaccccaacaccgagacctacctgcagccccagatcacccccaaccccgtgacccagcacgtgcaggcctacagcgcctacccccacagccccggccaggtgatcaccggctgccagctgctggtgtacaactaccaggagtaccccacctaccccgacagcgccttccaggtgaccaccggctaccagctgcccgtgtacaactaccagcccttccccgcctaccccagaagccccttccaggtgaccgccggctaccagctgcccgtgtacaactaccaggccttccccgcctaccccaacagccccttccaggtggccaccggctaccagttccccgtgtacaactaccagcccttccccgcctaccccagcagccccttccaggtgaccgccggctaccagctgcccgtgtacaactaccaggccttccccgcctaccccaacagccccttccaggtggccaccggctaccagttccccgtgtacaactaccagcccttccccgcctaccccagcagccccttccaggtgaccgccggctaccagctgcccgtgtacaactaccaggccttccccgcctaccccaacagccccttccaggtggccaccggctaccagttccccgtgtacaactaccaggccttccccgcctaccccaacagccccgtgcaggtgaccaccggctaccagctgcccgtgtacaactaccaggccttccccgcctaccccaacagccccttccaggtggccaccggctaccagttccccgtgtacaactaccaggccttccccgcctaccccaacagccccgtgcaggtgaccaccggctaccagctgcccgtgtacaactaccaggccttccccgcctaccccaacagcgccgtgcaggtgaccaccggctaccagttccacgtgtacaactaccagatgcccccccagtgccccgtgggcgagcagagaagaaacctgtggaccgaggcctacaagtggtggtacctggtgtgcctgatccagagaagagactag

SEQ ID NO: 78935 - DNA, 1677 bp, synthetic construct
  misc_feature 1..1677: note = Description of Artificial Sequence: Synthetic coding sequence
  source 1..1677: mol_type = other DNA
atgagcgccgccaaccccgagacccccaacagcaccatcagcagagaggccagcacccagagcagcagcgccgccgccagccagggctgggtgctgcccgagggcaagatcgtgcccaacaccgtgttcgtgggcggcatcgacgccagaatggacgagaccgagatcggcagctgcttcggcagatacggcagcgtgaaggaggtgaagatcatcaccaacagaaccggcgtgagcaagggctacggcttcgtgagcttcgtgaacgacgtggacgtgcagaagatcgtgggcagccagatccacttccacggcaagaagctgaagctgggccccgccatcagaaagcagaagctgtgcgccagacacgtgcagcccagacccctggtggtgaacccccccccccccccccagttccagaacgtgtggagaaaccccaacaccgagacctacctgcagccccagatcacccccaaccccgtgacccagcacgtgcaggcctacagcgcctacccccacagccccggccaggtgatcaccggctgccagctgctggtgtacaactaccaggagtaccccacctaccccgacagcgccttccaggtgaccaccggctaccagctgcccgtgtacaactaccagcccttccccgcctaccccagaagccccttccaggtgaccgccggctaccagctgcccgtgtacaactaccaggccttccccgcctaccccaacagccccttccaggtggccaccggctaccagttccccgtgtacaactaccagcccttccccgcctaccccagcagccccttccaggtgaccgccggctaccagctgcccgtgtacaactaccaggccttccccgcctaccccaacagccccttccaggtggccaccggctaccagttccccgtgtacaactaccaggccttccccgcctaccccaacagccccgtgcaggtgaccaccggctaccagctgcccgtgtacaactaccaggccttccccgcctaccccaacagccccgtgcaggtgaccaccggctaccagctgcccgtgtacaactaccaggccttccccgcctaccccagcagccccttccaggtgaccaccggctaccagctgcccgtgtacaactaccaggccttccccgcctaccccagcagccccttccaggtgaccaccggctaccagctgcccgtgtacaactaccaggccttccccgcctaccccagcagccccttccaggtgaccaccggctaccagctgcccgtgtacaactaccaggccttccccgcctaccccagcagccccttccaggtgaccaccggctaccagctgcccgtgtacaactaccaggccttccccgcctaccccagcagccccttccaggtgaccaccggctaccagctgcccgtgtacaactaccaggccttccccgcctaccccagcagccccttccaggtgaccaccggctaccagctgcccgtgtacaactaccaggccttccccgcctaccccaacagcgccgtgcaggtgaccaccggctaccagttccacgtgtacaactaccagatgcccccccagtgccccgtgggcgagcagagaagaaacctgtggaccgaggcctacaagtggtggtacctggtgtgcctgatccagagaagagactag

SEQ ID NO: 78936 - DNA, 1086 bp, synthetic construct
  misc_feature 1..1086: note = Description of Artificial Sequence: Synthetic coding sequence
  source 1..1086: mol_type = other DNA
atgagcgccgccaaccccgagacccccaacagcaccatcagcagagaggccagcacccagagcagcagcgccgccgccagccagggctgggtgctgcccgagggcaagatcgtgcccaacaccgtgttcgtgggcggcatcgacgccagaatggacgagaccgagatcggcagctgcttcggcagatacggcagcgtgaaggaggtgaagatcatcaccaacagaaccggcgtgagcaagggctacggcttcgtgagcttcgtgaacgacgtggacgtgcagaagatcgtgggcagccagatccacttccacggcaagaagctgaagctgggccccgccatcagaaagcagaagctgtgcgccagacacgtgcagcccagacccctggtggtgaacccccccccccccccccagttccagaacgtgtggagaaaccccaacaccgagacctacctgcagccccagatcacccccaaccccgtgacccagcacgtgcaggcctacagcgcctacccccacagccccggccaggtgatcaccggctgccagctgctggtgtacaactaccaggagtaccccacctaccccgacagcgccttccaggtgaccaccggctaccagctgcccgtgtacaactaccagcccttccccgcctaccccagaagccccttccaggtgaccgccggctaccagctgcccgtgtacaactaccaggccttccccgcctaccccaacagccccttccaggtggccaccggctaccagttccccgtgtacaactaccagcccttccccgcctaccccagcagccccttccaggtgaccgccggctaccagctgcccgtgtacaactaccaggccttccccgcctaccccaacagccccttccaggtggccaccggctaccagttccccgtgtacaactaccaggccttccccgcctaccccaacagccccttccaggtggccaccggctaccagttccccgtgtacaactaccaggccttccccgcctaccccaacagccccgtgcaggtgaccaccggctaccagctgcccgtgtacaactaccagatgcccccctag

SEQ ID NO: 78937 - DNA, 1965 bp, synthetic construct
  misc_feature 1..1965: note = Description of Artificial Sequence: Synthetic coding sequence
  source 1..1965: mol_type = other DNA
atgagcgccgccaaccccgagacccccaacagcaccatcagcagagaggccagcacccagagcagcagcgccgccgccagccagggctgggtgctgcccgagggcaagatcgtgcccaacaccgtgttcgtgggcggcatcgacgccagaatggacgagaccgagatcggcagctgcttcggcagatacggcagcgtgaaggaggtgaagatcatcaccaacagaaccggcgtgagcaagggctacggcttcgtgagcttcgtgaacgacgtggacgtgcagaagatcgtgggcagccagatccacttccacggcaagaagctgaagctgggccccgccatcagaaagcagaagctgtgcgccagacacgtgcagcccagacccctggtggtgaacccccccccccccccccagttccagaacgtgtggagaaaccccaacaccgagacctacctgcagccccagatcacccccaaccccgtgacccagcacgtgcaggcctacagcgcctacccccacagccccggccaggtgatcaccggctgccagctgctggtgtacaactaccaggagtaccccacctaccccgacagcgccttccaggtgaccaccggctaccagctgcccgtgtacaactaccagcccttccccgcctaccccagaagccccttccaggtgaccgccggctaccagctgcccgtgtacaactaccaggccttccccgcctaccccaacagccccttccaggtggccaccggctaccagttccccgtgtacaactaccagcccttccccgcctaccccagcagccccttccaggtgaccgccggctaccagctgcccgtgtacaactaccaggccttccccgcctaccccaacagccccttccaggtggccaccggctaccagttccccgtgtacaactaccagcccttccccgcctaccccagcagccccttccaggtgaccgccggctaccagctgcccgtgtacaactaccaggccttccccgcctaccccaacagccccttccaggtggccaccggctaccagttccccgtgtacaactaccaggccttccccgcctaccccaacagccccgtgcaggtgaccaccggctaccagctgcccgtgtacaactaccagcccttccccgcctaccccagaagccccttccaggtgaccgccggctaccagctgcccgtgtacaactaccaggccttccccgcctaccccaacagccccttccaggtggccaccggctaccagttccccgtgtacaactaccaggccttccccgcctaccccaacagccccgtgcaggtgaccaccggctaccagctgcccgtgtacaactaccaggccttccccgcctaccccagcagccccttccaggtgaccaccggctaccagctgcccgtgtacaactaccaggccttccccgcctaccccagcagccccttccaggtgaccaccggctaccagctgcccgtgtacaactaccaggccttccccgcctaccccagcagccccttccaggtgaccaccggctaccagctgcccgtgtacaactaccaggccttccccgcctaccccagcagccccttccaggtgaccaccggctaccagctgcccgtgtacaactaccaggccttccccgcctaccccagcagccccttccaggtgaccaccggctaccagctgcccgtgtacaactaccaggccttccccgcctaccccagcagccccttccaggtgaccaccggctaccagctgcccgtgtacaactaccaggccttccccgcctaccccaacagcgccgtgcaggtgaccaccggctaccagttccacgtgtacaactaccagatgcccccccagtgccccgtgggcgagcagagaagaaacctgtggaccgaggcctacaagtggtggtacctggtgtgcctgatccagagaagagactag

SEQ ID NO: 78938 - DNA, 1605 bp, synthetic construct; identical to SEQ ID NO: 78932
  misc_feature 1..1605: note = Description of Artificial Sequence: Synthetic coding sequence
  source 1..1605: mol_type = other DNA

SEQ ID NO: 78939 - DNA, 1317 bp, synthetic construct
  misc_feature 1..1317: note = Description of Artificial Sequence: Synthetic coding sequence
  source 1..1317: mol_type = other DNA
atgagcgccgccaaccccgagacccccaacagcaccatcagcagagaggccagcacccagagcagcagcgccgccgccagccagggctgggtgctgcccgagggcaagatcgtgcccaacaccgtgttcgtgggcggcatcgacgccagaatggacgagaccgagatcggcagctgcttcggcagatacggcagcgtgaaggaggtgaagatcatcaccaacagaaccggcgtgagcaagggctacggcttcgtgagcttcgtgaacgacgtggacgtgcagaagatcgtgggcagccagatccacttccacggcaagaagctgaagctgggccccgccatcagaaagcagaagctgtgcgccagacacgtgcagcccagacccctggtggtgaacccccccccccccccccagttccagaacgtgtggagaaaccccaacaccgagacctacctgcagccccagatcacccccaaccccgtgacccagcacgtgcaggcctacagcgcctacccccacagccccggccaggtgatcaccggctgccagctgctggtgtacaactaccaggagtaccccacctaccccgacagcgccttccaggtgaccaccggctaccagctgcccgtgtacaactaccagcccttccccgcctaccccagaagccccttccaggtgaccgccggctaccagctgcccgtgtacaactaccaggccttccccgcctaccccaacagccccttccaggtggccaccggctaccagttccccgtgtacaactaccaggccttccccgcctaccccaacagccccttccaggtggccaccggctaccagttccccgtgtacaactaccaggccttccccgcctaccccaacagccccttccaggtggccaccggctaccagttccccgtgtacaactaccaggccttccccgcctaccccaacagccccgtgcaggtgaccaccggctaccagctgcccgtgtacaactaccaggccttccccgcctaccccaacagccccttccaggtggccaccggctaccagttccccgtgtacaactaccaggccttccccgcctaccccaacagccccgtgcaggtgaccaccggctaccagctgcccgtgtacaactaccaggccttccccgcctaccccaacagcgccgtgcaggtgaccaccggctaccagttccacgtgtacaactaccagatgcccccccagtgccccgtgggcgagcagagaagaaacctgtggaccgaggcctacaagtggtggtacctggtgtgcctgatccagagaagagactag

SEQ ID NO: 78940 - DNA, 1173 bp, synthetic construct
  misc_feature 1..1173: note = Description of Artificial Sequence: Synthetic coding sequence
  source 1..1173: mol_type = other DNA
atgagcgccgccaaccccgagacccccaacagcaccatcagcagagaggccagcacccagagcagcagcgccgccgccagccagggctgggtgctgcccgagggcaagatcgtgcccaacaccgtgttcgtgggcggcatcgacgccagaatggacgagaccgagatcggcagctgcttcggcagatacggcagcgtgaaggaggtgaagatcatcaccaacagaaccggcgtgagcaagggctacggcttcgtgagcttcgtgaacgacgtggacgtgcagaagatcgtgggcagccagatccacttccacggcaagaagctgaagctgggccccgccatcagaaagcagaagctgtgcgccagacacgtgcagcccagacccctggtggtgaacccccccccccccccccagttccagaacgtgtggagaaaccccaacaccgagacctacctgcagccccagatcacccccaaccccgtgacccagcacgtgcaggcctacagcgcctacccccacagccccggccaggtgatcaccggctgccagctgctggtgtacaactaccaggagtaccccacctaccccgacagcgccttccaggtgaccaccggctaccagctgcccgtgtacaactaccagcccttccccgcctaccccagaagccccttccaggtgaccgccggctaccagctgcccgtgtacaactaccaggccttccccgcctaccccaacagccccttccaggtggccaccggctaccagttccccgtgtacaactaccagcccttccccgcctaccccagcagccccttccaggtgaccgccggctaccagctgcccgtgtacaactaccaggccttccccgcctaccccaacagccccttccaggtggccaccggctaccagttccccgtgtacaactaccaggccttccccgcctaccccaacagccccgtgcaggtgaccaccggctaccagctgcccgtgtacaactaccaggccttccccgcctaccccaacagcgccgtgcaggtgaccaccggctaccagttccacgtgtacaactaccagatgcccccccagtgccccgtgggcgagcagagaagaaacctgtggaccgaggcctacaagtggtggtacctggtgtgcctgatccagagaagagactag

SEQ ID NO: 78941 - DNA, 1746 bp, synthetic construct
  misc_feature 1..1746: note = Description of Artificial Sequence: Synthetic coding sequence
  source 1..1746: mol_type = other DNA
atgatggacgagaccgagatcggcagctgcttcggcagatacggcagcgtgaaggaggtgaagatcatcaccaacagaaccggcgtgagcaagggctacggcttcgtgagcttcgtgaacgacgtggacgtgcagaagatcgtgggcagccagatccacttccacggcaagaagctgaagctgggccccgccatcagaaagcagaagctgtgcgccagacacgtgcagcccagacccctggtggtgaacccccccccccccccccagttccagaacgtgtggagaaaccccaacaccgagacctacctgcagccccagatcacccccaaccccgtgacccagcacgtgcaggcctacagcgcctacccccacagccccggccaggtgatcaccggctgccagctgctggtgtacaactaccaggagtaccccacctaccccgacagcgccttccaggtgaccaccggctaccagctgcccgtgtacaactaccagcccttccccgcctaccccagaagccccttccaggtgaccgccggctaccagctgcccgtgtacaactaccaggccttccccgcctaccccaacagccccttccaggtggccaccggctaccagttccccgtgtacaactaccagcccttccccgcctaccccagcagccccttccaggtgaccgccggctaccagctgcccgtgtacaactaccaggccttccccgcctaccccaacagccccttccaggtggccaccggctaccagttccccgtgtacaactaccaggccttccccgcctaccccaacagccccttccaggtggccaccggctaccagttccccgtgtacaactaccaggccttccccgcctaccccaacagccccgtgcaggtgaccaccggctaccagctgcccgtgtacaactaccagcccttccccgcctaccccagaagccccttccaggtgaccgccggctaccagctgcccgtgtacaactaccaggccttccccgcctaccccaacagccccttccaggtggccaccggctaccagttccccgtgtacaactaccaggccttccccgcctaccccaacagccccgtgcaggtgaccaccggctaccagctgcccgtgtacaactaccaggccttccccgcctaccccagcagccccttccaggtgaccaccggctaccagctgcccgtgtacaactaccaggccttccccgcctaccccagcagccccttccaggtgaccaccggctaccagctgcccgtgtacaactaccaggccttccccgcctaccccagcagccccttccaggtgaccaccggctaccagctgcccgtgtacaactaccaggccttccccgcctaccccagcagccccttccaggtgaccaccggctaccagctgcccgtgtacaactaccaggccttccccgcctaccccagcagccccttccaggtgaccaccggctaccagctgcccgtgtacaactaccaggccttccccgcctaccccagcagccccttccaggtgaccaccggctaccagctgcccgtgtacaactaccaggccttccccgcctaccccaacagcgccgtgcaggtgaccaccggctaccagttccacgtgtacaactaccagatgcccccccagtgccccgtgggcgagcagagaagaaacctgtggaccgaggcctacaagtggtggtacctggtgtgcctgatccagagaagagactag

SEQ ID NO: 78942 - DNA, 1014 bp, synthetic construct
  misc_feature 1..1014: note = Description of Artificial Sequence: Synthetic coding sequence
  source 1..1014: mol_type = other DNA
atgagcgccgccaaccccgagacccccaacagcaccatcagcagagaggccagcacccagagcagcagcgccgccgccagccagggctgggtgctgcccgagggcaagatcgtgcccaacaccgtgttcgtgggcggcatcgacgccagaatggacgagaccgagatcggcagctgcttcggcagatacggcagcgtgaaggaggtgaagatcatcaccaacagaaccggcgtgagcaagggctacggcttcgtgagcttcgtgaacgacgtggacgtgcagaagatcgtgggcagccagatccacttccacggcaagaagctgaagctgggccccgccatcagaaagcagaagctgtgcgccagacacgtgcagcccagacccctggtggtgaacccccccccccccccccagttccagaacgtgtggagaaaccccaacaccgagacctacctgcagccccagatcacccccaaccccgtgacccagcacgtgcaggcctacagcgcctacccccacagccccggccaggtgatcaccggctgccagctgctggtgtacaactaccaggagtaccccacctaccccgacagcgccttccaggtgaccaccggctaccagctgcccgtgtacaactaccagcccttccccgcctaccccagaagccccttccaggtgaccgccggctaccagctgcccgtgtacaactaccaggccttccccgcctaccccaacagccccttccaggtggccaccggctaccagttccccgtgtacaactaccaggccttccccgcctaccccaacagccccgtgcaggtgaccaccggctaccagctgcccgtgtacaactaccaggccttccccgcctaccccaacagccccttccaggtggccaccggctaccagttccccgtgtacaactaccaggccttccccgcctaccccaacagccccgtgcaggtgaccaccggctaccagctgcccgtgtacaactaccagatgcccccctag

SEQ ID NO: 78943 - DNA, 1101 bp, synthetic construct
  misc_feature 1..1101: note = Description of Artificial Sequence: Synthetic coding sequence
  source 1..1101: mol_type = other DNA
atgagcgccgccaaccccgagacccccaacagcaccatcagcagagaggccagcacccagagcagcagcgccgccgccagccagggctgggtgctgcccgagggcaagatcgtgcccaacaccgtgttcgtgggcggcatcgacgccagaatggacgagaccgagatcggcagctgcttcggcagatacggcagcgtgaaggaggtgaagatcatcaccaacagaaccggcgtgagcaagggctacggcttcgtgagcttcgtgaacgacgtggacgtgcagaagatcgtgggcagccagatccacttccacggcaagaagctgaagctgggccccgccatcagaaagcagaagctgtgcgccagacacgtgcagcccagacccctggtggtgaacccccccccccccccccagttccagaacgtgtggagaaaccccaacaccgagacctacctgcagccccagatcacccccaaccccgtgacccagcacgtgcaggcctacagcgcctacccccacagccccggccaggtgatcaccggctgccagctgctggtgtacaactaccaggagtaccccacctaccccgacagcgccttccaggtgaccaccggctaccagctgcccgtgtacaactaccagcccttccccgcctaccccagaagccccttccaggtgaccgccggctaccagctgcccgtgtacaactaccaggccttccccgcctaccccaacagccccgtgcaggtgaccaccggctaccagctgcccgtgtacaactaccaggccttccccgcctaccccaacagccccgtgcaggtgaccaccggctaccagctgcccgtgtacaactaccaggccttccccgcctaccccaacagccccgtgcaggtgaccaccggctaccagctgcccgtgtacaactaccaggccttccccgcctaccccaacagcgccgtgcaggtgaccaccggctaccagttccacgtgtacaactaccagatgcccccccagtgccccgtgggcgagcagagaagaaacctgtggaccgaggcctacaagtggtggtacctggtgtgcctgatccagagaagagactag

SEQ ID NO: 78944 - DNA, 1317 bp, synthetic construct
  misc_feature 1..1317: note = Description of Artificial Sequence: Synthetic coding sequence
  source 1..1317: mol_type = other DNA
atgagcgccgccaaccccgagacccccaacagcaccatcagcagagaggccagcacccagagcagcagcgccgccgccagccagggctgggtgctgcccgagggcaagatcgtgcccaacaccgtgttcgtgggcggcatcgacgccagaatggacgagaccgagatcggcagctgcttcggcagatacggcagcgtgaaggaggtgaagatcatcaccaacagaaccggcgtgagcaagggctacggcttcgtgagcttcgtgaacgacgtggacgtgcagaagatcgtgggcagccagatccacttccacggcaagaagctgaagctgggccccgccatcagaaagcagaagctgtgcgccagacacgtgcagcccagacccctggtggtgaacccccccccccccccccagttccagaacgtgtggagaaaccccaacaccgagacctacctgcagccccagatcacccccaaccccgtgacccagcacgtgcaggcctacagcgcctacccccacagccccggccaggtgatcaccggctgccagctgctggtgtacaactaccaggagtaccccacctaccccgacagcgccttccaggtgaccaccggctaccagctgcccgtgtacaactaccagcccttccccgcctaccccagaagccccttccaggtgaccgccggctaccagctgcccgtgtacaactaccaggccttccccgcctaccccaacagccccttccaggtggccaccggctaccagttccccgtgtacaactaccaggccttccccgcctaccccaacagccccgtgcaggtgaccaccggctaccagctgcccgtgtacaactaccaggccttccccgcctaccccaacagccccttccaggtggccaccggctaccagttccccgtgtacaactaccaggccttccccgcctaccccaacagccccgtgcaggtgaccaccggctaccagctgcccgtgtacaactaccaggccttccccgcctaccccaacagccccttccaggtggccaccggctaccagttccccgtgtacaactaccaggccttccccgcctaccccaacagccccgtgcaggtgaccaccggctaccagctgcccgtgtacaactaccaggccttccccgcctaccccaacagcgccgtgcaggtgaccaccggctaccagttccacgtgtacaactaccagatgcccccccagtgccccgtgggcgagcagagaagaaacctgtggaccgaggcctacaagtggtggtacctggtgtgcctgatccagagaagagactag

SEQ ID NO: 78945 - DNA, 1086 bp, synthetic construct
  misc_feature 1..1086: note = Description of Artificial Sequence: Synthetic coding sequence
  source 1..1086: mol_type = other DNA
atgagcgccgccaaccccgagacccccaacagcaccatcagcagagaggccagcacccagagcagcagcgccgccgccagccagggctgggtgctgcccgagggcaagatcgtgcccaacaccgtgttcgtgggcggcatcgacgccagaatggacgagaccgagatcggcagctgcttcggcagatacggcagcgtgaaggaggtgaagatcatcaccaacagaaccggcgtgagcaagggctacggcttcgtgagcttcgtgaacgacgtggacgtgcagaagatcgtgggcagccagatccacttccacggcaagaagctgaagctgggccccgccatcagaaagcagaagctgtgcgccagacacgtgcagcccagacccctggtggtgaacccccccccccccccccagttccagaacgtgtggagaaaccccaacaccgagacctacctgcagccccagatcacccccaaccccgtgacccagcacgtgcaggcctacagcgcctacccccacagccccggccaggtgatcaccggctgccagctgctggtgtacaactaccaggagtaccccacctaccccgacagcgccttccaggtgaccaccggctaccagctgcccgtgtacaactaccagcccttccccgcctaccccagaagccccttccaggtgaccgccggctaccagctgcccgtgtacaactaccaggccttccccgcctaccccaacagccccttccaggtggccaccggctaccagttccccgtgtacaactaccaggccttccccgcctaccccaacagccccgtgcaggtgaccaccggctaccagctgcccgtgtacaactaccaggccttccccgcctaccccaacagccccttccaggtggccaccggctaccagttccccgtgtacaactaccaggccttccccgcctaccccaacagccccgtgcaggtgaccaccggctaccagctgcccgtgtacaactaccaggccttccccgcctaccccaacagccccgtgcaggtgaccaccggctaccagctgcccgtgtacaactaccagatgcccccctag

SEQ ID NO: 78946 - DNA, 1173 bp, synthetic construct
  misc_feature 1..1173: note = Description of Artificial Sequence: Synthetic coding sequence
  source 1..1173: mol_type = other DNA
atgagcgccgccaaccccgagacccccaacagcaccatcagcagagaggccagcacccagagcagcagcgccgccgccagccagggctgggtgctgcccgagggcaagatcgtgcccaacaccgtgttcgtgggcggcatcgacgccagaatggacgagaccgagatcggcagctgcttcggcagatacggcagcgtgaaggaggtgaagatcatcaccaacagaaccggcgtgagcaagggctacggcttcgtgagcttcgtgaacgacgtggacgtgcagaagatcgtgggcagccagatccacttccacggcaagaagctgaagctgggccccgccatcagaaagcagaagctgtgcgccagacacgtgcagcccagacccctggtggtgaacccccccccccccccccagttccagaacgtgtggagaaaccccaacaccgagacctacctgcagccccagatcacccccaaccccgtgacccagcacgtgcaggcctacagcgcctacccccacagccccggccaggtgatcaccggctgccagctgctggtgtacaactaccaggagtaccccacctaccccgacagcgccttccaggtgaccaccggctaccagctgcccgtgtacaactaccagcccttccccgcctaccccagaagccccttccaggtgaccgccggctaccagctgcccgtgtacaactaccaggccttccccgcctaccccaacagccccttccaggtggccaccggctaccagttccccgtgtacaactaccaggccttccccgcctaccccaacagccccgtgcaggtgaccaccggctaccagctgcccgtgtacaactaccaggccttccccgcctaccccaacagccccttccaggtggccaccggctaccagttccccgtgtacaactaccaggccttccccgcctaccccaacagccccgtgcaggtgaccaccggctaccagctgcccgtgtacaactaccaggccttccccgcctaccccaacagcgccgtgcaggtgaccaccggctaccagttccacgtgtacaactaccagatgcccccccagtgccccgtgggcgagcagagaagaaacctgtggaccgaggcctacaagtggtggtacctggtgtgcctgatccagagaagagactag

SEQ ID NO: 78947 - DNA, 948 bp, synthetic construct
  misc_feature 1..948: note = Description of Artificial Sequence: Synthetic coding sequence
  source 1..948: mol_type = other DNA
atggccgcccccagctgcggcggcgacagaaaggccagactgacccccagcctgccccacgagagcaccgccaaccccgagacccccaacagcaccatcagcagagaggccagcacccagagcagcagcgccgccaccagccagggctacatcctgcccgagggcaagatcatgcccaacaccgtgttcgtgggcggcatcgacgtgagaatggacgagaccgagatcagaagcttcttcgccagatacggcagcgtgaaggaggtgaagatcatcaccgacagaaccggcgtgagcaagggctacggcttcgtgagcttcttcaacgacgtggacgtgcagaagatcgtggagagccagatcaacttccacggcaagaagctgaagctgggccccgccatcagaaagcagaacctgtgcgcctaccacgtgcagcccagacccctggtgttcaaccaccccccccccccccagttccagaacgtgtggaccaaccccaacaccgagacctacatgcagcccaccaccaccatgaaccccatcacccagtacgtgcaggcctaccccacctaccccaacagccccgtgcaggtgatcaccggctaccagctgcccgtgtacaactaccagatgcccccccagtggcccgtgggcgagcagagaagctacgtggtgccccccgcctacagcgccgtgaactaccactgcaacgaggtggaccccggcgccgaggtggtgcccaacgagtgcagcgtgcacgaggccaccccccccagcggcaacggcccccagaagaagagcgtggacagaagcatccagaccgtggtgagctgcctgttcaaccccgagaacagactgagaaacagcgtggtgacccaggacgactacttcaaggacaagagagtgcaccacttcagaagaagcagagccatgctgaagagcgtgtag

SEQ ID NO: 78948 - DNA, 888 bp, synthetic construct
  misc_feature 1..888: note = Description of Artificial Sequence: Synthetic coding sequence
  source 1..888: mol_type = other DNA
atgagcaccgccaaccccgagacccccaacagcaccatcagcagagaggccagcacccagagcagcagcgccgccaccagccagggctacatcctgcccgagggcaagatcatgcccaacaccgtgttcgtgggcggcatcgacgtgagaatggacgagaccgagatcagaagcttcttcgccagatacggcagcgtgaaggaggtgaagatcatcaccgacagaaccggcgtgagcaagggctacggcttcgtgagcttcttcaacgacgtggacgtgcagaagatcgtggagagccagatcaacttccacggcaagaagctgaagctgggccccgccatcagaaagcagaacctgtgcgcctaccacgtgcagcccagacccctggtgttcaaccaccccccccccccccagttccagaacgtgtggaccaaccccaacaccgagacctacatgcagcccaccaccaccatgaaccccatcacccagtacgtgcaggcctaccccacctaccccaacagccccgtgcaggtgatcaccggctaccagctgcccgtgtacaactaccagatgcccccccagtggcccgtgggcgagcagagaagctacgtggtgccccccgcctacagcgccgtgaactaccactgcaacgaggtggaccccggcgccgaggtggtgcccaacgagtgcagcgtgcacgaggccaccccccccagcggcaacggcccccagaagaagagcgtggacagaagcatccagaccgtggtgagctgcctgttcaaccccgagaacagactgagaaacagcgtggtgacccaggacgactacttcaaggacaagagagtgcaccacttcagaagaagcagagccatgctgaagagcgtgtag

SEQ ID NO: 78949 - DNA, 2286 bp, synthetic construct
  misc_feature 1..2286: note = Description of Artificial Sequence: Synthetic coding sequence
  source 1..2286: mol_type = other DNA
atgaactggagattcgtggagctgctgtacttcctgttcatctggggcagaatcagcgtgcagcccagccaccaggagcccgccggcaccgaccagcacgtgagcaaggagttcgactggctgatcagcgacagaggccccttccaccacagcagaagctacctgagcttcgtggagagacacagacagggcttcaccaccagatacaagatctacagagagttcgccagatggaaggtgagaaacaccgccatcgagagaagagacctggtgagacaccccgtgcccctgatgcccgagttccagagaagcatcagactgctgggcagaagacccaccacccagcagttcatcgacaccatcatcaagaagtacggcacccacctgctgatcagcgccaccctgggcggcgaggaggccctgaccatgtacatggacaagagcagactggacagaaagagcggcaacgccacccagagcgtggaggccctgcaccagctggccagcagctacttcgtggacagagacggcaccatgagaagactgcacgagatccagatcagcaccggcgccatcaaggtgaccgagaccagaaccggccccctgggctgcaacagctacgacaacctggacagcgtgagcagcgtgctgctgcagagcaccgagagcaagctgcacctgcagggcctgcagatcatcttcccccagtacctgcaggagaagttcgtgcagagcgccctgagctacatcatgtgcaacggcgagggcgagtacctgtgccagaacagccagtgcagatgccagtgcgccgaggagttcccccagtgcaactgccccatcaccgacatccagatcatggagtacaccctggccaacatggccaagagctgggccgaggcctacaaggacctggagaacagcgacgagttcaagagcttcatgaagagactgcccagcaaccacttcctgaccatcggcagcatccaccagcactggggcaacgactgggacctgcagaacagatacaagctgctgcagagcgccaccgaggcccagagacagaagatccagagaaccgccagaaagctgttcggcctgagcgtgagatgcagacacaaccccaaccaccagctgcccagagagagaaccatccagcagtggctggccagagtgcagagcctgctgtactgcaacgagaacggcttctggggcaccttcctggagagccagagaagctgcgtgtgccacggcagcaccaccctgtgccagagacccatcccctgcgtgatcggcggcaacaacagctgcgccatgtgcagcctggccaacatcagcctgtgcggcagctgcaacaagggctacaagctgtacagaggcagatgcgagccccagaacgtggacagcgagagaagcgagcagttcatcagcttcgagaccgacctggacttccaggacctggagctgaagtacctgctgcagaagatggacagcagactgtacgtgcacaccaccttcatcagcaacgagatcagactggacaccttcttcgaccccagatggagaaagagaatgagcctgaccctgaagagcaacaagaacagaatggacttcatccacatggtgatcggcatgagcatgagaatctgccagatgagaaacagcagcctggaccccatgttcttcgtgtacgtgaaccccttcagcggcagccacagcgagggctggaacatgcccttcggcgagttcggctaccccagatgggagaagatcagactgcagaacagccagtgctacaactggaccctgctgctgggcaacagatggaagaccttcttcgagaccgtgcacatctacctgagaagcagaaccagactgcccaccctgctgagaaacgagaccggccagggccccgtggacctgagcgaccccagcaagagacagttctacatcaagatcagcgacgtgcaggtgttcggctacagcctgagattcaacgccgacctgctgagaagcgccgtgcagcaggtgaaccagagctacacccagggcggccagttctacagcagcagcagcgtgatgctgctgctgctggacatcagagacagaatcaacagactggccccccccgtggcccccggcaagccccagctggacctgttcagctgcatgctgaagcacagactgaagctgaccaacagcgagatcatcagagtgaaccacgccctggacctgtacaacaccgagatcctgaagcagagcgaccagatgaccgccaagctgtgctag

SEQ ID NO: 78950 - DNA, 963 bp, synthetic construct
  misc_feature 1..963: note = Description of Artificial Sequence: Synthetic coding sequence
  source 1..963: mol_type = other DNA
atgaactggagattcgtggagctgctgtacttcctgttcatctggggcagaatcagcgtgcagcccagccaccaggagcccgccggcaccgaccagcacgtgagcaaggagttcgactggctgatcagcgacagaggccccttccaccacagcagaagctacctgagcttcgtggagagacacagacagggcttcaccaccagatacaagatctacagagagttcgccagatggaaggtgagaaacaccgccatcgagagaagagacctggtgagacaccccgtgcccctgatgcccgagttccagagaagcatcagactgctgggcagaagacccaccacccagcagttcatcgacaccatcatcaagaagtacggcacccacctgctgatcagcgccaccctgggcggcgaggaggccctgaccatgtacatggacaagagcagactggacagaaagagcggcaacgccacccagagcgtggaggccctgcaccagctggccagcagctacttcgtggacagagacggcaccatgagaagactgcacgagatccagatcagcaccggcgccatcaaggtgaccgagaccagaaccggccccctgggctgcaacagctacgacaacctggacagcgtgagcagcgtgctgctgcagagcaccgagagcaagctgcacctgcagggcctgcagatcatcttcccccagtacctgcaggagaagttcgtgcagagcgccctgagctacatcatgtgcaacggcgagggcgagtacctgtgccagaacagccagtgcagatgccagtgcgccgaggagttcccccagtgcaactgccccatcaccgacatccagatcatggagtacaccctggccaacatggccaagagctgggccgaggcctacaaggacctggagaacagcggcagagagagccacagcgtgcccctgcacgagtggccctag

SEQ ID NO: 78951 - DNA, 2286 bp, synthetic construct; identical to SEQ ID NO: 78949
  misc_feature 1..2286: note = Description of Artificial Sequence: Synthetic coding sequence
  source 1..2286: mol_type = other DNA

SEQ ID NO: 78952 - DNA, 1404 bp, synthetic construct
  misc_feature 1..1404: note = Description of Artificial Sequence: Synthetic coding sequence
  source 1..1404: mol_type = other DNA
atgaagagaatcaaggtgcccgactacaaggacagaagcgtgttcggcgtgcccctgaccgtgaacgtgcagagaaccggccagcccctgccccagagcatccagcaggccatgagatacctgagaaaccactgcctggaccaggtgggcctgttcagaaagagcggcgtgaagagcagaatccaggccctgagacagatgaacgagggcgccatcgactgcgtgaactacgagggccagagcgcctacgacgtggccgacatgctgaagcagtacttcagagacctgcccgagcccctgatgaccaacaagctgagcgagaccttcctgcagatctaccagtacgtgcccaaggaccagagactgcaggccatcaaggccgccatcatgctgctgcccgacgagaacagagaggtgctgcagaccctgctgtacttcctgagcgacgtgaccgccgccgtgaaggagaaccagatgacccccaccaacctggccgtgtgcctggcccccagcctgttccacctgaacaccctgaagagagagaacagcagccccagagtgatgcagagaaagcagagcctgggcaagcccgaccagaaggacctgaacgagaacctggccgccacccagggcctggcccacatgatcgccgagtgcaagaagctgttccaggtgcccgaggagatgagcagatgcagaaacagctacaccgagcaggagctgaagcccctgaccctggaggccctgggccacctgggcaacgacgacagcgccgactaccagcacttcctgcaggactgcgtggacggcctgttcaaggaggtgaaggagaagttcaagggctgggtgagctacagcaccagcgagcaggccgagctgagctacaagaaggtgagcgagggcccccccctgagactgtggagaagcgtgatcgaggtgcccgccgtgcccgaggagatcctgaagagactgctgaaggagcagcacctgtgggacgtggacctgctggacagcaaggtgatcgagatcctggacagccagaccgagatctaccagtacgtgcagaacagcatggccccccaccccgccagagactacgtggtgctgagaacctggagaaccaacctgcccaagggcgcctgcgccctgctgctgaccagcgtggaccacgacagagcccccgtggtgggcgtgagagtgaacgtgctgctgagcagatacctgatcgagccctgcggccccggcaagagcaagctgacctacatgtgcagagtggacctgagaggccacatgcccgagtggtacaccaagagcttcggccacctgtgcgccgccgaggtggtgaagatcagagacagcttcagcaaccagaacaccgagaccaaggacaccaagagcagatag
